(19) United States
(12) Patent Application Publication
(10) Pub. No.: US 2007/0042945 A1
(43) Pub. Date: Feb. 22, 2007

(54) Nouvelles compositions et methods de traitement du psoriasis

(75) Inventors: Sarah C Bodary, Menlo Park, CA (US); Hilary Clark, San Francisco, CA (US); Janet K Jackman, Half Moon Bay, CA (US); Jill R Schoenfeld, Ashland, OR (US); P Mickey Williams, Half Moon Bay, CA (US); William I Wood, Cupertino, CA (US); Thomas D Wu, San Francisco, CA (US)

Correspondence Address: GENENTECH, INC., 1 DNA WAY, SOUTH SAN FRANCISCO, CA, 94080, US

(73) Assignee: Genentech, Inc., South San Francisco, CA (US)

(21) Appl. No.: 10/529,348

(22) PCT Filed: Sep. 25, 2003
(86) PCT No.: PCT/US03/30907

§ 371 Date: Jan. 9, 2006

Related U.S. Application Data
(60) Provisional application No. 60/414,006, filed on Sep. 25, 2002.

(51) Int. Cl. A61K 38/17; C07H 21/04; C12P 21/06; C12N 9/00

(52) U.S. Cl. 514/12; 435/69.1; 435/183; 435/320.1; 435/325; 530/350; 530/388.1; 536/23.2

(57) ABSTRACT

The present invention relates to compositions and methods useful for the diagnosis and treatment of psoriasis.

### FIELD OF THE INVENTION

[0001] The present invention relates to compositions and methods useful for the diagnosis and treatment of psoriasis.

### BACKGROUND OF THE INVENTION

[0002] Immune related and inflammatory diseases are the manifestation or consequence of fairly complex, often multiple interconnected biological pathways which in normal physiology are critical to respond to insult or injury, initiate repair from insult or injury, and mount innate and acquired defense against foreign organisms. Disease or pathology occurs when these normal physiological pathways cause additional insult or injury either as directly related to the intensity of the response, as a consequence of abnormal regulation or excessive stimulation, as a reaction to self, or as a combination of these.

[0003] Though the genesis of these diseases often involves multistep pathways and often multiple different biological systems/pathways, intervention at critical points in one or more of these pathways can have an ameliorative or therapeutic effect. Therapeutic intervention can occur by either antagonism of a detrimental process/pathway or stimulation of a beneficial process/pathway.

[0004] Many immune related diseases are known and have been extensively studied. Such diseases include immune-mediated inflammatory diseases, non-immune-mediated inflammatory diseases, infectious diseases, immunodeficiency diseases, neoplasia, etc.

[0005] T lymphocytes (T cells) are an important component of a mammalian immune response. T cells recognize antigens which are associated with a self-molecule encoded by genes within the major histocompatibility complex (MHC). The antigen may be displayed together with MHC molecules on the surface of antigen presenting cells, virus infected cells, cancer cells, grafts, etc. The T cell system eliminates these altered cells which pose a health threat to the host mammal. T cells include helper T cells and cytotoxic T cells. Helper T cells proliferate extensively following recognition of an antigen-MHC complex on an antigen presenting cell. Helper T cells also secrete a variety of cytokines, i.e., lymphokines, which play a central role in the activation of B cells, cytotoxic T cells and a variety of other cells which participate in the immune response.

[0006] Several diseases of the skin are correlated with an aberrant T cell response and to autoimmunity. Psoriasis is thought to be an autoimmune disease. Specifically, T-cells of the immune system recognize a protein in the skin and attack the area where that protein is found, causing the too-rapid growth of new skin cells and painful, elevated, scaly lesions. These lesions are characterized by hyperproliferation of keratinocytes and the accumulation of activated T-cells in the epidermis of the psoriatic lesions. There are several forms of psoriasis; guttate is the one that most commonly occurs in children and teens. It is sometimes preceded by an upper respiratory infection. Guttate psoriasis is noncontagious and characterized by small drop-like lesions, usually scattered over the trunk, limbs and scalp. According to the National Psoriasis Foundation, approximately seven million people in the United States have psoriasis. About 20,000 children are diagnosed with psoriasis annually, and many of the cases are attributed to upper respiratory infections. It is estimated that only about 1.5 million people with psoriasis actually seek treatment, primarily due to lack of or dissatisfaction with current treatments. Although the initial molecular cause of disease is unknown, genetic linkages have been mapped to at least 7 psoriasis susceptibility loci (Psor1 on 6p21.3, Psor2 on 17q, Psor3 on 4q, Psor4 on 1 cent-q21, Psor5 on 3q21, Psor6 on 19p13, and Psor7 on 1p). Some of these loci overlap with other autoimmune/inflammatory diseases including rheumatoid arthritis, atopic dermatitis, and irritable bowel disease. In this application, experiments determine that a gene is upregulated in psoriatic skin vs. normal skin.

[0007] Despite the above identified advances in psoriasis research, there is a great need for additional diagnostic and therapeutic agents capable of detecting the presence of a psoriasis in a mammal and for effectively inhibiting this affliction. Accordingly, it is an objective of the present invention to identify polypeptides that are overexpressed in psoriasis as compared to normal skin, and to use those polypeptides, and their encoding nucleic acids, to produce compositions of matter useful in the therapeutic treatment and diagnostic detection of psoriasis in mammals.

### SUMMARY OF THE INVENTION

### A. Embodiments

[0008] The present invention concerns compositions and methods useful for the diagnosis and treatment of psoriasis in mammals, including humans. The present invention is based on the identification of proteins (including agonist and antagonist antibodies) which are a result of psoriasis in mammals. Immune related diseases such as psoriasis may be treated by suppressing the immune response. Molecules that enhance the immune response stimulate or potentiate the immune response to an antigen. Molecules which stimulate the immune response can be used therapeutically where enhancement of the immune response would be beneficial. Alternatively, molecules that suppress the immune response attenuate or reduce the immune response to an antigen (e.g., neutralizing antibodies) can be used therapeutically where attenuation of the immune response would be beneficial (e.g., inflammation). Accordingly, the PRO polypeptides, agonists and antagonists thereof are also useful to prepare medicines and medicaments for the treatment of psoriasis. In a specific aspect, such medicines and medicaments comprise a therapeutically effective amount of a PRO polypeptide, agonist or antagonist thereof with a pharmaceutically acceptable carrier. Preferably, the admixture is sterile.

[0009] In a further embodiment, the invention concerns a method of identifying agonists or antagonists to a PRO polypeptide which comprises contacting the PRO polypeptide with a candidate molecule and monitoring a biological activity mediated by said PRO polypeptide. Preferably, the PRO polypeptide is a native sequence PRO polypeptide. In a specific aspect, the PRO agonist or antagonist is an anti-PRO antibody.

[0010] In another embodiment, the invention concerns a composition of matter comprising a PRO polypeptide or an agonist or antagonist antibody which binds the polypeptide in admixture with a carrier or excipient. In one aspect, the composition comprises a therapeutically effective amount of the polypeptide or antibody. In a further aspect, when the composition comprises a psoriasis inhibiting molecule, the composition is useful for: (a) reducing the amount of psoriasis tissue of a mammal in need thereof, (b) inhibiting or reducing an auto-immune response in a mammal in need thereof, In another aspect, the composition comprises a further active ingredient, which may, for example, be a further antibody or a cytotoxic or chemotherapeutic agent. Preferably, the composition is sterile.

[0011] In another embodiment, the invention concerns a method of treating psoriasis in a mammal in need thereof, comprising administering to the mammal an effective amount of a PRO polypeptide, an agonist thereof, or an antagonist thereto.

[0012] In another embodiment, the invention provides an antibody which specifically binds to any of the above or below described polypeptides. Optionally, the antibody is a monoclonal antibody, humanized antibody, antibody fragment or single-chain antibody. In one aspect, the present invention concerns an isolated antibody which binds a PRO polypeptide. In another aspect, the antibody mimics the activity of a PRO polypeptide (an agonist antibody) or conversely the antibody inhibits or neutralizes the activity of a PRO polypeptide (an antagonist antibody). In another aspect, the antibody is a monoclonal antibody, which preferably has nonhuman complementarity determining region (CDR) residues and human framework region (FR) residues. The antibody may be labeled and may be immobilized on a solid support. In a further aspect, the antibody is an antibody fragment, a monoclonal antibody, a single-chain antibody, or an anti-idiotypic antibody.

[0013] In yet another embodiment, the present invention provides a composition comprising an anti-PRO antibody in admixture with a pharmaceutically acceptable carrier. In one aspect, the composition comprises a therapeutically effective amount of the antibody. Preferably, the composition is sterile. The composition may be administered in the form of a liquid pharmaceutical formulation, which may be preserved to achieve extended storage stability. Alternatively, the antibody is a monoclonal antibody, an antibody fragment, a humanized antibody, or a single-chain antibody.

[0014] In a further embodiment, the invention concerns an article of manufacture, comprising:

[0015] (a) a composition of matter comprising a PRO polypeptide or agonist or antagonist thereof;

[0016] (b) a container containing said composition; and

[0017] (c) a label affixed to said container, or a package insert included in said container referring to the use of said PRO polypeptide or agonist or antagonist thereof in the treatment of an immune related disease. The composition may comprise a therapeutically effective amount of the PRO polypeptide or the agonist or antagonist thereof.

[0018] In yet another embodiment, the present invention concerns a method of diagnosing psoriasis in a mammal, comprising detecting the level of expression of a gene encoding a PRO polypeptide (a) in a test sample of tissue cells obtained from the mammal, and (b) in a control sample of known normal tissue cells of the same cell type, wherein a higher or lower expression level in the test sample as compared to the control sample indicates the presence of psoriasis in the mammal from which the test tissue cells were obtained.

[0019] In another embodiment, the present invention concerns a method of diagnosing psoriasis in a mammal, comprising (a) contacting an anti-PRO antibody with a test sample of tissue cells obtained from the mammal, and (b) detecting the formation of a complex between the antibody and a PRO polypeptide, in the test sample; wherein the formation of said complex is indicative of the presence or absence of said psoriasis. The detection may be qualitative or quantitative, and may be performed in comparison with monitoring the complex formation in a control sample of known normal tissue cells of the same cell type. A larger quantity of complexes formed in the test sample indicates the presence or absence of psoriasis in the mammal from which the test tissue cells were obtained. The antibody preferably carries a detectable label. Complex formation can be monitored, for example, by light microscopy, flow cytometry, fluorimetry, or other techniques known in the art. The test sample is usually obtained from an individual suspected of having psoriasis.

[0020] In another embodiment, the invention provides a method for determining the presence of a PRO polypeptide in a sample comprising exposing a test sample of cells suspected of containing the PRO polypeptide to an anti-PRO antibody and determining the binding of said antibody to said cell sample. In a specific aspect, the sample comprises a cell suspected of containing the PRO polypeptide and the antibody binds to the cell. The antibody is preferably detectably labeled and/or bound to a solid support.

[0021] In another embodiment, the present invention concerns a psoriasis diagnostic kit, comprising an anti-PRO antibody and a carrier in suitable packaging. The kit preferably contains instructions for using the antibody to detect the presence of the PRO polypeptide. Preferably the carrier is pharmaceutically acceptable.

[0022] In another embodiment, the present invention concerns a diagnostic kit, containing an anti-PRO antibody in suitable packaging. The kit preferably contains instructions for using the antibody to detect the PRO polypeptide.

[0023] In another embodiment, the invention provides a method of diagnosing an psoriasis in a mammal which comprises detecting the presence or absence or a PRO polypeptide in a test sample of tissue cells obtained from said mammal, wherein the presence or absence of the PRO polypeptide in said test sample is indicative of the presence of psoriasis in said mammal.

[0024] In another embodiment, the present invention concerns a method for identifying an agonist of a PRO polypeptide comprising:

[0025] (a) contacting cells and a test compound to be screened under conditions suitable for the induction of a cellular response normally induced by a PRO polypeptide; and

[0026] (b) determining the induction of said cellular response to determine if the test compound is an effective agonist, wherein the induction of said cellular response is indicative of said test compound being an effective agonist.

[0027] In another embodiment, the invention concerns a method for identifying a compound capable of inhibiting the activity of a PRO polypeptide comprising contacting a candidate compound with a PRO polypeptide under conditions and for a time sufficient to allow these two components to interact and determining whether the activity of the PRO polypeptide is inhibited. In a specific aspect, either the candidate compound or the PRO polypeptide is immobilized on a solid support. In another aspect, the non-immobilized component carries a detectable label. In a preferred aspect, this method comprises the steps of:

[0028] (a) contacting cells and a test compound to be screened in the presence of a PRO polypeptide under conditions suitable for the induction of a cellular response normally induced by a PRO polypeptide; and

[0029] (b) determining the induction of said cellular response to determine if the test compound is an effective antagonist.

[0030] In another embodiment, the invention provides a method for identifying a compound that inhibits the expression of a PRO polypeptide in cells that normally express the polypeptide, wherein the method comprises contacting the cells with a test compound and determining whether the expression of the PRO polypeptide is inhibited. In a preferred aspect, this method comprises the steps of:

[0031] (a) contacting cells and a test compound to be screened under conditions suitable for allowing expression of the PRO polypeptide; and

[0032] (b) determining the inhibition of expression of said polypeptide.

[0033] In yet another embodiment, the present invention concerns a method for treating psoriasis in a mammal that suffers therefrom comprising administering to the mammal a nucleic acid molecule that codes for either (a) a PRO polypeptide, (b) an agonist of a PRO polypeptide or (c) an antagonist of a PRO polypeptide, wherein said agonist or antagonist may be an anti-PRO antibody. In a preferred embodiment, the mammal is human. In another preferred embodiment, the nucleic acid is administered via ex vivo gene therapy. In a further preferred embodiment, the nucleic acid is comprised within a vector, more preferably an adenoviral, adeno-associated viral, lentiviral or retroviral vector.

[0034] In yet another aspect, the invention provides a recombinant viral particle comprising a viral vector consisting essentially of a promoter, nucleic acid encoding (a) a PRO polypeptide, (b) an agonist polypeptide of a PRO polypeptide, or (c) an antagonist polypeptide of a PRO polypeptide, and a signal sequence for cellular secretion of the polypeptide, wherein the viral vector is in association with viral structural proteins. Preferably, the signal sequence is from a mammal, such as from a native PRO polypeptide.

[0035] In a still further embodiment, the invention concerns an ex vivo producer cell comprising a nucleic acid construct that expresses retroviral structural proteins and also comprises a retroviral vector consisting essentially of a promoter, nucleic acid encoding (a) a PRO polypeptide, (b) an agonist polypeptide of a PRO polypeptide or (c) an antagonist polypeptide of a PRO polypeptide, and a signal sequence for cellular secretion of the polypeptide, wherein said producer cell packages the retroviral vector in association with the structural proteins to produce recombinant retroviral particles.

### B. Additional Embodiments

[0036] In other embodiments of the present invention, the invention provides vectors comprising DNA encoding any of the herein described polypeptides. Host cell comprising any such vector are also provided. By way of example, the host cells may be CHO cells, E. coli, or yeast. A process for producing any of the herein described polypeptides is further provided and comprises culturing host cells under conditions suitable for expression of the desired polypeptide and recovering the desired polypeptide from the cell culture.

[0037] In other embodiments, the invention provides chimeric molecules comprising any of the herein described polypeptides fused to a heterologous polypeptide or amino acid sequence. Example of such chimeric molecules comprise any of the herein described polypeptides fused to an epitope tag sequence or a Fc region of an immunoglobulin.

[0038] In another embodiment, the invention provides an antibody which specifically binds to any of the above or below described polypeptides. Optionally, the antibody is a monoclonal antibody, humanized antibody, antibody fragment or single-chain antibody.

[0039] In yet other embodiments, the invention provides oligonucleotide probes useful for isolating genomic and cDNA nucleotide sequences or as antisense probes, wherein those probes may be derived from any of the above or below described nucleotide sequences.

[0040] In other embodiments, the invention provides an isolated nucleic acid molecule comprising a nucleotide sequence that encodes a PRO polypeptide.

[0041] In one aspect, the isolated nucleic acid molecule comprises a nucleotide sequence having at least about 80% nucleic acid sequence identity, alternatively at least about 81% nucleic acid sequence identity, alternatively at least about 82% nucleic acid sequence identity, alternatively at least about 83% nucleic acid sequence identity, alternatively at least about 84% nucleic acid sequence identity, alternatively at least about 85% nucleic acid sequence identity, alternatively at least about 86% nucleic acid sequence identity, alternatively at least about 87% nucleic acid sequence identity, alternatively at least about 88% nucleic acid sequence identity, alternatively at least about 89% nucleic acid sequence identity, alternatively at least about 90% nucleic acid sequence identity, alternatively at least about 91% nucleic acid sequence identity, alternatively at least about 92% nucleic acid sequence identity, alternatively at least about 93% nucleic acid sequence identity, alternatively at least about 94% nucleic acid sequence identity, alternatively at least about 95% nucleic acid sequence identity, alternatively at least about 96% nucleic acid sequence identity, alternatively at least about 97% nucleic acid sequence identity, alternatively at least about 98% nucleic acid sequence identity and alternatively at least about 99% nucleic acid sequence identity to (a) a DNA molecule encoding a PRO polypeptide having a full-length amino acid sequence as disclosed herein, an amino acid sequence lacking the signal peptide as disclosed herein, an extracellular domain of a transmembrane protein, with or without the signal peptide, as disclosed herein or any other specifically defined fragment of the full-length amino acid sequence as disclosed herein, or (b) the complement of the DNA molecule of (a).

[0042] In other aspects, the isolated nucleic acid molecule comprises a nucleotide sequence having at least about 80% nucleic acid sequence identity, alternatively at least about 81% nucleic acid sequence identity, alternatively at least about 82% nucleic acid sequence identity, alternatively at least about 83% nucleic acid sequence identity, alternatively at least about 84% nucleic acid sequence identity, alternatively at least about 85% nucleic acid sequence identity, alternatively at least about 86% nucleic acid sequence identity, alternatively at least about 87% nucleic acid sequence identity, alternatively at least about 88% nucleic acid sequence identity, alternatively at least about 89% nucleic acid sequence identity, alternatively at least about 90% nucleic acid sequence identity, alternatively at least about 91% nucleic acid sequence identity, alternatively at least about 92% nucleic acid sequence identity, alternatively at least about 93% nucleic acid sequence identity, alternatively at least about 94% nucleic acid sequence identity, alternatively at least about 95% nucleic acid sequence identity, alternatively at least about 96% nucleic acid sequence identity, alternatively at least about 97% nucleic acid sequence identity, alternatively at least about 98% nucleic acid sequence identity and alternatively at least about 99% nucleic acid sequence identity to (a) a DNA molecule comprising the coding sequence of a full-length PRO polypeptide cDNA as disclosed herein, the coding sequence of a PRO polypeptide lacking the signal peptide as disclosed herein, the coding sequence of an extracellular domain of a transmembrane PRO polypeptide, with or without the signal peptide, as disclosed herein or the coding sequence of any other specifically defined fragment of the full-length amino acid sequence as disclosed herein, or (b) the complement of the DNA molecule of (a).

[0043] In a further aspect, the invention concerns an isolated nucleic acid molecule comprising a nucleotide sequence having at least about 80% nucleic acid sequence identity, alternatively at least about 81% nucleic acid sequence identity, alternatively at least about 82% nucleic acid sequence identity, alternatively at least about 83% nucleic acid sequence identity, alternatively at least about 84% nucleic acid sequence identity, alternatively at least about 85% nucleic acid sequence identity, alternatively at least about 86% nucleic acid sequence identity, alternatively at least about 87% nucleic acid sequence identity, alternatively at least about 88% nucleic acid sequence identity, alternatively at least about 89% nucleic acid sequence identity, alternatively at least about 90% nucleic acid sequence identity, alternatively at least about 91% nucleic acid sequence identity, alternatively at least about 92% nucleic acid sequence identity, alternatively at least about 93% nucleic acid sequence identity, alternatively at least about 94% nucleic acid sequence identity, alternatively at least about 95% nucleic acid sequence identity, alternatively at least about 96% nucleic acid sequence identity, alternatively at least about 97% nucleic acid sequence identity, alternatively at least about 98% nucleic acid sequence identity and alternatively at least about 99% nucleic acid sequence identity to (a) a DNA molecule that encodes the same mature polypeptide encoded by any of the human protein cDNAs as disclosed herein, or (b) the complement of the DNA molecule of (a).

[0044] Another aspect the invention provides an isolated nucleic acid molecule comprising a nucleotide sequence encoding a PRO polypeptide which is either transmembrane domain-deleted or transmembrane domain-inactivated, or is complementary to such encoding nucleotide sequence, wherein the transmembrane domain(s) of such polypeptide are disclosed herein. Therefore, soluble extracellular domains of the herein described PRO polypeptides are contemplated.

[0045] Another embodiment is directed to fragments of a PRO polypeptide coding sequence, or the complement thereof, that may find use as, for example, hybridization probes, for encoding fragments of a PRO polypeptide that may optionally encode a polypeptide comprising a binding site for an anti-PRO antibody or as antisense oligonucleotide probes. Such nucleic acid fragments are usually at least about 20 nucleotides in length, alternatively at least about 30 nucleotides in length, alternatively at least about 40 nucleotides in length, alternatively at least about 50 nucleotides in length, alternatively at least about 60 nucleotides in length, alternatively at least about 70 nucleotides in length, alternatively at least about 80 nucleotides in length, alternatively at least about 90 nucleotides in length, alternatively at least about 100 nucleotides in length, alternatively at least about 110 nucleotides in length, alternatively at least about 120 nucleotides in length, alternatively at least about 130 nucleotides in length, alternatively at least about 140 nucleotides in length, alternatively at least about 150 nucleotides in length, alternatively at least about 160 nucleotides in length, alternatively at least about 170 nucleotides in length, alternatively at least about 180 nucleotides in length, alternatively at least about 190 nucleotides in length, alternatively at least about 200 nucleotides in length, alternatively at least about 250 nucleotides in length, alternatively at least about 300 nucleotides in length, alternatively at least about 350 nucleotides in length, alternatively at least about 400 nucleotides in length, alternatively at least about 450 nucleotides in length, alternatively at least about 500 nucleotides in length, alternatively at least about 600 nucleotides in length, alternatively at least about 700 nucleotides in length, alternatively at least about 800 nucleotides in length, alternatively at least about 900 nucleotides in length and alternatively at least about 1000 nucleotides in length, wherein in this context the term “about” means the referenced nucleotide sequence length plus or minus 10% of that referenced length. It is noted that novel fragments of a PRO polypeptide-encoding nucleotide sequence may be determined in a routine manner by aligning the PRO polypeptide-encoding nucleotide sequence with other known nucleotide sequences using any of a number of well known sequence alignment programs and determining which PRO polypeptide-encoding nucleotide sequence fragment(s) are novel. All of such PRO polypeptide-encoding nucleotide sequences are contemplated herein. Also contemplated are the PRO polypeptide fragments encoded by these nucleotide molecule fragments, preferably those PRO polypeptide fragments that comprise a binding site for an anti-PRO antibody.

[0046] In another embodiment, the invention provides isolated PRO polypeptide encoded by any of the isolated nucleic acid sequences herein above identified.

[0047] In a certain aspect, the invention concerns an isolated PRO polypeptide, comprising an amino acid sequence having at least about 80% amino acid sequence identity, alternatively at least about 81% amino acid sequence identity, alternatively at least about 82% amino acid sequence identity, alternatively at least about 83% amino acid sequence identity, alternatively at least about 84% amino acid sequence identity, alternatively at least about 85% amino acid sequence identity, alternatively at least about 86% amino acid sequence identity, alternatively at least about 87% amino acid sequence identity, alternatively at least about 88% amino acid sequence identity, alternatively at least about 89% amino acid sequence identity, alternatively at least about 90% amino acid sequence identity, alternatively at least about 91% amino acid sequence identity, alternatively at least about 92% amino acid sequence identity, alternatively at least about 93% amino acid sequence identity, alternatively at least about 94% amino acid sequence identity, alternatively at least about 95% amino acid sequence identity, alternatively at least about 96% amino acid sequence identity, alternatively at least about 97% amino acid sequence identity, alternatively at least about 98% amino acid sequence identity and alternatively at least about 99% amino acid sequence identity to a PRO polypeptide having a full-length amino acid sequence as disclosed herein, an amino acid sequence lacking the signal peptide as disclosed herein, an extracellular domain of a transmembrane protein, with or without the signal peptide, as disclosed herein or any other specifically defined fragment of the full-length amino acid sequence as disclosed herein.

[0048] In a further aspect, the invention concerns an isolated PRO polypeptide comprising an amino acid sequence having at least about 80% amino acid sequence identity, alternatively at least about 81% amino acid sequence identity, alternatively at least about 82% amino acid sequence identity, alternatively at least about 83% amino acid sequence identity, alternatively at least about 84% amino acid sequence identity, alternatively at least about 85% amino acid sequence identity, alternatively at least about 86% amino acid sequence identity, alternatively at least about 87% amino acid sequence identity, alternatively at least about 88% amino acid sequence identity, alternatively at least about 89% amino acid sequence identity, alternatively at least about 90% amino acid sequence identity, alternatively at least about 91% amino acid sequence identity, alternatively at least about 92% amino acid sequence identity, alternatively at least about 93% amino acid sequence identity, alternatively at least about 94% amino acid sequence identity, alternatively at least about 95% amino acid sequence identity, alternatively at least about 96% amino acid sequence identity, alternatively at least about 97% amino acid sequence identity, alternatively at least about 98% amino acid sequence identity and alternatively at least about 99% amino acid sequence identity to an amino acid sequence encoded by any of the human protein cDNAs as disclosed herein.

[0049] In a specific aspect, the invention provides an isolated PRO polypeptide without the N-terminal signal sequence and/or the initiating methionine and is encoded by a nucleotide sequence that encodes such an amino acid sequence as herein before described. Processes for producing the same are also herein described, wherein those processes comprise culturing a host cell comprising a vector which comprises the appropriate encoding nucleic acid molecule under conditions suitable for expression of the PRO polypeptide and recovering the PRO polypeptide from the cell culture.

[0050] Another aspect the invention provides an isolated PRO polypeptide which is either transmembrane domain-deleted or transmembrane domain-inactivated. Processes for producing the same are also herein described, wherein those processes comprise culturing a host cell comprising a vector which comprises the appropriate encoding nucleic acid molecule under conditions suitable for expression of the PRO polypeptide and recovering the PRO polypeptide from the cell culture.

[0051] In yet another embodiment, the invention concerns agonists and antagonists of a native PRO polypeptide as defined herein. In a particular embodiment, the agonist or antagonist is an anti-PRO antibody or a small molecule.

[0052] In a further embodiment, the invention concerns a method of identifying agonists or antagonists to a PRO polypeptide which comprise contacting the PRO polypeptide with a candidate molecule and monitoring a biological activity mediated by said PRO polypeptide. Preferably, the PRO polypeptide is a native PRO polypeptide.

[0053] In a still further embodiment, the invention concerns a composition of matter comprising a PRO polypeptide, or an agonist or antagonist of a PRO polypeptide as herein described, or an anti-PRO antibody, in combination with a carrier. Optionally, the carrier is a pharmaceutically acceptable carrier.

[0054] Another embodiment of the present invention is directed to the use of a PRO polypeptide, or an agonist or antagonist thereof as herein before described, or an anti-PRO antibody, for the preparation of a medicament useful in the treatment of a condition which is responsive to the PRO polypeptide, an agonist or antagonist thereof or an anti-PRO antibody.

### BRIEF DESCRIPTION OF THE DRAWINGS

[0055] The FIGS. 1-2484 show the nucleic acids of the invention and their encoded PRO polypeptides.

[0056] FIG. 1 shows a nucleotide sequence (SEQ ID NO:1) of a native sequence PRO83270 cDNA, wherein SEQ ID NO:1 is a clone designated herein as “DNA326953”.

[0057] FIG. 2 shows the amino acid sequence (SEQ ID NO:2) derived from the coding sequence of SEQ ID NO:1 shown in FIG. 1.

[0058] FIG. 3 shows a nucleotide sequence (SEQ ID NO:3) of a native sequence PRO60747 cDNA, wherein SEQ ID NO:3 is a clone designated herein as “DNA272614”.

[0059] FIG. 4 shows the amino acid sequence (SEQ ID NO:4) derived from the coding sequence of SEQ ID NO:3 shown in FIG. 3.

[0060] FIG. 5 shows a nucleotide sequence (SEQ ID NO:5) of a native sequence PRO2690 cDNA, wherein SEQ ID NO:5 is a clone designated herein as “DNA88189”.

[0061] FIG. 6 shows the amino acid sequence (SEQ ID NO:6) derived from the coding sequence of SEQ ID NO:5 shown in FIG. 5.

[0062] FIG. 7 shows a nucleotide sequence (SEQ ID NO:7) of a native sequence PRO61604 cDNA, wherein SEQ ID NO:7 is a clone designated herein as “DNA272992”.

[0063] FIG. 8 shows the amino acid sequence (SEQ ID NO:8) derived from the coding sequence of SEQ ID NO:7 shown in FIG. 7.

[0064] FIG. 9A-B shows a nucleotide sequence (SEQ ID NO:9) of a native sequence PRO83571 cDNA, wherein SEQ ID NO:9 is a clone designated herein as “DNA327520”.

[0065] FIG. 10 shows the amino acid sequence (SEQ ID NO:10) derived from the coding sequence of SEQ ID NO:9 shown in FIG. 9A-B.

[0066] FIG. 11 shows a nucleotide sequence (SEQ ID NO:11) of a native sequence PRO58320 cDNA, wherein SEQ ID NO:11 is a clone designated herein as “DNA327521”.

[0067] FIG. 12 shows the amino acid sequence (SEQ ID NO:12) derived from the coding sequence of SEQ ID NO:11 shown in FIG. 11.

[0068] FIG. 13 shows a nucleotide sequence (SEQ ID NO:13) of a native sequence PRO2874 cDNA, wherein SEQ ID NO:13 is a clone designated herein as “DNA327522”.

[0069] FIG. 14 shows the amino acid sequence (SEQ ID NO:14) derived from the coding sequence of SEQ ID NO:13 shown in FIG. 13.

[0070] FIG. 15A-B shows a nucleotide sequence (SEQ ID NO:15) of a native sequence PRO49240 cDNA, wherein SEQ ID NO:15 is a clone designated herein as “DNA254177”.

[0071] FIG. 16 shows the amino acid sequence (SEQ ID NO:16) derived from the coding sequence of SEQ ID NO:15 shown in FIG. 15A-B.

[0072] FIG. 17 shows a nucleotide sequence (SEQ ID NO:17) of a native sequence PRO59307 cDNA, wherein SEQ ID NO:17 is a clone designated herein as “DNA270977”.

[0073] FIG. 18 shows the amino acid sequence (SEQ ID NO:18) derived from the coding sequence of SEQ ID NO:17 shown in FIG. 17.

[0074] FIG. 19 shows a nucleotide sequence (SEQ ID NO:19) of a native sequence PRO4619 cDNA, wherein SEQ ID NO:19 is a clone designated herein as “DNA103298”.

[0075] FIG. 20 shows the amino acid sequence (SEQ ID NO:20) derived from the coding sequence of SEQ ID NO:19 shown in FIG. 19.

[0076] FIG. 21 shows a nucleotide sequence (SEQ ID NO:21) of a native sequence PRO38028 cDNA, wherein SEQ ID NO:21 is a clone designated herein as “DNA327523”.

[0077] FIG. 22 shows the amino acid sequence (SEQ ID NO:22) derived from the coding sequence of SEQ ID NO:21 shown in FIG. 21.

[0078] FIG. 23A-B shows a nucleotide sequence (SEQ ID NO:23) of a native sequence PRO83572 cDNA, wherein SEQ ID NO:23 is a clone designated herein as “DNA327524”.

[0079] FIG. 24 shows the amino acid sequence (SEQ ID NO:24) derived from the coding sequence of SEQ ID NO:23 shown in FIG. 23A-B.

[0080] FIG. 25 shows a nucleotide sequence (SEQ ID NO:25) of a native sequence PRO2065 cDNA, wherein SEQ ID NO:25 is a clone designated herein as “DNA326839”.

[0081] FIG. 26 shows the amino acid sequence (SEQ ID NO:26) derived from the coding sequence of SEQ ID NO:25 shown in FIG. 25.

[0082] FIG. 27A-C shows a nucleotide sequence (SEQ ID NO:27) of a native sequence PRO83573 cDNA, wherein SEQ ID NO:27 is a clone designated herein as “DNA327525”.

[0083] FIG. 28 shows the amino acid sequence (SEQ ID NO:28) derived from the coding sequence of SEQ ID NO:27 shown in FIG. 27A-C.

[0084] FIG. 29 shows a nucleotide sequence (SEQ ID NO:29) of a native sequence PRO83574 cDNA, wherein SEQ ID NO:29 is a clone designated herein as “DNA327526”.

[0085] FIG. 30 shows the amino acid sequence (SEQ ID NO:30) derived from the coding sequence of SEQ ID NO:29 shown in FIG. 29.

[0086] FIG. 31 shows a nucleotide sequence (SEQ ID NO:31) of a native sequence PRO83575 cDNA, wherein SEQ ID NO:31 is a clone designated herein as “[DNA327527”.

[0087] FIG. 32 shows the amino acid sequence (SEQ ID NO:32) derived from the coding sequence of SEQ ID NO:31 shown in FIG. 31.

[0088] FIG. 33A-B shows a nucleotide sequence (SEQ ID NO:33) of a native sequence PRO83576 cDNA, wherein SEQ ID NO:33 is a clone designated herein as “DNA327528”.

[0089] FIG. 34 shows the amino acid sequence (SEQ ID NO:34) derived from the coding sequence of SEQ ID NO:33 shown in FIG. 33A-B.

[0090] FIG. 35 shows a nucleotide sequence (SEQ ID NO:35) of a native sequence PRO83577 cDNA, wherein SEQ ID NO:35 is a clone designated herein as “DNA327529”.

[0091] FIG. 36 shows the amino acid sequence (SEQ ID NO:36) derived from the coding sequence of SEQ ID NO:35 shown in FIG. 35.

[0092] FIG. 37 shows a nucleotide sequence (SEQ ID NO:37) of a native sequence PRO83578 cDNA, wherein SEQ ID NO:37 is a clone designated herein as “DNA327530”.

[0093] FIG. 38 shows the amino acid sequence (SEQ ID NO:38) derived from the coding sequence of SEQ ID NO:37 shown in FIG. 37.

[0094] FIG. 39 shows a nucleotide sequence (SEQ ID NO:39) of a native sequence PRO12077 cDNA, wherein SEQ ID NO:39 is a clone designated herein as “DNA324468”.

[0095] FIG. 40 shows the amino acid sequence (SEQ ID NO:40) derived from the coding sequence of SEQ ID NO:39 shown in FIG. 39.

[0096] FIG. 41 shows a nucleotide sequence (SEQ ID NO:41) of a native sequence PRO83579 cDNA, wherein SEQ ID NO:41 is a clone designated herein as “DNA327531”.

[0097] FIG. 42 shows the amino acid sequence (SEQ ID NO:42) derived from the coding sequence of SEQ ID NO:41 shown in FIG. 41.

[0098] FIG. 42 shows a nucleotide sequence (SEQ ID NO:42) of a native sequence PRO71901 cDNA, wherein SEQ ID NO:42 is a clone designated herein as “DNA325124”.

[0099] FIG. 43 shows the amino acid sequence (SEQ ID NO:43) derived from the coding sequence of SEQ ID NO:44 shown in FIG. 44.

[0100] FIG. 45 shows a nucleotide sequence (SEQ ID NO:45) of a native sequence PRO71134 cDNA, wherein SEQ ID NO:45 is a clone designated herein as “DNA327532”.

[0101] FIG. 46 shows the amino acid sequence (SEQ ID NO:46) derived from the coding sequence of SEQ ID NO:45 shown in FIG. 45.

[0102] FIG. 47 shows a nucleotide sequence (SEQ ID NO:47) of a native sequence PRO36526 cDNA, wherein SEQ ID NO:47 is a clone designated herein as “DNA327533”.

[0103] FIG. 48 shows the amino acid sequence (SEQ ID NO:48) derived from the coding sequence of SEQ ID NO:47 shown in FIG. 47.

[0104] FIG. 49 shows a nucleotide sequence (SEQ ID NO:49) of a native sequence PRO62529 cDNA, wherein SEQ ID NO:49 is a clone designated herein as “DNA274759”.

[0105] FIG. 50 shows the amino acid sequence (SEQ ID NO:50) derived from the coding sequence of SEQ ID NO:49 shown in Figure.

[0106] FIG. 51 shows a nucleotide sequence (SEQ ID NO:51) of a native sequence PRO62782 cDNA, wherein SEQ ID NO:51 is a clone designated herein as “DNA275062”.

[0107] FIG. 52 shows the amino acid sequence (SEQ ID NO:52) derived from the coding sequence of SEQ ID NO:51 shown in FIG. 51.

[0108] FIG. 53 shows a nucleotide sequence (SEQ ID NO:53) of a native sequence PRO2758 cDNA, wherein SEQ ID NO:58 is a clone designated herein as “DNA88350”.

[0109] FIG. 54 shows the amino acid sequence (SEQ ID NO:54) derived from the coding sequence of SEQ ID NO:53 shown in FIG. 53.

[0110] FIG. 55A-B shows a nucleotide sequence (SEQ ID NO:55) of a native sequence PRO41180 cDNA, wherein SEQ ID NO:55 is a clone designated herein as “DNA327534”.

[0111] FIG. 56 shows the amino acid sequence (SEQ ID NO:56) derived from the coding sequence of SEQ ID NO:55 shown in FIG. 55A-B.

[0112] FIG. 57 shows a nucleotide sequence (SEQ ID NO:57) of a native sequence PRO39268 cDNA, wherein SEQ ID NO:57 is a clone designated herein as “DNA287207”.

[0113] FIG. 58 shows the amino acid sequence (SEQ ID NO:58) derived from the coding sequence of SEQ ID NO:57 shown in FIG. 57.

[0114] FIG. 59 shows a nucleotide sequence (SEQ ID NO:59) of a native sequence PRO83580 cDNA, wherein SEQ ID NO:59 is a clone designated herein as “DNA327535”.

[0115] FIG. 60 shows the amino acid sequence (SEQ ID NO:60) derived from the coding sequence of SEQ ID NO:59 shown in FIG. 59.

[0116] FIG. 61 shows a nucleotide sequence (SEQ ID NO:61) of a native sequence PRO59895 cDNA, wherein SEQ ID NO:61 is a clone designated herein as “DNA271608”.

[0117] FIG. 62 shows the amino acid sequence (SEQ ID NO:62) derived from the coding sequence of SEQ ID NO:61 shown in FIG. 61.

[0118] FIG. 63A-B shows a nucleotide sequence (SEQ ID NO:63) of a native sequence PRO37003 cDNA, wherein SEQ ID NO:63 is a clone designated herein as “DNA327536”.

[0119] FIG. 64 shows the amino acid sequence (SEQ ID NO:64) derived from the coding sequence of SEQ ID NO:63 shown in FIG. 63A-B.

[0120] FIG. 65 shows a nucleotide sequence (SEQ ID NO:65) of a native sequence PRO3344 cDNA, wherein SEQ ID NO:65 is a clone designated herein as “DNA196817”.

[0121] FIG. 66 shows the amino acid sequence (SEQ ID NO:66) derived from the coding sequence of SEQ ID NO:65 shown in FIG. 65.

[0122] FIG. 67A-B shows a nucleotide sequence (SEQ ID NO:67) of a native sequence PRO83581 cDNA, wherein SEQ ID NO:67 is a clone designated herein as “DNA327537”.

[0123] FIG. 68 shows the amino acid sequence (SEQ ID NO:68) derived from the coding sequence of SEQ ID NO:67 shown in FIG. 67A-B.

[0124] FIG. 69 shows a nucleotide sequence (SEQ ID NO:69) of a native sequence PRO10315 cDNA, wherein SEQ ID NO:69 is a clone designated herein as “DNA327538”.

[0125] FIG. 70 shows the amino acid sequence (SEQ ID NO:70) derived from the coding sequence of SEQ ID NO:69 shown in FIG. 69.

[0126] FIG. 71A-B shows a nucleotide sequence (SEQ ID NO:71) of a native sequence PRO12211 cDNA, wherein SEQ ID NO:71 is a clone designated herein as “DNA327539”.

[0127] FIG. 72 shows the amino acid sequence (SEQ ID NO:72) derived from the coding sequence of SEQ ID NO:71 shown in FIG. 71A-B.

[0128] FIG. 73 shows a nucleotide sequence (SEQ ID NO:73) of a native sequence PRO36587 cDNA, wherein SEQ ID NO:73 is a clone designated herein as “DNA226124”.

[0129] FIG. 74 shows the amino acid sequence (SEQ ID NO:74) derived from the coding sequence of SEQ ID NO:73 shown in FIG. 73.

[0130] FIG. 75 shows a nucleotide sequence (SEQ ID NO:75) of a native sequence PRO37082 cDNA, wherein SEQ ID NO:75 is a clone designated herein as “DNA226619”.

[0131] FIG. 76 shows the amino acid sequence (SEQ ID NO:76) derived from the coding sequence of SEQ ID NO:75 shown in FIG. 75.

[0132] FIG. 77 shows a nucleotide sequence (SEQ ID NO:77) of a native sequence PRO37540 cDNA, wherein SEQ ID NO:77 is a clone designated herein as “DNA227077”.

[0133] FIG. 78 shows the amino acid sequence (SEQ ID NO:78) derived from the coding sequence of SEQ ID NO:77 shown in FIG. 77.

[0134] FIG. 79 shows a nucleotide sequence (SEQ ID NO:79) of a native sequence PRO38005 cDNA, wherein SEQ ID NO:79 is a clone designated herein as “DNA327540”.

[0135] FIG. 80 shows the amino acid sequence (SEQ ID NO:80) derived from the coding sequence of SEQ ID NO:79 shown in FIG. 79.

[0136] FIG. 81 shows a nucleotide sequence (SEQ ID NO:81) of a native sequence PRO36341 cDNA, wherein SEQ ID NO:81 is a clone designated herein as “DNA225878”.

[0137] FIG. 80 shows the amino acid sequence (SEQ ID NO:80) derived from the coding sequence of SEQ ID NO:81 shown in FIG. 81.

[0138] FIG. 83 shows a nucleotide sequence (SEQ ID NO:83) of a native sequence PRO60864 cDNA, wherein SEQ ID NO:83 is a clone designated herein as “DNA272753”.

[0139] FIG. 84 shows the amino acid sequence (SEQ ID NO:84) derived from the coding sequence of SEQ ID NO:83 shown in FIG. 83.

[0140] FIG. 85 shows a nucleotide sequence (SEQ ID NO:85) of a native sequence PRO71139 cDNA, wherein SEQ ID NO:85 is a clone designated herein as “DNA304713”.

[0141] FIG. 86 shows the amino acid sequence (SEQ ID NO:86) derived from the coding sequence of SEQ ID NO:85 shown in FIG. 85.

[0142] FIG. 87 shows a nucleotide sequence (SEQ ID NO:87) of a native sequence PRO60225 cDNA, wherein SEQ ID NO:87 is a clone designated herein as “DNA298609”.

[0143] FIG. 88 shows the amino acid sequence (SEQ ID NO:88) derived from the coding sequence of SEQ ID NO:87 shown in FIG. 87.

[0144] FIG. 89 shows a nucleotide sequence (SEQ ID NO:89) of a native sequence PRO71267 cDNA, wherein SEQ ID NO:89 is a clone designated herein as “DNA304872”.

[0145] FIG. 90 shows the amino acid sequence (SEQ ID NO:90) derived from the coding sequence of SEQ ID NO:89 shown in FIG. 89.

[0146] FIG. 91 shows a nucleotide sequence (SEQ ID NO:91) of a native sequence PRO82678 cDNA, wherein SEQ ID NO:91 is a clone designated herein as “DNA326273”.

[0147] FIG. 92 shows the amino acid sequence (SEQ ID NO:92) derived from the coding sequence of SEQ ID NO:91 shown in FIG. 91.

[0148] FIG. 93A-B shows a nucleotide sequence (SEQ ID NO:93) of a native sequence PRO2672 cDNA, wherein SEQ ID NO:93 is a clone designated herein as “DNA326191”.

[0149] FIG. 94 shows the amino acid sequence (SEQ ID NO:94) derived from the coding sequence of SEQ ID NO:93 shown in FIG. 93.

[0150] FIG. 95A-B shows a nucleotide sequence (SEQ ID NO:95) of a native sequence PRO2621 cDNA, wherein SEQ ID NO:95 is a clone designated herein as “DNA327541”.

[0151] FIG. 96 shows the amino acid sequence (SEQ ID NO:96) derived from the coding sequence of SEQ ID NO:96 shown in FIG. 95A-B.

[0152] FIG. 97 shows a nucleotide sequence (SEQ ID NO:97) of a native sequence PRO12890 cDNA, wherein SEQ ID NO:97 is a clone designated herein as “DNA151802”.

[0153] FIG. 98 shows the amino acid sequence (SEQ ID NO:98) derived from the coding sequence of SEQ ID NO:97 shown in FIG. 97.

[0154] FIG. 99 shows a nucleotide sequence (SEQ ID NO:99) of a native sequence PRO60221 cDNA, wherein SEQ ID NO:99 is a clone designated herein as “DNA271945”.

[0155] FIG. 100 shows the amino acid sequence (SEQ ID NO:100) derived from the coding sequence of SEQ ID NO:99 shown in FIG. 99.

[0156] FIG. 101 shows a nucleotide sequence (SEQ ID NO:101) of a native sequence PRO39294 cDNA, wherein SEQ ID NO:101 is a clone designated herein as “DNA239053”.

[0157] FIG. 102 shows the amino acid sequence (SEQ ID NO:102) derived from the coding sequence of SEQ ID NO:101 shown in FIG. 101.

[0158] FIG. 103 shows a nucleotide sequence (SEQ ID NO:103) of a native sequence PRO83582 cDNA, wherein SEQ ID NO:103 is a clone designated herein as “DNA327542”.

[0159] FIG. 104 shows the amino acid sequence (SEQ ID NO:104) derived from the coding sequence of SEQ ID NO:103 shown in FIG. 103.

[0160] FIG. 105 shows a nucleotide sequence (SEQ ID NO:105) of a native sequence PRO80554 cDNA, wherein SEQ ID NO:105 is a clone designated herein as “DNA323805”.

[0161] FIG. 106 shows the amino acid sequence (SEQ ID NO:106) derived from the coding sequence of SEQ ID NO:105 shown in FIG. 105.

[0162] FIG. 107 shows a nucleotide sequence (SEQ ID NO:107) of a native sequence PRO62241 cDNA, wherein SEQ ID NO:107 is a clone designated herein as “DNA327543”.

[0163] FIG. 108 shows the amino acid sequence (SEQ ID NO:108) derived from the coding sequence of SEQ ID NO:107 shown in FIG. 107.

[0164] FIG. 109 shows a nucleotide sequence (SEQ ID NO:109) of a native sequence PRO70357 cDNA, wherein SEQ ID NO:109 is a clone designated herein as “DNA327544”.

[0165] FIG. 108 shows the amino acid sequence (SEQ ID NO:108) derived from the coding sequence of SEQ ID NO:109 shown in FIG. 109.

[0166] FIG. 111A-B shows a nucleotide sequence (SEQ ID NO:111) of a native sequence PRO82731 cDNA, wherein SEQ ID NO:111 is a clone designated herein as “DNA327545”.

[0167] FIG. 112 shows the amino acid sequence (SEQ ID NO:112) derived from the coding sequence of SEQ ID NO:111 shown in FIG. 111A-B.

[0168] FIG. 113 shows a nucleotide sequence (SEQ ID NO:113) of a native sequence cDNA, wherein SEQ ID NO:113 is a clone designated herein as “DNA327546”.

[0169] FIG. 114 shows a nucleotide sequence (SEQ ID NO:114) of a native sequence PRO83583 cDNA, wherein SEQ ID NO:114 is a clone designated herein as “DNA327547”.

[0170] FIG. 115 shows the amino acid sequence (SEQ ID NO:115) derived from the coding sequence of SEQ ID NO:114 shown in FIG. 114.

[0171] FIG. 116 shows a nucleotide sequence (SEQ ID NO:116) of a native sequence PRO12618 cDNA, wherein SEQ ID NO:116 is a clone designated herein as “DNA151148”.

[0172] FIG. 117 shows the amino acid sequence (SEQ ID NO:117) derived from the coding sequence of SEQ ID NO:116 shown in FIG. 116.

[0173] FIG. 118 shows a nucleotide sequence (SEQ ID NO:118) of a native sequence PRO81281 cDNA, wherein SEQ ID NO:118 is a clone designated herein as “DNA327548”.

[0174] FIG. 119 shows the amino acid sequence (SEQ ID NO:119) derived from the coding sequence of SEQ ID NO:118 shown in FIG. 118.

[0175] FIG. 120A-B shows a nucleotide sequence (SEQ ID NO:120) of a native sequence PRO83584 cDNA, wherein SEQ ID NO:120 is a clone designated herein as “DNA327549”.

[0176] FIG. 121 shows the amino acid sequence (SEQ ID NO:121) derived from the coding sequence of SEQ ID NO:120 shown in FIG. 120A-B.

[0177] FIG. 122 shows a nucleotide sequence (SEQ ID NO:122) of a native sequence PRO81164 cDNA, wherein SEQ ID NO:122 is a clone designated herein as “DNA327550”.

[0178] FIG. 123 shows the amino acid sequence (SEQ ID NO:123) derived from the coding sequence of SEQ ID NO:122 shown in FIG. 122.

[0179] FIG. 124A-B shows a nucleotide sequence (SEQ ID NO:124) of a native sequence PRO4797 cDNA, wherein SEQ ID NO:124 is a clone designated herein as “DNA103470”.

[0180] FIG. 125 shows the amino acid sequence (SEQ ID NO:125) derived from the coding sequence of SEQ ID NO:124 shown in FIG. 124.

[0181] FIG. 126 shows a nucleotide sequence (SEQ ID NO:126) of a native sequence PRO4650 cDNA, wherein SEQ ID NO:126 is a clone designated herein as “DNA103320”.

[0182] FIG. 127 shows the amino acid sequence (SEQ ID NO:127) derived from the coding sequence of SEQ ID NO:126 shown in FIG. 126.

[0183] FIG. 128 shows a nucleotide sequence (SEQ ID NO:128) of a native sequence PRO59289 cDNA, wherein SEQ ID NO:128 is a clone designated herein as “DNA32755 1”.

[0184] FIG. 129 shows the amino acid sequence (SEQ ID NO:129) derived from the coding sequence of SEQ ID NO:128 shown in FIG. 128.

[0185] FIG. 130 shows a nucleotide sequence (SEQ ID NO:130) of a native sequence PRO22664 cDNA, wherein SEQ ID NO:130 is a clone designated herein as “DNA327552”.

[0186] FIG. 131 shows the amino acid sequence (SEQ ID NO:131) derived from the coding sequence of SEQ ID NO:130 shown in FIG. 130.

[0187] FIG. 132 shows a nucleotide sequence (SEQ ID NO:132) of a native sequence PRO2679 cDNA, wherein SEQ ID NO:132 is a clone designated herein as “DNA88166”.

[0188] FIG. 133 shows the amino acid sequence (SEQ ID NO:133) derived from the coding sequence of SEQ ID NO:132 shown in FIG. 132.

[0189] FIG. 134 shows a nucleotide sequence (SEQ ID NO:134) of a native sequence PRO37073 cDNA, wherein SEQ ID NO:134 is a clone designated herein as “DNA304459”.

[0190] FIG. 135 shows the amino acid sequence (SEQ ID NO:135) derived from the coding sequence of SEQ ID NO:134 shown in FIG. 134.

[0191] FIG. 136 shows a nucleotide sequence (SEQ ID NO:136) of a native sequence PRO37073 cDNA, wherein SEQ ID NO:136 is a clone designated herein as “DNA304459”.

[0192] FIG. 137 shows the amino acid sequence (SEQ ID NO:137) derived from the coding sequence of SEQ ID NO:136 shown in FIG. 136.

[0193] FIG. 138A-B shows a nucleotide sequence (SEQ ID NO:138) of a native sequence PRO83585 cDNA, wherein SEQ ID NO:138 is a clone designated herein as “DNA327553”.

[0194] FIG. 139 shows the amino acid sequence (SEQ ID NO:139) derived from the coding sequence of SEQ ID NO:138 shown in FIG. 138A-B.

[0195] FIG. 140 shows a nucleotide sequence (SEQ ID NO:140) of a native sequence PRO59386 cDNA, wherein SEQ ID NO:140 is a clone designated herein as “DNA327554”.

[0196] FIG. 141 shows the amino acid sequence (SEQ ID NO:141) derived from the coding sequence of SEQ ID NO:140 shown in FIG. 140.

[0197] FIG. 142 shows a nucleotide sequence (SEQ ID NO:142) of a native sequence PRO83586 cDNA, wherein SEQ ID NO:142 is a clone designated herein as “DNA327555”.

[0198] FIG. 143 shows the amino acid sequence (SEQ ID NO:143) derived from the coding sequence of SEQ ID NO:142 shown in FIG. 142.

[0199] FIG. 144 shows a nucleotide sequence (SEQ ID NO:144) of a native sequence PRO2551 cDNA, wherein SEQ ID NO:144 is a clone designated herein as “DNA79129”.

[0200] FIG. 145 shows the amino acid sequence (SEQ ID NO:145) derived from the coding sequence of SEQ ID NO:144 shown in FIG. 144.

[0201] FIG. 146 shows a nucleotide sequence (SEQ ID NO:146) of a native sequence PRO83587 cDNA, wherein SEQ ID NO:146 is a clone designated herein as “DNA327556”.

[0202] FIG. 147 shows the amino acid sequence (SEQ ID NO:147) derived from the coding sequence of SEQ ID NO:146 shown in FIG. 146.

[0203] FIG. 148 shows a nucleotide sequence (SEQ ID NO:148) of a native sequence PRO2804 cDNA, wherein SEQ ID NO:148 is a clone designated herein as “DNA88464”.

[0204] FIG. 149 shows the amino acid sequence (SEQ ID NO:149) derived from the coding sequence of SEQ ID NO:148 shown in FIG. 148.

[0205] FIG. 150 shows a nucleotide sequence (SEQ ID NO:150) of a native sequence PRO62244 cDNA, wherein SEQ ID NO:150 is a clone designated herein as “DNA274326”.

[0206] FIG. 151 shows the amino acid sequence (SEQ ID NO:151) derived from the coding sequence of SEQ ID NO:150 shown in FIG. 150.

[0207] FIG. 152A-B shows a nucleotide sequence (SEQ ID NO:152) of a native sequence PRO37659 cDNA, wherein SEQ ID NO:152 is a clone designated herein as “DNA227196”.

[0208] FIG. 153 shows the amino acid sequence (SEQ ID NO:153) derived from the coding sequence of SEQ ID NO:152 shown in FIG. 152A-B.

[0209] FIG. 154 shows a nucleotide sequence (SEQ ID NO:154) of a native sequence PRO50473 cDNA, wherein SEQ ID NO:154 is a clone designated herein as “DNA255406”.

[0210] FIG. 155 shows the amino acid sequence (SEQ ID NO:155) derived from the coding sequence of SEQ ID NO:154 shown in FIG. 154.

[0211] FIG. 156 shows a nucleotide sequence (SEQ ID NO:156) of a native sequence PRO83588 cDNA, wherein SEQ ID NO:156 is a clone designated herein as “DNA327557”.

[0212] FIG. 157 shows the amino acid sequence (SEQ ID NO:157) derived from the coding sequence of SEQ ID NO:156 shown in FIG. 156.

[0213] FIG. 158A-B shows a nucleotide sequence (SEQ ID NO:158) of a native sequence PRO12515 cDNA, wherein SEQ ID NO:158 is a clone designated herein as “DNA327558”.

[0214] FIG. 159 shows the amino acid sequence (SEQ ID NO:159) derived from the coding sequence of SEQ ID NO:158 shown in FIG. 158A-B.

[0215] FIG. 160 shows a nucleotide sequence (SEQ ID NO:160) of a native sequence PRO70353 cDNA, wherein SEQ ID NO:160 is a clone designated herein as “DNA290244”.

[0216] FIG. 161 shows the amino acid sequence (SEQ ID NO:161) derived from the coding sequence of SEQ ID NO:160 shown in FIG. 160.

[0217] FIG. 162 shows a nucleotide sequence (SEQ ID NO:162) of a native sequence PRO70329 cDNA, wherein SEQ ID NO:162 is a clone designated herein as “DNA290232”.

[0218] FIG. 163 shows the amino acid sequence (SEQ ID NO:163) derived from the coding sequence of SEQ ID NO:162 shown in FIG. 162.

[0219] FIG. 164A-B shows a nucleotide sequence (SEQ ID NO:164) of a native sequence PRO12561 cDNA, wherein SEQ ID NO:164 is a clone designated herein as “DNA150966”.

[0220] FIG. 165 shows the amino acid sequence (SEQ ID NO:165) derived from the coding sequence of SEQ ID NO:164 shown in FIG. 164A-B.

[0221] FIG. 166 shows a nucleotide sequence (SEQ ID NO:166) of a native sequence PRO38039 cDNA, wherein SEQ ID NO:166 is a clone designated herein as “DNA227576”.

[0222] FIG. 167 shows the amino acid sequence (SEQ ID NO:167) derived from the coding sequence of SEQ ID NO:166 shown in FIG. 166.

[0223] FIG. 168 shows a nucleotide sequence (SEQ ID NO:168) of a native sequence PRO12769 cDNA, wherein SEQ ID NO:168 is a clone designated herein as “DNA150429”.

[0224] FIG. 169 shows the amino acid sequence (SEQ ID NO:169) derived from the coding sequence of SEQ ID NO:168 shown in FIG. 168.

[0225] FIG. 170 shows a nucleotide sequence (SEQ ID NO:170) of a native sequence PRO83589 cDNA, wherein SEQ ID NO:170 is a clone designated herein as “DNA327559”.

[0226] FIG. 171 shows the amino acid sequence (SEQ ID NO:171) derived from the coding sequence of SEQ ID NO:170 shown in FIG. 170.

[0227] FIG. 172 shows a nucleotide sequence (SEQ ID NO:172) of a native sequence PRO83590 cDNA, wherein SEQ ID NO:172 is a clone designated herein as “DNA327560”.

[0228] FIG. 173 shows the amino acid sequence (SEQ ID NO:173) derived from the coding sequence of SEQ ID NO:172 shown in FIG. 172.

[0229] FIG. 174 shows a nucleotide sequence (SEQ ID NO:174) of a native sequence PRO80735 cDNA, wherein SEQ ID NO:174 is a clone designated herein as “DNA324015”.

[0230] FIG. 175 shows the amino acid sequence (SEQ ID NO:175) derived from the coding sequence of SEQ ID NO:174 shown in FIG. 174.

[0231] FIG. 176 shows a nucleotide sequence (SEQ ID NO:176) of a native sequence PRO36393 cDNA, wherein SEQ ID NO:176 is a clone designated herein as “DNA225930”.

[0232] FIG. 177 shows the amino acid sequence (SEQ ID NO:177) derived from the coding sequence of SEQ ID NO:176 shown in FIG. 176.

[0233] FIG. 178 shows a nucleotide sequence (SEQ ID NO:178) of a native sequence PRO2842 cDNA, wherein SEQ ID NO:178 is a clone designated herein as “DNA88562”.

[0234] FIG. 179 shows the amino acid sequence (SEQ ID NO:179) derived from the coding sequence of SEQ ID NO:178 shown in FIG. 178.

[0235] FIG. 180 shows a nucleotide sequence (SEQ ID NO:180) of a native sequence PRO81669 cDNA, wherein SEQ ID NO:180 is a clone designated herein as “DNA325092”.

[0236] FIG. 181 shows the amino acid sequence (SEQ ID NO:181) derived from the coding sequence of SEQ ID NO:180 shown in FIG. 180.

[0237] FIG. 182 shows a nucleotide sequence (SEQ ID NO:182) of a native sequence PRO49181 cDNA, wherein SEQ ID NO:182 is a clone designated herein as “DNA253582”.

[0238] FIG. 183 shows the amino acid sequence (SEQ ID NO:183) derived from the coding sequence of SEQ ID NO:182 shown in FIG. 182.

[0239] FIG. 184A-B shows a nucleotide sequence (SEQ ID NO:184) of a native sequence PRO83591 cDNA, wherein SEQ ID NO:184 is a clone designated herein as “DNA327561”.

[0240] FIG. 185 shows the amino acid sequence (SEQ ID NO:185) derived from the coding sequence of SEQ ID NO:184 shown in FIG. 184A-B.

[0241] FIG. 186 shows a nucleotide sequence (SEQ ID NO:186) of a native sequence PRO63048 cDNA, wherein SEQ ID NO:186 is a clone designated herein as “DNA275385”.

[0242] FIG. 187 shows the amino acid sequence (SEQ ID NO:187) derived from the coding sequence of SEQ ID NO:186 shown in FIG. 186.

[0243] FIG. 188 shows a nucleotide sequence (SEQ ID NO:188) of a native sequence PRO50067 cDNA, wherein SEQ ID NO:188 is a clone designated herein as “DNA254978”.

[0244] FIG. 189 shows the amino acid sequence (SEQ ID NO:189) derived from the coding sequence of SEQ ID NO:188 shown in FIG. 188.

[0245] FIG. 190 shows a nucleotide sequence (SEQ ID NO:190) of a native sequence PRO62097 cDNA, wherein SEQ ID NO:190 is a clone designated herein as “DNA274167”.

[0246] FIG. 191 shows the amino acid sequence (SEQ ID NO:191) derived from the coding sequence of SEQ ID NO:190 shown in FIG. 190.

[0247] FIG. 192A-B shows a nucleotide sequence (SEQ ID NO:192) of a native sequence cDNA, wherein SEQ ID NO:192 is a clone designated herein as “DNA327562”.

[0248] FIG. 193 shows a nucleotide sequence (SEQ ID NO:193) of a native sequence PRO80761 cDNA, wherein SEQ ID NO:193 is a clone designated herein as “DNA324044”.

[0249] FIG. 194 shows the amino acid sequence (SEQ ID NO:194) derived from the coding sequence of SEQ ID NO:193 shown in FIG. 193.

[0250] FIG. 195A-B shows a nucleotide sequence (SEQ ID NO:195) of a native sequence PRO83592 cDNA, wherein SEQ ID NO:195 is a clone designated herein as “DNA327563”.

[0251] FIG. 196 shows the amino acid sequence (SEQ ID NO:196) derived from the coding sequence of SEQ ID NO:195 shown in FIG. 195A-B.

[0252] FIG. 197 shows a nucleotide sequence (SEQ ID NO:197) of a native sequence PRO12452 cDNA, wherein SEQ ID NO:197 is a clone designated herein as “DNA150757”.

[0253] FIG. 198 shows the amino acid sequence (SEQ ID NO:198) derived from the coding sequence of SEQ ID NO:197 shown in FIG. 197.

[0254] FIG. 199 shows a nucleotide sequence (SEQ ID NO:199) of a native sequence PRO83593 cDNA, wherein SEQ ID NO:199 is a clone designated herein as “DNA327564”.

[0255] FIG. 200 shows the amino acid sequence (SEQ ID NO:200) derived from the coding sequence of SEQ ID NO:199 shown in FIG. 199.

[0256] FIG. 201A-B shows a nucleotide sequence (SEQ ID NO:201) of a native sequence PRO59326 cDNA, wherein SEQ ID NO:201 is a clone designated herein as “DNA270997”.

[0257] FIG. 202 shows the amino acid sequence (SEQ ID NO:202) derived from the coding sequence of SEQ ID NO:201 shown in FIG. 201A-B.

[0258] FIG. 203A-B shows a nucleotide sequence (SEQ ID NO:203) of a native sequence PRO83594 cDNA, wherein SEQ ID NO:203 is a clone designated herein as “DNA327565”.

[0259] FIG. 204 shows the amino acid sequence (SEQ ID NO:204) derived from the coding sequence of SEQ ID NO:203 shown in FIG. 203A-B.

[0260] FIG. 205A-B shows a nucleotide sequence (SEQ ID NO:205) of a native sequence PRO83595 cDNA, wherein SEQ ID NO:205 is a clone designated herein as “DNA327566”.

[0261] FIG. 206 shows the amino acid sequence (SEQ ID NO:206) derived from the coding sequence of SEQ ID NO:205 shown in FIG. 205A-B.

[0262] FIG. 207A-B shows a nucleotide sequence (SEQ ID NO:207) of a native sequence PRO36454 cDNA, wherein SEQ ID NO:207 is a clone designated herein as “DNA225991”.

[0263] FIG. 208 shows the amino acid sequence (SEQ ID NO:208) derived from the coding sequence of SEQ ID NO:207 shown in FIG. 207A-B.

[0264] FIG. 209 shows a nucleotide sequence (SEQ ID NO:209) of a native sequence PRO83596 cDNA, wherein SEQ ID NO:209 is a clone designated herein as “DNA327567”.

[0265] FIG. 210 shows the amino acid sequence (SEQ ID NO:210) derived from the coding sequence of SEQ ID NO:209 shown in FIG. 209.

[0266] FIG. 211 shows a nucleotide sequence (SEQ ID NO:211) of a native sequence PRO36579 cDNA, wherein SEQ ID NO:211 is a clone designated herein as “DNA226116”.

[0267] FIG. 212 shows the amino acid sequence (SEQ ID NO:212) derived from the coding sequence of SEQ ID NO:211 shown in FIG. 211.

[0268] FIG. 213A-B shows a nucleotide sequence (SEQ ID NO:213) of a native sequence PRO58096 cDNA, wherein SEQ ID NO:213 is a clone designated herein as “DNA269686”.

[0269] FIG. 214 shows the amino acid sequence (SEQ ID NO:214) derived from the coding sequence of SEQ ID NO:213 shown in FIG. 213A-B.

[0270] FIG. 215 shows a nucleotide sequence (SEQ ID NO:215) of a native sequence PRO57922 cDNA, wherein SEQ ID NO:215 is a clone designated herein as “DNA327568”.

[0271] FIG. 216 shows the amino acid sequence (SEQ ID NO:216) derived from the coding sequence of SEQ ID NO:215 shown in FIG. 215.

[0272] FIG. 217 shows a nucleotide sequence (SEQ ID NO:217) of a native sequence PRO2683 cDNA, wherein SEQ ID NO:217 is a clone designated herein as “DNA327569”.

[0273] FIG. 218 shows the amino acid sequence (SEQ ID NO:218) derived from the coding sequence of SEQ ID NO:217 shown in FIG. 217.

[0274] FIG. 219 shows a nucleotide sequence (SEQ ID NO:219) of a native sequence cDNA, wherein SEQ ID NO:219 is a clone designated herein as “DNA327570”.

[0275] FIG. 220 shows a nucleotide sequence (SEQ ID NO:220) of a native sequence PRO4735 cDNA, wherein SEQ ID NO:220 is a clone designated herein as “DNA32757 1”.

[0276] FIG. 221 shows the amino acid sequence (SEQ ID NO:221) derived from the coding sequence of SEQ ID NO:220 shown in FIG. 220.

[0277] FIG. 222 shows a nucleotide sequence (SEQ ID NO:222) of a native sequence PRO7143 cDNA, wherein SEQ ID NO:222 is a clone designated herein as “DNA129504”.

[0278] FIG. 223 shows the amino acid sequence (SEQ ID NO:223) derived from the coding sequence of SEQ ID NO:222 shown in FIG. 222.

[0279] FIG. 224A-B shows a nucleotide sequence (SEQ ID NO:224) of a native sequence PRO83597 cDNA, wherein SEQ ID NO:224 is a clone designated herein as “DNA327572”.

[0280] FIG. 225 shows the amino acid sequence (SEQ ID NO:225) derived from the coding sequence of SEQ ID NO:225 shown in FIG. 225A-B.

[0281] FIG. 226 shows a nucleotide sequence (SEQ ID NO:226) of a native sequence PRO81058 cDNA, wherein SEQ ID NO:81058 is a clone designated herein as “DNA324392”.

[0282] FIG. 227 shows the amino acid sequence (SEQ ID NO:227) derived from the coding sequence of SEQ ID NO:226 shown in FIG. 226.

[0283] FIG. 228 shows a nucleotide sequence (SEQ ID NO:228) of a native sequence PRO59301 cDNA, wherein SEQ ID NO:228 is a clone designated herein as “DNA327573”.

[0284] FIG. 229 shows the amino acid sequence (SEQ ID NO:229) derived from the coding sequence of SEQ ID NO:228 shown in FIG. 228.

[0285] FIG. 230 shows a nucleotide sequence (SEQ ID NO:230) of a native sequence PRO12878 cDNA, wherein SEQ ID NO:230 is a clone designated herein as “DNA325477”.

[0286] FIG. 231 shows the amino acid sequence (SEQ ID NO:231) derived from the coding sequence of SEQ ID NO:230 shown in FIG. 230.

[0287] FIG. 232 shows a nucleotide sequence (SEQ ID NO:232) of a native sequence PRO70994 cDNA, wherein SEQ ID NO:232 is a clone designated herein as “DNA302021”.

[0288] FIG. 233 shows the amino acid sequence (SEQ ID NO:233) derived from the coding sequence of SEQ ID NO:232 shown in FIG. 232.

[0289] FIG. 234 shows a nucleotide sequence (SEQ ID NO:234) of a native sequence PRO82546 cDNA, wherein SEQ ID NO:234 is a clone designated herein as “DNA326120”.

[0290] FIG. 235 shows the amino acid sequence (SEQ ID NO:235) derived from the coding sequence of SEQ ID NO:234 shown in FIG. 234.

[0291] FIG. 236 shows a nucleotide sequence (SEQ ID NO:236) of a native sequence PRO12478 cDNA, wherein SEQ ID NO:236 is a clone designated herein as “DNA150808”.

[0292] FIG. 237 shows the amino acid sequence (SEQ ID NO:237) derived from the coding sequence of SEQ ID NO: 236 shown in FIG. 236.

[0293] FIG. 238 shows a nucleotide sequence (SEQ ID NO:238) of a native sequence PRO59035 cDNA, wherein SEQ ID NO:238 is a clone designated herein as “DNA270669”.

[0294] FIG. 239 shows the amino acid sequence (SEQ ID NO:239) derived from the coding sequence of SEQ ID NO:238 shown in FIG. 238.

[0295] FIG. 240A-D shows a nucleotide sequence (SEQ ID NO:240) of a native sequence PRO83598 cDNA, wherein SEQ ID NO:240 is a clone designated herein as “DNA327574”.

[0296] FIG. 241 shows the amino acid sequence (SEQ ID NO:241) derived from the coding sequence of SEQ ID NO:240 shown in FIG. 240A-D.

[0297] FIG. 242 shows a nucleotide sequence (SEQ ID NO:242) of a native sequence PRO50174 cDNA, wherein SEQ ID NO:242 is a clone designated herein as “DNA255088”.

[0298] FIG. 243 shows the amino acid sequence (SEQ ID NO:243) derived from the coding sequence of SEQ ID NO:242 shown in FIG. 242.

[0299] FIG. 244A-B shows a nucleotide sequence (SEQ ID NO:244) of a native sequence PRO83599 cDNA, wherein SEQ ID NO:244 is a clone designated herein as “DNA327575”.

[0300] FIG. 245 shows the amino acid sequence (SEQ ID NO:245) derived from the coding sequence of SEQ ID NO:244 shown in FIG. 244A-B.

[0301] FIG. 246 shows a nucleotide sequence (SEQ ID NO:246) of a native sequence PRO81689 cDNA, wherein SEQ ID NO:246 is a clone designated herein as “DNA325115”.

[0302] FIG. 247 shows the amino acid sequence (SEQ ID NO:247) derived from the coding sequence of SEQ ID NO:246 shown in FIG. 246.

[0303] FIG. 248 shows a nucleotide sequence (SEQ ID NO:248) of a native sequence PRO83470 cDNA, wherein SEQ ID NO:248 is a clone designated herein as “DNA327193”.

[0304] FIG. 249 shows the amino acid sequence (SEQ ID NO:249) derived from the coding sequence of SEQ ID NO:248 shown in FIG. 248.

[0305] FIG. 250 shows a nucleotide sequence (SEQ ID NO:250) of a native sequence PRO58880 cDNA, wherein SEQ ID NO:250 is a clone designated herein as “DNA270502”.

[0306] FIG. 251 shows the amino acid sequence (SEQ ID NO:251) derived from the coding sequence of SEQ ID NO:250 shown in FIG. 250.

[0307] FIG. 252 shows a nucleotide sequence (SEQ ID NO:252) of a native sequence PRO12569 cDNA, wherein SEQ ID NO:252 is a clone designated herein as “DNA150989”.

[0308] FIG. 253 shows the amino acid sequence (SEQ ID NO:253) derived from the coding sequence of SEQ ID NO:252 shown in FIG. 252.

[0309] FIG. 254 shows a nucleotide sequence (SEQ ID NO:254) of a native sequence PRO37584 cDNA, wherein SEQ ID NO:254 is a clone designated herein as “DNA227121”.

[0310] FIG. 255 shows the amino acid sequence (SEQ ID NO:255) derived from the coding sequence of SEQ ID NO:254 shown in FIG. 254.

[0311] FIG. 256A-B shows a nucleotide sequence (SEQ ID NO:256) of a native sequence PRO83600 cDNA, wherein SEQ ID NO:256 is a clone designated herein as “DNA327576”.

[0312] FIG. 257 shows the amino acid sequence (SEQ ID NO:257) derived from the coding sequence of SEQ ID NO:256 shown in FIG. 256A-B.

[0313] FIG. 258 shows a nucleotide sequence (SEQ ID NO:258) of a native sequence PRO58089 cDNA, wherein SEQ ID NO:258 is a clone designated herein as “DNA269678”.

[0314] FIG. 259 shows the amino acid sequence (SEQ ID NO:259) derived from the coding sequence of SEQ ID NO:258 shown in FIG. 258.

[0315] FIG. 260 shows a nucleotide sequence (SEQ ID NO:260) of a native sequence PRO38852 cDNA, wherein SEQ ID NO:260 is a clone designated herein as “DNA234442”.

[0316] FIG. 261 shows the amino acid sequence (SEQ ID NO:261) derived from the coding sequence of SEQ ID NO:260 shown in FIG. 260.

[0317] FIG. 262A-B shows a nucleotide sequence (SEQ ID NO:262) of a native sequence PRO61835 cDNA, wherein SEQ ID NO:262 is a clone designated herein as “DNA273879”.

[0318] FIG. 263 shows the amino acid sequence (SEQ ID NO:263) derived from the coding sequence of SEQ ID NO:262 shown in FIG. 262A-B

[0319] FIG. 264 shows a nucleotide sequence (SEQ ID NO:264) of a native sequence PRO2113 cDNA, wherein SEQ ID NO:264 is a clone designated herein as “DNA327577”.

[0320] FIG. 265 shows the amino acid sequence (SEQ ID NO:265) derived from the coding sequence of SEQ ID NO:264 shown in FIG. 264.

[0321] FIG. 266A-B shows a nucleotide sequence (SEQ ID NO:266) of a native sequence PRO62605 cDNA, wherein SEQ ID NO:266 is a clone designated herein as “DNA274852”.

[0322] FIG. 267 shows the amino acid sequence (SEQ ID NO:267) derived from the coding sequence of SEQ ID NO:266 shown in FIG. 266A-B.

[0323] FIG. 268A-B shows a nucleotide sequence (SEQ ID NO:268) of a native sequence PRO62271 cDNA, wherein SEQ ID NO:268 is a clone designated herein as “DNA327578”.

[0324] FIG. 269 shows the amino acid sequence (SEQ ID NO:269) derived from the coding sequence of SEQ ID NO:268 shown in FIG. 268A-B.

[0325] FIG. 270A-C shows a nucleotide sequence (SEQ ID NO:270) of a native sequence cDNA, wherein SEQ ID NO:270 is a clone designated herein as “DNA327579”.

[0326] FIG. 271 shows a nucleotide sequence (SEQ ID NO:271) of a native sequence PRO83257 cDNA, wherein SEQ ID NO:271 is a clone designated herein as “DNA326939”.

[0327] FIG. 272 shows the amino acid sequence (SEQ ID NO:272) derived from the coding sequence of SEQ ID NO:271 shown in FIG. 271.

[0328] FIG. 273 shows a nucleotide sequence (SEQ ID NO:273) of a native sequence PRO80657 cDNA, wherein SEQ ID NO:273 is a clone designated herein as “DNA323923”.

[0329] FIG. 274 shows the amino acid sequence (SEQ ID NO:274) derived from the coding sequence of SEQ ID NO:273 shown in FIG. 273.

[0330] FIG. 275A-D shows a nucleotide sequence (SEQ ID NO:275) of a native sequence PRO83601 cDNA, wherein SEQ ID NO:275 is a clone designated herein as “DNA327580”.

[0331] FIG. 276 shows the amino acid sequence (SEQ ID NO:276) derived from the coding sequence of SEQ ID NO:275 shown in FIG. 275A-D.

[0332] FIG. 277A-B shows a nucleotide sequence (SEQ ID NO:277) of a native sequence PRO83602 cDNA, wherein SEQ ID NO:277 is a clone designated herein as “DNA327581”.

[0333] FIG. 278 shows the amino acid sequence (SEQ ID NO:278) derived from the coding sequence of SEQ ID NO:277 shown in FIG. 277A-B.

[0334] FIG. 279 shows a nucleotide sequence (SEQ ID NO:279) of a native sequence PRO2572 cDNA, wherein SEQ ID NO:279 is a clone designated herein as “DNA83058”.

[0335] FIG. 280 shows the amino acid sequence (SEQ ID NO:280) derived from the coding sequence of SEQ ID NO:279 shown in FIG. 279.

[0336] FIG. 281 shows a nucleotide sequence (SEQ ID NO:281) of a native sequence PRO69486 cDNA, wherein SEQ ID NO:281 is a clone designated herein as “DNA326896”.

[0337] FIG. 282 shows the amino acid sequence (SEQ ID NO:282) derived from the coding sequence of SEQ ID NO:281 shown in FIG. 281.

[0338] FIG. 283 shows a nucleotide sequence (SEQ ID NO:283) of a native sequence PRO82442 cDNA, wherein SEQ ID NO:283 is a clone designated herein as “DNA326000”.

[0339] FIG. 284 shows the amino acid sequence (SEQ ID NO:284) derived from the coding sequence of SEQ ID NO:283 shown in FIG. 283.

[0340] FIG. 285 shows a nucleotide sequence (SEQ ID NO:285) of a native sequence PRO82432 cDNA, wherein SEQ ID NO:285 is a clone designated herein as “DNA325988”.

[0341] FIG. 286 shows the amino acid sequence (SEQ ID NO:286) derived from the coding sequence of SEQ ID NO:285 shown in FIG. 285.

[0342] FIG. 287 shows a nucleotide sequence (SEQ ID NO:287) of a native sequence PRO1189 cDNA, wherein SEQ ID NO:287 is a clone designated herein as “DNA58828”.

[0343] FIG. 288 shows the amino acid sequence (SEQ ID NO:288) derived from the coding sequence of SEQ ID NO:287 shown in FIG. 287.

[0344] FIG. 289 shows a nucleotide sequence (SEQ ID NO:289) of a native sequence PRO1189 cDNA, wherein SEQ ID NO:289 is a clone designated herein as “DNA327192”.

[0345] FIG. 290 shows the amino acid sequence (SEQ ID NO:290) derived from the coding sequence of SEQ ID NO:289 shown in FIG. 289.

[0346] FIG. 291A-G shows a nucleotide sequence (SEQ ID NO:291) of a native sequence PRO83603 cDNA, wherein SEQ ID NO:291 is a clone designated herein as “DNA327582”.

[0347] FIG. 292 shows the amino acid sequence (SEQ ID NO:292) derived from the coding sequence of SEQ ID NO:291 shown in FIG. 291A-G.

[0348] FIG. 293 shows a nucleotide sequence (SEQ ID NO:293) of a native sequence PRO49685 cDNA, wherein SEQ ID NO:293 is a clone designated herein as “DNA254582”.

[0349] FIG. 294 shows the amino acid sequence (SEQ ID NO:294) derived from the coding sequence of SEQ ID NO:293 shown in FIG. 293.

[0350] FIG. 295A-B shows a nucleotide sequence (SEQ ID NO:295) of a native sequence PRO83604 cDNA, wherein SEQ ID NO:295 is a clone designated herein as “DNA327583”.

[0351] FIG. 296 shows the amino acid sequence (SEQ ID NO:296) derived from the coding sequence of SEQ ID NO:295 shown in FIG. 295A-B.

[0352] FIG. 297 shows a nucleotide sequence (SEQ ID NO:297) of a native sequence PRO59082 cDNA, wherein SEQ ID NO:297 is a clone designated herein as “DNA270719”.

[0353] FIG. 298 shows the amino acid sequence (SEQ ID NO:298) derived from the coding sequence of SEQ ID NO:297 shown in FIG. 297.

[0354] FIG. 299 shows a nucleotide sequence (SEQ ID NO:299) of a native sequence PRO69559 cDNA, wherein SEQ ID NO:299 is a clone designated herein as “DNA287289”.

[0355] FIG. 300 shows the amino acid sequence (SEQ ID NO:300) derived from the coding sequence of SEQ ID NO:299 shown in FIG. 299.

[0356] FIG. 301 shows a nucleotide sequence (SEQ ID NO:301) of a native sequence PRO61125 cDNA, wherein SEQ ID NO:301 is a clone designated herein as “DNA273060”.

[0357] FIG. 302 shows the amino acid sequence (SEQ ID NO:302) derived from the coding sequence of SEQ ID NO:301 shown in FIG. 301.

[0358] FIG. 303 shows a nucleotide sequence (SEQ ID NO:303) of a native sequence PRO80649 cDNA, wherein SEQ ID NO:303 is a clone designated herein as “DNA327584”.

[0359] FIG. 304 shows the amino acid sequence (SEQ ID NO:304) derived from the coding sequence of SEQ ID NO:303 shown in FIG. 303.

[0360] FIG. 305 shows a nucleotide sequence (SEQ ID NO:305) of a native sequence PRO12814 cDNA, wherein SEQ ID NO:305 is a clone designated herein as “DNA150872”.

[0361] FIG. 306 shows the amino acid sequence (SEQ ID NO:306) derived from the coding sequence of SEQ ID NO:305 shown in FIG. 305.

[0362] FIG. 307 shows a nucleotide sequence (SEQ ID NO:307) of a native sequence PRO83605 cDNA, wherein SEQ ID NO:307 is a clone designated herein as “DNA327585”.

[0363] FIG. 308 shows the amino acid sequence (SEQ ID NO:308) derived from the coding sequence of SEQ ID NO:307 shown in FIG. 307.

[0364] FIG. 309A-B shows a nucleotide sequence (SEQ ID NO:309) of a native sequence PRO24100 cDNA, wherein SEQ ID NO:309 is a clone designated herein as “DNA194837”.

[0365] FIG. 310 shows the amino acid sequence (SEQ ID NO:310) derived from the coding sequence of SEQ ID NO:309 shown in FIG. 309.

[0366] FIG. 311 shows a nucleotide sequence (SEQ ID NO:311) of a native sequence PRO82369 cDNA, wherein SEQ ID NO:311 is a clone designated herein as “DNA325915”.

[0367] FIG. 312 shows the amino acid sequence (SEQ ID NO:312) derived from the coding sequence of SEQ ID NO:311 shown in FIG. 311.

[0368] FIG. 313A-B shows a nucleotide sequence (SEQ ID NO:313) of a native sequence PRO2707 cDNA, wherein SEQ ID NO:313 is a clone designated herein as “DNA88229”.

[0369] FIG. 314 shows the amino acid sequence (SEQ ID NO:314) derived from the coding sequence of SEQ ID NO:313 shown in FIG. 313A-B.

[0370] FIG. 315 shows a nucleotide sequence (SEQ ID NO:315) of a native sequence PRO2579 cDNA, wherein SEQ ID NO:315 is a clone designated herein as “DNA327586”.

[0371] FIG. 316 shows the amino acid sequence (SEQ ID NO:316) derived from the coding sequence of SEQ ID NO:315 shown in FIG. 315.

[0372] FIG. 317 shows a nucleotide sequence (SEQ ID NO:317) of a native sequence PRO33677 cDNA, wherein SEQ ID NO:317 is a clone designated herein as “DNA210132”.

[0373] FIG. 318 shows the amino acid sequence (SEQ ID NO:318) derived from the coding sequence of SEQ ID NO:317 shown in FIG. 317.

[0374] FIG. 319 shows a nucleotide sequence (SEQ ID NO:319) of a native sequence PRO1720 cDNA, wherein SEQ ID NO:319 is a clone designated herein as “DNA326840”.

[0375] FIG. 320 shows the amino acid sequence (SEQ ID NO:320) derived from the coding sequence of SEQ ID NO:319 shown in FIG. 319.

[0376] FIG. 321 shows a nucleotide sequence (SEQ ID NO:321) of a native sequence PRO62607 cDNA, wherein SEQ ID NO:321 is a clone designated herein as “DNA324049”.

[0377] FIG. 322 shows the amino acid sequence (SEQ ID NO:322) derived from the coding sequence of SEQ ID NO:321 shown in FIG. 321.

[0378] FIG. 323A-B shows a nucleotide sequence (SEQ ID NO:323) of a native sequence PRO12256 cDNA, wherein SEQ ID NO:323 is a clone designated herein as “DNA150447”.

[0379] FIG. 324 shows the amino acid sequence (SEQ ID NO:324) derived from the coding sequence of SEQ ID NO:323 shown in FIG. 323A-B.

[0380] FIG. 325 shows a nucleotide sequence (SEQ ID NO:325) of a native sequence PRO83606 cDNA, wherein SEQ ID NO:325 is a clone designated herein as “DNA327587”.

[0381] FIG. 326 shows the amino acid sequence (SEQ ID NO:326) derived from the coding sequence of SEQ ID NO:325 shown in FIG. 325.

[0382] FIG. 327 shows a nucleotide sequence (SEQ ID NO:327) of a native sequence PRO59911 cDNA, wherein SEQ ID NO:327 is a clone designated herein as “DNA271624”.

[0383] FIG. 328 shows the amino acid sequence (SEQ ID NO:328) derived from the coding sequence of SEQ ID NO:327 shown in FIG. 327.

[0384] FIG. 329 shows a nucleotide sequence (SEQ ID NO:329) of a native sequence PRO57964 cDNA, wherein SEQ ID NO:329 is a clone designated herein as “DNA269548”.

[0385] FIG. 330 shows the amino acid sequence (SEQ ID NO:330) derived from the coding sequence of SEQ ID NO:329 shown in FIG. 329.

[0386] FIG. 331 shows a nucleotide sequence (SEQ ID NO:331) of a native sequence PRO83607 cDNA, wherein SEQ ID NO:331 is a clone designated herein as “DNA327588”.

[0387] FIG. 332 shows the amino acid sequence (SEQ ID NO:332) derived from the coding sequence of SEQ ID NO:331 shown in FIG. 331.

[0388] FIG. 333 shows a nucleotide sequence (SEQ ID NO:333) of a native sequence PRO70806 cDNA, wherein SEQ ID NO:333 is a clone designated herein as “DNA327589”.

[0389] FIG. 334 shows the amino acid sequence (SEQ ID NO:334) derived from the coding sequence of SEQ ID NO:333 shown in FIG. 333.

[0390] FIG. 335 shows a nucleotide sequence (SEQ ID NO:335) of a native sequence PRO2540 cDNA, wherein SEQ ID NO:335 is a clone designated herein as “DNA76514”.

[0391] FIG. 336 shows the amino acid sequence (SEQ ID NO:336) derived from the coding sequence of SEQ ID NO:335 shown in FIG. 335.

[0392] FIG. 337 shows a nucleotide sequence (SEQ ID NO:337) of a native sequence PRO83608 cDNA, wherein SEQ ID NO:337 is a clone designated herein as “DNA327590”.

[0393] FIG. 338 shows the amino acid sequence (SEQ ID NO:338) derived from the coding sequence of SEQ ID NO:337 shown in FIG. 337.

[0394] FIG. 339A-E shows a nucleotide sequence (SEQ ID NO:339) of a native sequence PRO83609 cDNA, wherein SEQ ID NO:339 is a clone designated herein as “DNA327591”.

[0395] FIG. 340 shows the amino acid sequence (SEQ ID NO:340) derived from the coding sequence of SEQ ID NO:339 shown in FIG. 339A-E.

[0396] FIG. 341 shows a nucleotide sequence (SEQ ID NO:341) of a native sequence PRO83610 cDNA, wherein SEQ ID NO:341 is a clone designated herein as “DNA327592”.

[0397] FIG. 342 shows the amino acid sequence (SEQ ID NO:342) derived from the coding sequence of SEQ ID NO:341 shown in FIG. 341.

[0398] FIG. 343 shows a nucleotide sequence (SEQ ID NO:343) of a native sequence PRO62830 cDNA, wherein SEQ ID NO:343 is a clone designated herein as “DNA287296”.

[0399] FIG. 344 shows the amino acid sequence (SEQ ID NO:344) derived from the coding sequence of SEQ ID NO:343 shown in FIG. 343.

[0400] FIG. 345 shows a nucleotide sequence (SEQ ID NO:345) of a native sequence PRO59733 cDNA, wherein SEQ ID NO:345 is a clone designated herein as “DNA327593”.

[0401] FIG. 346 shows the amino acid sequence (SEQ ID NO:346) derived from the coding sequence of SEQ ID NO:345 shown in FIG. 345.

[0402] FIG. 347 shows a nucleotide sequence (SEQ ID NO:347) of a native sequence PRO81169 cDNA, wherein SEQ ID NO:347 is a clone designated herein as “DNA324514”.

[0403] FIG. 348 shows the amino acid sequence (SEQ ID NO:348) derived from the coding sequence of SEQ ID NO:347 shown in FIG. 347.

[0404] FIG. 349 shows a nucleotide sequence (SEQ ID NO:349) of a native sequence PRO2644 cDNA, wherein SEQ ID NO:349 is a clone designated herein as “DNA88084”.

[0405] FIG. 350 shows the amino acid sequence (SEQ ID NO:350) derived from the coding sequence of SEQ ID NO:349 shown in FIG. 349.

[0406] FIG. 351 shows a nucleotide sequence (SEQ ID NO:351) of a native sequence PRO37015 cDNA, wherein SEQ ID NO:351 is a clone designated herein as “DNA287267”.

[0407] FIG. 352 shows the amino acid sequence (SEQ ID NO:352) derived from the coding sequence of SEQ ID NO:351 shown in FIG. 351.

[0408] FIG. 353 shows a nucleotide sequence (SEQ ID NO:353) of a native sequence PRO61409 cDNA, wherein SEQ ID NO:353 is a clone designated herein as “DNA273410”.

[0409] FIG. 354 shows the amino acid sequence (SEQ ID NO:354) derived from the coding sequence of SEQ ID NO:353 shown in FIG. 353.

[0410] FIG. 355 shows a nucleotide sequence (SEQ ID NO:355) of a native sequence PRO4798 cDNA, wherein SEQ ID NO:355 is a clone designated herein as “DNA103471”.

[0411] FIG. 356 shows the amino acid sequence (SEQ ID NO:356) derived from the coding sequence of SEQ ID NO:355 shown in FIG. 355.

[0412] FIG. 357A-B shows a nucleotide sequence (SEQ ID NO:357) of a native sequence PRO2573 cDNA, wherein SEQ ID NO:357 is a clone designated herein as “DNA83061”.

[0413] FIG. 358 shows the amino acid sequence (SEQ ID NO:358) derived from the coding sequence of SEQ ID NO:357 shown in FIG. 357A-B.

[0414] FIG. 359 shows a nucleotide sequence (SEQ ID NO:359) of a native sequence PRO81936 cDNA, wherein SEQ ID NO:359 is a clone designated herein as “DNA325404”.

[0415] FIG. 360 shows the amino acid sequence (SEQ ID NO:360) derived from the coding sequence of SEQ ID NO:359 shown in FIG. 359.

[0416] FIG. 361 shows a nucleotide sequence (SEQ ID NO:361) of a native sequence PRO80648 cDNA, wherein SEQ ID NO:361 is a clone designated herein as “DNA323910”.

[0417] FIG. 362 shows the amino acid sequence (SEQ ID NO:362) derived from the coding sequence of SEQ ID NO:361 shown in FIG. 361.

[0418] FIG. 363 shows a nucleotide sequence (SEQ ID NO:363) of a native sequence PRO83611 cDNA, wherein SEQ ID NO:363 is a clone designated herein as “DNA327594”.

[0419] FIG. 364 shows the amino acid sequence (SEQ ID NO:364) derived from the coding sequence of SEQ ID NO:363 shown in FIG. 363.

[0420] FIG. 365 shows a nucleotide sequence (SEQ ID NO:365) of a native sequence PRO83612 cDNA, wherein SEQ ID NO:365 is a clone designated herein as “DNA327595”.

[0421] FIG. 366 shows the amino acid sequence (SEQ ID NO:366) derived from the coding sequence of SEQ ID NO:365 shown in FIG. 365.

[0422] FIG. 367A-B shows a nucleotide sequence (SEQ ID NO:367) of a native sequence PRO1920 cDNA, wherein SEQ ID NO:367 is a clone designated herein as “DNA327596”.

[0423] FIG. 368 shows the amino acid sequence (SEQ ID NO:368) derived from the coding sequence of SEQ ID NO:367 shown in FIG. 367A-B.

[0424] FIG. 369A-B shows a nucleotide sequence (SEQ ID NO:369) of a native sequence PRO83613 cDNA, wherein SEQ ID NO:369 is a clone designated herein as “DNA327597”.

[0425] FIG. 370 shows the amino acid sequence (SEQ ID NO:370) derived from the coding sequence of SEQ ID NO:369 shown in FIG. 369A-B.

[0426] FIG. 371 shows a nucleotide sequence (SEQ ID NO:371) of a native sequence PRO2831 cDNA, wherein SEQ ID NO:371 is a clone designated herein as “DNA327598”.

[0427] FIG. 372 shows the amino acid sequence (SEQ ID NO:372) derived from the coding sequence of SEQ ID NO:371 shown in FIG. 371.

[0428] FIG. 373A-B shows a nucleotide sequence (SEQ ID NO:373) of a native sequence PRO83614 cDNA, wherein SEQ ID NO:373 is a clone designated herein as “DNA327599”.

[0429] FIG. 374 shows the amino acid sequence (SEQ ID NO:374) derived from the coding sequence of SEQ ID NO:373 shown in FIG. 373A-B.

[0430] FIG. 375A-B shows a nucleotide sequence (SEQ ID NO:375) of a native sequence PRO38442 cDNA, wherein SEQ ID NO:375 is a clone designated herein as “DNA227979”.

[0431] FIG. 376 shows the amino acid sequence (SEQ ID NO:376) derived from the coding sequence of SEQ ID NO:375 shown in FIG. 375A-B.

[0432] FIG. 377 shows a nucleotide sequence (SEQ ID NO:377) of a native sequence PRO59478 cDNA, wherein SEQ ID NO:377 is a clone designated herein as “DNA271157”.

[0433] FIG. 378 shows the amino acid sequence (SEQ ID NO:378) derived from the coding sequence of SEQ ID NO:377 shown in FIG. 377.

[0434] FIG. 379 shows a nucleotide sequence (SEQ ID NO:379) of a native sequence PRO60450 cDNA, wherein SEQ ID NO:379 is a clone designated herein as “DNA272185”.

[0435] FIG. 380 shows the amino acid sequence (SEQ ID NO:380) derived from the coding sequence of SEQ ID NO:379 shown in FIG. 379.

[0436] FIG. 381A-B shows a nucleotide sequence (SEQ ID NO:381) of a native sequence PRO4802 cDNA, wherein SEQ ID NO:381 is a clone designated herein as “DNA103475”.

[0437] FIG. 382 shows the amino acid sequence (SEQ ID NO:382) derived from the coding sequence of SEQ ID NO:381 shown in FIG. 381.

[0438] FIG. 383 shows a nucleotide sequence (SEQ ID NO:383) of a native sequence PRO1192 cDNA, wherein SEQ ID NO:383 is a clone designated herein as “DNA327600”.

[0439] FIG. 384 shows the amino acid sequence (SEQ ID NO:384) derived from the coding sequence of SEQ ID NO:383 shown in FIG. 383.

[0440] FIG. 385 shows a nucleotide sequence (SEQ ID NO:385) of a native sequence PRO1192 cDNA, wherein SEQ ID NO:385 is a clone designated herein as “DNA327601”.

[0441] FIG. 386 shows the amino acid sequence (SEQ ID NO:386) derived from the coding sequence of SEQ ID NO:385 shown in FIG. 385.

[0442] FIG. 387 shows a nucleotide sequence (SEQ ID NO:387) of a native sequence PRO61296 cDNA, wherein SEQ ID NO:387 is a clone designated herein as “DNA273286”.

[0443] FIG. 388 shows the amino acid sequence (SEQ ID NO:388) derived from the coding sequence of SEQ ID NO:387 shown in FIG. 387.

[0444] FIG. 389 shows a nucleotide sequence (SEQ ID NO:389) of a native sequence PRO45618 cDNA, wherein SEQ ID NO:389 is a clone designated herein as “DNA327602”.

[0445] FIG. 390 shows the amino acid sequence (SEQ ID NO:390) derived from the coding sequence of SEQ ID NO:389 shown in FIG. 389.

[0446] FIG. 391 shows a nucleotide sequence (SEQ ID NO:391) of a native sequence PRO58118 cDNA, wherein SEQ ID NO:391 is a clone designated herein as “DNA327603”.

[0447] FIG. 392 shows the amino acid sequence (SEQ ID NO:392) derived from the coding sequence of SEQ ID NO:391 shown in FIG. 391.

[0448] FIG. 393 shows a nucleotide sequence (SEQ ID NO:393) of a native sequence PRO131 cDNA, wherein SEQ ID NO:393 is a clone designated herein as “DNA5353 1”.

[0449] FIG. 394 shows the amino acid sequence (SEQ ID NO:394) derived from the coding sequence of SEQ ID NO:393 shown in FIG. 393.

[0450] FIG. 395 shows a nucleotide sequence (SEQ ID NO:395) of a native sequence PRO4728 cDNA, wherein SEQ ID NO:395 is a clone designated herein as “DNA327604”.

[0451] FIG. 396 shows the amino acid sequence (SEQ ID NO:396) derived from the coding sequence of SEQ ID NO:395 shown in FIG. 395.

[0452] FIG. 397A-D shows a nucleotide sequence (SEQ ID NO:397) of a native sequence PRO83615 cDNA, wherein SEQ ID NO:397 is a clone designated herein as “DNA327605”.

[0453] FIG. 398A-B shows the amino acid sequence (SEQ ID NO:398) derived from the coding sequence of SEQ ID NO:397 shown in FIG. 397A-D.

[0454] FIG. 399A-B shows a nucleotide sequence (SEQ ID NO:399) of a native sequence PRO36600 cDNA, wherein SEQ ID NO:399 is a clone designated herein as “DNA226137”.

[0455] FIG. 400 shows the amino acid sequence (SEQ ID NO:400) derived from the coding sequence of SEQ ID NO:399 shown in FIG. 399A-B.

[0456] FIG. 401 shows a nucleotide sequence (SEQ ID NO:401) of a native sequence PRO57873 cDNA, wherein SEQ ID NO:401 is a clone designated herein as “DNA327606”.

[0457] FIG. 402 shows the amino acid sequence (SEQ ID NO:402) derived from the coding sequence of SEQ ID NO:401 shown in FIG. 401.

[0458] FIG. 403 shows a nucleotide sequence (SEQ ID NO:403) of a native sequence PRO83616 cDNA, wherein SEQ ID NO:403 is a clone designated herein as “DNA327607”.

[0459] FIG. 404 shows the amino acid sequence (SEQ ID NO:404) derived from the coding sequence of SEQ ID NO:403 shown in FIG. 403.

[0460] FIG. 405 shows a nucleotide sequence (SEQ ID NO:405) of a native sequence PRO62740 cDNA, wherein SEQ ID NO:405 is a clone designated herein as “DNA275012”.

[0461] FIG. 406 shows the amino acid sequence (SEQ ID NO:406) derived from the coding sequence of SEQ ID NO:405 shown in FIG. 405.

[0462] FIG. 407 shows a nucleotide sequence (SEQ ID NO:407) of a native sequence PRO83617 cDNA, wherein SEQ ID NO:407 is a clone designated herein as “DNA327608”.

[0463] FIG. 408 shows the amino acid sequence (SEQ ID NO:408) derived from the coding sequence of SEQ ID NO:407 shown in FIG. 407.

[0464] FIG. 409 shows a nucleotide sequence (SEQ ID NO:409) of a native sequence PRO36596 cDNA, wherein SEQ ID NO:409 is a clone designated herein as “DNA226133”.

[0465] FIG. 410 shows the amino acid sequence (SEQ ID NO:410) derived from the coding sequence of SEQ ID NO:409 shown in FIG. 409.

[0466] FIG. 411 shows a nucleotide sequence (SEQ ID NO:411) of a native sequence PRO3629 cDNA, wherein SEQ ID NO:411 is a clone designated herein as “DNA326089”.

[0467] FIG. 412 shows the amino acid sequence (SEQ ID NO:412) derived from the coding sequence of SEQ ID NO:411 shown in FIG. 411.

[0468] FIG. 413 shows a nucleotide sequence (SEQ ID NO:413) of a native sequence PRO57934 cDNA, wherein SEQ ID NO:413 is a clone designated herein as “DNA269518”.

[0469] FIG. 414 shows the amino acid sequence (SEQ ID NO:414) derived from the coding sequence of SEQ ID NO:413 shown in FIG. 413.

[0470] FIG. 415 shows a nucleotide sequence (SEQ ID NO:415) of a native sequence PRO83618 cDNA, wherein SEQ ID NO:415 is a clone designated herein as “DNA327609”.

[0471] FIG. 416 shows the amino acid sequence (SEQ ID NO:416) derived from the coding sequence of SEQ ID NO:415 shown in FIG. 415.

[0472] FIG. 417 shows a nucleotide sequence (SEQ ID NO:417) of a native sequence PRO70595 cDNA, wherein SEQ ID NO:417 is a clone designated herein as “DNA290319”.

[0473] FIG. 418 shows the amino acid sequence (SEQ ID NO:418) derived from the coding sequence of SEQ ID NO:417 shown in FIG. 417.

[0474] FIG. 419 shows a nucleotide sequence (SEQ ID NO:419) of a native sequence PRO60781 cDNA, wherein SEQ ID NO:419 is a clone designated herein as “DNA272655”.

[0475] FIG. 420 shows the amino acid sequence (SEQ ID NO:420) derived from the coding sequence of SEQ ID NO:419 shown in FIG. 419.

[0476] FIG. 421 shows a nucleotide sequence (SEQ ID NO:421) of a native sequence PRO12186 cDNA, wherein SEQ ID NO:421 is a clone designated herein as “DNA151798”.

[0477] FIG. 422 shows the amino acid sequence (SEQ ID NO:422) derived from the coding sequence of SEQ ID NO:421 shown in FIG. 421.

[0478] FIG. 423 shows a nucleotide sequence (SEQ ID NO:423) of a native sequence PRO37977 cDNA, wherein SEQ ID NO:423 is a clone designated herein as “DNA227514”.

[0479] FIG. 424 shows the amino acid sequence (SEQ ID NO:424) derived from the coding sequence of SEQ ID NO:423 shown in FIG. 423.

[0480] FIG. 425 shows a nucleotide sequence (SEQ ID NO:425) of a native sequence PRO83619 cDNA, wherein SEQ ID NO:425 is a clone designated herein as “DNA327610”.

[0481] FIG. 426 shows the amino acid sequence (SEQ ID NO:426) derived from the coding sequence of SEQ ID NO:425 shown in FIG. 425.

[0482] FIG. 427A-B shows a nucleotide sequence (SEQ ID NO:427) of a native sequence PRO83620 cDNA, wherein SEQ ID NO:427 is a clone designated herein as “DNA32761 1”.

[0483] FIG. 428 shows the amino acid sequence (SEQ ID NO:428) derived from the coding sequence of SEQ ID NO:427 shown in FIG. 427A-B.

[0484] FIG. 429 shows a nucleotide sequence (SEQ ID NO:429) of a native sequence PRO83621 cDNA, wherein SEQ ID NO:429 is a clone designated herein as “DNA327612”.

[0485] FIG. 430 shows the amino acid sequence (SEQ ID NO:430) derived from the coding sequence of SEQ ID NO:429 shown in FIG. 429.

[0486] FIG. 431 shows a nucleotide sequence (SEQ ID NO:431) of a native sequence PRO82689 cDNA, wherein SEQ ID NO:431 is a clone designated herein as “DNA326287”.

[0487] FIG. 432 shows the amino acid sequence (SEQ ID NO:432) derived from the coding sequence of SEQ ID NO:431 shown in FIG. 431.

[0488] FIG. 433 shows a nucleotide sequence (SEQ ID NO:433) of a native sequence PRO83622 cDNA, wherein SEQ ID NO:433 is a clone designated herein as “DNA327613”.

[0489] FIG. 434 shows the amino acid sequence (SEQ ID NO:434) derived from the coding sequence of SEQ ID NO:433 shown in FIG. 433.

[0490] FIG. 435 shows a nucleotide sequence (SEQ ID NO:435) of a native sequence PRO11 cDNA, wherein SEQ ID NO:435 is a clone designated herein as “DNA327614”.

[0491] FIG. 436 shows the amino acid sequence (SEQ ID NO:436) derived from the coding sequence of SEQ ID NO:435 shown in FIG. 435.

[0492] FIG. 437A-B shows a nucleotide sequence (SEQ ID NO:437) of a native sequence PRO83623 cDNA, wherein SEQ ID NO:437 is a clone designated herein as “DNA327615”.

[0493] FIG. 438 shows the amino acid sequence (SEQ ID NO:438) derived from the coding sequence of SEQ ID NO:437 shown in FIG. 437A-B.

[0494] FIG. 439 shows a nucleotide sequence (SEQ ID NO:439) of a native sequence PRO83624 cDNA, wherein SEQ ID NO:439 is a clone designated herein as “DNA327616”.

[0495] FIG. 440 shows the amino acid sequence (SEQ ID NO:440) derived from the coding sequence of SEQ ID NO:439 shown in FIG. 439.

[0496] FIG. 441 shows a nucleotide sequence (SEQ ID NO:441) of a native sequence PRO36219 cDNA, wherein SEQ ID NO:441 is a clone designated herein as “DNA225756”.

[0497] FIG. 442 shows the amino acid sequence (SEQ ID NO:442) derived from the coding sequence of SEQ ID NO:441 shown in FIG. 441.

[0498] FIG. 443 shows a nucleotide sequence (SEQ ID NO:443) of a native sequence PRO4793 cDNA, wherein SEQ ID NO:443 is a clone designated herein as “DNA325800”.

[0499] FIG. 444 shows the amino acid sequence (SEQ ID NO:444) derived from the coding sequence of SEQ ID NO:443 shown in FIG. 443.

[0500] FIG. 445 shows a nucleotide sequence (SEQ ID NO:445) of a native sequence PRO83625 cDNA, wherein SEQ ID NO:445 is a clone designated herein as “DNA327617”.

[0501] FIG. 446 shows the amino acid sequence (SEQ ID NO:446) derived from the coding sequence of SEQ ID NO:445 shown in FIG. 445.

[0502] FIG. 447 shows a nucleotide sequence (SEQ ID NO:447) of a native sequence PRO49481 cDNA, wherein SEQ ID NO:447 is a clone designated herein as “DNA254370”.

[0503] FIG. 448 shows the amino acid sequence (SEQ ID NO:448) derived from the coding sequence of SEQ ID NO: 447 shown in FIG. 447.

[0504] FIG. 449A-B shows a nucleotide sequence (SEQ ID NO:449) of a native sequence PRO83626 cDNA, wherein SEQ ID NO:449 is a clone designated herein as “DNA327618”.

[0505] FIG. 450 shows the amino acid sequence (SEQ ID NO:450) derived from the coding sequence of SEQ ID NO:449 shown in FIG. 449A-B.

[0506] FIG. 451 shows a nucleotide sequence (SEQ ID NO:451) of a native sequence PRO83627 cDNA, wherein SEQ ID NO:451 is a clone designated herein as “DNA327619”.

[0507] FIG. 452 shows the amino acid sequence (SEQ ID NO:452) derived from the coding sequence of SEQ ID NO:451 shown in FIG. 451.

[0508] FIG. 453 shows a nucleotide sequence (SEQ ID NO:453) of a native sequence PRO12754 cDNA, wherein SEQ ID NO:453 is a clone designated herein as “DNA151910”.

[0509] FIG. 454 shows the amino acid sequence (SEQ ID NO:454) derived from the coding sequence of SEQ ID NO:453 shown in FIG. 453.

[0510] FIG. 455A-C shows a nucleotide sequence (SEQ ID NO:455) of a native sequence PRO36778 cDNA, wherein SEQ ID NO:455 is a clone designated herein as “DNA226315”.

[0511] FIG. 456 shows the amino acid sequence (SEQ ID NO:456) derived from the coding sequence of SEQ ID NO:455 shown in FIG. 455.

[0512] FIG. 457 shows a nucleotide sequence (SEQ ID NO:457) of a native sequence PRO4633 cDNA, wherein SEQ ID NO:457 is a clone designated herein as “DNA327620”.

[0513] FIG. 458 shows the amino acid sequence (SEQ ID NO:458) derived from the coding sequence of SEQ ID NO:457 shown in FIG. 457.

[0514] FIG. 459 shows a nucleotide sequence (SEQ ID NO:459) of a native sequence PRO83628 cDNA, wherein SEQ ID NO:459 is a clone designated herein as “DNA327621”.

[0515] FIG. 460 shows the amino acid sequence (SEQ ID NO:460) derived from the coding sequence of SEQ ID NO:459 shown in FIG. 459.

[0516] FIG. 461 shows a nucleotide sequence (SEQ ID NO:461) of a native sequence PRO83472 cDNA, wherein SEQ ID NO:461 is a clone designated herein as “DNA327196”.

[0517] FIG. 462 shows the amino acid sequence (SEQ ID NO:462) derived from the coding sequence of SEQ ID NO:461 shown in FIG. 461.

[0518] FIG. 463 shows a nucleotide sequence (SEQ ID NO:463) of a native sequence PRO83629 cDNA, wherein SEQ ID NO:463 is a clone designated herein as “DNA327622”.

[0519] FIG. 464 shows the amino acid sequence (SEQ ID NO:464) derived from the coding sequence of SEQ ID NO:463 shown in FIG. 463.

[0520] FIG. 465A-B shows a nucleotide sequence (SEQ ID NO:465) of a native sequence PRO12278 cDNA, wherein SEQ ID NO:465 is a clone designated herein as “DNA150475”.

[0521] FIG. 466 shows the amino acid sequence (SEQ ID NO:466) derived from the coding sequence of SEQ ID NO:465 shown in FIG. 465A-B.

[0522] FIG. 466 shows a nucleotide sequence (SEQ ID NO:466) of a native sequence PRO24089 cDNA, wherein SEQ ID NO:466 is a clone designated herein as “DNA327623”.

[0523] FIG. 467 shows the amino acid sequence (SEQ ID NO:467) derived from the coding sequence of SEQ ID NO:466 shown in FIG. 466.

[0524] FIG. 469 shows a nucleotide sequence (SEQ ID NO:469) of a native sequence PRO60979 cDNA, wherein SEQ ID NO:469 is a clone designated herein as “DNA272889”.

[0525] FIG. 470 shows the amino acid sequence (SEQ ID NO:470) derived from the coding sequence of SEQ ID NO:469 shown in FIG. 469.

[0526] FIG. 471 shows a nucleotide sequence (SEQ ID NO:471) of a native sequence PRO83630 cDNA, wherein SEQ ID NO:471 is a clone designated herein as “DNA327624”.

[0527] FIG. 472 shows the amino acid sequence (SEQ ID NO:472) derived from the coding sequence of SEQ ID NO:471 shown in FIG. 471.

[0528] FIG. 473 shows a nucleotide sequence (SEQ ID NO:473) of a native sequence PRO11985 cDNA, wherein SEQ ID NO:473 is a clone designated herein as “DNA151689”.

[0529] FIG. 474 shows the amino acid sequence (SEQ ID NO:474) derived from the coding sequence of SEQ ID NO:473 shown in FIG. 473.

[0530] FIG. 475 shows a nucleotide sequence (SEQ ID NO:475) of a native sequence PRO60900 cDNA, wherein SEQ ID NO:475 is a clone designated herein as “DNA272795”.

[0531] FIG. 476 shows the amino acid sequence (SEQ ID NO:476) derived from the coding sequence of SEQ ID NO:475 shown in FIG. 475.

[0532] FIG. 477 shows a nucleotide sequence (SEQ ID NO:477) of a native sequence PRO36124 cDNA, wherein SEQ ID NO:477 is a clone designated herein as “DNA225661”.

[0533] FIG. 478 shows the amino acid sequence (SEQ ID NO:478) derived from the coding sequence of SEQ ID NO:477 shown in FIG. 477.

[0534] FIG. 479 shows a nucleotide sequence (SEQ ID NO:479) of a native sequence PRO61634 cDNA, wherein SEQ ID NO:479 is a clone designated herein as “DNA273666”.

[0535] FIG. 480 shows the amino acid sequence (SEQ ID NO:480) derived from the coding sequence of SEQ ID NO:479 shown in FIG. 479.

[0536] FIG. 481 shows a nucleotide sequence (SEQ ID NO:481) of a native sequence PRO37065 cDNA, wherein SEQ ID NO:481 is a clone designated herein as “DNA226602”.

[0537] FIG. 482 shows the amino acid sequence (SEQ ID NO:482) derived from the coding sequence of SEQ ID NO:481 shown in FIG. 481.

[0538] FIG. 483 shows a nucleotide sequence (SEQ ID NO:483) of a native sequence PRO25138 cDNA, wherein SEQ ID NO:483 is a clone designated herein as “DNA327625”.

[0539] FIG. 484 shows the amino acid sequence (SEQ ID NO:484) derived from the coding sequence of SEQ ID NO:483 shown in FIG. 483.

[0540] FIG. 485 shows a nucleotide sequence (SEQ ID NO:485) of a native sequence PRO37779 cDNA, wherein SEQ ID NO:485 is a clone designated herein as “DNA327626”.

[0541] FIG. 486 shows the amino acid sequence (SEQ ID NO:486) derived from the coding sequence of SEQ ID NO:485 shown in FIG. 485.

[0542] FIG. 487 shows a nucleotide sequence (SEQ ID NO:487) of a native sequence PRO69656 cDNA, wherein SEQ ID NO:487 is a clone designated herein as “DNA287399”.

[0543] FIG. 488 shows the amino acid sequence (SEQ ID NO:488) derived from the coding sequence of SEQ ID NO:487 shown in FIG. 487.

[0544] FIG. 489A-B shows a nucleotide sequence (SEQ ID NO:489) of a native sequence PRO83631 cDNA, wherein SEQ ID NO:489 is a clone designated herein as “DNA327627”.

[0545] FIG. 490 shows the amino acid sequence (SEQ ID NO:490) derived from the coding sequence of SEQ ID NO:489 shown in FIG. 489A-B.

[0546] FIG. 491 shows a nucleotide sequence (SEQ ID NO:491) of a native sequence PRO83632 cDNA, wherein SEQ ID NO:491 is a clone designated herein as “DNA327628”.

[0547] FIG. 492 shows the amino acid sequence (SEQ ID NO:492) derived from the coding sequence of SEQ ID NO:491 shown in FIG. 491.

[0548] FIG. 493 shows a nucleotide sequence (SEQ ID NO:493) of a native sequence PRO83633 cDNA, wherein SEQ ID NO:493 is a clone designated herein as “DNA327629”.

[0549] FIG. 494 shows the amino acid sequence (SEQ ID NO:494) derived from the coding sequence of SEQ ID NO:493 shown in FIG. 493.

[0550] FIG. 495A-B shows a nucleotide sequence (SEQ ID NO:495) of a native sequence PRO36043 cDNA, wherein SEQ ID NO:495 is a clone designated herein as “DNA225580”.

[0551] FIG. 496 shows the amino acid sequence (SEQ ID NO:496) derived from the coding sequence of SEQ ID NO:495 shown in FIG. 495A-B.

[0552] FIG. 497 shows a nucleotide sequence (SEQ ID NO:497) of a native sequence PRO60569 cDNA, wherein SEQ ID NO:497 is a clone designated herein as “DNA272312”.

[0553] FIG. 498 shows the amino acid sequence (SEQ ID NO:498) derived from the coding sequence of SEQ ID NO:497 shown in FIG. 497.

[0554] FIG. 499 shows a nucleotide sequence (SEQ ID NO:499) of a native sequence PRO38724 cDNA, wherein SEQ ID NO:499 is a clone designated herein as “DNA327630”.

[0555] FIG. 500 shows the amino acid sequence (SEQ ID NO:500) derived from the coding sequence of SEQ ID NO:499 shown in FIG. 499.

[0556] FIG. 501 shows a nucleotide sequence (SEQ ID NO:501) of a native sequence PRO83634 cDNA, wherein SEQ ID NO:501 is a clone designated herein as “DNA32763 1”.

[0557] FIG. 502 shows the amino acid sequence (SEQ ID NO:502) derived from the coding sequence of SEQ ID NO:501 shown in FIG. 501.

[0558] FIG. 503 shows a nucleotide sequence (SEQ ID NO:503) of a native sequence PRO83635 cDNA, wherein SEQ ID NO:503 is a clone designated herein as “DNA327632”.

[0559] FIG. 504 shows the amino acid sequence (SEQ ID NO:504) derived from the coding sequence of SEQ ID NO:503 shown in FIG. 503.

[0560] FIG. 505 shows a nucleotide sequence (SEQ ID NO:505) of a native sequence PRO82726 cDNA, wherein SEQ ID NO:505 is a clone designated herein as “DNA326328”.

[0561] FIG. 506 shows the amino acid sequence (SEQ ID NO:506) derived from the coding sequence of SEQ ID NO:505 shown in FIG. 505.

[0562] FIG. 507 shows a nucleotide sequence (SEQ ID NO:507) of a native sequence PRO2870 cDNA, wherein SEQ ID NO:507 is a clone designated herein as “DNA327633”.

[0563] FIG. 508 shows the amino acid sequence (SEQ ID NO:508) derived from the coding sequence of SEQ ID NO:507 shown in FIG. 507.

[0564] FIG. 509 shows a nucleotide sequence (SEQ ID NO:509) of a native sequence PRO2885 cDNA, wherein SEQ ID NO:509 is a clone designated herein as “DNA88654”.

[0565] FIG. 510 shows the amino acid sequence (SEQ ID NO:510) derived from the coding sequence of SEQ ID NO:509 shown in FIG. 509.

[0566] FIG. 511 shows a nucleotide sequence (SEQ ID NO:511) of a native sequence PRO83636 cDNA, wherein SEQ ID NO:511 is a clone designated herein as “DNA327634”.

[0567] FIG. 512 shows the amino acid sequence (SEQ ID NO:512) derived from the coding sequence of SEQ ID NO:511 shown in FIG. 511.

[0568] FIG. 513 shows a nucleotide sequence (SEQ ID NO:513) of a native sequence PRO21708 cDNA, wherein SEQ ID NO:513 is a clone designated herein as “DNA188333”.

[0569] FIG. 514 shows the amino acid sequence (SEQ ID NO:514) derived from the coding sequence of SEQ ID NO:513 shown in FIG. 513.

[0570] FIG. 515 shows a nucleotide sequence (SEQ ID NO:515) of a native sequence PRO21825 cDNA, wherein SEQ ID NO:515 is a clone designated herein as “DNA188269”.

[0571] FIG. 516 shows the amino acid sequence (SEQ ID NO:516) derived from the coding sequence of SEQ ID NO:515 shown in FIG. 515.

[0572] FIG. 517A-B shows a nucleotide sequence (SEQ ID NO:517) of a native sequence PRO36946 cDNA, wherein SEQ ID NO:517 is a clone designated herein as “DNA226483”.

[0573] FIG. 518 shows the amino acid sequence (SEQ ID NO:518) derived from the coding sequence of SEQ ID NO:517 shown in FIG. 517A-B.

[0574] FIG. 519 shows a nucleotide sequence (SEQ ID NO:519) of a native sequence PRO49203 cDNA, wherein SEQ ID NO:519 is a clone designated herein as “DNA253798”.

[0575] FIG. 520 shows the amino acid sequence (SEQ ID NO:520) derived from the coding sequence of SEQ ID NO:520 shown in FIG. 520.

[0576] FIG. 521 shows a nucleotide sequence (SEQ ID NO:521) of a native sequence PRO59526 cDNA, wherein SEQ ID NO:521 is a clone designated herein as “DNA271211”.

[0577] FIG. 522 shows the amino acid sequence (SEQ ID NO:522) derived from the coding sequence of SEQ ID NO:521 shown in FIG. 521.

[0578] FIG. 523 shows a nucleotide sequence (SEQ ID NO:523) of a native sequence PRO59946 cDNA, wherein SEQ ID NO:523 is a clone designated herein as “DNA271660”.

[0579] FIG. 524 shows the amino acid sequence (SEQ ID NO:524) derived from the coding sequence of SEQ ID NO:523 shown in FIG. 523.

[0580] FIG. 525 shows a nucleotide sequence (SEQ ID NO:525) of a native sequence PRO83637 cDNA, wherein SEQ ID NO:525 is a clone designated herein as “DNA327635”.

[0581] FIG. 526 shows the amino acid sequence (SEQ ID NO:526) derived from the coding sequence of SEQ ID NO:525 shown in FIG. 525.

[0582] FIG. 527 shows a nucleotide sequence (SEQ ID NO:527) of a native sequence PRO2703 cDNA, wherein SEQ ID NO:527 is a clone designated herein as “DNA88215”.

[0583] FIG. 528 shows the amino acid sequence (SEQ ID NO:528) derived from the coding sequence of SEQ ID NO:527 shown in FIG. 527.

[0584] FIG. 529 shows a nucleotide sequence (SEQ ID NO:529) of a native sequence PRO52392 cDNA, wherein SEQ ID NO:529 is a clone designated herein as “DNA257852”.

[0585] FIG. 530 shows the amino acid sequence (SEQ ID NO:530) derived from the coding sequence of SEQ ID NO:529 shown in FIG. 529.

[0586] FIG. 531 shows a nucleotide sequence (SEQ ID NO:531) of a native sequence PRO83638 cDNA, wherein SEQ ID NO:531 is a clone designated herein as “DNA327636”.

[0587] FIG. 532 shows the amino acid sequence (SEQ ID NO:532) derived from the coding sequence of SEQ ID NO:531 shown in FIG. 531.

[0588] FIG. 533 shows a nucleotide sequence (SEQ ID NO:533) of a native sequence PRO2552 cDNA, wherein SEQ ID NO:533 is a clone designated herein as “DNA327637”.

[0589] FIG. 534 shows the amino acid sequence (SEQ ID NO:534) derived from the coding sequence of SEQ ID NO:533 shown in FIG. 533.

[0590] FIG. 535 shows a nucleotide sequence (SEQ ID NO:535) of a native sequence PRO83639 cDNA, wherein SEQ ID NO:535 is a clone designated herein as “DNA327638”.

[0591] FIG. 536 shows the amino acid sequence (SEQ ID NO:536) derived from the coding sequence of SEQ ID NO:535 shown in FIG. 535.

[0592] FIG. 537 shows a nucleotide sequence (SEQ ID NO:537) of a native sequence PRO69600 cDNA, wherein SEQ ID NO:537 is a clone designated herein as “DNA287337”.

[0593] FIG. 538 shows the amino acid sequence (SEQ ID NO:538) derived from the coding sequence of SEQ ID NO:537 shown in FIG. 537.

[0594] FIG. 539 shows a nucleotide sequence (SEQ ID NO:539) of a native sequence PRO36650 cDNA, wherein SEQ ID NO:539 is a clone designated herein as “DNA226187”.

[0595] FIG. 540 shows the amino acid sequence (SEQ ID NO:540) derived from the coding sequence of SEQ ID NO:539 shown in FIG. 539.

[0596] FIG. 541 shows a nucleotide sequence (SEQ ID NO:541) of a native sequence PRO21885 cDNA, wherein SEQ ID NO:541 is a clone designated herein as “DNA188355”.

[0597] FIG. 542 shows the amino acid sequence (SEQ ID NO:542) derived from the coding sequence of SEQ ID NO:541 shown in FIG. 541.

[0598] FIG. 543 shows a nucleotide sequence (SEQ ID NO:543) of a native sequence PRO69503 cDNA, wherein SEQ ID NO:543 is a clone designated herein as “DNA287224”.

[0599] FIG. 544 shows the amino acid sequence (SEQ ID NO:544) derived from the coding sequence of SEQ ID NO:543 shown in FIG. 543.

[0600] FIG. 545 shows a nucleotide sequence (SEQ ID NO:545) of a native sequence PRO83640 cDNA, wherein SEQ ID NO:545 is a clone designated herein as “DNA327639”.

[0601] FIG. 546 shows the amino acid sequence (SEQ ID NO:546) derived from the coding sequence of SEQ ID NO:545 shown in FIG. 545.

[0602] FIG. 547 shows a nucleotide sequence (SEQ ID NO:547) of a native sequence PRO83641 cDNA, wherein SEQ ID NO:547 is a clone designated herein as “DNA327640”.

[0603] FIG. 548 shows the amino acid sequence (SEQ ID NO:548) derived from the coding sequence of SEQ ID NO:547 shown in FIG. 547.

[0604] FIG. 549 shows a nucleotide sequence (SEQ ID NO:549) of a native sequence PRO83642 cDNA, wherein SEQ ID NO:549 is a clone designated herein as “DNA327641”.

[0605] FIG. 550 shows the amino acid sequence (SEQ ID NO:550) derived from the coding sequence of SEQ ID NO:549 shown in FIG. 549.

[0606] FIG. 551 shows a nucleotide sequence (SEQ ID NO:551) of a native sequence PRO83643 cDNA, wherein SEQ ID NO:551 is a clone designated herein as “DNA327642”.

[0607] FIG. 552 shows the amino acid sequence (SEQ ID NO:552) derived from the coding sequence of SEQ ID NO:551 shown in FIG. 551.

[0608] FIG. 553 shows a nucleotide sequence (SEQ ID NO:553) of a native sequence PRO51301 cDNA, wherein SEQ ID NO:553 is a clone designated herein as “DNA256257”.

[0609] FIG. 554 shows the amino acid sequence (SEQ ID NO:554) derived from the coding sequence of SEQ ID NO:553 shown in FIG. 553.

[0610] FIG. 555A-B shows a nucleotide sequence (SEQ ID NO:555) of a native sequence PRO83644 cDNA, wherein SEQ ID NO:555 is a clone designated herein as “DNA327643”.

[0611] FIG. 556 shows the amino acid sequence (SEQ ID NO:556) derived from the coding sequence of SEQ ID NO:555 shown in FIG. 555A-B.

[0612] FIG. 557 shows a nucleotide sequence (SEQ ID NO:557) of a native sequence PRO2267 cDNA, wherein SEQ ID NO:557 is a clone designated herein as “DNA88281”.

[0613] FIG. 558 shows the amino acid sequence (SEQ ID NO:558) derived from the coding sequence of SEQ ID NO:557 shown in FIG. 557.

[0614] FIG. 559 shows a nucleotide sequence (SEQ ID NO:559) of a native sequence PRO81000 cDNA, wherein SEQ ID NO:559 is a clone designated herein as “DNA324324”.

[0615] FIG. 560 shows the amino acid sequence (SEQ ID NO:560) derived from the coding sequence of SEQ ID NO:559 shown in FIG. 559.

[0616] FIG. 561 shows a nucleotide sequence (SEQ ID NO:561) of a native sequence PRO69582 cDNA, wherein SEQ ID NO:561 is a clone designated herein as “DNA287317”.

[0617] FIG. 562 shows the amino acid sequence (SEQ ID NO:562) derived from the coding sequence of SEQ ID NO:561 shown in FIG. 561.

[0618] FIG. 563 shows a nucleotide sequence (SEQ ID NO:563) of a native sequence PRO83645 cDNA, wherein SEQ ID NO:563 is a clone designated herein as “DNA327644”.

[0619] FIG. 564 shows the amino acid sequence (SEQ ID NO:564) derived from the coding sequence of SEQ ID NO:563 shown in FIG. 563.

[0620] FIG. 565 shows a nucleotide sequence (SEQ ID NO:565) of a native sequence PRO2715 cDNA, wherein SEQ ID NO:565 is a clone designated herein as “DNA88248”.

[0621] FIG. 566 shows the amino acid sequence (SEQ ID NO:566) derived from the coding sequence of SEQ ID NO:565 shown in FIG. 565.

[0622] FIG. 567 shows a nucleotide sequence (SEQ ID NO:567) of a native sequence PRO83646 cDNA, wherein SEQ ID NO:567 is a clone designated herein as “DNA327645”.

[0623] FIG. 568 shows the amino acid sequence (SEQ ID NO:568) derived from the coding sequence of SEQ ID NO:567 shown in FIG. 567.

[0624] FIG. 569 shows a nucleotide sequence (SEQ ID NO:569) of a native sequence PRO83647 cDNA, wherein SEQ ID NO:569 is a clone designated herein as “DNA327646”.

[0625] FIG. 570 shows the amino acid sequence (SEQ ID NO:570) derived from the coding sequence of SEQ ID NO:569 shown in FIG. 569.

[0626] FIG. 571A-B shows a nucleotide sequence (SEQ ID NO:571) of a native sequence PRO12449 cDNA, wherein SEQ ID NO:571 is a clone designated herein as “DNA226859”.

[0627] FIG. 572 shows the amino acid sequence (SEQ ID NO:572) derived from the coding sequence of SEQ ID NO:571 shown in FIG. 571A-B.

[0628] FIG. 573 shows a nucleotide sequence (SEQ ID NO:573) of a native sequence PRO36372 cDNA, wherein SEQ ID NO:573 is a clone designated herein as “DNA225909”.

[0629] FIG. 574 shows the amino acid sequence (SEQ ID NO:574) derived from the coding sequence of SEQ ID NO:573 shown in FIG. 573.

[0630] FIG. 575 shows a nucleotide sequence (SEQ ID NO:575) of a native sequence PRO2447 cDNA, wherein SEQ ID NO:575 is a clone designated herein as “DNA327647”.

[0631] FIG. 576 shows the amino acid sequence (SEQ ID NO:576) derived from the coding sequence of SEQ ID NO:575 shown in FIG. 575.

[0632] FIG. 577 shows a nucleotide sequence (SEQ ID NO:577) of a native sequence PRO83648 cDNA, wherein SEQ ID NO:577 is a clone designated herein as “DNA327648”.

[0633] FIG. 578 shows the amino acid sequence (SEQ ID NO:578) derived from the coding sequence of SEQ ID NO:577 shown in FIG. 577.

[0634] FIG. 579A-B shows a nucleotide sequence (SEQ ID NO:579) of a native sequence PRO4673 cDNA, wherein SEQ ID NO:579 is a clone designated herein as “DNA327649”.

[0635] FIG. 580 shows the amino acid sequence (SEQ ID NO:580) derived from the coding sequence of SEQ ID NO:579 shown in FIG. 579A-B.

[0636] FIG. 581 shows a nucleotide sequence (SEQ ID NO:581) of a native sequence PRO12489 cDNA, wherein SEQ ID NO:581 is a clone designated herein as “DNA150830”.

[0637] FIG. 582 shows the amino acid sequence (SEQ ID NO:582) derived from the coding sequence of SEQ ID NO:581 shown in FIG. 581.

[0638] FIG. 583 shows a nucleotide sequence (SEQ ID NO:583) of a native sequence PRO36008 cDNA, wherein SEQ ID NO:583 is a clone designated herein as “DNA327650”.

[0639] FIG. 584 shows the amino acid sequence (SEQ ID NO:584) derived from the coding sequence of SEQ ID NO:583 shown in FIG. 583.

[0640] FIG. 585 shows a nucleotide sequence (SEQ ID NO:585) of a native sequence PRO83649 cDNA, wherein SEQ ID NO:585 is a clone designated herein as “DNA327651”.

[0641] FIG. 586 shows the amino acid sequence (SEQ ID NO:586) derived from the coding sequence of SEQ ID NO:585 shown in FIG. 585.

[0642] FIG. 587 shows a nucleotide sequence (SEQ ID NO:587) of a native sequence PRO70423 cDNA, wherein SEQ ID NO:587 is a clone designated herein as “DNA290279”.

[0643] FIG. 588 shows the amino acid sequence (SEQ ID NO:588) derived from the coding sequence of SEQ ID NO:587 shown in FIG. 587.

[0644] FIG. 589A-B shows a nucleotide sequence (SEQ ID NO:589) of a native sequence PRO50365 cDNA, wherein SEQ ID NO:589 is a clone designated herein as “DNA255292”.

[0645] FIG. 590 shows the amino acid sequence (SEQ ID NO:590) derived from the coding sequence of SEQ ID NO:589 shown in FIG. 589A-B.

[0646] FIG. 591 shows a nucleotide sequence (SEQ ID NO:591) of a native sequence PRO58149 cDNA, wherein SEQ ID NO:591 is a clone designated herein as “DNA269740”.

[0647] FIG. 592 shows the amino acid sequence (SEQ ID NO:592) derived from the coding sequence of SEQ ID NO:591 shown in FIG. 591.

[0648] FIG. 593A-B shows a nucleotide sequence (SEQ ID NO:593) of a native sequence PRO2628 cDNA, wherein SEQ ID NO:593 is a clone designated herein as “DNA327652”.

[0649] FIG. 594 shows the amino acid sequence (SEQ ID NO:594) derived from the coding sequence of SEQ ID NO:593 shown in FIG. 593A-B.

[0650] FIG. 595 shows a nucleotide sequence (SEQ ID NO:595) of a native sequence PRO49580 cDNA, wherein SEQ ID NO:595 is a clone designated herein as “DNA254472”.

[0651] FIG. 596 shows the amino acid sequence (SEQ ID NO:596) derived from the coding sequence of SEQ ID NO:595 shown in FIG. 595.

[0652] FIG. 597 shows a nucleotide sequence (SEQ ID NO:597) of a native sequence PRO59596 cDNA, wherein SEQ ID NO:597 is a clone designated herein as “DNA327653”.

[0653] FIG. 598 shows the amino acid sequence (SEQ ID NO:598) derived from the coding sequence of SEQ ID NO:597 shown in FIG. 597.

[0654] FIG. 599 shows a nucleotide sequence (SEQ ID NO:599) of a native sequence PRO59210 cDNA, wherein SEQ ID NO:599 is a clone designated herein as “DNA270875”.

[0655] FIG. 600 shows the amino acid sequence (SEQ ID NO:600) derived from the coding sequence of SEQ ID NO:599 shown in FIG. 599.

[0656] FIG. 601A-B shows a nucleotide sequence (SEQ ID NO:601) of a native sequence PRO70395 cDNA, wherein SEQ ID NO:601 is a clone designated herein as “DNA290265”.

[0657] FIG. 602 shows the amino acid sequence (SEQ ID NO:602) derived from the coding sequence of SEQ ID NO:601 shown in FIG. 601A-B.

[0658] FIG. 603 shows a nucleotide sequence (SEQ ID NO:603) of a native sequence PRO58792 cDNA, wherein SEQ ID NO:603 is a clone designated herein as “DNA27041 1”.

[0659] FIG. 604 shows the amino acid sequence (SEQ ID NO:604) derived from the coding sequence of SEQ ID NO:603 shown in FIG. 603.

[0660] FIG. 605 shows a nucleotide sequence (SEQ ID NO:605) of a native sequence PRO83650 cDNA, wherein SEQ ID NO:605 is a clone designated herein as “DNA327654”.

[0661] FIG. 606 shows the amino acid sequence (SEQ ID NO:606) derived from the coding sequence of SEQ ID NO:605 shown in FIG. 605.

[0662] FIG. 607 shows a nucleotide sequence (SEQ ID NO:607) of a native sequence PRO322 cDNA, wherein SEQ ID NO:607 is a clone designated herein as “DNA327655”.

[0663] FIG. 608 shows the amino acid sequence (SEQ ID NO:608) derived from the coding sequence of SEQ ID NO:607 shown in FIG. 607.

[0664] FIG. 609 shows a nucleotide sequence (SEQ ID NO:609) of a native sequence PRO69572 cDNA, wherein SEQ ID NO:609 is a clone designated herein as “DNA287306”.

[0665] FIG. 610 shows the amino acid sequence (SEQ ID NO:610) derived from the coding sequence of SEQ ID NO:609 shown in FIG. 609.

[0666] FIG. 611 shows a nucleotide sequence (SEQ ID NO:611) of a native sequence PRO36117 cDNA, wherein SEQ ID NO:611 is a clone designated herein as “DNA327656”.

[0667] FIG. 612 shows the amino acid sequence (SEQ ID NO:612) derived from the coding sequence of SEQ ID NO:611 shown in FIG. 611.

[0668] FIG. 613 shows a nucleotide sequence (SEQ ID NO:613) of a native sequence PRO59399 cDNA, wherein SEQ ID NO:613 is a clone designated herein as “DNA271075”.

[0669] FIG. 614 shows the amino acid sequence (SEQ ID NO:614) derived from the coding sequence of SEQ ID NO:613 shown in FIG. 613.

[0670] FIG. 615A-B shows a nucleotide sequence (SEQ ID NO:615) of a native sequence PRO38147 cDNA, wherein SEQ ID NO:615 is a clone designated herein as “DNA327657”.

[0671] FIG. 616 shows the amino acid sequence (SEQ ID NO:616) derived from the coding sequence of SEQ ID NO:615 shown in FIG. 615.

[0672] FIG. 617 shows a nucleotide sequence (SEQ ID NO:617) of a native sequence PRO83651 cDNA, wherein SEQ ID NO:617 is a clone designated herein as “DNA327658”.

[0673] FIG. 618 shows the amino acid sequence (SEQ ID NO:618) derived from the coding sequence of SEQ ID NO:617 shown in FIG. 617.

[0674] FIG. 619 shows a nucleotide sequence (SEQ ID NO:619) of a native sequence PRO36302 cDNA, wherein SEQ ID NO:619 is a clone designated herein as “DNA225839”.

[0675] FIG. 620 shows the amino acid sequence (SEQ ID NO:620) derived from the coding sequence of SEQ ID NO:619 shown in FIG. 619.

[0676] FIG. 621 shows a nucleotide sequence (SEQ ID NO:621) of a native sequence PRO70443 cDNA, wherein SEQ ID NO:621 is a clone designated herein as “DNA327659”.

[0677] FIG. 622 shows the amino acid sequence (SEQ ID NO:622) derived from the coding sequence of SEQ ID NO:621 shown in FIG. 621.

[0678] FIG. 623 shows a nucleotide sequence (SEQ ID NO:623) of a native sequence PRO2063 cDNA, wherein SEQ ID NO:623 is a clone designated herein as “DNA83055”.

[0679] FIG. 624 shows the amino acid sequence (SEQ ID NO:624) derived from the coding sequence of SEQ ID NO:623 shown in FIG. 623.

[0680] FIG. 625 shows a nucleotide sequence (SEQ ID NO:625) of a native sequence PRO327 cDNA, wherein SEQ ID NO:625 is a clone designated herein as “DNA327660”.

[0681] FIG. 626 shows the amino acid sequence (SEQ ID NO:626) derived from the coding sequence of SEQ ID NO:625 shown in FIG. 625.

[0682] FIG. 627 shows a nucleotide sequence (SEQ ID NO:627) of a native sequence PRO83652 cDNA, wherein SEQ ID NO:627 is a clone designated herein as “DNA327661”.

[0683] FIG. 628 shows the amino acid sequence (SEQ ID NO:628) derived from the coding sequence of SEQ ID NO:627 shown in FIG. 627.

[0684] FIG. 629 shows a nucleotide sequence (SEQ ID NO:629) of a native sequence PRO36992 cDNA, wherein SEQ ID NO:629 is a clone designated herein as “DNA299878”.

[0685] FIG. 630 shows the amino acid sequence (SEQ ID NO:630) derived from the coding sequence of SEQ ID NO:629 shown in FIG. 629.

[0686] FIG. 631 shows a nucleotide sequence (SEQ ID NO:631) of a native sequence PRO2018 cDNA, wherein SEQ ID NO:631 is a clone designated herein as “DNA75863”.

[0687] FIG. 632 shows the amino acid sequence (SEQ ID NO:632) derived from the coding sequence of SEQ ID NO:631 shown in FIG. 631.

[0688] FIG. 633 shows a nucleotide sequence (SEQ ID NO:633) of a native sequence PRO38396 cDNA, wherein SEQ ID NO:633 is a clone designated herein as “DNA227933”.

[0689] FIG. 634 shows the amino acid sequence (SEQ ID NO:634) derived from the coding sequence of SEQ ID NO:633 shown in FIG. 633.

[0690] FIG. 635A-B shows a nucleotide sequence (SEQ ID NO:635) of a native sequence cDNA, wherein SEQ ID NO:635 is a clone designated herein as “DNA327662”.

[0691] FIG. 636 shows a nucleotide sequence (SEQ ID NO:636) of a native sequence PRO37683 cDNA, wherein SEQ ID NO:636 is a clone designated herein as “DNA227220”.

[0692] FIG. 637 shows the amino acid sequence (SEQ ID NO:637) derived from the coding sequence of SEQ ID NO:636 shown in FIG. 636.

[0693] FIG. 638 shows a nucleotide sequence (SEQ ID NO:638) of a native sequence PRO35062 cDNA, wherein SEQ ID NO:638 is a clone designated herein as “DNA213596”.

[0694] FIG. 639 shows the amino acid sequence (SEQ ID NO:639) derived from the coding sequence of SEQ ID NO:638 shown in FIG. 638.

[0695] FIG. 640 shows a nucleotide sequence (SEQ ID NO:640) of a native sequence PRO81618 cDNA, wherein SEQ ID NO:640 is a clone designated herein as “DNA325029”.

[0696] FIG. 641 shows the amino acid sequence (SEQ ID NO:641) derived from the coding sequence of SEQ ID NO:640 shown in FIG. 640.

[0697] FIG. 642 shows a nucleotide sequence (SEQ ID NO:642) of a native sequence PRO83654 cDNA, wherein SEQ ID NO:642 is a clone designated herein as “DNA327663”.

[0698] FIG. 643 shows the amino acid sequence (SEQ ID NO:643) derived from the coding sequence of SEQ ID NO:642 shown in FIG. 642.

[0699] FIG. 644 shows a nucleotide sequence (SEQ ID NO:644) of a native sequence PRO2722 cDNA, wherein SEQ ID NO:644 is a clone designated herein as “DNA327664”.

[0700] FIG. 645 shows the amino acid sequence (SEQ ID NO:645) derived from the coding sequence of SEQ ID NO:644 shown in FIG. 644.

[0701] FIG. 646 shows a nucleotide sequence (SEQ ID NO:646) of a native sequence PRO38104 cDNA, wherein SEQ ID NO:646 is a clone designated herein as “DNA227641”.

[0702] FIG. 647 shows the amino acid sequence (SEQ ID NO:647) derived from the coding sequence of SEQ ID NO:646 shown in FIG. 646.

[0703] FIG. 648 shows a nucleotide sequence (SEQ ID NO:648) of a native sequence PRO83655 cDNA, wherein SEQ ID NO:648 is a clone designated herein as “DNA327665”.

[0704] FIG. 649 shows the amino acid sequence (SEQ ID NO:649) derived from the coding sequence of SEQ ID NO:650 shown in FIG. 650.

[0705] FIG. 650 shows a nucleotide sequence (SEQ ID NO:650) of a native sequence PRO83656 cDNA, wherein SEQ ID NO:650 is a clone designated herein as “DNA327666”.

[0706] FIG. 651 shows the amino acid sequence (SEQ ID NO:651) derived from the coding sequence of SEQ ID NO:650 shown in FIG. 650.

[0707] FIG. 652 shows a nucleotide sequence (SEQ ID NO:652) of a native sequence PRO83135 cDNA, wherein SEQ ID NO:652 is a clone designated herein as “DNA327667”.

[0708] FIG. 653 shows the amino acid sequence (SEQ ID NO:653) derived from the coding sequence of SEQ ID NO:652 shown in FIG. 652.

[0709] FIG. 654 shows a nucleotide sequence (SEQ ID NO:654) of a native sequence PRO83141 cDNA, wherein SEQ ID NO:654 is a clone designated herein as “DNA327668”.

[0710] FIG. 655 shows the amino acid sequence (SEQ ID NO:655) derived from the coding sequence of SEQ ID NO:654 shown in FIG. 654.

[0711] FIG. 656 shows a nucleotide sequence (SEQ ID NO:656) of a native sequence PRO83657 cDNA, wherein SEQ ID NO:656 is a clone designated herein as “DNA327669”.

[0712] FIG. 657 shows the amino acid sequence (SEQ ID NO:657) derived from the coding sequence of SEQ ID NO:656 shown in FIG. 656.

[0713] FIG. 658 shows a nucleotide sequence (SEQ ID NO:658) of a native sequence PRO1288 cDNA, wherein SEQ ID NO:658 is a clone designated herein as “DNA327670”.

[0714] FIG. 659 shows the amino acid sequence (SEQ ID NO:659) derived from the coding sequence of SEQ ID NO:658 shown in FIG. 658.

[0715] FIG. 660 shows a nucleotide sequence (SEQ ID NO:660) of a native sequence PRO83658 cDNA, wherein SEQ ID NO:660 is a clone designated herein as “DNA327671”.

[0716] FIG. 661 shows the amino acid sequence (SEQ ID NO:661) derived from the coding sequence of SEQ ID NO:660 shown in FIG. 660.

[0717] FIG. 662 shows a nucleotide sequence (SEQ ID NO:662) of a native sequence PRO2200 cDNA, wherein SEQ ID NO:662 is a clone designated herein as “DNA88155”.

[0718] FIG. 663 shows the amino acid sequence (SEQ ID NO:663) derived from the coding sequence of SEQ ID NO:662 shown in FIG. 662.

[0719] FIG. 664 shows a nucleotide sequence (SEQ ID NO:664) of a native sequence PRO58669 cDNA, wherein SEQ ID NO:664 is a clone designated herein as “DNA270281”.

[0720] FIG. 665 shows the amino acid sequence (SEQ ID NO:665) derived from the coding sequence of SEQ ID NO:664 shown in FIG. 664.

[0721] FIG. 666 shows a nucleotide sequence (SEQ ID NO:666) of a native sequence PRO83659 cDNA, wherein SEQ ID NO:666 is a clone designated herein as “DNA327672”.

[0722] FIG. 667 shows the amino acid sequence (SEQ ID NO:667) derived from the coding sequence of SEQ ID NO:666 shown in FIG. 666.

[0723] FIG. 668 shows a nucleotide sequence (SEQ ID NO:668) of a native sequence PRO21820 cDNA, wherein SEQ ID NO:668 is a clone designated herein as “DNA188289”.

[0724] FIG. 669 shows the amino acid sequence (SEQ ID NO:669) derived from the coding sequence of SEQ ID NO:668 shown in FIG. 668.

[0725] FIG. 670 shows a nucleotide sequence (SEQ ID NO:670) of a native sequence PRO37994 cDNA, wherein SEQ ID NO:670 is a clone designated herein as “DNA22753 1”.

[0726] FIG. 671 shows the amino acid sequence (SEQ ID NO:671) derived from the coding sequence of SEQ ID NO:670 shown in FIG. 670.

[0727] FIG. 672 shows a nucleotide sequence (SEQ ID NO:672) of a native sequence PRO83660 cDNA, wherein SEQ ID NO:672 is a clone designated herein as “DNA327673”.

[0728] FIG. 673 shows the amino acid sequence (SEQ ID NO:673) derived from the coding sequence of SEQ ID NO:672 shown in FIG. 672.

[0729] FIG. 674A-B shows a nucleotide sequence (SEQ ID NO:674) of a native sequence PRO83661 cDNA, wherein SEQ ID NO:674 is a clone designated herein as “DNA327674”.

[0730] FIG. 675 shows the amino acid sequence (SEQ ID NO:675) derived from the coding sequence of SEQ ID NO:674 shown in FIG. 674A-B.

[0731] FIG. 676 shows a nucleotide sequence (SEQ ID NO:676) of a native sequence PRO83662 cDNA, wherein SEQ ID NO:676 is a clone designated herein as “DNA327675”.

[0732] FIG. 677 shows the amino acid sequence (SEQ ID NO:677) derived from the coding sequence of SEQ ID NO:676 shown in FIG. 676.

[0733] FIG. 678 shows a nucleotide sequence (SEQ ID NO:678) of a native sequence PRO2040 cDNA, wherein SEQ ID NO:678 is a clone designated herein as “DNA327676”.

[0734] FIG. 679 shows the amino acid sequence (SEQ ID NO:679) derived from the coding sequence of SEQ ID NO:678 shown in FIG. 678.

[0735] FIG. 680A-B shows a nucleotide sequence (SEQ ID NO:680) of a native sequence PRO50849 cDNA, wherein SEQ ID NO:680 is a clone designated herein as “DNA255794”.

[0736] FIG. 681 shows the amino acid sequence (SEQ ID NO:681) derived from the coding sequence of SEQ ID NO:680 shown in FIG. 680.

[0737] FIG. 682 shows a nucleotide sequence (SEQ ID NO:682) of a native sequence PRO50985 cDNA, wherein SEQ ID NO:682 is a clone designated herein as “DNA255933”.

[0738] FIG. 683 shows the amino acid sequence (SEQ ID NO:683) derived from the coding sequence of SEQ ID NO:682 shown in FIG. 682.

[0739] FIG. 684 shows a nucleotide sequence (SEQ ID NO:684) of a native sequence PRO50904 cDNA, wherein SEQ ID NO:684 is a clone designated herein as “DNA255850”.

[0740] FIG. 685 shows the amino acid sequence (SEQ ID NO:685) derived from the coding sequence of SEQ ID NO:684 shown in FIG. 684.

[0741] FIG. 686 shows a nucleotide sequence (SEQ ID NO:686) of a native sequence PRO38131 cDNA, wherein SEQ ID NO:686 is a clone designated herein as “DNA227668”.

[0742] FIG. 687 shows the amino acid sequence (SEQ ID NO:687) derived from the coding sequence of SEQ ID NO:686 shown in FIG. 686.

[0743] FIG. 688 shows a nucleotide sequence (SEQ ID NO:688) of a native sequence PRO24015 cDNA, wherein SEQ ID NO:688 is a clone designated herein as “DNA327677”.

[0744] FIG. 689 shows the amino acid sequence (SEQ ID NO:689) derived from the coding sequence of SEQ ID NO:688 shown in FIG. 688.

[0745] FIG. 690 shows a nucleotide sequence (SEQ ID NO:690) of a native sequence PRO35066 cDNA, wherein SEQ ID NO:690 is a clone designated herein as “DNA327678”.

[0746] FIG. 691 shows the amino acid sequence (SEQ ID NO:691) derived from the coding sequence of SEQ ID NO:690 shown in FIG. 690.

[0747] FIG. 692 shows a nucleotide sequence (SEQ ID NO:692) of a native sequence PRO23864 cDNA, wherein SEQ ID NO:692 is a clone designated herein as “DNA194506”.

[0748] FIG. 693 shows the amino acid sequence (SEQ ID NO:693) derived from the coding sequence of SEQ ID NO:692 shown in FIG. 692.

[0749] FIG. 694 shows a nucleotide sequence (SEQ ID NO:694) of a native sequence PRO83663 cDNA, wherein SEQ ID NO:694 is a clone designated herein as “DNA327679”.

[0750] FIG. 695 shows the amino acid sequence (SEQ ID NO:695) derived from the coding sequence of SEQ ID NO:694 shown in FIG. 694.

[0751] FIG. 696 shows a nucleotide sequence (SEQ ID NO:696) of a native sequence PRO83664 cDNA, wherein SEQ ID NO:696 is a clone designated herein as “DNA327680”.

[0752] FIG. 697 shows the amino acid sequence (SEQ ID NO:697) derived from the coding sequence of SEQ ID NO:696 shown in FIG. 696.

[0753] FIG. 698A-C shows a nucleotide sequence (SEQ ID NO:698) of a native sequence PRO83665 cDNA, wherein SEQ ID NO:698 is a clone designated herein as “DNA327681”.

[0754] FIG. 699 shows the amino acid sequence (SEQ ID NO:699) derived from the coding sequence of SEQ ID NO:698 shown in FIG. 698A-C.

[0755] FIG. 700 shows a nucleotide sequence (SEQ ID NO:700) of a native sequence PRO83666 cDNA, wherein SEQ ID NO:700 is a clone designated herein as “DNA327682”.

[0756] FIG. 701 shows the amino acid sequence (SEQ ID NO:701) derived from the coding sequence of SEQ ID NO:700 shown in FIG. 700.

[0757] FIG. 702 shows a nucleotide sequence (SEQ ID NO:702) of a native sequence PRO58590 cDNA, wherein SEQ ID NO:702 is a clone designated herein as “DNA270202”.

[0758] FIG. 703 shows the amino acid sequence (SEQ ID NO:703) derived from the coding sequence of SEQ ID NO:702 shown in FIG. 702.

[0759] FIG. 704 shows a nucleotide sequence (SEQ ID NO:704) of a native sequence PRO83667 cDNA, wherein SEQ ID NO:704 is a clone designated herein as “DNA327683”.

[0760] FIG. 705 shows the amino acid sequence (SEQ ID NO:705) derived from the coding sequence of SEQ ID NO:704 shown in FIG. 704.

[0761] FIG. 706A-B shows a nucleotide sequence (SEQ ID NO:706) of a native sequence PRO83668 cDNA, wherein SEQ ID NO:706 is a clone designated herein as “DNA327684”.

[0762] FIG. 707 shows the amino acid sequence (SEQ ID NO:707) derived from the coding sequence of SEQ ID NO:706 shown in FIG. 706A-B.

[0763] FIG. 708 shows a nucleotide sequence (SEQ ID NO:708) of a native sequence PRO83669 cDNA, wherein SEQ ID NO:708 is a clone designated herein as “DNA327685”.

[0764] FIG. 709 shows the amino acid sequence (SEQ ID NO:709) derived from the coding sequence of SEQ ID NO:708 shown in FIG. 708.

[0765] FIG. 710 shows a nucleotide sequence (SEQ ID NO:710) of a native sequence PRO83670 cDNA, wherein SEQ ID NO:710 is a clone designated herein as “DNA327686”.

[0766] FIG. 711 shows the amino acid sequence (SEQ ID NO:711) derived from the coding sequence of SEQ ID NO:710 shown in FIG. 710.

[0767] FIG. 712 shows a nucleotide sequence (SEQ ID NO:712) of a native sequence PRO83671 cDNA, wherein SEQ ID NO:712 is a clone designated herein as “DNA327687”.

[0768] FIG. 713 shows the amino acid sequence (SEQ ID NO:713) derived from the coding sequence of SEQ ID NO:712 shown in FIG. 712.

[0769] FIG. 714 shows a nucleotide sequence (SEQ ID NO:714) of a native sequence PRO83672 cDNA, wherein SEQ ID NO:714 is a clone designated herein as “DNA327688”.

[0770] FIG. 715 shows the amino acid sequence (SEQ ID NO:715) derived from the coding sequence of SEQ ID NO:714 shown in FIG. 714.

[0771] FIG. 716A-B shows a nucleotide sequence (SEQ ID NO:716) of a native sequence PRO82391 cDNA, wherein SEQ ID NO:716 is a clone designated herein as “DNA325944”.

[0772] FIG. 717 shows the amino acid sequence (SEQ ID NO:717) derived from the coding sequence of SEQ ID NO:716 shown in FIG. 716A-B.

[0773] FIG. 718 shows a nucleotide sequence (SEQ ID NO:718) of a native sequence PRO9824 cDNA, wherein SEQ ID NO:718 is a clone designated herein as “DNA327689”.

[0774] FIG. 719 shows the amino acid sequence (SEQ ID NO:719) derived from the coding sequence of SEQ ID NO:718 shown in FIG. 718.

[0775] FIG. 720 shows a nucleotide sequence (SEQ ID NO:720) of a native sequence PRO83673 cDNA, wherein SEQ ID NO:720 is a clone designated herein as “DNA327690”.

[0776] FIG. 721 shows the amino acid sequence (SEQ ID NO:721) derived from the coding sequence of SEQ ID NO:720 shown in FIG. 720.

[0777] FIG. 722 shows a nucleotide sequence (SEQ ID NO:722) of a native sequence PRO83674 cDNA, wherein SEQ ID NO:722 is a clone designated herein as “DNA327691”.

[0778] FIG. 723 shows the amino acid sequence (SEQ ID NO:723) derived from the coding sequence of SEQ ID NO:722 shown in FIG. 722.

[0779] FIG. 724 shows a nucleotide sequence (SEQ ID NO:724) of a native sequence PRO83675 cDNA, wherein SEQ ID NO:724 is a clone designated herein as “DNA327692”.

[0780] FIG. 725 shows the amino acid sequence (SEQ ID NO:725) derived from the coding sequence of SEQ ID NO:724 shown in FIG. 724.

[0781] FIG. 726A-C shows a nucleotide sequence (SEQ ID NO:726) of a native sequence PRO83676 cDNA, wherein SEQ ID NO:726 is a clone designated herein as “DNA327693”.

[0782] FIG. 727 shows the amino acid sequence (SEQ ID NO:727) derived from the coding sequence of SEQ ID NO:726 shown in FIG. 726A-C.

[0783] FIG. 728A-C shows a nucleotide sequence (SEQ ID NO:728) of a native sequence PRO83677 cDNA, wherein SEQ ID NO:728 is a clone designated herein as “DNA327694”.

[0784] FIG. 729 shows the amino acid sequence (SEQ ID NO:729) derived from the coding sequence of SEQ ID NO:728 shown in FIG. 728A-C.

[0785] FIG. 730A-C shows a nucleotide sequence (SEQ ID NO:730) of a native sequence PRO83678 cDNA, wherein SEQ ID NO:730 is a clone designated herein as “DNA327695”.

[0786] FIG. 731 shows the amino acid sequence (SEQ ID NO:731) derived from the coding sequence of SEQ ID NO:730 shown in FIG. 730A-C.

[0787] FIG. 732A-B shows a nucleotide sequence (SEQ ID NO:732) of a native sequence PRO4870 cDNA, wherein SEQ ID NO:732 is a clone designated herein as “DNA325513”.

[0788] FIG. 733 shows the amino acid sequence (SEQ ID NO:733) derived from the coding sequence of SEQ ID NO:732 shown in FIG. 732A-B.

[0789] FIG. 734 shows a nucleotide sequence (SEQ ID NO:734) of a native sequence PRO83679 cDNA, wherein SEQ ID NO:734 is a clone designated herein as “DNA327696”.

[0790] FIG. 735 shows the amino acid sequence (SEQ ID NO:735) derived from the coding sequence of SEQ ID NO:734 shown in FIG. 734.

[0791] FIG. 736 shows a nucleotide sequence (SEQ ID NO:736) of a native sequence PRO62376 cDNA, wherein SEQ ID NO:736 is a clone designated herein as “DNA274471”.

[0792] FIG. 737 shows the amino acid sequence (SEQ ID NO:737) derived from the coding sequence of SEQ ID NO:736 shown in FIG. 736.

[0793] FIG. 738 shows a nucleotide sequence (SEQ ID NO:738) of a native sequence PRO83680 cDNA, wherein SEQ ID NO:738 is a clone designated herein as “DNA327697”.

[0794] FIG. 739 shows the amino acid sequence (SEQ ID NO:739) derived from the coding sequence of SEQ ID NO:738 shown in FIG. 738.

[0795] FIG. 740 shows a nucleotide sequence (SEQ ID NO:740) of a native sequence PRO83681 cDNA, wherein SEQ ID NO:740 is a clone designated herein as “DNA327698”.

[0796] FIG. 741 shows the amino acid sequence (SEQ ID NO:741) derived from the coding sequence of SEQ ID NO:740 shown in FIG. 740.

[0797] FIG. 742 shows a nucleotide sequence (SEQ ID NO:742) of a native sequence PRO83682 cDNA, wherein SEQ ID NO:742 is a clone designated herein as “DNA327699”.

[0798] FIG. 743 shows the amino acid sequence (SEQ ID NO:743) derived from the coding sequence of SEQ ID NO:742 shown in FIG. 742.

[0799] FIG. 744A-B shows a nucleotide sequence (SEQ ID NO:744) of a native sequence PRO2564 cDNA, wherein SEQ ID NO:744 is a clone designated herein as “DNA8303 1”.

[0800] FIG. 745 shows the amino acid sequence (SEQ ID NO:745) derived from the coding sequence of SEQ ID NO:744 shown in FIG. 744A-B.

[0801] FIG. 746 shows a nucleotide sequence (SEQ ID NO:746) of a native sequence PRO83683 cDNA, wherein SEQ ID NO:746 is a clone designated herein as “DNA327700”.

[0802] FIG. 747 shows the amino acid sequence (SEQ ID NO:747) derived from the coding sequence of SEQ ID NO:746 shown in FIG. 746.

[0803] FIG. 748 shows a nucleotide sequence (SEQ ID NO:748) of a native sequence PRO82667 cDNA, wherein SEQ ID NO:748 is a clone designated herein as “DNA327701”.

[0804] FIG. 749 shows the amino acid sequence (SEQ ID NO:749) derived from the coding sequence of SEQ ID NO:748 shown in FIG. 748.

[0805] FIG. 750 shows a nucleotide sequence (SEQ ID NO:750) of a native sequence PRO83684 cDNA, wherein SEQ ID NO:750 is a clone designated herein as “DNA327702”.

[0806] FIG. 751 shows the amino acid sequence (SEQ ID NO:751) derived from the coding sequence of SEQ ID NO:750 shown in FIG. 750.

[0807] FIG. 752 shows a nucleotide sequence (SEQ ID NO:752) of a native sequence PRO83685 cDNA, wherein SEQ ID NO:752 is a clone designated herein as “DNA327703”.

[0808] FIG. 753 shows the amino acid sequence (SEQ ID NO:753) derived from the coding sequence of SEQ ID NO:752 shown in FIG. 752.

[0809] FIG. 754 shows a nucleotide sequence (SEQ ID NO:754) of a native sequence PRO58048 cDNA, wherein SEQ ID NO:754 is a clone designated herein as “DNA269636”.

[0810] FIG. 755 shows the amino acid sequence (SEQ ID NO:755) derived from the coding sequence of SEQ ID NO:754 shown in FIG. 754.

[0811] FIG. 756A-B shows a nucleotide sequence (SEQ ID NO:756) of a native sequence PRO81999 cDNA, wherein SEQ ID NO:756 is a clone designated herein as “DNA325478”.

[0812] FIG. 757 shows the amino acid sequence (SEQ ID NO:757) derived from the coding sequence of SEQ ID NO:756 shown in FIG. 756A-B.

[0813] FIG. 758 shows a nucleotide sequence (SEQ ID NO:758) of a native sequence PRO83686 cDNA, wherein SEQ ID NO:758 is a clone designated herein as “DNA327704”.

[0814] FIG. 759 shows the amino acid sequence (SEQ ID NO:759) derived from the coding sequence of SEQ ID NO:758 shown in FIG. 758.

[0815] FIG. 760 shows a nucleotide sequence (SEQ ID NO:760) of a native sequence PRO83687 cDNA, wherein SEQ ID NO:760 is a clone designated herein as “DNA327705”.

[0816] FIG. 761 shows the amino acid sequence (SEQ ID NO:761) derived from the coding sequence of SEQ ID NO:760 shown in FIG. 760.

[0817] FIG. 762 shows a nucleotide sequence (SEQ ID NO:762) of a native sequence PRO83688 cDNA, wherein SEQ ID NO:762 is a clone designated herein as “DNA327706”.

[0818] FIG. 763 shows the amino acid sequence (SEQ ID NO:763) derived from the coding sequence of SEQ ID NO:762 shown in FIG. 762.

[0819] FIG. 764 shows a nucleotide sequence (SEQ ID NO:764) of a native sequence PRO37752 cDNA, wherein SEQ ID NO:764 is a clone designated herein as “DNA227289”.

[0820] FIG. 765 shows the amino acid sequence (SEQ ID NO:765) derived from the coding sequence of SEQ ID NO:764 shown in FIG. 764.

[0821] FIG. 766 shows a nucleotide sequence (SEQ ID NO:766) of a native sequence PRO83689 cDNA, wherein SEQ ID NO:766 is a clone designated herein as “DNA327707”.

[0822] FIG. 767 shows the amino acid sequence (SEQ ID NO:767) derived from the coding sequence of SEQ ID NO:766 shown in FIG. 766.

[0823] FIG. 768 shows a nucleotide sequence (SEQ ID NO:768) of a native sequence cDNA, wherein SEQ ID NO:768 is a clone designated herein as “DNA327708”.

[0824] FIG. 769 shows a nucleotide sequence (SEQ ID NO:769) of a native sequence PRO21716 cDNA, wherein SEQ ID NO:769 is a clone designated herein as “DNA188204”.

[0825] FIG. 770 shows the amino acid sequence (SEQ ID NO:770) derived from the coding sequence of SEQ ID NO:769 shown in FIG. 769.

[0826] FIG. 771 shows a nucleotide sequence (SEQ ID NO:771) of a native sequence PRO83690 cDNA, wherein SEQ ID NO:771 is a clone designated herein as “DNA327709”.

[0827] FIG. 772 shows the amino acid sequence (SEQ ID NO:772) derived from the coding sequence of SEQ ID NO:771 shown in FIG. 771.

[0828] FIG. 773 shows a nucleotide sequence (SEQ ID NO:773) of a native sequence PRO81730 cDNA, wherein SEQ ID NO:773 is a clone designated herein as “DNA325163”.

[0829] FIG. 774 shows the amino acid sequence (SEQ ID NO:774) derived from the coding sequence of SEQ ID NO:773 shown in FIG. 773.

[0830] FIG. 775 shows a nucleotide sequence (SEQ ID NO:775) of a native sequence PRO83691 cDNA, wherein SEQ ID NO:775 is a clone designated herein as “DNA327710”.

[0831] FIG. 776 shows the amino acid sequence (SEQ ID NO:776) derived from the coding sequence of SEQ ID NO:775 shown in FIG. 775.

[0832] FIG. 777 shows a nucleotide sequence (SEQ ID NO:777) of a native sequence PRO83692 cDNA, wherein SEQ ID NO:777 is a clone designated herein as “DNA32771 1”.

[0833] FIG. 778 shows the amino acid sequence (SEQ ID NO:778) derived from the coding sequence of SEQ ID NO:777 shown in FIG. 777.

[0834] FIG. 779 shows a nucleotide sequence (SEQ ID NO:779) of a native sequence PRO11113 cDNA, wherein SEQ ID NO:779 is a clone designated herein as “DNA327712”.

[0835] FIG. 780 shows the amino acid sequence (SEQ ID NO:780) derived from the coding sequence of SEQ ID NO:779 shown in FIG. 779.

[0836] FIG. 781 shows a nucleotide sequence (SEQ ID NO:781) of a native sequence PRO37975 cDNA, wherein SEQ ID NO:781 is a clone designated herein as “DNA327713”.

[0837] FIG. 782 shows the amino acid sequence (SEQ ID NO:782) derived from the coding sequence of SEQ ID NO:781 shown in FIG. 781.

[0838] FIG. 783 shows a nucleotide sequence (SEQ ID NO:783) of a native sequence PRO81832 cDNA, wherein SEQ ID NO:783 is a clone designated herein as “DNA325285”.

[0839] FIG. 784 shows the amino acid sequence (SEQ ID NO:784) derived from the coding sequence of SEQ ID NO:783 shown in Figure.

[0840] FIG. 785A-B shows a nucleotide sequence (SEQ ID NO:785) of a native sequence PRO83693 cDNA, wherein SEQ ID NO:785 is a clone designated herein as “DNA327714”.

[0841] FIG. 786 shows the amino acid sequence (SEQ ID NO:786) derived from the coding sequence of SEQ ID NO:785 shown in FIG. 785.

[0842] FIG. 787 shows a nucleotide sequence (SEQ ID NO:787) of a native sequence PRO83694 cDNA, wherein SEQ ID NO:787 is a clone designated herein as “DNA327715”.

[0843] FIG. 788 shows the amino acid sequence (SEQ ID NO:788) derived from the coding sequence of SEQ ID NO:787 shown in FIG. 787.

[0844] FIG. 789 shows a nucleotide sequence (SEQ ID NO:789) of a native sequence PRO82674 cDNA, wherein SEQ ID NO:789 is a clone designated herein as “DNA326267”.

[0845] FIG. 790 shows the amino acid sequence (SEQ ID NO:790) derived from the coding sequence of SEQ ID NO:789 shown in FIG. 789.

[0846] FIG. 791 shows a nucleotide sequence (SEQ ID NO:791) of a native sequence PRO4766 cDNA, wherein SEQ ID NO:791 is a clone designated herein as “DNA103439”.

[0847] FIG. 792 shows the amino acid sequence (SEQ ID NO:792) derived from the coding sequence of SEQ ID NO:791 shown in FIG. 791.

[0848] FIG. 793 shows a nucleotide sequence (SEQ ID NO:793) of a native sequence PRO37946 cDNA, wherein SEQ ID NO:793 is a clone designated herein as “DNA227483”.

[0849] FIG. 794 shows the amino acid sequence (SEQ ID NO:794) derived from the coding sequence of SEQ ID NO:793 shown in FIG. 793.

[0850] FIG. 795 shows a nucleotide sequence (SEQ ID NO:795) of a native sequence PRO61496 cDNA, wherein SEQ ID NO:795 is a clone designated herein as “DNA273515”.

[0851] FIG. 796 shows the amino acid sequence (SEQ ID NO:796) derived from the coding sequence of SEQ ID NO:795 shown in FIG. 795.

[0852] FIG. 797 shows a nucleotide sequence (SEQ ID NO:797) of a native sequence PRO83695 cDNA, wherein SEQ ID NO:797 is a clone designated herein as “DNA327716”.

[0853] FIG. 798 shows the amino acid sequence (SEQ ID NO:798) derived from the coding sequence of SEQ ID NO:797 shown in FIG. 797.

[0854] FIG. 799 shows a nucleotide sequence (SEQ ID NO:799) of a native sequence PRO62702 cDNA, wherein SEQ ID NO:799 is a clone designated herein as “DNA274969”.

[0855] FIG. 800 shows the amino acid sequence (SEQ ID NO:800) derived from the coding sequence of SEQ ID NO:799 shown in FIG. 799.

[0856] FIG. 801 shows a nucleotide sequence (SEQ ID NO:801) of a native sequence PRO83696 cDNA, wherein SEQ ID NO:801 is a clone designated herein as “DNA327717”.

[0857] FIG. 802 shows the amino acid sequence (SEQ ID NO:802) derived from the coding sequence of SEQ ID NO:801 shown in FIG. 801.

[0858] FIG. 803 shows a nucleotide sequence (SEQ ID NO:803) of a native sequence cDNA, wherein SEQ ID NO:803 is a clone designated herein as “DNA274406”.

[0859] FIG. 804 shows a nucleotide sequence (SEQ ID NO:804) of a native sequence PRO83697 cDNA, wherein SEQ ID NO:804 is a clone designated herein as “DNA327718”.

[0860] FIG. 805 shows the amino acid sequence (SEQ ID NO:805) derived from the coding sequence of SEQ ID NO:804 shown in FIG. 804.

[0861] FIG. 806 shows a nucleotide sequence (SEQ ID NO:806) of a native sequence PRO58042 cDNA, wherein SEQ ID NO:806 is a clone designated herein as “DNA269630”.

[0862] FIG. 807 shows the amino acid sequence (SEQ ID NO:807) derived from the coding sequence of SEQ ID NO:806 shown in FIG. 806.

[0863] FIG. 808 shows a nucleotide sequence (SEQ ID NO:808) of a native sequence PRO83698 cDNA, wherein SEQ ID NO:808 is a clone designated herein as “DNA327719”.

[0864] FIG. 809 shows the amino acid sequence (SEQ ID NO:809) derived from the coding sequence of SEQ ID NO:808 shown in FIG. 808.

[0865] FIG. 810 shows a nucleotide sequence (SEQ ID NO:810) of a native sequence PRO83699 cDNA, wherein SEQ ID NO:810 is a clone designated herein as “DNA327720”.

[0866] FIG. 811 shows the amino acid sequence (SEQ ID NO:811) derived from the coding sequence of SEQ ID NO:810 shown in FIG. 810.

[0867] FIG. 812 shows a nucleotide sequence (SEQ ID NO:812) of a native sequence PRO81429 cDNA, wherein SEQ ID NO:812 is a clone designated herein as “DNA324816”.

[0868] FIG. 813 shows the amino acid sequence (SEQ ID NO:813) derived from the coding sequence of SEQ ID NO:812 shown in FIG. 812.

[0869] FIG. 814 shows a nucleotide sequence (SEQ ID NO:814) of a native sequence PRO83700 cDNA, wherein SEQ ID NO:814 is a clone designated herein as “DNA327721”.

[0870] FIG. 815 shows the amino acid sequence (SEQ ID NO:815) derived from the coding sequence of SEQ ID NO:814 shown in FIG. 814.

[0871] FIG. 816 shows a nucleotide sequence (SEQ ID NO:816) of a native sequence PRO36415 cDNA, wherein SEQ ID NO:816 is a clone designated herein as “DNA225952”.

[0872] FIG. 817 shows the amino acid sequence (SEQ ID NO:817) derived from the coding sequence of SEQ ID NO:816 shown in FIG. 816.

[0873] FIG. 818 shows a nucleotide sequence (SEQ ID NO:818) of a native sequence PRO83701 cDNA, wherein SEQ ID NO:818 is a clone designated herein as “DNA327722”.

[0874] FIG. 819 shows the amino acid sequence (SEQ ID NO:819) derived from the coding sequence of SEQ ID NO:818 shown in FIG. 818.

[0875] FIG. 820 shows a nucleotide sequence (SEQ ID NO:820) of a native sequence PRO61971 cDNA, wherein SEQ ID NO:820 is a clone designated herein as “DNA274027”.

[0876] FIG. 821 shows the amino acid sequence (SEQ ID NO:821) derived from the coding sequence of SEQ ID NO:820 shown in FIG. 820.

[0877] FIG. 822 shows a nucleotide sequence (SEQ ID NO:822) of a native sequence PRO83702 cDNA, wherein SEQ ID NO:822 is a clone designated herein as “DNA327723”.

[0878] FIG. 823 shows the amino acid sequence (SEQ ID NO:823) derived from the coding sequence of SEQ ID NO:822 shown in FIG. 822.

[0879] FIG. 824 shows a nucleotide sequence (SEQ ID NO:824) of a native sequence cDNA, wherein SEQ ID NO:824 is a clone designated herein as “DNA327724”.

[0880] FIG. 825 shows a nucleotide sequence (SEQ ID NO:825) of a native sequence PRO59053 cDNA, wherein SEQ ID NO:825 is a clone designated herein as “DNA270689”.

[0881] FIG. 826 shows the amino acid sequence (SEQ ID NO:826) derived from the coding sequence of SEQ ID NO:825 shown in FIG. 825.

[0882] FIG. 827 shows a nucleotide sequence (SEQ ID NO:827) of a native sequence PRO83703 cDNA, wherein SEQ ID NO:827 is a clone designated herein as “DNA327725”.

[0883] FIG. 828 shows the amino acid sequence (SEQ ID NO:828) derived from the coding sequence of SEQ ID NO:827 shown in FIG. 827.

[0884] FIG. 829A-B shows a nucleotide sequence (SEQ ID NO:829) of a native sequence PRO83704 cDNA, wherein SEQ ID NO:829 is a clone designated herein as “DNA327726”.

[0885] FIG. 830 shows the amino acid sequence (SEQ ID NO:830) derived from the coding sequence of SEQ ID NO:829 shown in FIG. 829A-B.

[0886] FIG. 831 shows a nucleotide sequence (SEQ ID NO:831) of a native sequence PRO83705 cDNA, wherein SEQ ID NO:831 is a clone designated herein as “DNA327727”.

[0887] FIG. 832 shows the amino acid sequence (SEQ ID NO:832) derived from the coding sequence of SEQ ID NO:831 shown in FIG. 831.

[0888] FIG. 833 shows a nucleotide sequence (SEQ ID NO:833) of a native sequence PRO4348 cDNA, wherein SEQ ID NO:833 is a clone designated herein as “DNA327728”.

[0889] FIG. 834 shows the amino acid sequence (SEQ ID NO:834) derived from the coding sequence of SEQ ID NO:833 shown in FIG. 833.

[0890] FIG. 835 shows a nucleotide sequence (SEQ ID NO:835) of a native sequence PRO36908 cDNA, wherein SEQ ID NO:835 is a clone designated herein as “DNA226445”.

[0891] FIG. 836 shows the amino acid sequence (SEQ ID NO:836) derived from the coding sequence of SEQ ID NO:835 shown in FIG. 835.

[0892] FIG. 837 shows a nucleotide sequence (SEQ ID NO:837) of a native sequence PRO62893 cDNA, wherein SEQ ID NO:837 is a clone designated herein as “DNA275195”.

[0893] FIG. 838 shows the amino acid sequence (SEQ ID NO:838) derived from the coding sequence of SEQ ID NO:837 shown in FIG. 837.

[0894] FIG. 839 shows a nucleotide sequence (SEQ ID NO:839) of a native sequence PRO58354 cDNA, wherein SEQ ID NO:839 is a clone designated herein as “DNA327729”.

[0895] FIG. 840 shows the amino acid sequence (SEQ ID NO:840) derived from the coding sequence of SEQ ID NO:839 shown in FIG. 839.

[0896] FIG. 841 shows a nucleotide sequence (SEQ ID NO:841) of a native sequence PRO83706 cDNA, wherein SEQ ID NO:841 is a clone designated herein as “DNA327730”.

[0897] FIG. 842 shows the amino acid sequence (SEQ ID NO:842) derived from the coding sequence of SEQ ID NO:841 shown in FIG. 841.

[0898] FIG. 843 shows a nucleotide sequence (SEQ ID NO:843) of a native sequence PRO83707 cDNA, wherein SEQ ID NO:843 is a clone designated herein as “DNA32773 1”.

[0899] FIG. 844 shows the amino acid sequence (SEQ ID NO:844) derived from the coding sequence of SEQ ID NO:843 shown in FIG. 843.

[0900] FIG. 845 shows a nucleotide sequence (SEQ ID NO:845) of a native sequence PRO61801 cDNA, wherein SEQ ID NO:845 is a clone designated herein as “DNA327732”.

[0901] FIG. 846 shows the amino acid sequence (SEQ ID NO:846) derived from the coding sequence of SEQ ID NO:845 shown in FIG. 845.

[0902] FIG. 847A-B shows a nucleotide sequence (SEQ ID NO:847) of a native sequence PRO83708 cDNA, wherein SEQ ID NO:847 is a clone designated herein as “DNA327733”.

[0903] FIG. 848 shows the amino acid sequence (SEQ ID NO:848) derived from the coding sequence of SEQ ID NO:847 shown in FIG. 847.

[0904] FIG. 849 shows a nucleotide sequence (SEQ ID NO:849) of a native sequence PRO83709 cDNA, wherein SEQ ID NO:849 is a clone designated herein as “DNA327734”.

[0905] FIG. 850 shows the amino acid sequence (SEQ ID NO:850) derived from the coding sequence of SEQ ID NO:849 shown in FIG. 849.

[0906] FIG. 851 shows a nucleotide sequence (SEQ ID NO:851) of a native sequence PRO83710 cDNA, wherein SEQ ID NO:851 is a clone designated herein as “DNA327735”.

[0907] FIG. 852 shows the amino acid sequence (SEQ ID NO:852) derived from the coding sequence of SEQ ID NO:851 shown in FIG. 851.

[0908] FIG. 853 shows a nucleotide sequence (SEQ ID NO:853) of a native sequence PRO70858 cDNA, wherein SEQ ID NO:853 is a clone designated herein as “DNA299884”.

[0909] FIG. 854 shows the amino acid sequence (SEQ ID NO:854) derived from the coding sequence of SEQ ID NO:853 shown in FIG. 853.

[0910] FIG. 855 shows a nucleotide sequence (SEQ ID NO:855) of a native sequence PRO2601 cDNA, wherein SEQ ID NO:855 is a clone designated herein as “DNA83128”.

[0911] FIG. 856 shows the amino acid sequence (SEQ ID NO:856) derived from the coding sequence of SEQ ID NO:855 shown in FIG. 855.

[0912] FIG. 857 shows a nucleotide sequence (SEQ ID NO:857) of a native sequence PRO83711 cDNA, wherein SEQ ID NO:857 is a clone designated herein as “DNA327736”.

[0913] FIG. 858 shows the amino acid sequence (SEQ ID NO:858) derived from the coding sequence of SEQ ID NO:857 shown in FIG. 857.

[0914] FIG. 859 shows a nucleotide sequence (SEQ ID NO:859) of a native sequence PRO83712 cDNA, wherein SEQ ID NO:859 is a clone designated herein as “DNA327737”.

[0915] FIG. 860 shows the amino acid sequence (SEQ ID NO:860) derived from the coding sequence of SEQ ID NO:859 shown in FIG. 859.

[0916] FIG. 861 shows a nucleotide sequence (SEQ ID NO:861) of a native sequence PRO83713 cDNA, wherein SEQ ID NO:861 is a clone designated herein as “DNA327738”.

[0917] FIG. 862 shows the amino acid sequence (SEQ ID NO:862) derived from the coding sequence of SEQ ID NO:861 shown in FIG. 861.

[0918] FIG. 863 shows a nucleotide sequence (SEQ ID NO:863) of a native sequence PRO83714 cDNA, wherein SEQ ID NO:863 is a clone designated herein as “DNA327739”.

[0919] FIG. 864 shows the amino acid sequence (SEQ ID NO:864) derived from the coding sequence of SEQ ID NO:863 shown in FIG. 863.

[0920] FIG. 865 shows a nucleotide sequence (SEQ ID NO:865) of a native sequence PRO1787 cDNA, wherein SEQ ID NO:865 is a clone designated herein as “DNA327740”.

[0921] FIG. 866 shows the amino acid sequence (SEQ ID NO:866) derived from the coding sequence of SEQ ID NO:865 shown in FIG. 865.

[0922] FIG. 867 shows a nucleotide sequence (SEQ ID NO:867) of a native sequence PRO83715 cDNA, wherein SEQ ID NO:867 is a clone designated herein as “DNA327741”.

[0923] FIG. 868 shows the amino acid sequence (SEQ ID NO:868) derived from the coding sequence of SEQ ID NO:867 shown in FIG. 867.

[0924] FIG. 869 shows a nucleotide sequence (SEQ ID NO:869) of a native sequence PRO58969 cDNA, wherein SEQ ID NO:869 is a clone designated herein as “DNA270597”.

[0925] FIG. 870 shows the amino acid sequence (SEQ ID NO:870) derived from the coding sequence of SEQ ID NO:869 shown in FIG. 869.

[0926] FIG. 871A-D shows a nucleotide sequence (SEQ ID NO:871) of a native sequence PRO83716 cDNA, wherein SEQ ID NO:871 is a clone designated herein as “DNA327742”.

[0927] FIG. 872A-B shows the amino acid sequence (SEQ ID NO:872) derived from the coding sequence of SEQ ID NO:871 shown in FIG. 871A-D.

[0928] FIG. 873 shows a nucleotide sequence (SEQ ID NO:873) of a native sequence PRO83717 cDNA, wherein SEQ ID NO:873 is a clone designated herein as “DNA327743”.

[0929] FIG. 874 shows the amino acid sequence (SEQ ID NO:874) derived from the coding sequence of SEQ ID NO:873 shown in FIG. 873.

[0930] FIG. 875 shows a nucleotide sequence (SEQ ID NO:875) of a native sequence PRO60945 cDNA, wherein SEQ ID NO:875 is a clone designated herein as “DNA326821”.

[0931] FIG. 876 shows the amino acid sequence (SEQ ID NO:876) derived from the coding sequence of SEQ ID NO:875 shown in FIG. 875.

[0932] FIG. 877 shows a nucleotide sequence (SEQ ID NO:877) of a native sequence PRO71063 cDNA, wherein SEQ ID NO:877 is a clone designated herein as “DNA304499”.

[0933] FIG. 878 shows the amino acid sequence (SEQ ID NO:878) derived from the coding sequence of SEQ ID NO:877 shown in FIG. 877.

[0934] FIG. 879 shows a nucleotide sequence (SEQ ID NO:879) of a native sequence PRO83718 cDNA, wherein SEQ ID NO:879 is a clone designated herein as “DNA327744”.

[0935] FIG. 880 shows the amino acid sequence (SEQ ID NO:880) derived from the coding sequence of SEQ ID NO:879 shown in FIG. 879.

[0936] FIG. 881 shows a nucleotide sequence (SEQ ID NO:881) of a native sequence PRO83719 cDNA, wherein SEQ ID NO:881 is a clone designated herein as “DNA327745”.

[0937] FIG. 882 shows the amino acid sequence (SEQ ID NO:882) derived from the coding sequence of SEQ ID NO:881 shown in FIG. 881.

[0938] FIG. 883 shows a nucleotide sequence (SEQ ID NO:883) of a native sequence PRO83720 cDNA, wherein SEQ ID NO:883 is a clone designated herein as “DNA327746”.

[0939] FIG. 884 shows the amino acid sequence (SEQ ID NO:884) derived from the coding sequence of SEQ ID NO:883 shown in FIG. 883.

[0940] FIG. 885 shows a nucleotide sequence (SEQ ID NO:885) of a native sequence PRO25204 cDNA, wherein SEQ ID NO:885 is a clone designated herein as “DNA196754”.

[0941] FIG. 886 shows the amino acid sequence (SEQ ID NO:886) derived from the coding sequence of SEQ ID NO:885 shown in FIG. 885.

[0942] FIG. 887 shows a nucleotide sequence (SEQ ID NO:887) of a native sequence PRO60397 cDNA, wherein SEQ ID NO:887 is a clone designated herein as “DNA272127”.

[0943] FIG. 888 shows the amino acid sequence (SEQ ID NO:888) derived from the coding sequence of SEQ ID NO:887 shown in FIG. 887.

[0944] FIG. 889 shows a nucleotide sequence (SEQ ID NO:889) of a native sequence PRO83721 cDNA, wherein SEQ ID NO:889 is a clone designated herein as “DNA327747”.

[0945] FIG. 890 shows the amino acid sequence (SEQ ID NO:890) derived from the coding sequence of SEQ ID NO:889 shown in FIG. 889.

[0946] FIG. 891 shows a nucleotide sequence (SEQ ID NO:891) of a native sequence PRO4575 cDNA, wherein SEQ ID NO:891 is a clone designated herein as “DNA103245”.

[0947] FIG. 892 shows the amino acid sequence (SEQ ID NO:892) derived from the coding sequence of SEQ ID NO:891 shown in FIG. 891.

[0948] FIG. 893 shows a nucleotide sequence (SEQ ID NO:893) of a native sequence PRO37550 cDNA, wherein SEQ ID NO:893 is a clone designated herein as “DNA227087”.

[0949] FIG. 894 shows the amino acid sequence (SEQ ID NO:894) derived from the coding sequence of SEQ ID NO:893 shown in FIG. 893.

[0950] FIG. 895 shows a nucleotide sequence (SEQ ID NO:895) of a native sequence PRO36541 cDNA, wherein SEQ ID NO:895 is a clone designated herein as “DNA226078”.

[0951] FIG. 896 shows the amino acid sequence (SEQ ID NO:896) derived from the coding sequence of SEQ ID NO:895 shown in FIG. 895.

[0952] FIG. 897A-B shows a nucleotide sequence (SEQ ID NO:897) of a native sequence PRO2537 cDNA, wherein SEQ ID NO:897 is a clone designated herein as “DNA76504”.

[0953] FIG. 898 shows the amino acid sequence (SEQ ID NO:898) derived from the coding sequence of SEQ ID NO:897 shown in FIG. 897A-B.

[0954] FIG. 899 shows a nucleotide sequence (SEQ ID NO:899) of a native sequence PRO83722 cDNA, wherein SEQ ID NO:899 is a clone designated herein as “DNA327748”.

[0955] FIG. 900 shows the amino acid sequence (SEQ ID NO:900) derived from the coding sequence of SEQ ID NO:899 shown in FIG. 899.

[0956] FIG. 901 shows a nucleotide sequence (SEQ ID NO:901) of a native sequence PRO83723 cDNA, wherein SEQ ID NO:901 is a clone designated herein as “DNA327749”.

[0957] FIG. 902 shows the amino acid sequence (SEQ ID NO:902) derived from the coding sequence of SEQ ID NO:901 shown in FIG. 901.

[0958] FIG. 903 shows a nucleotide sequence (SEQ ID NO:903) of a native sequence PRO83724 cDNA, wherein SEQ ID NO:903 is a clone designated herein as “DNA327750”.

[0959] FIG. 904 shows the amino acid sequence (SEQ ID NO:904) derived from the coding sequence of SEQ ID NO:903 shown in FIG. 903.

[0960] FIG. 905 shows a nucleotide sequence (SEQ ID NO:905) of a native sequence PRO61480 cDNA, wherein SEQ ID NO:905 is a clone designated herein as “DNA327751”.

[0961] FIG. 906 shows the amino acid sequence (SEQ ID NO:906) derived from the coding sequence of SEQ ID NO:905 shown in FIG. 905.

[0962] FIG. 907 shows a nucleotide sequence (SEQ ID NO:907) of a native sequence PRO2695 cDNA, wherein SEQ ID NO:907 is a clone designated herein as “DNA88198”.

[0963] FIG. 908 shows the amino acid sequence (SEQ ID NO:908) derived from the coding sequence of SEQ ID NO:907 shown in FIG. 907.

[0964] FIG. 909 shows a nucleotide sequence (SEQ ID NO:909) of a native sequence cDNA, wherein SEQ ID NO:909 is a clone designated herein as “DNA327752”.

[0965] FIG. 910 shows a nucleotide sequence (SEQ ID NO:910) of a native sequence PRO20144 cDNA, wherein SEQ ID NO:910 is a clone designated herein as “DNA171416”.

[0966] FIG. 911 shows the amino acid sequence (SEQ ID NO:911) derived from the coding sequence of SEQ ID NO:910 shown in FIG. 910.

[0967] FIG. 912 shows a nucleotide sequence (SEQ ID NO:912) of a native sequence PRO51365 cDNA, wherein SEQ ID NO:912 is a clone designated herein as “DNA327753”.

[0968] FIG. 913 shows the amino acid sequence (SEQ ID NO:913) derived from the coding sequence of SEQ ID NO:912 shown in FIG. 912.

[0969] FIG. 914 shows a nucleotide sequence (SEQ ID NO:914) of a native sequence PRO4526 cDNA, wherein SEQ ID NO:914 is a clone designated herein as “DNA327754”.

[0970] FIG. 915 shows the amino acid sequence (SEQ ID NO:915) derived from the coding sequence of SEQ ID NO:914 shown in FIG. 914.

[0971] FIG. 916 shows a nucleotide sequence (SEQ ID NO:916) of a native sequence PRO83725 cDNA, wherein SEQ ID NO:916 is a clone designated herein as “DNA327755”.

[0972] FIG. 917 shows the amino acid sequence (SEQ ID NO:917) derived from the coding sequence of SEQ ID NO:916 shown in FIG. 916.

[0973] FIG. 918 shows a nucleotide sequence (SEQ ID NO:918) of a native sequence PRO83726 cDNA, wherein SEQ ID NO:918 is a clone designated herein as “DNA327756”.

[0974] FIG. 919 shows the amino acid sequence (SEQ ID NO:919) derived from the coding sequence of SEQ ID NO:918 shown in FIG. 918.

[0975] FIG. 920A-B shows a nucleotide sequence (SEQ ID NO:920) of a native sequence PRO60082 cDNA, wherein SEQ ID NO:920 is a clone designated herein as “DNA327757”.

[0976] FIG. 921 shows the amino acid sequence (SEQ ID NO:921) derived from the coding sequence of SEQ ID NO:920 shown in FIG. 920A-B.

[0977] FIG. 922 shows a nucleotide sequence (SEQ ID NO:922) of a native sequence PRO81272 cDNA, wherein SEQ ID NO:922 is a clone designated herein as “DNA324626”.

[0978] FIG. 923 shows the amino acid sequence (SEQ ID NO:923) derived from the coding sequence of SEQ ID NO:922 shown in FIG. 922.

[0979] FIG. 924A-D shows a nucleotide sequence (SEQ ID NO:924) of a native sequence PRO83727 cDNA, wherein SEQ ID NO:924 is a clone designated herein as “DNA327758”.

[0980] FIG. 925 shows the amino acid sequence (SEQ ID NO:925) derived from the coding sequence of SEQ ID NO:924 shown in FIG. 924A-D.

[0981] FIG. 926 shows a nucleotide sequence (SEQ ID NO:926) of a native sequence PRO83728 cDNA, wherein SEQ ID NO:926 is a clone designated herein as “DNA327759”.

[0982] FIG. 927 shows the amino acid sequence (SEQ ID NO:927) derived from the coding sequence of SEQ ID NO:926 shown in FIG. 926.

[0983] FIG. 928 shows a nucleotide sequence (SEQ ID NO:928) of a native sequence PRO59647 cDNA, wherein SEQ ID NO:928 is a clone designated herein as “DNA271344”.

[0984] FIG. 929 shows the amino acid sequence (SEQ ID NO:929) derived from the coding sequence of SEQ ID NO:928 shown in FIG. 928.

[0985] FIG. 930 shows a nucleotide sequence (SEQ ID NO:930) of a native sequence PRO80955 cDNA, wherein SEQ ID NO:930 is a clone designated herein as “DNA324272”.

[0986] FIG. 931 shows the amino acid sequence (SEQ ID NO:931) derived from the coding sequence of SEQ ID NO:930 shown in FIG. 930.

[0987] FIG. 932 shows a nucleotide sequence (SEQ ID NO:932) of a native sequence PRO21787 cDNA, wherein SEQ ID NO:932 is a clone designated herein as “DNA188293”.

[0988] FIG. 933 shows the amino acid sequence (SEQ ID NO:933) derived from the coding sequence of SEQ ID NO:932 shown in FIG. 932.

[0989] FIG. 934 shows a nucleotide sequence (SEQ ID NO:934) of a native sequence PRO83729 cDNA, wherein SEQ ID NO:934 is a clone designated herein as “DNA327760”.

[0990] FIG. 935 shows the amino acid sequence (SEQ ID NO:935) derived from the coding sequence of SEQ ID NO:934 shown in FIG. 934.

[0991] FIG. 936 shows a nucleotide sequence (SEQ ID NO:936) of a native sequence PRO83730 cDNA, wherein SEQ ID NO:936 is a clone designated herein as “DNA327761”.

[0992] FIG. 937 shows the amino acid sequence (SEQ ID NO:937) derived from the coding sequence of SEQ ID NO:936 shown in FIG. 936.

[0993] FIG. 938 shows a nucleotide sequence (SEQ ID NO:938) of a native sequence cDNA, wherein SEQ ID NO:938 is a clone designated herein as “DNA327762”.

[0994] FIG. 939 shows a nucleotide sequence (SEQ ID NO:939) of a native sequence PRO83731 cDNA, wherein SEQ ID NO:939 is a clone designated herein as “DNA327763”.

[0995] FIG. 940 shows the amino acid sequence (SEQ ID NO:940) derived from the coding sequence of SEQ ID NO:939 shown in FIG. 939.

[0996] FIG. 941 shows a nucleotide sequence (SEQ ID NO:941) of a native sequence cDNA, wherein SEQ ID NO:941 is a clone designated herein as “DNA327764”.

[0997] FIG. 942A-C shows a nucleotide sequence (SEQ ID NO:942) of a native sequence PRO83732 cDNA, wherein SEQ ID NO:942 is a clone designated herein as “DNA327765”.

[0998] FIG. 943 shows the amino acid sequence (SEQ ID NO:943) derived from the coding sequence of SEQ ID NO:942 shown in FIG. 942A-C.

[0999] FIG. 944A-B shows a nucleotide sequence (SEQ ID NO:944) of a native sequence cDNA, wherein SEQ ID NO:944 is a clone designated herein as “DNA194332”.

[1000] FIG. 945 shows a nucleotide sequence (SEQ ID NO:945) of a native sequence PRO69690 cDNA, wherein SEQ ID NO:945 is a clone designated herein as “DNA287433”.

[1001] FIG. 946 shows the amino acid sequence (SEQ ID NO:946) derived from the coding sequence of SEQ ID NO:945 shown in FIG. 945.

[1002] FIG. 947 shows a nucleotide sequence (SEQ ID NO:947) of a native sequence PRO83733 cDNA, wherein SEQ ID NO:947 is a clone designated herein as “DNA327766”.

[1003] FIG. 948 shows the amino acid sequence (SEQ ID NO:948) derived from the coding sequence of SEQ ID NO:947 shown in FIG. 947.

[1004] FIG. 949A-B shows a nucleotide sequence (SEQ ID NO:949) of a native sequence PRO83734 cDNA, wherein SEQ ID NO:949 is a clone designated herein as “DNA327767”.

[1005] FIG. 950 shows the amino acid sequence (SEQ ID NO:950) derived from the coding sequence of SEQ ID NO:949 shown in FIG. 949A-B.

[1006] FIG. 951 shows a nucleotide sequence (SEQ ID NO:951) of a native sequence PRO119 cDNA, wherein SEQ ID NO:951 is a clone designated herein as “DNA52750”.

[1007] FIG. 952 shows the amino acid sequence (SEQ ID NO:952) derived from the coding sequence of SEQ ID NO:951 shown in FIG. 951.

[1008] FIG. 953 shows a nucleotide sequence (SEQ ID NO:953) of a native sequence cDNA, wherein SEQ ID NO:953 is a clone designated herein as “DNA327768”.

[1009] FIG. 954 shows a nucleotide sequence (SEQ ID NO:954) of a native sequence PRO83735 cDNA, wherein SEQ ID NO:954 is a clone designated herein as “DNA327769”.

[1010] FIG. 955 shows the amino acid sequence (SEQ ID NO:955) derived from the coding sequence of SEQ ID NO:954 shown in FIG. 954.

[1011] FIG. 956 shows a nucleotide sequence (SEQ ID NO:956) of a native sequence PRO83736 cDNA, wherein SEQ ID NO:956 is a clone designated herein as “DNA327770”.

[1012] FIG. 957 shows the amino acid sequence (SEQ ID NO:957) derived from the coding sequence of SEQ ID NO:956 shown in FIG. 956.

[1013] FIG. 958 shows a nucleotide sequence (SEQ ID NO:958) of a native sequence PRO12179 cDNA, wherein SEQ ID NO:958 is a clone designated herein as “DNA151120”.

[1014] FIG. 959 shows the amino acid sequence (SEQ ID NO:959) derived from the coding sequence of SEQ ID NO:958 shown in FIG. 958.

[1015] FIG. 960 shows a nucleotide sequence (SEQ ID NO:960) of a native sequence PRO83737 cDNA, wherein SEQ ID NO:960 is a clone designated herein as “DNA327771”.

[1016] FIG. 961 shows the amino acid sequence (SEQ ID NO:961) derived from the coding sequence of SEQ ID NO:960 shown in FIG. 960.

[1017] FIG. 962A-B shows a nucleotide sequence (SEQ ID NO:962) of a native sequence cDNA, wherein SEQ ID NO:962 is a clone designated herein as “DNA228024”.

[1018] FIG. 963 shows a nucleotide sequence (SEQ ID NO:963) of a native sequence cDNA, wherein SEQ ID NO:963 is a clone designated herein as “DNA150980”.

[1019] FIG. 964 shows a nucleotide sequence (SEQ ID NO:964) of a native sequence cDNA, wherein SEQ ID NO:964 is a clone designated herein as “DNA327772”.

[1020] FIG. 965A-B shows a nucleotide sequence (SEQ ID NO:965) of a native sequence PRO83739 cDNA, wherein SEQ ID NO:965 is a clone designated herein as “DNA327773”.

[1021] FIG. 966 shows the amino acid sequence (SEQ ID NO:966) derived from the coding sequence of SEQ ID NO:965 shown in FIG. 965.

[1022] FIG. 967 shows a nucleotide sequence (SEQ ID NO:967) of a native sequence PRO83740 cDNA, wherein SEQ ID NO:967 is a clone designated herein as “DNA327774”.

[1023] FIG. 968 shows the amino acid sequence (SEQ ID NO:968) derived from the coding sequence of SEQ ID NO:967 shown in FIG. 967.

[1024] FIG. 969A-C shows a nucleotide sequence (SEQ ID NO:969) of a native sequence PRO83741 cDNA, wherein SEQ ID NO:969 is a clone designated herein as “DNA327775”.

[1025] FIG. 970 shows the amino acid sequence (SEQ ID NO:970) derived from the coding sequence of SEQ ID NO:969 shown in FIG. 969A-C.

[1026] FIG. 971A-B shows a nucleotide sequence (SEQ ID NO:971) of a native sequence PRO49304 cDNA, wherein SEQ ID NO:971 is a clone designated herein as “DNA254192”.

[1027] FIG. 972 shows the amino acid sequence (SEQ ID NO:972) derived from the coding sequence of SEQ ID NO:971 shown in FIG. 971A-B.

[1028] FIG. 973A-B shows a nucleotide sequence (SEQ ID NO:973) of a native sequence PRO62241 cDNA, wherein SEQ ID NO:973 is a clone designated herein as “DNA274322”.

[1029] FIG. 974 shows the amino acid sequence (SEQ ID NO:974) derived from the coding sequence of SEQ ID NO:973 shown in FIG. 973A-B.

[1030] FIG. 975 shows a nucleotide sequence (SEQ ID NO:975) of a native sequence PRO36504 cDNA, wherein SEQ ID NO:975 is a clone designated herein as “DNA226041”.

[1031] FIG. 976 shows the amino acid sequence (SEQ ID NO:976) derived from the coding sequence of SEQ ID NO:975 shown in FIG. 975.

[1032] FIG. 977 shows a nucleotide sequence (SEQ ID NO:977) of a native sequence PRO83742 cDNA, wherein SEQ ID NO:977 is a clone designated herein as “DNA327776”.

[1033] FIG. 978 shows the amino acid sequence (SEQ ID NO:978) derived from the coding sequence of SEQ ID NO:977 shown in FIG. 977.

[1034] FIG. 979 shows a nucleotide sequence (SEQ ID NO:979) of a native sequence PRO11833 cDNA, wherein SEQ ID NO:979 is a clone designated herein as “DNA151487”.

[1035] FIG. 980 shows the amino acid sequence (SEQ ID NO:980) derived from the coding sequence of SEQ ID NO:979 shown in FIG. 979.

[1036] FIG. 981A-D shows a nucleotide sequence (SEQ ID NO:981) of a native sequence cDNA, wherein SEQ ID NO:981 is a clone designated herein as “DNA327777”.

[1037] FIG. 982A-B shows a nucleotide sequence (SEQ ID NO:982) of a native sequence cDNA, wherein SEQ ID NO:982 is a clone designated herein as “DNA327778”.

[1038] FIG. 983A-B shows a nucleotide sequence (SEQ ID NO:983) of a native sequence cDNA, wherein SEQ ID NO:983 is a clone designated herein as “DNA270118”.

[1039] FIG. 984A-B shows a nucleotide sequence (SEQ ID NO:984) of a native sequence PRO83744 cDNA, wherein SEQ ID NO:984 is a clone designated herein as “DNA327779”.

[1040] FIG. 985 shows the amino acid sequence (SEQ ID NO:985) derived from the coding sequence of SEQ ID NO:984 shown in FIG. 984A-B.

[1041] FIG. 986A-B shows a nucleotide sequence (SEQ ID NO:986) of a native sequence cDNA, wherein SEQ ID NO:986 is a clone designated herein as “DNA327780”.

[1042] FIG. 987A-B shows a nucleotide sequence (SEQ ID NO:987) of a native sequence PRO83745 cDNA, wherein SEQ ID NO:987 is a clone designated herein as “DNA327781”.

[1043] FIG. 988 shows the amino acid sequence (SEQ ID NO:988) derived from the coding sequence of SEQ ID NO:987 shown in FIG. 987A-B.

[1044] FIG. 989 shows a nucleotide sequence (SEQ ID NO:989) of a native sequence cDNA, wherein SEQ ID NO:989 is a clone designated herein as “DNA327782”.

[1045] FIG. 990 shows a nucleotide sequence (SEQ ID NO:990) of a native sequence PRO83747 cDNA, wherein SEQ ID NO:990 is a clone designated herein as “DNA327783”.

[1046] FIG. 991 shows the amino acid sequence (SEQ ID NO:991) derived from the coding sequence of SEQ ID NO:990 shown in FIG. 990.

[1047] FIG. 992A-B shows a nucleotide sequence (SEQ ID NO:992) of a native sequence PRO83748 cDNA, wherein SEQ ID NO:992 is a clone designated herein as “DNA327784”.

[1048] FIG. 993 shows the amino acid sequence (SEQ ID NO:993) derived from the coding sequence of SEQ ID NO:992 shown in FIG. 992A-B.

[1049] FIG. 994 shows a nucleotide sequence (SEQ ID NO:994) of a native sequence PRO80622 cDNA, wherein SEQ ID NO:994 is a clone designated herein as “DNA323879”.

[1050] FIG. 995 shows the amino acid sequence (SEQ ID NO:995) derived from the coding sequence of SEQ ID NO:994 shown in FIG. 994.

[1051] FIG. 996 shows a nucleotide sequence (SEQ ID NO:996) of a native sequence PRO83749 cDNA, wherein SEQ ID NO:996 is a clone designated herein as “DNA327785”.

[1052] FIG. 997 shows the amino acid sequence (SEQ ID NO:997) derived from the coding sequence of SEQ ID NO:996 shown in FIG. 996.

[1053] FIG. 998 shows a nucleotide sequence (SEQ ID NO:998) of a native sequence cDNA, wherein SEQ ID NO:998 is a clone designated herein as “DNA327786”.

[1054] FIG. 999 shows a nucleotide sequence (SEQ ID NO:999) of a native sequence PRO83751 cDNA, wherein SEQ ID NO:999 is a clone designated herein as “DNA327787”.

[1055] FIG. 1000 shows the amino acid sequence (SEQ ID NO:1000) derived from the coding sequence of SEQ ID NO:999 shown in FIG. 999.

[1056] FIG. 1001 shows a nucleotide sequence (SEQ ID NO:1001) of a native sequence PRO83752 cDNA, wherein SEQ ID NO:1001 is a clone designated herein as “DNA327788”.

[1057] FIG. 1002 shows the amino acid sequence (SEQ ID NO:1002) derived from the coding sequence of SEQ ID NO:1001 shown in FIG. 1001.

[1058] FIG. 1003 shows a nucleotide sequence (SEQ ID NO:1003) of a native sequence cDNA, wherein SEQ ID NO:1003 is a clone designated herein as “DNA228053”.

[1059] FIG. 1004 shows a nucleotide sequence (SEQ ID NO:1004) of a native sequence PRO54720 cDNA, wherein SEQ ID NO:1004 is a clone designated herein as “DNA260974”.

[1060] FIG. 1005 shows the amino acid sequence (SEQ ID NO:1005) derived from the coding sequence of SEQ ID NO:1004 shown in FIG. 1004.

[1061] FIG. 1006A-B shows a nucleotide sequence (SEQ ID NO:1006) of a native sequence PRO50245 cDNA, wherein SEQ ID NO:1006 is a clone designated herein as “DNA255165”.

[1062] FIG. 1007 shows the amino acid sequence (SEQ ID NO:1007) derived from the coding sequence of SEQ ID NO:1006 shown in FIG. 1006A-B.

[1063] FIG. 1008 shows a nucleotide sequence (SEQ ID NO:1008) of a native sequence PRO83753 cDNA, wherein SEQ ID NO:1008 is a clone designated herein as “DNA327789”.

[1064] FIG. 1009 shows the amino acid sequence (SEQ ID NO:1009) derived from the coding sequence of SEQ ID NO:1008 shown in FIG. 1008.

[1065] FIG. 1010 shows a nucleotide sequence (SEQ ID NO:1010) of a native sequence PRO83754 cDNA, wherein SEQ ID NO:1010 is a clone designated herein as “DNA327790”.

[1066] FIG. 1011 shows the amino acid sequence (SEQ ID NO:1011) derived from the coding sequence of SEQ ID NO:1010 shown in FIG. 1010.

[1067] FIG. 1012A-B shows a nucleotide sequence (SEQ ID NO:1012) of a native sequence PRO83755 cDNA, wherein SEQ ID NO:1012 is a clone designated herein as “DNA327791”.

[1068] FIG. 1013 shows the amino acid sequence (SEQ ID NO:1013) derived from the coding sequence of SEQ ID NO:1012 shown in FIG. 1012A-B.

[1069] FIG. 1014A-B shows a nucleotide sequence (SEQ ID NO:1014) of a native sequence PRO83756 cDNA, wherein SEQ ID NO: is a clone designated herein as “DNA327792”.

[1070] FIG. 1015 shows the amino acid sequence (SEQ ID NO:1015) derived from the coding sequence of SEQ ID NO:1014 shown in FIG. 1014A-B.

[1071] FIG. 1016 shows a nucleotide sequence (SEQ ID NO:1016) of a native sequence PRO83757 cDNA, wherein SEQ ID NO:1016 is a clone designated herein as “DNA327793”.

[1072] FIG. 1017 shows the amino acid sequence (SEQ ID NO:1017) derived from the coding sequence of SEQ ID NO:1016 shown in FIG. 1016.

[1073] FIG. 1018A-D shows a nucleotide sequence (SEQ ID NO:1018) of a native sequence PRO83758 cDNA, wherein SEQ ID NO:1018 is a clone designated herein as “DNA327794”.

[1074] FIG. 1019 shows the amino acid sequence (SEQ ID NO:1019) derived from the coding sequence of SEQ ID NO:1018 shown in FIG. 1018A-D.

[1075] FIG. 1020 shows a nucleotide sequence (SEQ ID NO:1020) of a native sequence cDNA, wherein SEQ ID NO:1020 is a clone designated herein as “DNA327795”.

[1076] FIG. 1021 shows a nucleotide sequence (SEQ ID NO:1021) of a native sequence PRO83760 cDNA, wherein SEQ ID NO:1021 is a clone designated herein as “DNA327796”.

[1077] FIG. 1022 shows the amino acid sequence (SEQ ID NO:1022) derived from the coding sequence of SEQ ID NO:1021 shown in FIG. 1021.

[1078] FIG. 1023 shows a nucleotide sequence (SEQ ID NO:1023) of a native sequence PRO83761 cDNA, wherein SEQ ID NO:1023 is a clone designated herein as “DNA327797”.

[1079] FIG. 1024 shows the amino acid sequence (SEQ ID NO:1024) derived from the coding sequence of SEQ ID NO:1023 shown in FIG. 1023.

[1080] FIG. 1025 shows a nucleotide sequence (SEQ ID NO:1025) of a native sequence PRO83762 cDNA, wherein SEQ ID NO:1025 is a clone designated herein as “DNA327798”.

[1081] FIG. 1026 shows the amino acid sequence (SEQ ID NO:1026) derived from the coding sequence of SEQ ID NO:1025 shown in FIG. 1025.

[1082] FIG. 1027 shows a nucleotide sequence (SEQ ID NO:1027) of a native sequence PRO40011 cDNA, wherein SEQ ID NO:1027 is a clone designated herein as “DNA327799”.

[1083] FIG. 1028 shows the amino acid sequence (SEQ ID NO:1028) derived from the coding sequence of SEQ ID NO:1027 shown in FIG. 1027.

[1084] FIG. 1029 shows a nucleotide sequence (SEQ ID NO:1029) of a native sequence PRO83763 cDNA, wherein SEQ ID NO:1029 is a clone designated herein as “DNA327800”.

[1085] FIG. 1030 shows the amino acid sequence (SEQ ID NO:1030) derived from the coding sequence of SEQ ID NO:1029 shown in FIG. 1029.

[1086] FIG. 1031 shows a nucleotide sequence (SEQ ID NO:1031) of a native sequence PRO11792 cDNA, wherein SEQ ID NO:1031 is a clone designated herein as “DNA151422”.

[1087] FIG. 1032 shows the amino acid sequence (SEQ ID NO:1032) derived from the coding sequence of SEQ ID NO:1031 shown in FIG. 1031.

[1088] FIG. 1033 shows a nucleotide sequence (SEQ ID NO:1033) of a native sequence PRO83764 cDNA, wherein SEQ ID NO:1033 is a clone designated herein as “DNA327801”.

[1089] FIG. 1034 shows the amino acid sequence (SEQ ID NO:1034) derived from the coding sequence of SEQ ID NO:1033 shown in FIG. 1033.

[1090] FIG. 1035 shows a nucleotide sequence (SEQ ID NO:1035) of a native sequence PRO71208 cDNA, wherein SEQ ID NO:1035 is a clone designated herein as “DNA304796”.

[1091] FIG. 1036 shows the amino acid sequence (SEQ ID NO:1036) derived from the coding sequence of SEQ ID NO:1035 shown in FIG. 1035.

[1092] FIG. 1037 shows a nucleotide sequence (SEQ ID NO:1037) of a native sequence PRO83765 cDNA, wherein SEQ ID NO:1037 is a clone designated herein as “DNA327802”.

[1093] FIG. 1038 shows the amino acid sequence (SEQ ID NO:1083) derived from the coding sequence of SEQ ID NO:1037 shown in FIG. 1037.

[1094] FIG. 1039A-B shows a nucleotide sequence (SEQ ID NO:1039) of a native sequence PRO83766 cDNA, wherein SEQ ID NO:1039 is a clone designated herein as “DNA327803”.

[1095] FIG. 1040 shows the amino acid sequence (SEQ ID NO:1040) derived from the coding sequence of SEQ ID NO:1039 shown in FIG. 1039A-B.

[1096] FIG. 1041 shows a nucleotide sequence (SEQ ID NO:1041) of a native sequence PRO61547 cDNA, wherein SEQ ID NO:1041 is a clone designated herein as “DNA273569”.

[1097] FIG. 1042 shows the amino acid sequence (SEQ ID NO:1042) derived from the coding sequence of SEQ ID NO:1041 shown in FIG. 1041.

[1098] FIG. 1043 shows a nucleotide sequence (SEQ ID NO:1043) of a native sequence PRO69493 cDNA, wherein SEQ ID NO:1043 is a clone designated herein as “DNA327804”.

[1099] FIG. 1044 shows the amino acid sequence (SEQ ID NO:1044) derived from the coding sequence of SEQ ID NO:1043 shown in FIG. 1043.

[1100] FIG. 1045 shows a nucleotide sequence (SEQ ID NO:1045) of a native sequence cDNA, wherein SEQ ID NO:1045 is a clone designated herein as “DNA327805”.

[1101] FIG. 1046 shows a nucleotide sequence (SEQ ID NO:1046) of a native sequence PRO83767 cDNA, wherein SEQ ID NO:1046 is a clone designated herein as “DNA327806”.

[1102] FIG. 1047 shows the amino acid sequence (SEQ ID NO:1047) derived from the coding sequence of SEQ ID NO:1046 shown in FIG. 1046.

[1103] FIG. 1048 shows a nucleotide sequence (SEQ ID NO:1048) of a native sequence PRO83768 cDNA, wherein SEQ ID NO:1048 is a clone designated herein as “DNA327807”.

[1104] FIG. 1049 shows the amino acid sequence (SEQ ID NO:1049) derived from the coding sequence of SEQ ID NO:1048 shown in FIG. 1048.

[1105] FIG. 1050 shows a nucleotide sequence (SEQ ID NO:1050) of a native sequence PRO83769 cDNA, wherein SEQ ID NO:1050 is a clone designated herein as “DNA327808”.

[1106] FIG. 1051 shows the amino acid sequence (SEQ ID NO:1051) derived from the coding sequence of SEQ ID NO:1050 shown in FIG. 1050.

[1107] FIG. 1052 shows a nucleotide sequence (SEQ ID NO:1052) of a native sequence PRO83770 cDNA, wherein SEQ ID NO:1052 is a clone designated herein as “DNA327809”.

[1108] FIG. 1053 shows the amino acid sequence (SEQ ID NO:1053) derived from the coding sequence of SEQ ID NO:1052 shown in FIG. 1052.

[1109] FIG. 1054A-C shows a nucleotide sequence (SEQ ID NO:1054) of a native sequence PRO12903 cDNA, wherein SEQ ID NO:1054 is a clone designated herein as “DNA151840”.

[1110] FIG. 1055 shows the amino acid sequence (SEQ ID NO1055) derived from the coding sequence of SEQ ID NO:1054 shown in FIG. 1054A-C.

[1111] FIG. 1056 shows a nucleotide sequence (SEQ ID NO:1056) of a native sequence PRO83771 cDNA, wherein SEQ ID NO:1056 is a clone designated herein as “DNA3278 10”.

[1112] FIG. 1057 shows the amino acid sequence (SEQ ID NO:1057) derived from the coding sequence of SEQ ID NO:1056 shown in FIG. 1056.

[1113] FIG. 1058A-B shows a nucleotide sequence (SEQ ID NO:1058) of a native sequence cDNA, wherein SEQ ID NO:1058 is a clone designated herein as “DNA256455”.

[1114] FIG. 1059 shows a nucleotide sequence (SEQ ID NO:1059) of a native sequence PRO83772 cDNA, wherein SEQ ID NO:1059 is a clone designated herein as “DNA32781 1”.

[1115] FIG. 1060 shows the amino acid sequence (SEQ ID NO:1060) derived from the coding sequence of SEQ ID NO:1059 shown in FIG. 1059.

[1116] FIG. 1061 shows a nucleotide sequence (SEQ ID NO:1061) of a native sequence PRO49268 cDNA, wherein SEQ ID NO:1061 is a clone designated herein as “DNA254153”.

[1117] FIG. 1062 shows the amino acid sequence (SEQ ID NO:1062) derived from the coding sequence of SEQ ID NO:1061 shown in FIG. 1061.

[1118] FIG. 1063 shows a nucleotide sequence (SEQ ID NO:1063) of a native sequence PRO83773 cDNA, wherein SEQ ID NO:1063 is a clone designated herein as “DNA327812”.

[1119] FIG. 1064 shows the amino acid sequence (SEQ ID NO:1064) derived from the coding sequence of SEQ ID NO:1063 shown in FIG. 1063.

[1120] FIG. 1065 shows a nucleotide sequence (SEQ ID NO:1065) of a native sequence PRO83774 cDNA, wherein SEQ ID NO:1065 is a clone designated herein as “DNA327813”.

[1121] FIG. 1066 shows the amino acid sequence (SEQ ID NO:1066) derived from the coding sequence of SEQ ID NO:1065 shown in FIG. 1065.

[1122] FIG. 1067 shows a nucleotide sequence (SEQ ID NO:1067) of a native sequence PRO38184 cDNA, wherein SEQ ID NO:1067 is a clone designated herein as “DNA227721”.

[1123] FIG. 1068 shows the amino acid sequence (SEQ ID NO:1068) derived from the coding sequence of SEQ ID NO:1067 shown in FIG. 1067.

[1124] FIG. 1069 shows a nucleotide sequence (SEQ ID NO:1069) of a native sequence PRO71203 cDNA, wherein SEQ ID NO:1069 is a clone designated herein as “DNA304791”.

[1125] FIG. 1070 shows the amino acid sequence (SEQ ID NO:1070) derived from the coding sequence of SEQ ID NO:1069 shown in FIG. 1069.

[1126] FIG. 1071 shows a nucleotide sequence (SEQ ID NO:1071) of a native sequence PRO58654 cDNA, wherein SEQ ID NO:1071 is a clone designated herein as “DNA270266”.

[1127] FIG. 1072 shows the amino acid sequence (SEQ ID NO:1072) derived from the coding sequence of SEQ ID NO:1071 shown in FIG. 1071.

[1128] FIG. 1073 shows a nucleotide sequence (SEQ ID NO:1073) of a native sequence PRO2038 cDNA, wherein SEQ ID NO:1073 is a clone designated herein as “DNA327814”.

[1129] FIG. 1074 shows the amino acid sequence (SEQ ID NO:1074) derived from the coding sequence of SEQ ID NO:1073 shown in FIG. 1073.

[1130] FIG. 1075 shows a nucleotide sequence (SEQ ID NO:1075) of a native sequence PRO61547 cDNA, wherein SEQ ID NO:1075 is a clone designated herein as “DNA327815”.

[1131] FIG. 1076 shows the amino acid sequence (SEQ ID NO:1076) derived from the coding sequence of SEQ ID NO:1075 shown in FIG. 1075.

[1132] FIG. 1077 shows a nucleotide sequence (SEQ ID NO:1077) of a native sequence PRO82146 cDNA, wherein SEQ ID NO:1077 is a clone designated herein as “DNA327816”.

[1133] FIG. 1078 shows the amino acid sequence (SEQ ID NO:1078) derived from the coding sequence of SEQ ID NO:1077 shown in FIG. 1077.

[1134] FIG. 1079 shows a nucleotide sequence (SEQ ID NO:1079) of a native sequence PRO868 cDNA, wherein SEQ ID NO:1079 is a clone designated herein as “DNA324728”.

[1135] FIG. 1080 shows the amino acid sequence (SEQ ID NO:1080) derived from the coding sequence of SEQ ID NO:1079 shown in FIG. 1079.

[1136] FIG. 1081A-B shows a nucleotide sequence (SEQ ID NO:1081) of a native sequence PRO23865 cDNA, wherein SEQ ID NO:1081 is a clone designated herein as “DNA194507”.

[1137] FIG. 1082 shows the amino acid sequence (SEQ ID NO:1082) derived from the coding sequence of SEQ ID NO:1081 shown in FIG. 1081A-B.

[1138] FIG. 1083 shows a nucleotide sequence (SEQ ID NO:1083) of a native sequence PRO1573 cDNA, wherein SEQ ID NO:1083 is a clone designated herein as “DNA327817”.

[1139] FIG. 1084 shows the amino acid sequence (SEQ ID NO:1084) derived from the coding sequence of SEQ ID NO:1083 shown in FIG. 1083.

[1140] FIG. 1085 shows a nucleotide sequence (SEQ ID NO:1085) of a native sequence PRO83775 cDNA, wherein SEQ ID NO:1085 is a clone designated herein as “DNA327818”.

[1141] FIG. 1086 shows the amino acid sequence (SEQ ID NO:1086) derived from the coding sequence of SEQ ID NO:1085 shown in FIG. 1085.

[1142] FIG. 1087 shows a nucleotide sequence (SEQ ID NO:1087) of a native sequence cDNA, wherein SEQ ID NO:1087 is a clone designated herein as “DNA327819”.

[1143] FIG. 1088 shows a nucleotide sequence (SEQ ID NO:1088) of a native sequence PRO83776 cDNA, wherein SEQ ID NO:1088 is a clone designated herein as “DNA327820”.

[1144] FIG. 1089 shows the amino acid sequence (SEQ ID NO:1089) derived from the coding sequence of SEQ ID NO:1088 shown in FIG. 1088.

[1145] FIG. 1090A-B shows a nucleotide sequence (SEQ ID NO:1090) of a native sequence PRO83777 cDNA, wherein SEQ ID NO:1090 is a clone designated herein as “DNA327821”.

[1146] FIG. 1091 shows the amino acid sequence (SEQ ID NO:1091) derived from the coding sequence of SEQ ID NO:1090 shown in FIG. 1090A-B.

[1147] FIG. 1092 shows a nucleotide sequence (SEQ ID NO:1092) of a native sequence PRO4676 cDNA, wherein SEQ ID NO:1092 is a clone designated herein as “DNA288259”.

[1148] FIG. 1093 shows the amino acid sequence (SEQ ID NO:1093) derived from the coding sequence of SEQ ID NO:1092 shown in FIG. 1092.

[1149] FIG. 1094 shows a nucleotide sequence (SEQ ID NO:1094) of a native sequence cDNA, wherein SEQ ID NO:1094 is a clone designated herein as “DNA271990”.

[1150] FIG. 1095A-B shows a nucleotide sequence (SEQ ID NO:1095) of a native sequence cDNA, wherein SEQ ID NO:1095 is a clone designated herein as “DNA273734”.

[1151] FIG. 1096 shows a nucleotide sequence (SEQ ID NO:1096) of a native sequence cDNA, wherein SEQ ID NO:1096 is a clone designated herein as “DNA327822”.

[1152] FIG. 1097 shows a nucleotide sequence (SEQ ID NO:1097) of a native sequence PRO83778 cDNA, wherein SEQ ID NO:1097 is a clone designated herein as “DNA327823”.

[1153] FIG. 1098 shows the amino acid sequence (SEQ ID NO:1098) derived from the coding sequence of SEQ ID NO:1097 shown in FIG. 1097.

[1154] FIG. 1099A-B shows a nucleotide sequence (SEQ ID NO:1099) of a native sequence PRO34518 cDNA, wherein SEQ ID NO:1099 is a clone designated herein as “DNA327824”.

[1155] FIG. 1100 shows the amino acid sequence (SEQ ID NO:1100) derived from the coding sequence of SEQ ID NO:1099 shown in FIG. 1099A-B.

[1156] FIG. 1101 shows a nucleotide sequence (SEQ ID NO:1101) of a native sequence cDNA, wherein SEQ ID NO:1101 is a clone designated herein as “DNA271933”.

[1157] FIG. 1102A-B shows a nucleotide sequence (SEQ ID NO:1102) of a native sequence PRO83779 cDNA, wherein SEQ ID NO:1102 is a clone designated herein as “DNA327825”.

[1158] FIG. 1103 shows the amino acid sequence (SEQ ID NO:1103) derived from the coding sequence of SEQ ID NO:1102 shown in FIG. 1102A-B.

[1159] FIG. 1104A-B shows a nucleotide sequence (SEQ ID NO:1104) of a native sequence PRO24039 cDNA, wherein SEQ ID NO:1104 is a clone designated herein as “DNA327826”.

[1160] FIG. 1105 shows the amino acid sequence (SEQ ID NO:1105) derived from the coding sequence of SEQ ID NO:1104 shown in FIG. 1104A-B.

[1161] FIG. 1106 shows a nucleotide sequence (SEQ ID NO:1106) of a native sequence PRO38060 cDNA, wherein SEQ ID NO:1106 is a clone designated herein as “DNA227597”.

[1162] FIG. 1107 shows the amino acid sequence (SEQ ID NO:1107) derived from the coding sequence of SEQ ID NO:1106 shown in FIG. 1106.

[1163] FIG. 1108A-B shows a nucleotide sequence (SEQ ID NO:1108) of a native sequence cDNA, wherein SEQ ID NO:1108 is a clone designated herein as “DNA327827”.

[1164] FIG. 1109 shows a nucleotide sequence (SEQ ID NO:1109) of a native sequence PRO83780 cDNA, wherein SEQ ID NO:1109 is a clone designated herein as “DNA327828”.

[1165] FIG. 1110 shows the amino acid sequence (SEQ ID NO:1110) derived from the coding sequence of SEQ ID NO:1109 shown in FIG. 1109.

[1166] FIG. 1111 shows a nucleotide sequence (SEQ ID NO:1111) of a native sequence PRO83781 cDNA, wherein SEQ ID NO:1111 is a clone designated herein as “DNA327829”.

[1167] FIG. 1112 shows the amino acid sequence (SEQ ID NO:1112) derived from the coding sequence of SEQ ID NO:1111 shown in FIG. 1111.

[1168] FIG. 1113 shows a nucleotide sequence (SEQ ID NO:1113) of a native sequence PRO83782 cDNA, wherein SEQ ID NO:1113 is a clone designated herein as “DNA327830”.

[1169] FIG. 1114 shows the amino acid sequence (SEQ ID NO:1114) derived from the coding sequence of SEQ ID NO:1113 shown in FIG. 1113.

[1170] FIG. 1115 shows a nucleotide sequence (SEQ ID NO:1115) of a native sequence PRO83783 cDNA, wherein SEQ ID NO:1115 is a clone designated herein as “DNA327831”.

[1171] FIG. 1116 shows the amino acid sequence (SEQ ID NO:1116) derived from the coding sequence of SEQ ID NO:1115 shown in FIG. 1115.

[1172] FIG. 1117 shows a nucleotide sequence (SEQ ID NO:1117) of a native sequence PRO83784 cDNA, wherein SEQ ID NO:1117 is a clone designated herein as “DNA327832”.

[1173] FIG. 1118 shows the amino acid sequence (SEQ ID NO:1118) derived from the coding sequence of SEQ ID NO:1117 shown in FIG. 1117.

[1174] FIG. 1119 shows a nucleotide sequence (SEQ ID NO:1119) of a native sequence PRO23628 cDNA, wherein SEQ ID NO:1119 is a clone designated herein as “DNA327833”.

[1175] FIG. 1120 shows the amino acid sequence (SEQ ID NO:1120) derived from the coding sequence of SEQ ID NO:1119 shown in FIG. 1119.

[1176] FIG. 1121A-B shows a nucleotide sequence (SEQ ID NO:1121) of a native sequence PRO83785 cDNA, wherein SEQ ID NO:1121 is a clone designated herein as “DNA327834”.

[1177] FIG. 1122 shows the amino acid sequence (SEQ ID NO:1122) derived from the coding sequence of SEQ ID NO:1121 shown in FIG. 1121A-B.

[1178] FIG. 1123A-B shows a nucleotide sequence (SEQ ID NO:1123) of a native sequence PRO83786 cDNA, wherein SEQ ID NO:1123 is a clone designated herein as “DNA327835”.

[1179] FIG. 1124 shows the amino acid sequence (SEQ ID NO:1124) derived from the coding sequence of SEQ ID NO:1123 shown in FIG. 1123A-B.

[1180] FIG. 1125 shows a nucleotide sequence (SEQ ID NO:1125) of a native sequence PRO52581 cDNA, wherein SEQ ID NO:1125 is a clone designated herein as “DNA258641”.

[1181] FIG. 1126 shows the amino acid sequence (SEQ ID NO:1126) derived from the coding sequence of SEQ ID NO:1125 shown in FIG. 1125.

[1182] FIG. 1127 shows a nucleotide sequence (SEQ ID NO:1127) of a native sequence PRO83787 cDNA, wherein SEQ ID NO:1127 is a clone designated herein as “DNA327836”.

[1183] FIG. 1128 shows the amino acid sequence (SEQ ID NO:1128) derived from the coding sequence of SEQ ID NO:1127 shown in FIG. 1127.

[1184] FIG. 1129A-B shows a nucleotide sequence (SEQ ID NO:1129) of a native sequence PRO49486 cDNA, wherein SEQ ID NO:1129 is a clone designated herein as “DNA254376”.

[1185] FIG. 1130 shows the amino acid sequence (SEQ ID NO:1130) derived from the coding sequence of SEQ ID NO:1129 shown in FIG. 1129A-B.

[1186] FIG. 1131 shows a nucleotide sequence (SEQ ID NO:1131) of a native sequence PRO83788 cDNA, wherein SEQ ID NO:1131 is a clone designated herein as “DNA327837”.

[1187] FIG. 1132 shows the amino acid sequence (SEQ ID NO:1132) derived from the coding sequence of SEQ ID NO:1131 shown in FIG. 1131.

[1188] FIG. 1133 shows a nucleotide sequence (SEQ ID NO:1133) of a native sequence PRO83789 cDNA, wherein SEQ ID NO:1133 is a clone designated herein as “DNA327838”.

[1189] FIG. 1134 shows the amino acid sequence (SEQ ID NO:1134) derived from the coding sequence of SEQ ID NO:1133 shown in FIG. 1133.

[1190] FIG. 1135 shows a nucleotide sequence (SEQ ID NO:1135) of a native sequence PRO38220 cDNA, wherein SEQ ID NO:1135 is a clone designated herein as “DNA227757”.

[1191] FIG. 1136 shows the amino acid sequence (SEQ ID NO:1136) derived from the coding sequence of SEQ ID NO:1135 shown in FIG. 1135.

[1192] FIG. 1137 shows a nucleotide sequence (SEQ ID NO:1137) of a native sequence PRO2730 cDNA, wherein SEQ ID NO:1137 is a clone designated herein as “DNA88292”.

[1193] FIG. 1138 shows the amino acid sequence (SEQ ID NO:1138) derived from the coding sequence of SEQ ID NO:1137 shown in FIG. 1137.

[1194] FIG. 1139 shows a nucleotide sequence (SEQ ID NO:1139) of a native sequence PRO21884 cDNA, wherein SEQ ID NO:1139 is a clone designated herein as “DNA188349”.

[1195] FIG. 1140 shows the amino acid sequence (SEQ ID NO:1140) derived from the coding sequence of SEQ ID NO:1139 shown in FIG. 1139.

[1196] FIG. 1141 shows a nucleotide sequence (SEQ ID NO:1141) of a native sequence PRO83790 cDNA, wherein SEQ ID NO:1141 is a clone designated herein as “DNA327839”.

[1197] FIG. 1142 shows the amino acid sequence (SEQ ID NO:1142) derived from the coding sequence of SEQ ID NO:1141 shown in FIG. 1141.

[1198] FIG. 1143 shows a nucleotide sequence (SEQ ID NO:1143) of a native sequence PRO37826 cDNA, wherein SEQ ID NO:1143 is a clone designated herein as “DNA327840”.

[1199] FIG. 1144 shows the amino acid sequence (SEQ ID NO:1144) derived from the coding sequence of SEQ ID NO:1143 shown in FIG. 1143.

[1200] FIG. 1145 shows a nucleotide sequence (SEQ ID NO:1145) of a native sequence PRO58102 cDNA, wherein SEQ ID NO:1145 is a clone designated herein as “DNA269692”.

[1201] FIG. 1146 shows the amino acid sequence (SEQ ID NO:1146) derived from the coding sequence of SEQ ID NO:1145 shown in FIG. 1145.

[1202] FIG. 1147 shows a nucleotide sequence (SEQ ID NO:1147) of a native sequence PRO12377 cDNA, wherein SEQ ID NO:1147 is a clone designated herein as “DNA327841”.

[1203] FIG. 1148 shows the amino acid sequence (SEQ ID NO:1148) derived from the coding sequence of SEQ ID NO:1147 shown in FIG. 1147.

[1204] FIG. 1149 shows a nucleotide sequence (SEQ ID NO:1149) of a native sequence PRO36639 cDNA, wherein SEQ ID NO:1149 is a clone designated herein as “DNA226176”.

[1205] FIG. 1150 shows the amino acid sequence (SEQ ID NO:1150) derived from the coding sequence of SEQ ID NO:1149 shown in FIG. 1149.

[1206] FIG. 1151 shows a nucleotide sequence (SEQ ID NO:1151) of a native sequence cDNA, wherein SEQ ID NO:1151 is a clone designated herein as “DNA195995”.

[1207] FIG. 1152 shows a nucleotide sequence (SEQ ID NO:1152) of a native sequence PRO83791 cDNA, wherein SEQ ID NO:1152 is a clone designated herein as “DNA327842”.

[1208] FIG. 1153 shows the amino acid sequence (SEQ ID NO:1153) derived from the coding sequence of SEQ ID NO:1152 shown in FIG. 1152.

[1209] FIG. 1154 shows a nucleotide sequence (SEQ ID NO:1154) of a native sequence PRO81472 cDNA, wherein SEQ ID NO:1154 is a clone designated herein as “DNA327843”.

[1210] FIG. 1155 shows the amino acid sequence (SEQ ID NO:1155) derived from the coding sequence of SEQ ID NO:1154 shown in FIG. 1154.

[1211] FIG. 1156 shows a nucleotide sequence (SEQ ID NO:1156) of a native sequence PRO51365 cDNA, wherein SEQ ID NO:1156 is a clone designated herein as “DNA327844”.

[1212] FIG. 1157 shows the amino acid sequence (SEQ ID NO:1157) derived from the coding sequence of SEQ ID NO:1156 shown in FIG. 1156.

[1213] FIG. 1158 shows a nucleotide sequence (SEQ ID NO:1158) of a native sequence PRO69463 cDNA, wherein SEQ ID NO:1158 is a clone designated herein as “DNA287173”.

[1214] FIG. 1159 shows the amino acid sequence (SEQ ID NO:1159) derived from the coding sequence of SEQ ID NO:1158 shown in FIG. 1158.

[1215] FIG. 1160 shows a nucleotide sequence (SEQ ID NO:1160) of a native sequence PRO61271 cDNA, wherein SEQ ID NO:1160 is a clone designated herein as “DNA327845”.

[1216] FIG. 1161 shows the amino acid sequence (SEQ ID NO:1161) derived from the coding sequence of SEQ ID NO:1160 shown in FIG. 1160.

[1217] FIG. 1162 shows a nucleotide sequence (SEQ ID NO:1162) of a native sequence cDNA, wherein SEQ ID NO:1162 is a clone designated herein as “DNA196182”.

[1218] FIG. 1163 shows a nucleotide sequence (SEQ ID NO:1163) of a native sequence PRO83792 cDNA, wherein SEQ ID NO:1163 is a clone designated herein as “DNA327846”.

[1219] FIG. 1164 shows the amino acid sequence (SEQ ID NO:1164) derived from the coding sequence of SEQ ID NO:1163 shown in FIG. 1163.

[1220] FIG. 1165A-B shows a nucleotide sequence (SEQ ID NO:1165) of a native sequence PRO2834 cDNA, wherein SEQ ID NO:1165 is a clone designated herein as “DNA327847”.

[1221] FIG. 1166 shows the amino acid sequence (SEQ ID NO:1166) derived from the coding sequence of SEQ ID NO:1165 shown in FIG. 1165A-B.

[1222] FIG. 1167 shows a nucleotide sequence (SEQ ID NO:1167) of a native sequence PRO2834 cDNA, wherein SEQ ID NO:1167 is a clone designated herein as “DNA88541”.

[1223] FIG. 1168 shows the amino acid sequence (SEQ ID NO:1168) derived from the coding sequence of SEQ ID NO:1167 shown in FIG. 1167.

[1224] FIG. 1169 shows a nucleotide sequence (SEQ ID NO:1169) of a native sequence PRO83793 cDNA, wherein SEQ ID NO:1169 is a clone designated herein as “DNA327848”.

[1225] FIG. 1170 shows the amino acid sequence (SEQ ID NO:1170) derived from the coding sequence of SEQ ID NO:1169 shown in FIG. 1169.

[1226] FIG. 1171 shows a nucleotide sequence (SEQ ID NO:1171) of a native sequence PRO83794 cDNA, wherein SEQ ID NO:1171 is a clone designated herein as “DNA327849”.

[1227] FIG. 1172 shows the amino acid sequence (SEQ ID NO:1172) derived from the coding sequence of SEQ ID NO:1171 shown in FIG. 1171.

[1228] FIG. 1173A-B shows a nucleotide sequence (SEQ ID NO:1173) of a native sequence PRO2237 cDNA, wherein SEQ ID NO:1173 is a clone designated herein as “DNA88226”.

[1229] FIG. 1174 shows the amino acid sequence (SEQ ID NO:1174) derived from the coding sequence of SEQ ID NO:1173 shown in FIG. 1173A-B.

[1230] FIG. 1175 shows a nucleotide sequence (SEQ ID NO:1175) of a native sequence PRO60803 cDNA, wherein SEQ ID NO:1175 is a clone designated herein as “DNA327850”.

[1231] FIG. 1176 shows the amino acid sequence (SEQ ID NO:1176) derived from the coding sequence of SEQ ID NO:1175 shown in FIG. 1175.

[1232] FIG. 1177 shows a nucleotide sequence (SEQ ID NO:1177) of a native sequence PRO80741 cDNA, wherein SEQ ID NO:1177 is a clone designated herein as “DNA324022”.

[1233] FIG. 1178 shows the amino acid sequence (SEQ ID NO:1178) derived from the coding sequence of SEQ ID NO:1177 shown in FIG. 1177.

[1234] FIG. 1179 shows a nucleotide sequence (SEQ ID NO:1179) of a native sequence PRO83795 cDNA, wherein SEQ ID NO:1179 is a clone designated herein as “DNA327851”.

[1235] FIG. 1180 shows the amino acid sequence (SEQ ID NO:1180) derived from the coding sequence of SEQ ID NO:1179 shown in FIG. 1179.

[1236] FIG. 1181 shows a nucleotide sequence (SEQ ID NO:1181) of a native sequence PRO60759 cDNA, wherein SEQ ID NO:1181 is a clone designated herein as “DNA272626”.

[1237] FIG. 1182 shows the amino acid sequence (SEQ ID NO:1182) derived from the coding sequence of SEQ ID NO:1181 shown in FIG. 1181.

[1238] FIG. 1183 shows a nucleotide sequence (SEQ ID NO:1183) of a native sequence PRO37222 cDNA, wherein SEQ ID NO:1183 is a clone designated herein as “DNA226759”.

[1239] FIG. 1184 shows the amino acid sequence (SEQ ID NO:1184) derived from the coding sequence of SEQ ID NO:1183 shown in FIG. 1183.

[1240] FIG. 1185A-B shows a nucleotide sequence (SEQ ID NO:1185) of a native sequence PRO81523 cDNA, wherein SEQ ID NO:1185 is a clone designated herein as “DNA324921”.

[1241] FIG. 1186 shows the amino acid sequence (SEQ ID NO:1186) derived from the coding sequence of SEQ ID NO:1185 shown in FIG. 1185A-B.

[1242] FIG. 1187 shows a nucleotide sequence (SEQ ID NO:1187) of a native sequence PRO83796 cDNA, wherein SEQ ID NO:1187 is a clone designated herein as “DNA327852”.

[1243] FIG. 1188 shows the amino acid sequence (SEQ ID NO:1188) derived from the coding sequence of SEQ ID NO:1187 shown in FIG. 1187.

[1244] FIG. 1189 shows a nucleotide sequence (SEQ ID NO:1189) of a native sequence PRO82223 cDNA, wherein SEQ ID NO:1189 is a clone designated herein as “DNA327853”.

[1245] FIG. 1190 shows the amino acid sequence (SEQ ID NO:1190) derived from the coding sequence of SEQ ID NO:1189 shown in FIG. 1189.

[1246] FIG. 1191A-B shows a nucleotide sequence (SEQ ID NO:1191) of a native sequence PRO83797 cDNA, wherein SEQ ID NO:1191 is a clone designated herein as “DNA327854”.

[1247] FIG. 1192 shows the amino acid sequence (SEQ ID NO:1192) derived from the coding sequence of SEQ ID NO:1191 shown in FIG. 1191A-B.

[1248] FIG. 1193 shows a nucleotide sequence (SEQ ID NO:1193) of a native sequence PRO83367 cDNA, wherein SEQ ID NO:1193 is a clone designated herein as “DNA327855”.

[1249] FIG. 1194 shows the amino acid sequence (SEQ ID NO:1194) derived from the coding sequence of SEQ ID NO:1193 shown in FIG. 1193.

[1250] FIG. 1195 shows a nucleotide sequence (SEQ ID NO:1195) of a native sequence PRO61079 cDNA, wherein SEQ ID NO:1195 is a clone designated herein as “DNA273008”.

[1251] FIG. 1196 shows the amino acid sequence (SEQ ID NO:1196) derived from the coding sequence of SEQ ID NO:1195 shown in FIG. 1195.

[1252] FIG. 1197A-B shows a nucleotide sequence (SEQ ID NO:1197) of a native sequence PRO83798 cDNA, wherein SEQ ID NO:1197 is a clone designated herein as “DNA327856”.

[1253] FIG. 1198 shows the amino acid sequence (SEQ ID NO:1198) derived from the coding sequence of SEQ ID NO:1197 shown in FIG. 1197A-B.

[1254] FIG. 1199 shows a nucleotide sequence (SEQ ID NO:1199) of a native sequence PRO37776 cDNA, wherein SEQ ID NO:1199 is a clone designated herein as “DNA227313”.

[1255] FIG. 1200 shows the amino acid sequence (SEQ ID NO:1200) derived from the coding sequence of SEQ ID NO:1199 shown in FIG. 1199.

[1256] FIG. 1201 shows a nucleotide sequence (SEQ ID NO:1201) of a native sequence PRO37961 cDNA, wherein SEQ ID NO:1201 is a clone designated herein as “DNA227498”.

[1257] FIG. 1202 shows the amino acid sequence (SEQ ID NO:1202) derived from the coding sequence of SEQ ID NO:1201 shown in FIG. 1201.

[1258] FIG. 1203 shows a nucleotide sequence (SEQ ID NO:1203) of a native sequence PRO83799 cDNA, wherein SEQ ID NO:1203 is a clone designated herein as “DNA327857”.

[1259] FIG. 1204 shows the amino acid sequence (SEQ ID NO:1204) derived from the coding sequence of SEQ ID NO:1203 shown in FIG. 1203.

[1260] FIG. 1205 shows a nucleotide sequence (SEQ ID NO:1205) of a native sequence PRO49837 cDNA, wherein SEQ ID NO:1205 is a clone designated herein as “DNA254739”.

[1261] FIG. 1206 shows the amino acid sequence (SEQ ID NO:1206) derived from the coding sequence of SEQ ID NO:1205 shown in FIG. 1205.

[1262] FIG. 1207 shows a nucleotide sequence (SEQ ID NO:1207) of a native sequence PRO83800 cDNA, wherein SEQ ID NO:1207 is a clone designated herein as “DNA327858”.

[1263] FIG. 1208 shows the amino acid sequence (SEQ ID NO:1208) derived from the coding sequence of SEQ ID NO:1207 shown in FIG. 1207.

[1264] FIG. 1209 shows a nucleotide sequence (SEQ ID NO:1209) of a native sequence PRO69677 cDNA, wherein SEQ ID NO:1209 is a clone designated herein as “DNA287420”.

[1265] FIG. 1210 shows the amino acid sequence (SEQ ID NO:1210) derived from the coding sequence of SEQ ID NO:1209 shown in FIG. 1209.

[1266] FIG. 1211 shows a nucleotide sequence (SEQ ID NO:1211) of a native sequence PRO37748 cDNA, wherein SEQ ID NO:1211 is a clone designated herein as “DNA327859”.

[1267] FIG. 1212 shows the amino acid sequence (SEQ ID NO:1212) derived from the coding sequence of SEQ ID NO:1211 shown in FIG. 1211.

[1268] FIG. 1213 shows a nucleotide sequence (SEQ ID NO:1213) of a native sequence PRO83801 cDNA, wherein SEQ ID NO:1213 is a clone designated herein as “DNA327860”.

[1269] FIG. 1214 shows the amino acid sequence (SEQ ID NO:1214) derived from the coding sequence of SEQ ID NO:1213 shown in FIG. 1213.

[1270] FIG. 1215 shows a nucleotide sequence (SEQ ID NO:1215) of a native sequence PRO83802 cDNA, wherein SEQ ID NO:1215 is a clone designated herein as “DNA327861”.

[1271] FIG. 1216 shows the amino acid sequence (SEQ ID NO:1216) derived from the coding sequence of SEQ ID NO:1215 shown in FIG. 1215.

[1272] FIG. 1217 shows a nucleotide sequence (SEQ ID NO:1217) of a native sequence PRO83803 cDNA, wherein SEQ ID NO:1217 is a clone designated herein as “DNA327862”.

[1273] FIG. 1218 shows the amino acid sequence (SEQ ID NO:1218) derived from the coding sequence of SEQ ID NO:1217 shown in FIG. 1217.

[1274] FIG. 1219 shows a nucleotide sequence (SEQ ID NO:1219) of a native sequence PRO83804 cDNA, wherein SEQ ID NO:1219 is a clone designated herein as “DNA327863”.

[1275] FIG. 1220 shows the amino acid sequence (SEQ ID NO:1220) derived from the coding sequence of SEQ ID NO:1219 shown in FIG. 1219.

[1276] FIG. 1221 shows a nucleotide sequence (SEQ ID NO:1221) of a native sequence PRO50409 cDNA, wherein SEQ ID NO:1221 is a clone designated herein as “DNA255340”.

[1277] FIG. 1222 shows the amino acid sequence (SEQ ID NO:1222) derived from the coding sequence of SEQ ID NO:1221 shown in FIG. 1221.

[1278] FIG. 1223A-B shows a nucleotide sequence (SEQ ID NO:1223) of a native sequence PRO69478 cDNA, wherein SEQ ID NO:1223 is a clone designated herein as “DNA287192”.

[1279] FIG. 1224 shows the amino acid sequence (SEQ ID NO:1224) derived from the coding sequence of SEQ ID NO:1223 shown in FIG. 1223A-B.

[1280] FIG. 1225 shows a nucleotide sequence (SEQ ID NO:1225) of a native sequence PRO83805 cDNA, wherein SEQ ID NO:1225 is a clone designated herein as “DNA327864”.

[1281] FIG. 1226 shows the amino acid sequence (SEQ ID NO:1226) derived from the coding sequence of SEQ ID NO:1225 shown in FIG. 1225.

[1282] FIG. 1227 shows a nucleotide sequence (SEQ ID NO:1227) of a native sequence PRO83806 cDNA, wherein SEQ ID NO:1227 is a clone designated herein as “DNA327865”.

[1283] FIG. 1228 shows the amino acid sequence (SEQ ID NO:1228) derived from the coding sequence of SEQ ID NO:1227 shown in FIG. 1227.

[1284] FIG. 1229 shows a nucleotide sequence (SEQ ID NO:1229) of a native sequence PRO83807 cDNA, wherein SEQ ID NO:1229 is a clone designated herein as “DNA327866”.

[1285] FIG. 1230 shows the amino acid sequence (SEQ ID NO:1230) derived from the coding sequence of SEQ ID NO:1229 shown in FIG. 1229.

[1286] FIG. 1231 shows a nucleotide sequence (SEQ ID NO:1231) of a native sequence PRO83808 cDNA, wherein SEQ ID NO:1231 is a clone designated herein as “DNA327867”.

[1287] FIG. 1232 shows the amino acid sequence (SEQ ID NO:1232) derived from the coding sequence of SEQ ID NO:1231 shown in FIG. 1231.

[1288] FIG. 1233 shows a nucleotide sequence (SEQ ID NO:1233) of a native sequence PRO83809 cDNA, wherein SEQ ID NO:1233 is a clone designated herein as “DNA327868”.

[1289] FIG. 1234 shows the amino acid sequence (SEQ ID NO:1234) derived from the coding sequence of SEQ ID NO:1233 shown in FIG. 1233.

[1290] FIG. 1235 shows a nucleotide sequence (SEQ ID NO:1235) of a native sequence PRO1898 cDNA, wherein SEQ ID NO:1235 is a clone designated herein as “DNA327869”.

[1291] FIG. 1236 shows the amino acid sequence (SEQ ID NO:1236) derived from the coding sequence of SEQ ID NO:1235 shown in FIG. 1235.

[1292] FIG. 1237 shows a nucleotide sequence (SEQ ID NO:1237) of a native sequence PRO83810 cDNA, wherein SEQ ID NO:1237 is a clone designated herein as “DNA327870”.

[1293] FIG. 1238 shows the amino acid sequence (SEQ ID NO:1238) derived from the coding sequence of SEQ ID NO:1237 shown in FIG. 1237.

[1294] FIG. 1239 shows a nucleotide sequence (SEQ ID NO:1239) of a native sequence PRO60668 cDNA, wherein SEQ ID NO:1239 is a clone designated herein as “DNA272415”.

[1295] FIG. 1240 shows the amino acid sequence (SEQ ID NO:1240) derived from the coding sequence of SEQ ID NO:1239 shown in FIG. 1239.

[1296] FIG. 1241 shows a nucleotide sequence (SEQ ID NO:1241) of a native sequence PRO37056 cDNA, wherein SEQ ID NO:1241 is a clone designated herein as “DNA226593”.

[1297] FIG. 1242 shows the amino acid sequence (SEQ ID NO:1242) derived from the coding sequence of SEQ ID NO:1241 shown in FIG. 1241.

[1298] FIG. 1243 shows a nucleotide sequence (SEQ ID NO:1243) of a native sequence PRO83811 cDNA, wherein SEQ ID NO:1243 is a clone designated herein as “DNA327871”.

[1299] FIG. 1244 shows the amino acid sequence (SEQ ID NO:1244) derived from the coding sequence of SEQ ID NO:1243 shown in FIG. 1243.

[1300] FIG. 1245 shows a nucleotide sequence (SEQ ID NO:1245) of a native sequence PRO50616 cDNA, wherein SEQ ID NO:1245 is a clone designated herein as “DNA255552”.

[1301] FIG. 1246 shows the amino acid sequence (SEQ ID NO:1246) derived from the coding sequence of SEQ ID NO:1245 shown in FIG. 1245.

[1302] FIG. 1247 shows a nucleotide sequence (SEQ ID NO:1247) of a native sequence PRO83812 cDNA, wherein SEQ ID NO:1247 is a clone designated herein as “DNA327872”.

[1303] FIG. 1248 shows the amino acid sequence (SEQ ID NO:1248) derived from the coding sequence of SEQ ID NO:1247 shown in FIG. 1247.

[1304] FIG. 1249 shows a nucleotide sequence (SEQ ID NO:1249) of a native sequence PRO83813 cDNA, wherein SEQ ID NO:1249 is a clone designated herein as “DNA327873”.

[1305] FIG. 1250 shows the amino acid sequence (SEQ ID NO:1250) derived from the coding sequence of SEQ ID NO:1249 shown in FIG. 1249.

[1306] FIG. 1251 shows a nucleotide sequence (SEQ ID NO:1251) of a native sequence PRO4805 cDNA, wherein SEQ ID NO:1251 is a clone designated herein as “DNA327874”.

[1307] FIG. 1252 shows the amino acid sequence (SEQ ID NO:1252) derived from the coding sequence of SEQ ID NO:1251 shown in FIG. 1251.

[1308] FIG. 1253 shows a nucleotide sequence (SEQ ID NO:1253) of a native sequence PRO69459 cDNA, wherein SEQ ID NO:1253 is a clone designated herein as “DNA287166”.

[1309] FIG. 1254 shows the amino acid sequence (SEQ ID NO:1254) derived from the coding sequence of SEQ ID NO:1253 shown in FIG. 1253.

[1310] FIG. 1255 shows a nucleotide sequence (SEQ ID NO:1255) of a native sequence PRO83814 cDNA, wherein SEQ ID NO:1255 is a clone designated herein as “DNA327875”.

[1311] FIG. 1256 shows the amino acid sequence (SEQ ID NO:1256) derived from the coding sequence of SEQ ID NO:1255 shown in FIG. 1255.

[1312] FIG. 1257 shows a nucleotide sequence (SEQ ID NO:1257) of a native sequence PRO66032 cDNA, wherein SEQ ID NO:1257 is a clone designated herein as “DNA279661”.

[1313] FIG. 1258 shows the amino acid sequence (SEQ ID NO:1258) derived from the coding sequence of SEQ ID NO:1257 shown in FIG. 1257.

[1314] FIG. 1259 shows a nucleotide sequence (SEQ ID NO:1259) of a native sequence PRO51309 cDNA, wherein SEQ ID NO:1259 is a clone designated herein as “DNA256265”.

[1315] FIG. 1260 shows the amino acid sequence (SEQ ID NO:1260) derived from the coding sequence of SEQ ID NO:1259 shown in FIG. 1259.

[1316] FIG. 1261 shows a nucleotide sequence (SEQ ID NO:1216) of a native sequence PRO83469 cDNA, wherein SEQ ID NO:1261 is a clone designated herein as “DNA327191”.

[1317] FIG. 1262 shows the amino acid sequence (SEQ ID NO:1262) derived from the coding sequence of SEQ ID NO:1261 shown in FIG. 1261.

[1318] FIG. 1263 shows a nucleotide sequence (SEQ ID NO:1263) of a native sequence PRO83815 cDNA, wherein SEQ ID NO:1263 is a clone designated herein as “DNA327876”.

[1319] FIG. 1264 shows the amino acid sequence (SEQ ID NO:1264) derived from the coding sequence of SEQ ID NO:1263 shown in FIG. 1263.

[1320] FIG. 1265 shows a nucleotide sequence (SEQ ID NO:1265) of a native sequence PRO83816 cDNA, wherein SEQ ID NO:1265 is a clone designated herein as “DNA327877”.

[1321] FIG. 1266 shows the amino acid sequence (SEQ ID NO:1266) derived from the coding sequence of SEQ ID NO:1265 shown in FIG. 1265.

[1322] FIG. 1267 shows a nucleotide sequence (SEQ ID NO:1267) of a native sequence PRO34321 cDNA, wherein SEQ ID NO:1267 is a clone designated herein as “DNA218269”.

[1323] FIG. 1268 shows the amino acid sequence (SEQ ID NO:1268) derived from the coding sequence of SEQ ID NO:1267 shown in FIG. 1267.

[1324] FIG. 1269 shows a nucleotide sequence (SEQ ID NO:1269) of a native sequence PRO70808 cDNA, wherein SEQ ID NO:1269 is a clone designated herein as “DNA297191”.

[1325] FIG. 1270 shows the amino acid sequence (SEQ ID NO:1270) derived from the coding sequence of SEQ ID NO:1269 shown in FIG. 1269.

[1326] FIG. 1271 shows a nucleotide sequence (SEQ ID NO:1271) of a native sequence PRO83817 cDNA, wherein SEQ ID NO:1271 is a clone designated herein as “DNA327878”.

[1327] FIG. 1272 shows the amino acid sequence (SEQ ID NO:1272) derived from the coding sequence of SEQ ID NO:1271 shown in FIG. 1271.

[1328] FIG. 1273 shows a nucleotide sequence (SEQ ID NO:1273) of a native sequence PRO83818 cDNA, wherein SEQ ID NO:1273 is a clone designated herein as “DNA327879”.

[1329] FIG. 1274 shows the amino acid sequence (SEQ ID NO:1274) derived from the coding sequence of SEQ ID NO:1273 shown in FIG. 1273.

[1330] FIG. 1275 shows a nucleotide sequence (SEQ ID NO:1275) of a native sequence PRO83819 cDNA, wherein SEQ ID NO:1275 is a clone designated herein as “DNA327880”.

[1331] FIG. 1276 shows the amino acid sequence (SEQ ID NO:1276) derived from the coding sequence of SEQ ID NO:1275 shown in FIG. 1275.

[1332] FIG. 1277 shows a nucleotide sequence (SEQ ID NO:1277) of a native sequence PRO83820 cDNA, wherein SEQ ID NO:1277 is a clone designated herein as “DNA32788 1”.

[1333] FIG. 1278 shows the amino acid sequence (SEQ ID NO:1278) derived from the coding sequence of SEQ ID NO:1277 shown in FIG. 1277.

[1334] FIG. 1279 shows a nucleotide sequence (SEQ ID NO:1279) of a native sequence PRO31794 cDNA, wherein SEQ ID NO:1279 is a clone designated herein as “DNA327882”.

[1335] FIG. 1280 shows the amino acid sequence (SEQ ID NO:1280) derived from the coding sequence of SEQ ID NO:1279 shown in FIG. 1279.

[1336] FIG. 1281 shows a nucleotide sequence (SEQ ID NO:1281) of a native sequence PRO82421 cDNA, wherein SEQ ID NO:1281 is a clone designated herein as “DNA325976”.

[1337] FIG. 1282 shows the amino acid sequence (SEQ ID NO:1282) derived from the coding sequence of SEQ ID NO:1281 shown in FIG. 1281.

[1338] FIG. 1283 shows a nucleotide sequence (SEQ ID NO:1283) of a native sequence PRO49810 cDNA, wherein SEQ ID NO:1283 is a clone designated herein as “DNA254710”.

[1339] FIG. 1284 shows the amino acid sequence (SEQ ID NO:1284) derived from the coding sequence of SEQ ID NO:1283 shown in FIG. 1283.

[1340] FIG. 1285 shows a nucleotide sequence (SEQ ID NO:1285) of a native sequence PRO59776 cDNA, wherein SEQ ID NO:1285 is a clone designated herein as “DNA271483”.

[1341] FIG. 1286 shows the amino acid sequence (SEQ ID NO:1286) derived from the coding sequence of SEQ ID NO:1285 shown in FIG. 1285.

[1342] FIG. 1287 shows a nucleotide sequence (SEQ ID NO:1287) of a native sequence PRO83821 cDNA, wherein SEQ ID NO:1287 is a clone designated herein as “DNA327883”.

[1343] FIG. 1288 shows the amino acid sequence (SEQ ID NO:1288) derived from the coding sequence of SEQ ID NO:1287 shown in FIG. 1287.

[1344] FIG. 1289 shows a nucleotide sequence (SEQ ID NO:1289) of a native sequence PRO83822 cDNA, wherein SEQ ID NO:1289 is a clone designated herein as “DNA327884”.

[1345] FIG. 1290 shows the amino acid sequence (SEQ ID NO:1290) derived from the coding sequence of SEQ ID NO:1289 shown in FIG. 1289.

[1346] FIG. 1291 shows a nucleotide sequence (SEQ ID NO:1291) of a native sequence PRO82377 cDNA, wherein SEQ ID NO:1291 is a clone designated herein as “DNA327885”.

[1347] FIG. 1292 shows the amino acid sequence (SEQ ID NO:1292) derived from the coding sequence of SEQ ID NO:1291 shown in FIG. 1291.

[1348] FIG. 1293 shows a nucleotide sequence (SEQ ID NO:1293) of a native sequence PRO41077 cDNA, wherein SEQ ID NO:1293 is a clone designated herein as “DNA327886”.

[1349] FIG. 1294 shows the amino acid sequence (SEQ ID NO:1294) derived from the coding sequence of SEQ ID NO:1293 shown in FIG. 1293.

[1350] FIG. 1295 shows a nucleotide sequence (SEQ ID NO:1295) of a native sequence PRO83823 cDNA, wherein SEQ ID NO:1295 is a clone designated herein as “DNA327887”.

[1351] FIG. 1296 shows the amino acid sequence (SEQ ID NO:1296) derived from the coding sequence of SEQ ID NO:1295 shown in FIG. 1295.

[1352] FIG. 1297 shows a nucleotide sequence (SEQ ID NO:1297) of a native sequence PRO83824 cDNA, wherein SEQ ID NO:1297 is a clone designated herein as “DNA327888”.

[1353] FIG. 1298 shows the amino acid sequence (SEQ ID NO:1298) derived from the coding sequence of SEQ ID NO:1297 shown in FIG. 1297.

[1354] FIG. 1299 shows a nucleotide sequence (SEQ ID NO:1299) of a native sequence PRO83825 cDNA, wherein SEQ ID NO:1299 is a clone designated herein as “DNA327889”.

[1355] FIG. 1300 shows the amino acid sequence (SEQ ID NO:1300) derived from the coding sequence of SEQ ID NO:1299 shown in FIG. 1299.

[1356] FIG. 1301 shows a nucleotide sequence (SEQ ID NO:1301) of a native sequence PRO83826 cDNA, wherein SEQ ID NO:1301 is a clone designated herein as “DNA327890”.

[1357] FIG. 1302 shows the amino acid sequence (SEQ ID NO:1302) derived from the coding sequence of SEQ ID NO:1301 shown in FIG. 1301.

[1358] FIG. 1303 shows a nucleotide sequence (SEQ ID NO:1303) of a native sequence PRO50546 cDNA, wherein SEQ ID NO:1303 is a clone designated herein as “DNA255479”.

[1359] FIG. 1304 shows the amino acid sequence (SEQ ID NO:1304) derived from the coding sequence of SEQ ID NO:1303 shown in FIG. 1303.

[1360] FIG. 1305 shows a nucleotide sequence (SEQ ID NO:1305) of a native sequence PRO83827 cDNA, wherein SEQ ID NO:1305 is a clone designated herein as “DNA327891”.

[1361] FIG. 1306 shows the amino acid sequence (SEQ ID NO:1306) derived from the coding sequence of SEQ ID NO:1305 shown in FIG. 1305.

[1362] FIG. 1307 shows a nucleotide sequence (SEQ ID NO:1307) of a native sequence PRO37408 cDNA, wherein SEQ ID NO:1307 is a clone designated herein as “DNA226945”.

[1363] FIG. 1308 shows the amino acid sequence (SEQ ID NO:1308) derived from the coding sequence of SEQ ID NO:1307 shown in FIG. 1307.

[1364] FIG. 1309 shows a nucleotide sequence (SEQ ID NO:1309) of a native sequence PRO83828 cDNA, wherein SEQ ID NO:1309 is a clone designated herein as “DNA327892”.

[1365] FIG. 1310 shows the amino acid sequence (SEQ ID NO:1310) derived from the coding sequence of SEQ ID NO:1309 shown in FIG. 1309.

[1366] FIG. 1311 shows a nucleotide sequence (SEQ ID NO:1311) of a native sequence PRO83829 cDNA, wherein SEQ ID NO:1311 is a clone designated herein as “DNA327893”.

[1367] FIG. 1312 shows the amino acid sequence (SEQ ID NO:1312) derived from the coding sequence of SEQ ID NO:1311 shown in FIG. 1311.

[1368] FIG. 1313 shows a nucleotide sequence (SEQ ID NO:1313) of a native sequence PRO50241 cDNA, wherein SEQ ID NO:1313 is a clone designated herein as “DNA255161”.

[1369] FIG. 1314 shows the amino acid sequence (SEQ ID NO:1314) derived from the coding sequence of SEQ ID NO:1313 shown in FIG. 1313.

[1370] FIG. 1315 shows a nucleotide sequence (SEQ ID NO:1315) of a native sequence PRO37102 cDNA, wherein SEQ ID NO:1315 is a clone designated herein as “DNA226639”.

[1371] FIG. 1316 shows the amino acid sequence (SEQ ID NO:1316) derived from the coding sequence of SEQ ID NO:1315 shown in FIG. 1315.

[1372] FIG. 1317 shows a nucleotide sequence (SEQ ID NO:1317) of a native sequence PRO69488 cDNA, wherein SEQ ID NO:1317 is a clone designated herein as “DNA287206”.

[1373] FIG. 1318 shows the amino acid sequence (SEQ ID NO:1318) derived from the coding sequence of SEQ ID NO:1317 shown in FIG. 1317.

[1374] FIG. 1319 shows a nucleotide sequence (SEQ ID NO:1319) of a native sequence PRO83830 cDNA, wherein SEQ ID NO:1319 is a clone designated herein as “DNA327894”.

[1375] FIG. 1320 shows the amino acid sequence (SEQ ID NO:1320) derived from the coding sequence of SEQ ID NO:1319 shown in FIG. 1319.

[1376] FIG. 1321 shows a nucleotide sequence (SEQ ID NO:1321) of a native sequence PRO83831 cDNA, wherein SEQ ID NO:1321 is a clone designated herein as “DNA327895”.

[1377] FIG. 1322 shows the amino acid sequence (SEQ ID NO:1322) derived from the coding sequence of SEQ ID NO:1321 shown in FIG. 1321.

[1378] FIG. 1323 shows a nucleotide sequence (SEQ ID NO:1323) of a native sequence PRO83832 cDNA, wherein SEQ ID NO:1323 is a clone designated herein as “DNA327896”.

[1379] FIG. 1324 shows the amino acid sequence (SEQ ID NO:1324) derived from the coding sequence of SEQ ID NO:1323 shown in FIG. 1323.

[1380] FIG. 1325 shows a nucleotide sequence (SEQ ID NO:1325) of a native sequence PRO33675 cDNA, wherein SEQ ID NO:1325 is a clone designated herein as “DNA210130”.

[1381] FIG. 1326 shows the amino acid sequence (SEQ ID NO:1326) derived from the coding sequence of SEQ ID NO:1325 shown in FIG. 1325.

[1382] FIG. 1327 shows a nucleotide sequence (SEQ ID NO:1327) of a native sequence PRO83833 cDNA, wherein SEQ ID NO:1327 is a clone designated herein as “DNA327897”.

[1383] FIG. 1328 shows the amino acid sequence (SEQ ID NO:1328) derived from the coding sequence of SEQ ID NO:1327 shown in FIG. 1327.

[1384] FIG. 1329 shows a nucleotide sequence (SEQ ID NO:1329) of a native sequence PRO38467 cDNA, wherein SEQ ID NO:1329 is a clone designated herein as “DNA228004”.

[1385] FIG. 1330 shows the amino acid sequence (SEQ ID NO:1330) derived from the coding sequence of SEQ ID NO:1329 shown in FIG. 1329.

[1386] FIG. 1331 shows a nucleotide sequence (SEQ ID NO:1331) of a native sequence PRO38250 cDNA, wherein SEQ ID NO:1331 is a clone designated herein as “DNA227787”.

[1387] FIG. 1332 shows the amino acid sequence (SEQ ID NO:1332) derived from the coding sequence of SEQ ID NO:1331 shown in FIG. 1331.

[1388] FIG. 1333 shows a nucleotide sequence (SEQ ID NO:1333) of a native sequence PRO38854 cDNA, wherein SEQ ID NO:1333 is a clone designated herein as “DNA327898”.

[1389] FIG. 1334 shows the amino acid sequence (SEQ ID NO:1334) derived from the coding sequence of SEQ ID NO:1333 shown in FIG. 1333.

[1390] FIG. 1335 shows a nucleotide sequence (SEQ ID NO:1335) of a native sequence PRO82424 cDNA, wherein SEQ ID NO:1335 is a clone designated herein as “DNA325979”.

[1391] FIG. 1336 shows the amino acid sequence (SEQ ID NO:1336) derived from the coding sequence of SEQ ID NO:1335 shown in FIG. 1335.

[1392] FIG. 1337 shows a nucleotide sequence (SEQ ID NO:1337) of a native sequence PRO83834 cDNA, wherein SEQ ID NO:1337 is a clone designated herein as “DNA327899”.

[1393] FIG. 1338 shows the amino acid sequence (SEQ ID NO:1338) derived from the coding sequence of SEQ ID NO:1337 shown in FIG. 1337.

[1394] FIG. 1339 shows a nucleotide sequence (SEQ ID NO:1339) of a native sequence PRO51573 cDNA, wherein SEQ ID NO:1339 is a clone designated herein as “DNA25654 1”.

[1395] FIG. 1340 shows the amino acid sequence (SEQ ID NO:140) derived from the coding sequence of SEQ ID NO:1339 shown in FIG. 1339.

[1396] FIG. 1341 shows a nucleotide sequence (SEQ ID NO:1341) of a native sequence PRO34753 cDNA, wherein SEQ ID NO:1341 is a clone designated herein as “DNA221079”.

[1397] FIG. 1342 shows the amino acid sequence (SEQ ID NO:1342) derived from the coding sequence of SEQ ID NO:1341 shown in FIG. 1341.

[1398] FIG. 1343 shows a nucleotide sequence (SEQ ID NO:1343) of a native sequence PRO83835 cDNA, wherein SEQ ID NO:1343 is a clone designated herein as “DNA327900”.

[1399] FIG. 1344 shows the amino acid sequence (SEQ ID NO:1344) derived from the coding sequence of SEQ ID NO:1343 shown in FIG. 1343.

[1400] FIG. 1345 shows a nucleotide sequence (SEQ ID NO:1345) of a native sequence PRO83836 cDNA, wherein SEQ ID NO:1345 is a clone designated herein as “DNA327901”.

[1401] FIG. 1346 shows the amino acid sequence (SEQ ID NO:1346) derived from the coding sequence of SEQ ID NO:1345 shown in FIG. 1345.

[1402] FIG. 1347 shows a nucleotide sequence (SEQ ID NO:1347) of a native sequence PRO83837 cDNA, wherein SEQ ID NO:1347 is a clone designated herein as “DNA327902”.

[1403] FIG. 1348 shows the amino acid sequence (SEQ ID NO:1348) derived from the coding sequence of SEQ ID NO:1347 shown in FIG. 1347.

[1404] FIG. 1349 shows a nucleotide sequence (SEQ ID NO:1349) of a native sequence PRO83838 cDNA, wherein SEQ ID NO:1349 is a clone designated herein as “DNA327903”.

[1405] FIG. 1350 shows the amino acid sequence (SEQ ID NO:1350) derived from the coding sequence of SEQ ID NO:1349 shown in FIG. 1349.

[1406] FIG. 1351 shows a nucleotide sequence (SEQ ID NO:1351) of a native sequence PRO83839 cDNA, wherein SEQ ID NO:1351 is a clone designated herein as “DNA327904”.

[1407] FIG. 1352 shows the amino acid sequence (SEQ ID NO:1352) derived from the coding sequence of SEQ ID NO:1351 shown in FIG. 1351.

[1408] FIG. 1353 shows a nucleotide sequence (SEQ ID NO:1353) of a native sequence PRO51567 cDNA, wherein SEQ ID NO:1353 is a clone designated herein as “DNA256535”.

[1409] FIG. 1354 shows the amino acid sequence (SEQ ID NO:1354) derived from the coding sequence of SEQ ID NO:1353 shown in FIG. 1353.

[1410] FIG. 1355 shows a nucleotide sequence (SEQ ID NO:1355) of a native sequence PRO49407 cDNA, wherein SEQ ID NO:1355 is a clone designated herein as “DNA254296”.

[1411] FIG. 1356 shows the amino acid sequence (SEQ ID NO:1356) derived from the coding sequence of SEQ ID NO:1355 shown in FIG. 1355.

[1412] FIG. 1357 shows a nucleotide sequence (SEQ ID NO:1357) of a native sequence PRO83840 cDNA, wherein SEQ ID NO:1357 is a clone designated herein as “DNA327905”.

[1413] FIG. 1358 shows the amino acid sequence (SEQ ID NO:1358) derived from the coding sequence of SEQ ID NO:1357 shown in FIG. 1357.

[1414] FIG. 1359 shows a nucleotide sequence (SEQ ID NO:1359) of a native sequence PRO51079 cDNA, wherein SEQ ID NO:1359 is a clone designated herein as “DNA25603 1”.

[1415] FIG. 1360 shows the amino acid sequence (SEQ ID NO:1360) derived from the coding sequence of SEQ ID NO:1359 shown in FIG. 1359.

[1416] FIG. 1361 shows a nucleotide sequence (SEQ ID NO:1361) of a native sequence PRO83841 cDNA, wherein SEQ ID NO:1361 is a clone designated herein as “DNA327906”.

[1417] FIG. 1362 shows the amino acid sequence (SEQ ID NO:1362) derived from the coding sequence of SEQ ID NO:1361 shown in FIG. 1361.

[1418] FIG. 1363 shows a nucleotide sequence (SEQ ID NO:1363) of a native sequence PRO83842 cDNA, wherein SEQ ID NO:1363 is a clone designated herein as “DNA327907”.

[1419] FIG. 1364 shows the amino acid sequence (SEQ ID NO:1364) derived from the coding sequence of SEQ ID NO:1363 shown in FIG. 1363.

[1420] FIG. 1365 shows a nucleotide sequence (SEQ ID NO:1365) of a native sequence PRO37831 cDNA, wherein SEQ ID NO:1365 is a clone designated herein as “DNA227368”.

[1421] FIG. 1366 shows the amino acid sequence (SEQ ID NO:1366) derived from the coding sequence of SEQ ID NO:1365 shown in FIG. 1365.

[1422] FIG. 1367 shows a nucleotide sequence (SEQ ID NO:1367) of a native sequence PRO83843 cDNA, wherein SEQ ID NO:1367 is a clone designated herein as “DNA327908”.

[1423] FIG. 1368 shows the amino acid sequence (SEQ ID NO:1368) derived from the coding sequence of SEQ ID NO:1367 shown in FIG. 1367.

[1424] FIG. 1369 shows a nucleotide sequence (SEQ ID NO:1369) of a native sequence PRO83844 cDNA, wherein SEQ ID NO:1369 is a clone designated herein as “DNA327909”.

[1425] FIG. 1370 shows the amino acid sequence (SEQ ID NO:1370) derived from the coding sequence of SEQ ID NO:1369 shown in FIG. 1369.

[1426] FIG. 1371 shows a nucleotide sequence (SEQ ID NO:1371) of a native sequence PRO83845 cDNA, wherein SEQ ID NO:1371 is a clone designated herein as “DNA327910”.

[1427] FIG. 1372 shows the amino acid sequence (SEQ ID NO:1372) derived from the coding sequence of SEQ ID NO:1371 shown in FIG. 1371.

[1428] FIG. 1373 shows a nucleotide sequence (SEQ ID NO:1373) of a native sequence PRO83846 cDNA, wherein SEQ ID NO:1373 is a clone designated herein as “DNA32791 1”.

[1429] FIG. 1374 shows the amino acid sequence (SEQ ID NO:1374) derived from the coding sequence of SEQ ID NO:1373 shown in FIG. 1373.

[1430] FIG. 1375 shows a nucleotide sequence (SEQ ID NO:1375) of a native sequence PRO83847 cDNA, wherein SEQ ID NO:1375 is a clone designated herein as “DNA327912”.

[1431] FIG. 1376 shows the amino acid sequence (SEQ ID NO:1376) derived from the coding sequence of SEQ ID NO:1375 shown in FIG. 1375.

[1432] FIG. 1377 shows a nucleotide sequence (SEQ ID NO:1377) of a native sequence PRO83848 cDNA, wherein SEQ ID NO:1377 is a clone designated herein as “DNA327913”.

[1433] FIG. 1378 shows the amino acid sequence (SEQ ID NO:1378) derived from the coding sequence of SEQ ID NO:1377 shown in FIG. 1377.

[1434] FIG. 1379 shows a nucleotide sequence (SEQ ID NO:1379) of a native sequence PRO83849 cDNA, wherein SEQ ID NO:1379 is a clone designated herein as “DNA327914”.

[1435] FIG. 1380 shows the amino acid sequence (SEQ ID NO:1379) derived from the coding sequence of SEQ ID NO:1380 shown in FIG. 1380.

[1436] FIG. 1381 shows a nucleotide sequence (SEQ ID NO:1381) of a native sequence PRO50532 cDNA, wherein SEQ ID NO:1381 is a clone designated herein as “DNA255465”.

[1437] FIG. 1382 shows the amino acid sequence (SEQ ID NO:1382) derived from the coding sequence of SEQ ID NO:1381 shown in FIG. 1381.

[1438] FIG. 1383 shows a nucleotide sequence (SEQ ID NO:1383) of a native sequence PRO83850 cDNA, wherein SEQ ID NO:1383 is a clone designated herein as “DNA327915”.

[1439] FIG. 1384 shows the amino acid sequence (SEQ ID NO:1384) derived from the coding sequence of SEQ ID NO:1383 shown in FIG. 1383.

[1440] FIG. 1385 shows a nucleotide sequence (SEQ ID NO:1385) of a native sequence PRO50821 cDNA, wherein SEQ ID NO:1385 is a clone designated herein as “DNA255766”.

[1441] FIG. 1386 shows the amino acid sequence (SEQ ID NO:1386) derived from the coding sequence of SEQ ID NO:1385 shown in Figure.

[1442] FIG. 1387 shows a nucleotide sequence (SEQ ID NO:1387) of a native sequence PRO70011 cDNA, wherein SEQ ID NO:1387 is a clone designated herein as “DNA288247”.

[1443] FIG. 1388 shows the amino acid sequence (SEQ ID NO:1388) derived from the coding sequence of SEQ ID NO:1387 shown in FIG. 1387.

[1444] FIG. 1389 shows a nucleotide sequence (SEQ ID NO:1389) of a native sequence PRO83851 cDNA, wherein SEQ ID NO:1389 is a clone designated herein as “DNA327916”.

[1445] FIG. 1390 shows the amino acid sequence (SEQ ID NO:1390) derived from the coding sequence of SEQ ID NO:1389 shown in FIG. 1389.

[1446] FIG. 1391 shows a nucleotide sequence (SEQ ID NO:1391) of a native sequence PRO83852 cDNA, wherein SEQ ID NO:1391 is a clone designated herein as “DNA327917”.

[1447] FIG. 1392 shows the amino acid sequence (SEQ ID NO:1392) derived from the coding sequence of SEQ ID NO:1391 shown in FIG. 1391.

[1448] FIG. 1393 shows a nucleotide sequence (SEQ ID NO:1393) of a native sequence PRO83853 cDNA, wherein SEQ ID NO:1393 is a clone designated herein as “DNA327918”.

[1449] FIG. 1394 shows the amino acid sequence (SEQ ID NO:1394) derived from the coding sequence of SEQ ID NO:1393 shown in FIG. 1393.

[1450] FIG. 1395 shows a nucleotide sequence (SEQ ID NO:1395) of a native sequence PRO83854 cDNA, wherein SEQ ID NO:1395 is a clone designated herein as “DNA327919”.

[1451] FIG. 1396 shows the amino acid sequence (SEQ ID NO:1396) derived from the coding sequence of SEQ ID NO:1395 shown in FIG. 1395.

[1452] FIG. 1397 shows a nucleotide sequence (SEQ ID NO:1397) of a native sequence PRO37730 cDNA, wherein SEQ ID NO:1397 is a clone designated herein as “DNA227267”.

[1453] FIG. 1398 shows the amino acid sequence (SEQ ID NO:1398) derived from the coding sequence of SEQ ID NO:1397 shown in FIG. 1397.

[1454] FIG. 1399 shows a nucleotide sequence (SEQ ID NO:1399) of a native sequence PRO38355 cDNA, wherein SEQ ID NO:1399 is a clone designated herein as “DNA327920”.

[1455] FIG. 1400 shows the amino acid sequence (SEQ ID NO:1400) derived from the coding sequence of SEQ ID NO:1399 shown in FIG. 1399.

[1456] FIG. 1401 shows a nucleotide sequence (SEQ ID NO:1401) of a native sequence PRO83856 cDNA, wherein SEQ ID NO:1401 is a clone designated herein as “DNA327921”.

[1457] FIG. 1402 shows the amino acid sequence (SEQ ID NO:1402) derived from the coding sequence of SEQ ID NO:1401 shown in FIG. 1401.

[1458] FIG. 1403 shows a nucleotide sequence (SEQ ID NO:1403) of a native sequence PRO83857 cDNA, wherein SEQ ID NO:1403 is a clone designated herein as “DNA327922”.

[1459] FIG. 1404 shows the amino acid sequence (SEQ ID NO:1404) derived from the coding sequence of SEQ ID NO:1403 shown in FIG. 1403.

[1460] FIG. 1405 shows a nucleotide sequence (SEQ ID NO:1405) of a native sequence PRO6092 cDNA, wherein SEQ ID NO:1405 is a clone designated herein as “DNA327923”.

[1461] FIG. 1406 shows the amino acid sequence (SEQ ID NO:1406) derived from the coding sequence of SEQ ID NO:1405 shown in FIG. 1405.

[1462] FIG. 1407 shows a nucleotide sequence (SEQ ID NO:1407) of a native sequence PRO61855 cDNA, wherein SEQ ID NO:1407 is a clone designated herein as “DNA273901”.

[1463] FIG. 1408 shows the amino acid sequence (SEQ ID NO:1408) derived from the coding sequence of SEQ ID NO:1407 shown in FIG. 1407.

[1464] FIG. 1409 shows a nucleotide sequence (SEQ ID NO:1409) of a native sequence PRO12205 cDNA, wherein SEQ ID NO:1409 is a clone designated herein as “DNA151848”.

[1465] FIG. 1410 shows the amino acid sequence (SEQ ID NO:1410) derived from the coding sequence of SEQ ID NO:1409 shown in FIG. 1409.

[1466] FIG. 1411 shows a nucleotide sequence (SEQ ID NO:1411) of a native sequence PRO58388 cDNA, wherein SEQ ID NO:1411 is a clone designated herein as “DNA269992”.

[1467] FIG. 1412 shows the amino acid sequence (SEQ ID NO:1412) derived from the coding sequence of SEQ ID NO:1411 shown in FIG. 1411.

[1468] FIG. 1413 shows a nucleotide sequence (SEQ ID NO:1413) of a native sequence PRO83858 cDNA, wherein SEQ ID NO:1413 is a clone designated herein as “DNA327924”.

[1469] FIG. 1414 shows the amino acid sequence (SEQ ID NO:1414) derived from the coding sequence of SEQ ID NO:1413 shown in FIG. 1413.

[1470] FIG. 1415 shows a nucleotide sequence (SEQ ID NO:1415) of a native sequence PRO83859 cDNA, wherein SEQ ID NO:1415 is a clone designated herein as “DNA327925”.

[1471] FIG. 1416 shows the amino acid sequence (SEQ ID NO:1416) derived from the coding sequence of SEQ ID NO:1415 shown in FIG. 1415.

[1472] FIG. 1417 shows a nucleotide sequence (SEQ ID NO:1417) of a native sequence PRO83860 cDNA, wherein SEQ ID NO:1417 is a clone designated herein as “DNA327926”.

[1473] FIG. 1418 shows the amino acid sequence (SEQ ID NO:1418) derived from the coding sequence of SEQ ID NO:1417 shown in FIG. 1417.

[1474] FIG. 1419 shows a nucleotide sequence (SEQ ID NO:1419) of a native sequence PRO57311 cDNA, wherein SEQ ID NO:1419 is a clone designated herein as “DNA327927”.

[1475] FIG. 1420 shows the amino acid sequence (SEQ ID NO:1420) derived from the coding sequence of SEQ ID NO:1419 shown in FIG. 1419.

[1476] FIG. 1421 shows a nucleotide sequence (SEQ ID NO:1421) of a native sequence PRO1082 cDNA, wherein SEQ ID NO:1421 is a clone designated herein as “DNA327928”.

[1477] FIG. 1422 shows the amino acid sequence (SEQ ID NO:1422) derived from the coding sequence of SEQ ID NO:1421 shown in FIG. 1421.

[1478] FIG. 1423 shows a nucleotide sequence (SEQ ID NO:1423) of a native sequence cDNA, wherein SEQ ID NO:1423 is a clone designated herein as “DNA195869”.

[1479] FIG. 1424 shows a nucleotide sequence (SEQ ID NO:1424) of a native sequence PRO83861 cDNA, wherein SEQ ID NO:1424 is a clone designated herein as “DNA327929”.

[1480] FIG. 1425 shows the amino acid sequence (SEQ ID NO:1425) derived from the coding sequence of SEQ ID NO:1424 shown in FIG. 1424.

[1481] FIG. 1426 shows a nucleotide sequence (SEQ ID NO:1426) of a native sequence PRO83862 cDNA, wherein SEQ ID NO:1426 is a clone designated herein as “DNA327930”.

[1482] FIG. 1427 shows the amino acid sequence (SEQ ID NO:1427) derived from the coding sequence of SEQ ID NO:1426 shown in FIG. 1426.

[1483] FIG. 1428 shows a nucleotide sequence (SEQ ID NO:1428) of a native sequence PRO83863 cDNA, wherein SEQ ID NO:1428 is a clone designated herein as “DNA327931”.

[1484] FIG. 1429 shows the amino acid sequence (SEQ ID NO:1429) derived from the coding sequence of SEQ ID NO:1428 shown in FIG. 1428.

[1485] FIG. 1430 shows a nucleotide sequence (SEQ ID NO:1430) of a native sequence cDNA, wherein SEQ ID NO:1430 is a clone designated herein as “DNA273119”.

[1486] FIG. 1431 shows a nucleotide sequence (SEQ ID NO:1431) of a native sequence PRO83864 cDNA, wherein SEQ ID NO:1431 is a clone designated herein as “DNA327932”.

[1487] FIG. 1432 shows the amino acid sequence (SEQ ID NO:1432) derived from the coding sequence of SEQ ID NO:1431 shown in FIG. 1431.

[1488] FIG. 1433 shows a nucleotide sequence (SEQ ID NO:1433) of a native sequence PRO62262 cDNA, wherein SEQ ID NO:1433 is a clone designated herein as “DNA274348”.

[1489] FIG. 1434 shows the amino acid sequence (SEQ ID NO:1434) derived from the coding sequence of SEQ ID NO:1433 shown in FIG. 1433.

[1490] FIG. 1435 shows a nucleotide sequence (SEQ ID NO:1435) of a native sequence PRO83865 cDNA, wherein SEQ ID NO:1435 is a clone designated herein as “DNA327933”.

[1491] FIG. 1436 shows the amino acid sequence (SEQ ID NO:1436) derived from the coding sequence of SEQ ID NO:1435 shown in FIG. 1435.

[1492] FIG. 1437 shows a nucleotide sequence (SEQ ID NO:1437) of a native sequence PRO4342 cDNA, wherein SEQ ID NO:1437 is a clone designated herein as “DNA327934”.

[1493] FIG. 1438 shows the amino acid sequence (SEQ ID NO:1438) derived from the coding sequence of SEQ ID NO:1437 shown in FIG. 1437.

[1494] FIG. 1439 shows a nucleotide sequence (SEQ ID NO:1439) of a native sequence PRO1314 cDNA, wherein SEQ ID NO:1439 is a clone designated herein as “DNA324364”.

[1495] FIG. 1440 shows the amino acid sequence (SEQ ID NO:1440) derived from the coding sequence of SEQ ID NO:1439 shown in FIG. 1439.

[1496] FIG. 1441 shows a nucleotide sequence (SEQ ID NO:1441) of a native sequence PRO83866 cDNA, wherein SEQ ID NO:1441 is a clone designated herein as “DNA327935”.

[1497] FIG. 1442 shows the amino acid sequence (SEQ ID NO:1442) derived from the coding sequence of SEQ ID NO:1441 shown in FIG. 1441.

[1498] FIG. 1443 shows a nucleotide sequence (SEQ ID NO:1443) of a native sequence PRO718 cDNA, wherein SEQ ID NO:1443 is a clone designated herein as “DNA327936”.

[1499] FIG. 1444 shows the amino acid sequence (SEQ ID NO:1444) derived from the coding sequence of SEQ ID NO:1443 shown in FIG. 1443.

[1500] FIG. 1445 shows a nucleotide sequence (SEQ ID NO:1445) of a native sequence PRO83867 cDNA, wherein SEQ ID NO:1445 is a clone designated herein as “DNA327937”.

[1501] FIG. 1446 shows the amino acid sequence (SEQ ID NO:1446) derived from the coding sequence of SEQ ID NO:1445 shown in FIG. 1445.

[1502] FIG. 1447 shows a nucleotide sequence (SEQ ID NO:1447) of a native sequence PRO11577 cDNA, wherein SEQ ID NO:1447 is a clone designated herein as “DNA150654”.

[1503] FIG. 1448 shows the amino acid sequence (SEQ ID NO:1448) derived from the coding sequence of SEQ ID NO:1447 shown in FIG. 1447.

[1504] FIG. 1449 shows a nucleotide sequence (SEQ ID NO:1449) of a native sequence PRO83868 cDNA, wherein SEQ ID NO:1449 is a clone designated herein as “DNA327938”.

[1505] FIG. 1450 shows the amino acid sequence (SEQ ID NO:1450) derived from the coding sequence of SEQ ID NO:1449 shown in FIG. 1449.

[1506] FIG. 1451 shows a nucleotide sequence (SEQ ID NO:1451) of a native sequence PRO83869 cDNA, wherein SEQ ID NO:1451 is a clone designated herein as “DNA327939”.

[1507] FIG. 1452 shows the amino acid sequence (SEQ ID NO:1452) derived from the coding sequence of SEQ ID NO:1451 shown in FIG. 1451.

[1508] FIG. 1453 shows a nucleotide sequence (SEQ ID NO:1453) of a native sequence PRO50262 cDNA, wherein SEQ ID NO:1453 is a clone designated herein as “DNA255183”.

[1509] FIG. 1454 shows the amino acid sequence (SEQ ID NO:1454) derived from the coding sequence of SEQ ID NO:1453 shown in FIG. 1453.

[1510] FIG. 1455 shows a nucleotide sequence (SEQ ID NO:1455) of a native sequence PRO1375 cDNA, wherein SEQ ID NO:1455 is a clone designated herein as “DNA327940”.

[1511] FIG. 1456 shows the amino acid sequence (SEQ ID NO:1456) derived from the coding sequence of SEQ ID NO:1455 shown in FIG. 1455.

[1512] FIG. 1457 shows a nucleotide sequence (SEQ ID NO:1457) of a native sequence PRO944 cDNA, wherein SEQ ID NO:1457 is a clone designated herein as “DNA32794 1”.

[1513] FIG. 1458 shows the amino acid sequence (SEQ ID NO:1458) derived from the coding sequence of SEQ ID NO:1457 shown in FIG. 1457.

[1514] FIG. 1459 shows a nucleotide sequence (SEQ ID NO:1459) of a native sequence PRO83870 cDNA, wherein SEQ ID NO:1459 is a clone designated herein as “DNA327942”.

[1515] FIG. 1460 shows the amino acid sequence (SEQ ID NO:1460) derived from the coding sequence of SEQ ID NO:1459 shown in FIG. 1459.

[1516] FIG. 1461 shows a nucleotide sequence (SEQ ID NO:1461) of a native sequence PRO865 cDNA, wherein SEQ ID NO:1461 is a clone designated herein as “DNA327943”.

[1517] FIG. 1462 shows the amino acid sequence (SEQ ID NO:1462) derived from the coding sequence of SEQ ID NO:1461 shown in FIG. 1461.

[1518] FIG. 1463 shows a nucleotide sequence (SEQ ID NO:1463) of a native sequence PRO7433 cDNA, wherein SEQ ID NO:1463 is a clone designated herein as “DNA327944”.

[1519] FIG. 1464 shows the amino acid sequence (SEQ ID NO:1464) derived from the coding sequence of SEQ ID NO:1463 shown in Figure.

[1520] FIG. 1465 shows a nucleotide sequence (SEQ ID NO:1465) of a native sequence PRO82384 cDNA, wherein SEQ ID NO:1465 is a clone designated herein as “DNA325936”.

[1521] FIG. 1466 shows the amino acid sequence (SEQ ID NO:1466) derived from the coding sequence of SEQ ID NO:1465 shown in FIG. 1465.

[1522] FIG. 1467 shows a nucleotide sequence (SEQ ID NO:1467) of a native sequence PRO83871 cDNA, wherein SEQ ID NO:1467 is a clone designated herein as “DNA327945”.

[1523] FIG. 1468 shows the amino acid sequence (SEQ ID NO:1468) derived from the coding sequence of SEQ ID NO:1467 shown in FIG. 1467.

[1524] FIG. 1469 shows a nucleotide sequence (SEQ ID NO:1469) of a native sequence PRO49401 cDNA, wherein SEQ ID NO:1469 is a clone designated herein as “DNA254290”.

[1525] FIG. 1470 shows the amino acid sequence (SEQ ID NO:1470) derived from the coding sequence of SEQ ID NO:1469 shown in FIG. 1469.

[1526] FIG. 1471 shows a nucleotide sequence (SEQ ID NO:1471) of a native sequence PRO83872 cDNA, wherein SEQ ID NO:1471 is a clone designated herein as “DNA327946”.

[1527] FIG. 1472 shows the amino acid sequence (SEQ ID NO:1472) derived from the coding sequence of SEQ ID NO:1471 shown in FIG. 1471.

[1528] FIG. 1473 shows a nucleotide sequence (SEQ ID NO:1473) of a native sequence PRO83873 cDNA, wherein SEQ ID NO:1473 is a clone designated herein as “DNA327947”.

[1529] FIG. 1474 shows the amino acid sequence (SEQ ID NO:1474) derived from the coding sequence of SEQ ID NO:1473 shown in FIG. 1473.

[1530] FIG. 1475 shows a nucleotide sequence (SEQ ID NO:1475) of a native sequence PRO10928 cDNA, wherein SEQ ID NO:1475 is a clone designated herein as “DNA152786”.

[1531] FIG. 1476 shows the amino acid sequence (SEQ ID NO:1476) derived from the coding sequence of SEQ ID NO:1475 shown in FIG. 1475.

[1532] FIG. 1477 shows a nucleotide sequence (SEQ ID NO:1477) of a native sequence PRO81339 cDNA, wherein SEQ ID NO:1477 is a clone designated herein as “DNA324707”.

[1533] FIG. 1478 shows the amino acid sequence (SEQ ID NO:1478) derived from the coding sequence of SEQ ID NO:1477 shown in FIG. 1477.

[1534] FIG. 1479 shows a nucleotide sequence (SEQ ID NO:1479) of a native sequence PRO69660 cDNA, wherein SEQ ID NO:1479 is a clone designated herein as “DNA327948”.

[1535] FIG. 1480 shows the amino acid sequence (SEQ ID NO:1480) derived from the coding sequence of SEQ ID NO:1479 shown in FIG. 1479.

[1536] FIG. 1481 shows a nucleotide sequence (SEQ ID NO:1481) of a native sequence PRO83874 cDNA, wherein SEQ ID NO:1481 is a clone designated herein as “DNA327949”.

[1537] FIG. 1482 shows the amino acid sequence (SEQ ID NO:1482) derived from the coding sequence of SEQ ID NO:1481 shown in FIG. 1481.

[1538] FIG. 1483 shows a nucleotide sequence (SEQ ID NO:1483) of a native sequence PRO83875 cDNA, wherein SEQ ID NO:1483 is a clone designated herein as “DNA327950”.

[1539] FIG. 1484 shows the amino acid sequence (SEQ ID NO:1484) derived from the coding sequence of SEQ ID NO:1483 shown in FIG. 1483.

[1540] FIG. 1485 shows a nucleotide sequence (SEQ ID NO:1485) of a native sequence PRO83876 cDNA, wherein SEQ ID NO:1485 is a clone designated herein as “DNA327951”.

[1541] FIG. 1486 shows the amino acid sequence (SEQ ID NO:1486) derived from the coding sequence of SEQ ID NO:1485 shown in FIG. 1485.

[1542] FIG. 1487 shows a nucleotide sequence (SEQ ID NO:1487) of a native sequence PRO83877 cDNA, wherein SEQ ID NO:1487 is a clone designated herein as “DNA327952”.

[1543] FIG. 1488 shows the amino acid sequence (SEQ ID NO:1488) derived from the coding sequence of SEQ ID NO:1487 shown in Figure.

[1544] FIG. 1489 shows a nucleotide sequence (SEQ ID NO:1489) of a native sequence PRO83878 cDNA, wherein SEQ ID NO:1489 is a clone designated herein as “DNA327953”.

[1545] FIG. 1490 shows the amino acid sequence (SEQ ID NO:1490) derived from the coding sequence of SEQ ID NO:1489 shown in FIG. 1489.

[1546] FIG. 1491 shows a nucleotide sequence (SEQ ID NO:1491) of a native sequence PRO52040 cDNA, wherein SEQ ID NO:1491 is a clone designated herein as “DNA257461”.

[1547] FIG. 1492 shows the amino acid sequence (SEQ ID NO:1492) derived from the coding sequence of SEQ ID NO:1491 shown in FIG. 1491.

[1548] FIG. 1493 shows a nucleotide sequence (SEQ ID NO:1493) of a native sequence PRO83879 cDNA, wherein SEQ ID NO:1493 is a clone designated herein as “DNA327954”.

[1549] FIG. 1494 shows the amino acid sequence (SEQ ID NO:1494) derived from the coding sequence of SEQ ID NO:1493 shown in FIG. 1493.

[1550] FIG. 1495 shows a nucleotide sequence (SEQ ID NO:1495) of a native sequence PRO83880 cDNA, wherein SEQ ID NO:1495 is a clone designated herein as “DNA327955”.

[1551] FIG. 1496 shows the amino acid sequence (SEQ ID NO:1496) derived from the coding sequence of SEQ ID NO:1495 shown in FIG. 1495.

[1552] FIG. 1497 shows a nucleotide sequence (SEQ ID NO:1497) of a native sequence PRO83881 cDNA, wherein SEQ ID NO:1497 is a clone designated herein as “DNA327956”.

[1553] FIG. 1498 shows the amino acid sequence (SEQ ID NO:1498) derived from the coding sequence of SEQ ID NO:1497 shown in FIG. 1497.

[1554] FIG. 1499 shows a nucleotide sequence (SEQ ID NO:1499) of a native sequence PRO83882 cDNA, wherein SEQ ID NO:1499 is a clone designated herein as “DNA327957”.

[1555] FIG. 1500 shows the amino acid sequence (SEQ ID NO:1500) derived from the coding sequence of SEQ ID NO:1499 shown in FIG. 1499.

[1556] FIG. 1501 shows a nucleotide sequence (SEQ ID NO:1501) of a native sequence PRO82861 cDNA, wherein SEQ ID NO:1501 is a clone designated herein as “DNA326483”.

[1557] FIG. 1502 shows the amino acid sequence (SEQ ID NO:1502) derived from the coding sequence of SEQ ID NO:1501 shown in FIG. 1501.

[1558] FIG. 1503 shows a nucleotide sequence (SEQ ID NO:1503) of a native sequence PRO50738 cDNA, wherein SEQ ID NO:1503 is a clone designated herein as “DNA255676”.

[1559] FIG. 1504 shows the amino acid sequence (SEQ ID NO:1504) derived from the coding sequence of SEQ ID NO:1503 shown in FIG. 1503.

[1560] FIG. 1505 shows a nucleotide sequence (SEQ ID NO:1505) of a native sequence PRO61417 cDNA, wherein SEQ ID NO:1505 is a clone designated herein as “DNA273418”.

[1561] FIG. 1506 shows the amino acid sequence (SEQ ID NO:1506) derived from the coding sequence of SEQ ID NO:1505 shown in FIG. 1505.

[1562] FIG. 1507 shows a nucleotide sequence (SEQ ID NO:1507) of a native sequence PRO23554 cDNA, wherein SEQ ID NO:1507 is a clone designated herein as “DNA327958”.

[1563] FIG. 1508 shows the amino acid sequence (SEQ ID NO:1508) derived from the coding sequence of SEQ ID NO:1507 shown in FIG. 1507.

[1564] FIG. 1509 shows a nucleotide sequence (SEQ ID NO:1509) of a native sequence PRO83883 cDNA, wherein SEQ ID NO:1509 is a clone designated herein as “DNA327959”.

[1565] FIG. 1510 shows the amino acid sequence (SEQ ID NO:1510) derived from the coding sequence of SEQ ID NO:1509 shown in FIG. 1509.

[1566] FIG. 1511 shows a nucleotide sequence (SEQ ID NO:1511) of a native sequence PRO52449 cDNA, wherein SEQ ID NO:1511 is a clone designated herein as “DNA257916”.

[1567] FIG. 1512 shows the amino acid sequence (SEQ ID NO:1512) derived from the coding sequence of SEQ ID NO:1511 shown in FIG. 1511.

[1568] FIG. 1513 shows a nucleotide sequence (SEQ ID NO:1513) of a native sequence PRO83884 cDNA, wherein SEQ ID NO:1513 is a clone designated herein as “DNA327960”.

[1569] FIG. 1514 shows the amino acid sequence (SEQ ID NO:1514) derived from the coding sequence of SEQ ID NO:1513 shown in Figure.

[1570] FIG. 1515 shows a nucleotide sequence (SEQ ID NO:1515) of a native sequence PRO83885 cDNA, wherein SEQ ID NO:1515 is a clone designated herein as “DNA327961”.

[1571] FIG. 1516 shows the amino acid sequence (SEQ ID NO:1516) derived from the coding sequence of SEQ ID NO:1515 shown in FIG. 1515.

[1572] FIG. 1517 shows a nucleotide sequence (SEQ ID NO:1517) of a native sequence PRO54660 cDNA, wherein SEQ ID NO:1517 is a clone designated herein as “DNA327962”.

[1573] FIG. 1518 shows the amino acid sequence (SEQ ID NO:1518) derived from the coding sequence of SEQ ID NO:1517 shown in FIG. 1517.

[1574] FIG. 1519 shows a nucleotide sequence (SEQ ID NO:1519) of a native sequence PRO83886 cDNA, wherein SEQ ID NO:1519 is a clone designated herein as “DNA327963”.

[1575] FIG. 1520 shows the amino acid sequence (SEQ ID NO:1520) derived from the coding sequence of SEQ ID NO:1519 shown in FIG. 1519.

[1576] FIG. 1521 shows a nucleotide sequence (SEQ ID NO:1521) of a native sequence PRO83887 cDNA, wherein SEQ ID NO:1521 is a clone designated herein as “DNA327964”.

[1577] FIG. 1522 shows the amino acid sequence (SEQ ID NO:1522) derived from the coding sequence of SEQ ID NO:1521 shown in FIG. 1521.

[1578] FIG. 1523 shows a nucleotide sequence (SEQ ID NO:1523) of a native sequence PRO83888 cDNA, wherein SEQ ID NO:1523 is a clone designated herein as “DNA327965”.

[1579] FIG. 1524 shows the amino acid sequence (SEQ ID NO:1524) derived from the coding sequence of SEQ ID NO:1523 shown in FIG. 1523.

[1580] FIG. 1525 shows a nucleotide sequence (SEQ ID NO:1525) of a native sequence PRO83889 cDNA, wherein SEQ ID NO:1525 is a clone designated herein as “DNA327966”.

[1581] FIG. 1526 shows the amino acid sequence (SEQ ID NO:1526) derived from the coding sequence of SEQ ID NO:1525 shown in FIG. 1525.

[1582] FIG. 1527 shows a nucleotide sequence (SEQ ID NO:1527) of a native sequence PRO1065 cDNA, wherein SEQ ID NO:1527 is a clone designated herein as “DNA327200”.

[1583] FIG. 1528 shows the amino acid sequence (SEQ ID NO:1528) derived from the coding sequence of SEQ ID NO:1527 shown in FIG. 1527.

[1584] FIG. 1529 shows a nucleotide sequence (SEQ ID NO:1529) of a native sequence PRO83890 cDNA, wherein SEQ ID NO:1529 is a clone designated herein as “DNA327967”.

[1585] FIG. 1530 shows the amino acid sequence (SEQ ID NO:1530) derived from the coding sequence of SEQ ID NO:1529 shown in FIG. 1529.

[1586] FIG. 1531 shows a nucleotide sequence (SEQ ID NO:1531) of a native sequence PRO83891 cDNA, wherein SEQ ID NO:1531 is a clone designated herein as “DNA327968”.

[1587] FIG. 1532 shows the amino acid sequence (SEQ ID NO:1532) derived from the coding sequence of SEQ ID NO:1531 shown in FIG. 1531.

[1588] FIG. 1533 shows a nucleotide sequence (SEQ ID NO:1533) of a native sequence PRO301 cDNA, wherein SEQ ID NO:1533 is a clone designated herein as “DNA327969”.

[1589] FIG. 1534 shows the amino acid sequence (SEQ ID NO:1534) derived from the coding sequence of SEQ ID NO:1533 shown in FIG. 1533.

[1590] FIG. 1535 shows a nucleotide sequence (SEQ ID NO:1535) of a native sequence PRO83473 cDNA, wherein SEQ ID NO:1535 is a clone designated herein as “DNA327197”.

[1591] FIG. 1536 shows the amino acid sequence (SEQ ID NO:1536) derived from the coding sequence of SEQ ID NO:1535 shown in FIG. 1535.

[1592] FIG. 1537 shows a nucleotide sequence (SEQ ID NO:1537) of a native sequence PRO83892 cDNA, wherein SEQ ID NO:1537 is a clone designated herein as “DNA327970”.

[1593] FIG. 1538 shows the amino acid sequence (SEQ ID NO:1538) derived from the coding sequence of SEQ ID NO:1537 shown in FIG. 1537.

[1594] FIG. 1539 shows a nucleotide sequence (SEQ ID NO:1539) of a native sequence PRO83893 cDNA, wherein SEQ ID NO:1539 is a clone designated herein as “DNA327971”.

[1595] FIG. 1540 shows the amino acid sequence (SEQ ID NO:1540) derived from the coding sequence of SEQ ID NO:1539 shown in FIG. 1539.

[1596] FIG. 1541 shows a nucleotide sequence (SEQ ID NO:1541) of a native sequence PRO83474 cDNA, wherein SEQ ID NO:1541 is a clone designated herein as “DNA327198”.

[1597] FIG. 1542 shows the amino acid sequence (SEQ ID NO:1542) derived from the coding sequence of SEQ ID NO:1541 shown in FIG. 1541.

[1598] FIG. 1543 shows a nucleotide sequence (SEQ ID NO:1543) of a native sequence PRO83894 cDNA, wherein SEQ ID NO:1543 is a clone designated herein as “DNA327972”.

[1599] FIG. 1544 shows the amino acid sequence (SEQ ID NO:1544) derived from the coding sequence of SEQ ID NO:1543 shown in FIG. 1543.

[1600] FIG. 1545 shows a nucleotide sequence (SEQ ID NO:1545) of a native sequence PRO83895 cDNA, wherein SEQ ID NO:1545 is a clone designated herein as “DNA327973”.

[1601] FIG. 1546 shows the amino acid sequence (SEQ ID NO:1546) derived from the coding sequence of SEQ ID NO:1545 shown in FIG. 1545.

[1602] FIG. 1547 shows a nucleotide sequence (SEQ ID NO:1547) of a native sequence PRO83896 cDNA, wherein SEQ ID NO:1547 is a clone designated herein as “DNA327974”.

[1603] FIG. 1548 shows the amino acid sequence (SEQ ID NO:1548) derived from the coding sequence of SEQ ID NO:1547 shown in FIG. 1547.

[1604] FIG. 1549 shows a nucleotide sequence (SEQ ID NO:1549) of a native sequence PRO83897 cDNA, wherein SEQ ID NO:1549 is a clone designated herein as “DNA327975”.

[1605] FIG. 1550 shows the amino acid sequence (SEQ ID NO:1550) derived from the coding sequence of SEQ ID NO:1549 shown in FIG. 1549.

[1606] FIG. 1551 shows a nucleotide sequence (SEQ ID NO:1551) of a native sequence PRO69574 cDNA, wherein SEQ ID NO:1551 is a clone designated herein as “DNA327976”.

[1607] FIG. 1552 shows the amino acid sequence (SEQ ID NO:1552) derived from the coding sequence of SEQ ID NO:1521 shown in FIG. 1521.

[1608] FIG. 1553 shows a nucleotide sequence (SEQ ID NO:1553) of a native sequence PRO83898 cDNA, wherein SEQ ID NO:1553 is a clone designated herein as “DNA327977”.

[1609] FIG. 1554 shows the amino acid sequence (SEQ ID NO:1554) derived from the coding sequence of SEQ ID NO:1553 shown in FIG. 1553.

[1610] FIG. 1555 shows a nucleotide sequence (SEQ ID NO:1555) of a native sequence PRO83899 cDNA, wherein SEQ ID NO:1555 is a clone designated herein as “DNA327978”.

[1611] FIG. 1556 shows the amino acid sequence (SEQ ID NO:1556) derived from the coding sequence of SEQ ID NO:1555 shown in FIG. 1555.

[1612] FIG. 1557 shows a nucleotide sequence (SEQ ID NO:1557) of a native sequence PRO82633 cDNA, wherein SEQ ID NO:1557 is a clone designated herein as “DNA327979”.

[1613] FIG. 1558 shows the amino acid sequence (SEQ ID NO:1558) derived from the coding sequence of SEQ ID NO:1557 shown in FIG. 1557.

[1614] FIG. 1559 shows a nucleotide sequence (SEQ ID NO:1559) of a native sequence PRO83900 cDNA, wherein SEQ ID NO:1559 is a clone designated herein as “DNA327980”.

[1615] FIG. 1560 shows the amino acid sequence (SEQ ID NO:1560) derived from the coding sequence of SEQ ID NO:1559 shown in FIG. 1559.

[1616] FIG. 1561 shows a nucleotide sequence (SEQ ID NO:1561) of a native sequence PRO83901 cDNA, wherein SEQ ID NO:1561 is a clone designated herein as “DNA327981”.

[1617] FIG. 1562 shows the amino acid sequence (SEQ ID NO:1562) derived from the coding sequence of SEQ ID NO:1561 shown in FIG. 1561.

[1618] FIG. 1563 shows a nucleotide sequence (SEQ ID NO:1563) of a native sequence PRO83902 cDNA, wherein SEQ ID NO:1563 is a clone designated herein as “DNA327982”.

[1619] FIG. 1564 shows the amino acid sequence (SEQ ID NO:1654) derived from the coding sequence of SEQ ID NO:1563 shown in FIG. 1563.

[1620] FIG. 1565 shows a nucleotide sequence (SEQ ID NO:1565) of a native sequence PRO83903 cDNA, wherein SEQ ID NO:1565 is a clone designated herein as “DNA327983”.

[1621] FIG. 1566 shows the amino acid sequence (SEQ ID NO:1566) derived from the coding sequence of SEQ ID NO:1565 shown in FIG. 1565.

[1622] FIG. 1567 shows a nucleotide sequence (SEQ ID NO:1567) of a native sequence PRO83904 cDNA, wherein SEQ ID NO:1567 is a clone designated herein as “DNA327984”.

[1623] FIG. 1568 shows the amino acid sequence (SEQ ID NO:1568) derived from the coding sequence of SEQ ID NO:1567 shown in FIG. 1567.

[1624] FIG. 1569 shows a nucleotide sequence (SEQ ID NO:1569) of a native sequence PRO23253 cDNA, wherein SEQ ID NO:1569 is a clone designated herein as “DNA169523”.

[1625] FIG. 1570 shows the amino acid sequence (SEQ ID NO:1570) derived from the coding sequence of SEQ ID NO:1569 shown in FIG. 1569.

[1626] FIG. 1571 shows a nucleotide sequence (SEQ ID NO:1571) of a native sequence PRO83905 cDNA, wherein SEQ ID NO:1571 is a clone designated herein as “DNA327985”.

[1627] FIG. 1572 shows the amino acid sequence (SEQ ID NO:1572) derived from the coding sequence of SEQ ID NO:1571 shown in FIG. 1571.

[1628] FIG. 1573 shows a nucleotide sequence (SEQ ID NO:1573) of a native sequence PRO83906 cDNA, wherein SEQ ID NO:1573 is a clone designated herein as “DNA327986”.

[1629] FIG. 1574 shows the amino acid sequence (SEQ ID NO:1574) derived from the coding sequence of SEQ ID NO:1573 shown in FIG. 1573.

[1630] FIG. 1575 shows a nucleotide sequence (SEQ ID NO:1575) of a native sequence PRO83907 cDNA, wherein SEQ ID NO:1575 is a clone designated herein as “DNA327987”.

[1631] FIG. 1576 shows the amino acid sequence (SEQ ID NO:1576) derived from the coding sequence of SEQ ID NO:1575 shown in FIG. 1575.

[1632] FIG. 1577 shows a nucleotide sequence (SEQ ID NO:1577) of a native sequence PRO83908 cDNA, wherein SEQ ID NO:1577 is a clone designated herein as “DNA327988”.

[1633] FIG. 1578 shows the amino acid sequence (SEQ ID NO:1578) derived from the coding sequence of SEQ ID NO:1577 shown in FIG. 1577.

[1634] FIG. 1579 shows a nucleotide sequence (SEQ ID NO:1579) of a native sequence PRO83909 cDNA, wherein SEQ ID NO:1579 is a clone designated herein as “DNA327989”.

[1635] FIG. 1580 shows the amino acid sequence (SEQ ID NO:1580) derived from the coding sequence of SEQ ID NO:1579 shown in FIG. 1579.

[1636] FIG. 1581 shows a nucleotide sequence (SEQ ID NO:1581) of a native sequence PRO83910 cDNA, wherein SEQ ID NO:1581 is a clone designated herein as “DNA327990”.

[1637] FIG. 1582 shows the amino acid sequence (SEQ ID NO:1582) derived from the coding sequence of SEQ ID NO:1581 shown in FIG. 1581.

[1638] FIG. 1583 shows a nucleotide sequence (SEQ ID NO:1583) of a native sequence cDNA, wherein SEQ ID NO:1583 is a clone designated herein as “DNA327991”.

[1639] FIG. 1584 shows a nucleotide sequence (SEQ ID NO:1584) of a native sequence PRO83912 cDNA, wherein SEQ ID NO:1584 is a clone designated herein as “DNA327992”.

[1640] FIG. 1585 shows the amino acid sequence (SEQ ID NO:1585) derived from the coding sequence of SEQ ID NO:1584 shown in FIG. 1584.

[1641] FIG. 1586 shows a nucleotide sequence (SEQ ID NO:1586) of a native sequence PRO81138 cDNA, wherein SEQ ID NO:1586 is a clone designated herein as “DNA327993”.

[1642] FIG. 1587 shows the amino acid sequence (SEQ ID NO:1587) derived from the coding sequence of SEQ ID NO:1586 shown in FIG. 1586.

[1643] FIG. 1588 shows a nucleotide sequence (SEQ ID NO:1588) of a native sequence cDNA, wherein SEQ ID NO:1588 is a clone designated herein as “DNA327994”.

[1644] FIG. 1589 shows a nucleotide sequence (SEQ ID NO:1589) of a native sequence PRO83914 cDNA, wherein SEQ ID NO:1589 is a clone designated herein as “DNA327995”.

[1645] FIG. 1590 shows the amino acid sequence (SEQ ID NO:1590) derived from the coding sequence of SEQ ID NO:1589 shown in FIG. 1589.

[1646] FIG. 1591 shows a nucleotide sequence (SEQ ID NO:1591) of a native sequence PRO83915 cDNA, wherein SEQ ID NO:1591 is a clone designated herein as “DNA327996”.

[1647] FIG. 1592 shows the amino acid sequence (SEQ ID NO:1592) derived from the coding sequence of SEQ ID NO:1591 shown in FIG. 1591.

[1648] FIG. 1593 shows a nucleotide sequence (SEQ ID NO:1593) of a native sequence PRO83916 cDNA, wherein SEQ ID NO:1593 is a clone designated herein as “DNA327997”.

[1649] FIG. 1594 shows the amino acid sequence (SEQ ID NO:1594) derived from the coding sequence of SEQ ID NO:1593 shown in FIG. 1593.

[1650] FIG. 1595 shows a nucleotide sequence (SEQ ID NO:1595) of a native sequence cDNA, wherein SEQ ID NO:1595 is a clone designated herein as “DNA327998”.

[1651] FIG. 1596 shows a nucleotide sequence (SEQ ID NO:1596) of a native sequence PRO83918 cDNA, wherein SEQ ID NO:1596 is a clone designated herein as “DNA327999”.

[1652] FIG. 1597 shows the amino acid sequence (SEQ ID NO:1597) derived from the coding sequence of SEQ ID NO:1596 shown in FIG. 1596.

[1653] FIG. 1598 shows a nucleotide sequence (SEQ ID NO:1598) of a native sequence PRO83919 cDNA, wherein SEQ ID NO:1598 is a clone designated herein as “DNA328000”.

[1654] FIG. 1599 shows the amino acid sequence (SEQ ID NO:1599) derived from the coding sequence of SEQ ID NO:1598 shown in FIG. 1598.

[1655] FIG. 1600 shows a nucleotide sequence (SEQ ID NO:1600) of a native sequence PRO83920 cDNA, wherein SEQ ID NO:1600 is a clone designated herein as “DNA328001”.

[1656] FIG. 1601 shows the amino acid sequence (SEQ ID NO:1601) derived from the coding sequence of SEQ ID NO:1600 shown in FIG. 1600.

[1657] FIG. 1602 shows a nucleotide sequence (SEQ ID NO:1602) of a native sequence PRO83921 cDNA, wherein SEQ ID NO:1602 is a clone designated herein as “DNA328002”.

[1658] FIG. 1603 shows the amino acid sequence (SEQ ID NO:1603) derived from the coding sequence of SEQ ID NO:1602 shown in FIG. 1602.

[1659] FIG. 1604 shows a nucleotide sequence (SEQ ID NO:1604) of a native sequence PRO83922 cDNA, wherein SEQ ID NO:1604 is a clone designated herein as “DNA328003”.

[1660] FIG. 1605 shows the amino acid sequence (SEQ ID NO:1605) derived from the coding sequence of SEQ ID NO:1604 shown in FIG. 1604.

[1661] FIG. 1606 shows a nucleotide sequence (SEQ ID NO:1606) of a native sequence PRO83923 cDNA, wherein SEQ ID NO:1606 is a clone designated herein as “DNA328004”.

[1662] FIG. 1607 shows the amino acid sequence (SEQ ID NO:1607) derived from the coding sequence of SEQ ID NO:1606 shown in FIG. 1606.

[1663] FIG. 1608 shows a nucleotide sequence (SEQ ID NO:1608) of a native sequence cDNA, wherein SEQ ID NO:1608 is a clone designated herein as “DNA328005”.

[1664] FIG. 1609 shows a nucleotide sequence (SEQ ID NO:1509) of a native sequence PRO83924 cDNA, wherein SEQ ID NO:1609 is a clone designated herein as “DNA328006”.

[1665] FIG. 1610 shows the amino acid sequence (SEQ ID NO:1610) derived from the coding sequence of SEQ ID NO:1609 shown in FIG. 1609.

[1666] FIG. 1611 shows a nucleotide sequence (SEQ ID NO:1611) of a native sequence cDNA, wherein SEQ ID NO:1611 is a clone designated herein as “DNA255056”.

[1667] FIG. 1612 shows a nucleotide sequence (SEQ ID NO:1612) of a native sequence PRO83925 cDNA, wherein SEQ ID NO:1612 is a clone designated herein as “DNA328007”.

[1668] FIG. 1613 shows the amino acid sequence (SEQ ID NO:1613) derived from the coding sequence of SEQ ID NO:1612 shown in FIG. 1612.

[1669] FIG. 1614 shows a nucleotide sequence (SEQ ID NO:1614) of a native sequence PRO83926 cDNA, wherein SEQ ID NO:1614 is a clone designated herein as “DNA328008”.

[1670] FIG. 1615 shows the amino acid sequence (SEQ ID NO:1615) derived from the coding sequence of SEQ ID NO:1614 shown in FIG. 1614.

[1671] FIG. 1616 shows a nucleotide sequence (SEQ ID NO:1616) of a native sequence PRO83927 cDNA, wherein SEQ ID NO:1616 is a clone designated herein as “DNA328009”.

[1672] FIG. 1617 shows the amino acid sequence (SEQ ID NO:1617) derived from the coding sequence of SEQ ID NO:1616 shown in FIG. 1616.

[1673] FIG. 1618 shows a nucleotide sequence (SEQ ID NO:1618) of a native sequence PRO83928 cDNA, wherein SEQ ID NO:1618 is a clone designated herein as “DNA328010”.

[1674] FIG. 1619 shows the amino acid sequence (SEQ ID NO:1619) derived from the coding sequence of SEQ ID NO:1618 shown in FIG. 1618.

[1675] FIG. 1620 shows a nucleotide sequence (SEQ ID NO:1620) of a native sequence PRO28545 cDNA, wherein SEQ ID NO:1620 is a clone designated herein as “DNA199088”.

[1676] FIG. 1621 shows the amino acid sequence (SEQ ID NO:1621) derived from the coding sequence of SEQ ID NO:1620 shown in FIG. 1620.

[1677] FIG. 1622 shows a nucleotide sequence (SEQ ID NO:1622) of a native sequence PRO70021 cDNA, wherein SEQ ID NO:1622 is a clone designated herein as “DNA288261”.

[1678] FIG. 1623 shows the amino acid sequence (SEQ ID NO:1623) derived from the coding sequence of SEQ ID NO:1622 shown in FIG. 1622.

[1679] FIG. 1624 shows a nucleotide sequence (SEQ ID NO:1624) of a native sequence PRO83929 cDNA, wherein SEQ ID NO:1624 is a clone designated herein as “DNA328011”.

[1680] FIG. 1625 shows the amino acid sequence (SEQ ID NO:1625) derived from the coding sequence of SEQ ID NO:1624 shown in FIG. 1624.

[1681] FIG. 1626 shows a nucleotide sequence (SEQ ID NO:1626) of a native sequence PRO83930 cDNA, wherein SEQ ID NO:1626 is a clone designated herein as “DNA328012”.

[1682] FIG. 1627 shows the amino acid sequence (SEQ ID NO:1627) derived from the coding sequence of SEQ ID NO:1626 shown in FIG. 1626.

[1683] FIG. 1628 shows a nucleotide sequence (SEQ ID NO:1628) of a native sequence PRO83931 cDNA, wherein SEQ ID NO:1628 is a clone designated herein as “DNA328013”.

[1684] FIG. 1629 shows the amino acid sequence (SEQ ID NO:1629) derived from the coding sequence of SEQ ID NO:1628 shown in FIG. 1628.

[1685] FIG. 1630 shows a nucleotide sequence (SEQ ID NO:1630) of a native sequence PRO83932 cDNA, wherein SEQ ID NO:1630 is a clone designated herein as “DNA328014”.

[1686] FIG. 1631 shows the amino acid sequence (SEQ ID NO:1631) derived from the coding sequence of SEQ ID NO:1630 shown in FIG. 1630.

[1687] FIG. 1632 shows a nucleotide sequence (SEQ ID NO:1632) of a native sequence PRO50889 cDNA, wherein SEQ ID NO:1632 is a clone designated herein as “DNA255834”.

[1688] FIG. 1633 shows the amino acid sequence (SEQ ID NO:1633) derived from the coding sequence of SEQ ID NO:1632 shown in FIG. 1632.

[1689] FIG. 1634 shows a nucleotide sequence (SEQ ID NO:1634) of a native sequence PRO865 cDNA, wherein SEQ ID NO:1634 is a clone designated herein as “DNA260947”.

[1690] FIG. 1635 shows the amino acid sequence (SEQ ID NO:1635) derived from the coding sequence of SEQ ID NO:1634 shown in FIG. 1634.

[1691] FIG. 1636 shows a nucleotide sequence (SEQ ID NO:1636) of a native sequence PRO83933 cDNA, wherein SEQ ID NO:1636 is a clone designated herein as “DNA328015”.

[1692] FIG. 1637 shows the amino acid sequence (SEQ ID NO:1637) derived from the coding sequence of SEQ ID NO:1636 shown in FIG. 1636.

[1693] FIG. 1638 shows a nucleotide sequence (SEQ ID NO:1638) of a native sequence PRO83934 cDNA, wherein SEQ ID NO:1638 is a clone designated herein as “DNA328016”.

[1694] FIG. 1639 shows the amino acid sequence (SEQ ID NO:1639) derived from the coding sequence of SEQ ID NO:1638 shown in FIG. 1638.

[1695] FIG. 1640 shows a nucleotide sequence (SEQ ID NO:1640) of a native sequence PRO83935 cDNA, wherein SEQ ID NO:1640 is a clone designated herein as “DNA328017”.

[1696] FIG. 1641 shows the amino acid sequence (SEQ ID NO:1641) derived from the coding sequence of SEQ ID NO:1640 shown in FIG. 1640.

[1697] FIG. 1642 shows a nucleotide sequence (SEQ ID NO:1642) of a native sequence PRO83936 cDNA, wherein SEQ ID NO:1642 is a clone designated herein as “DNA328018”.

[1698] FIG. 1643 shows the amino acid sequence (SEQ ID NO:1643) derived from the coding sequence of SEQ ID NO:1642 shown in FIG. 1642.

[1699] FIG. 1644 shows a nucleotide sequence (SEQ ID NO:1644) of a native sequence PRO83937 cDNA, wherein SEQ ID NO:1644 is a clone designated herein as “DNA328019”.

[1700] FIG. 1645 shows the amino acid sequence (SEQ ID NO:1645) derived from the coding sequence of SEQ ID NO:1645 shown in FIG. 1643.

[1701] FIG. 1646 shows a nucleotide sequence (SEQ ID NO:1646) of a native sequence PRO83938 cDNA, wherein SEQ ID NO:1646 is a clone designated herein as “DNA328020”.

[1702] FIG. 1647 shows the amino acid sequence (SEQ ID NO:1647) derived from the coding sequence of SEQ ID NO:1646 shown in FIG. 1646.

[1703] FIG. 1648 shows a nucleotide sequence (SEQ ID NO:1648) of a native sequence cDNA, wherein SEQ ID NO:1648 is a clone designated herein as “DNA268880”.

[1704] FIG. 1649 shows a nucleotide sequence (SEQ ID NO:1649) of a native sequence PRO1190 cDNA, wherein SEQ ID NO:1649 is a clone designated herein as “DNA59586”.

[1705] FIG. 1650 shows the amino acid sequence (SEQ ID NO:1650) derived from the coding sequence of SEQ ID NO:1649 shown in FIG. 1649.

[1706] FIG. 1651 shows a nucleotide sequence (SEQ ID NO:1651) of a native sequence cDNA, wherein SEQ ID NO:1651 is a clone designated herein as “DNA328021”.

[1707] FIG. 1652 shows a nucleotide sequence (SEQ ID NO:1652) of a native sequence cDNA, wherein SEQ ID NO:1652 is a clone designated herein as “DNA328022”.

[1708] FIG. 1653 shows a nucleotide sequence (SEQ ID NO:1653) of a native sequence PRO61223 cDNA, wherein SEQ ID NO:1653 is a clone designated herein as “DNA328023”.

[1709] FIG. 1654 shows the amino acid sequence (SEQ ID NO:1654) derived from the coding sequence of SEQ ID NO:1653 shown in FIG. 1653.

[1710] FIG. 1655 shows a nucleotide sequence (SEQ ID NO:1655) of a native sequence PRO83941 cDNA, wherein SEQ ID NO:1655 is a clone designated herein as “DNA328024”.

[1711] FIG. 1656 shows the amino acid sequence (SEQ ID NO:1656) derived from the coding sequence of SEQ ID NO:1655 shown in FIG. 1655.

[1712] FIG. 1567 shows a nucleotide sequence (SEQ ID NO:1657) of a native sequence PRO83942 cDNA, wherein SEQ ID NO:1657 is a clone designated herein as “DNA328025”.

[1713] FIG. 1658 shows the amino acid sequence (SEQ ID NO:1658) derived from the coding sequence of SEQ ID NO:1657 shown in FIG. 1657.

[1714] FIG. 1659 shows a nucleotide sequence (SEQ ID NO:1659) of a native sequence PRO83943 cDNA, wherein SEQ ID NO:1659 is a clone designated herein as “DNA328026”.

[1715] FIG. 1660 shows the amino acid sequence (SEQ ID NO:1660) derived from the coding sequence of SEQ ID NO:1659 shown in FIG. 1659.

[1716] FIG. 1661 shows a nucleotide sequence (SEQ ID NO:1661) of a native sequence PRO23314 cDNA, wherein SEQ ID NO:1661 is a clone designated herein as “DNA193896”.

[1717] FIG. 1662 shows the amino acid sequence (SEQ ID NO:1662) derived from the coding sequence of SEQ ID NO:1661 shown in FIG. 1661.

[1718] FIG. 1663 shows a nucleotide sequence (SEQ ID NO:1663) of a native sequence PRO83944 cDNA, wherein SEQ ID NO:1663 is a clone designated herein as “DNA328027”.

[1719] FIG. 1664 shows the amino acid sequence (SEQ ID NO:1664) derived from the coding sequence of SEQ ID NO:1663 shown in FIG. 1663.

[1720] FIG. 1665 shows a nucleotide sequence (SEQ ID NO:1665) of a native sequence PRO83945 cDNA, wherein SEQ ID NO:1665 is a clone designated herein as “DNA328028”.

[1721] FIG. 1666 shows the amino acid sequence (SEQ ID NO:1666) derived from the coding sequence of SEQ ID NO:1665 shown in FIG. 1665.

[1722] FIG. 1667 shows a nucleotide sequence (SEQ ID NO:1667) of a native sequence PRO83946 cDNA, wherein SEQ ID NO:1667 is a clone designated herein as “DNA328029”.

[1723] FIG. 1668 shows the amino acid sequence (SEQ ID NO:1668) derived from the coding sequence of SEQ ID NO:1667 shown in FIG. 1667.

[1724] FIG. 1669 shows a nucleotide sequence (SEQ ID NO:1669) of a native sequence PRO4977 cDNA, wherein SEQ ID NO:1669 is a clone designated herein as “DNA62849”.

[1725] FIG. 1670 shows the amino acid sequence (SEQ ID NO:1670) derived from the coding sequence of SEQ ID NO:1669 shown in FIG. 1669.

[1726] FIG. 1671 shows a nucleotide sequence (SEQ ID NO:1671) of a native sequence PRO83947 cDNA, wherein SEQ ID NO:1671 is a clone designated herein as “DNA328030”.

[1727] FIG. 1672 shows the amino acid sequence (SEQ ID NO:1672) derived from the coding sequence of SEQ ID NO:1671 shown in FIG. 1671.

[1728] FIG. 1673 shows a nucleotide sequence (SEQ ID NO:1673) of a native sequence PRO83948 cDNA, wherein SEQ ID NO:1673 is a clone designated herein as “DNA32803 1”.

[1729] FIG. 1674 shows the amino acid sequence (SEQ ID NO:1674) derived from the coding sequence of SEQ ID NO:1673 shown in FIG. 1673.

[1730] FIG. 1675 shows a nucleotide sequence (SEQ ID NO:1675) of a native sequence PRO71114 cDNA, wherein SEQ ID NO:1675 is a clone designated herein as “DNA328032”.

[1731] FIG. 1676 shows the amino acid sequence (SEQ ID NO:1676) derived from the coding sequence of SEQ ID NO:1675 shown in FIG. 1675.

[1732] FIG. 1677 shows a nucleotide sequence (SEQ ID NO:1677) of a native sequence PRO83949 cDNA, wherein SEQ ID NO:1677 is a clone designated herein as “DNA328033”.

[1733] FIG. 1678 shows the amino acid sequence (SEQ ID NO:1678) derived from the coding sequence of SEQ ID NO:1677 shown in FIG. 1677.

[1734] FIG. 1679 shows a nucleotide sequence (SEQ ID NO:1679) of a native sequence PRO83950 cDNA, wherein SEQ ID NO:1679 is a clone designated herein as “DNA328034”.

[1735] FIG. 1680 shows the amino acid sequence (SEQ ID NO:1680) derived from the coding sequence of SEQ ID NO:1679 shown in FIG. 1679.

[1736] FIG. 1681 shows a nucleotide sequence (SEQ ID NO:1681) of a native sequence PRO83951 cDNA, wherein SEQ ID NO:1681 is a clone designated herein as “DNA328035”.

[1737] FIG. 1682 shows the amino acid sequence (SEQ ID NO:1682) derived from the coding sequence of SEQ ID NO:1681 shown in FIG. 1681.

[1738] FIG. 1683 shows a nucleotide sequence (SEQ ID NO:1683) of a native sequence cDNA, wherein SEQ ID NO:1683 is a clone designated herein as “DNA328036”.

[1739] FIG. 1684 shows a nucleotide sequence (SEQ ID NO:1684) of a native sequence cDNA, wherein SEQ ID NO:1684 is a clone designated herein as “DNA328037”.

[1740] FIG. 1685 shows a nucleotide sequence (SEQ ID NO:1685) of a native sequence PRO83953 cDNA, wherein SEQ ID NO:1685 is a clone designated herein as “DNA328038”.

[1741] FIG. 1686 shows the amino acid sequence (SEQ ID NO:1686) derived from the coding sequence of SEQ ID NO:1685 shown in FIG. 1685.

[1742] FIG. 1687 shows a nucleotide sequence (SEQ ID NO:1687) of a native sequence PRO83954 cDNA, wherein SEQ ID NO:1687 is a clone designated herein as “DNA328039”.

[1743] FIG. 1688 shows the amino acid sequence (SEQ ID NO:1688) derived from the coding sequence of SEQ ID NO:1687 shown in FIG. 1677.

[1744] FIG. 1689 shows a nucleotide sequence (SEQ ID NO:1689) of a native sequence cDNA, wherein SEQ ID NO:1689 is a clone designated herein as “DNA328040”.

[1745] FIG. 1690 shows a nucleotide sequence (SEQ ID NO:1690) of a native sequence PRO83955 cDNA, wherein SEQ ID NO:1690 is a clone designated herein as “DNA328041”.

[1746] FIG. 1691 shows the amino acid sequence (SEQ ID NO:1691) derived from the coding sequence of SEQ ID NO:1690 shown in FIG. 1690.

[1747] FIG. 1692 shows a nucleotide sequence (SEQ ID NO:1692) of a native sequence PRO83956 cDNA, wherein SEQ ID NO:1692 is a clone designated herein as “DNA328042”.

[1748] FIG. 1693 shows the amino acid sequence (SEQ ID NO:1693) derived from the coding sequence of SEQ ID NO:1692 shown in FIG. 1692.

[1749] FIG. 1694 shows a nucleotide sequence (SEQ ID NO:1694) of a native sequence PRO83957 cDNA, wherein SEQ ID NO:1694 is a clone designated herein as “DNA328043”.

[1750] FIG. 1695 shows the amino acid sequence (SEQ ID NO:1695) derived from the coding sequence of SEQ ID NO:1694 shown in FIG. 1694.

[1751] FIG. 1696 shows a nucleotide sequence (SEQ ID NO:1696) of a native sequence PRO83958 cDNA, wherein SEQ ID NO:1696 is a clone designated herein as “DNA328044”.

[1752] FIG. 1697 shows the amino acid sequence (SEQ ID NO:1697) derived from the coding sequence of SEQ ID NO:1696 shown in FIG. 1696.

[1753] FIG. 1698 shows a nucleotide sequence (SEQ ID NO:1698) of a native sequence PRO83959 cDNA, wherein SEQ ID NO:1698 is a clone designated herein as “DNA328045”.

[1754] FIG. 1699 shows the amino acid sequence (SEQ ID NO:1699) derived from the coding sequence of SEQ ID NO:1698 shown in FIG. 1698.

[1755] FIG. 1700 shows a nucleotide sequence (SEQ ID NO:1700) of a native sequence PRO83960 cDNA, wherein SEQ ID NO:1700 is a clone designated herein as “DNA328046”.

[1756] FIG. 1701 shows the amino acid sequence (SEQ ID NO:1701) derived from the coding sequence of SEQ ID NO:1700 shown in FIG. 1700.

[1757] FIG. 1702 shows a nucleotide sequence (SEQ ID NO:1702) of a native sequence PRO83961 cDNA, wherein SEQ ID NO:1702 is a clone designated herein as “DNA328047”.

[1758] FIG. 1703 shows the amino acid sequence (SEQ ID NO:1703) derived from the coding sequence of SEQ ID NO:1702 shown in FIG. 1702.

[1759] FIG. 1704 shows a nucleotide sequence (SEQ ID NO:1704) of a native sequence PRO83962 cDNA, wherein SEQ ID NO:1704 is a clone designated herein as “DNA328048”.

[1760] FIG. 1705 shows the amino acid sequence (SEQ ID NO:1705) derived from the coding sequence of SEQ ID NO:1704 shown in FIG. 1704.

[1761] FIG. 1706 shows a nucleotide sequence (SEQ ID NO:1706) of a native sequence cDNA, wherein SEQ ID NO:1706 is a clone designated herein as “DNA257403”.

[1762] FIG. 1707 shows a nucleotide sequence (SEQ ID NO:1707) of a native sequence PRO23317 cDNA, wherein SEQ ID NO:1707 is a clone designated herein as “DNA193899”.

[1763] FIG. 1708 shows the amino acid sequence (SEQ ID NO:1708) derived from the coding sequence of SEQ ID NO:1707 shown in FIG. 1707.

[1764] FIG. 1709 shows a nucleotide sequence (SEQ ID NO:1709) of a native sequence PRO83963 cDNA, wherein SEQ ID NO:1709 is a clone designated herein as “DNA328049”.

[1765] FIG. 1710 shows the amino acid sequence (SEQ ID NO:1710) derived from the coding sequence of SEQ ID NO:1709 shown in FIG. 1709.

[1766] FIG. 1711 shows a nucleotide sequence (SEQ ID NO:1711) of a native sequence PRO60890 cDNA, wherein SEQ ID NO:1711 is a clone designated herein as “DNA272784”.

[1767] FIG. 1712 shows the amino acid sequence (SEQ ID NO:1712) derived from the coding sequence of SEQ ID NO:1711 shown in FIG. 1711.

[1768] FIG. 1713 shows a nucleotide sequence (SEQ ID NO:1713) of a native sequence PRO49544 cDNA, wherein SEQ ID NO:1713 is a clone designated herein as “DNA254435”.

[1769] FIG. 1714 shows the amino acid sequence (SEQ ID NO:1714) derived from the coding sequence of SEQ ID NO:1713 shown in FIG. 1713.

[1770] FIG. 1715 shows a nucleotide sequence (SEQ ID NO:1715) of a native sequence PRO83964 cDNA, wherein SEQ ID NO:1715 is a clone designated herein as “DNA328050”.

[1771] FIG. 1716 shows the amino acid sequence (SEQ ID NO:1716) derived from the coding sequence of SEQ ID NO:1715 shown in FIG. 1715.

[1772] FIG. 1717 shows a nucleotide sequence (SEQ ID NO:1717) of a native sequence PRO83965 cDNA, wherein SEQ ID NO:1717 is a clone designated herein as “DNA328051”.

[1773] FIG. 1718 shows the amino acid sequence (SEQ ID NO:1718) derived from the coding sequence of SEQ ID NO:1717 shown in FIG. 1717.

[1774] FIG. 1719 shows a nucleotide sequence (SEQ ID NO:1719) of a native sequence PRO83966 cDNA, wherein SEQ ID NO:1719 is a clone designated herein as “DNA328052”.

[1775] FIG. 1720 shows the amino acid sequence (SEQ ID NO:1720) derived from the coding sequence of SEQ ID NO:1719 shown in FIG. 1719.

[1776] FIG. 1721 shows a nucleotide sequence (SEQ ID NO:1721) of a native sequence PRO61074 cDNA, wherein SEQ ID NO:1721 is a clone designated herein as “DNA273002”.

[1777] FIG. 1722 shows the amino acid sequence (SEQ ID NO:1722) derived from the coding sequence of SEQ ID NO:1721 shown in FIG. 1721.

[1778] FIG. 1723 shows a nucleotide sequence (SEQ ID NO:1723) of a native sequence cDNA, wherein SEQ ID NO:1723 is a clone designated herein as “DNA164635”.

[1779] FIG. 1724 shows a nucleotide sequence (SEQ ID NO:1724) of a native sequence PRO83967 cDNA, wherein SEQ ID NO:1724 is a clone designated herein as “DNA328053”.

[1780] FIG. 1725 shows the amino acid sequence (SEQ ID NO:1725) derived from the coding sequence of SEQ ID NO:1724 shown in FIG. 1724.

[1781] FIG. 1726 shows a nucleotide sequence (SEQ ID NO:1726) of a native sequence PRO19908 cDNA, wherein SEQ ID NO:1726 is a clone designated herein as “DNA76526”.

[1782] FIG. 1727 shows the amino acid sequence (SEQ ID NO:1727) derived from the coding sequence of SEQ ID NO:1726 shown in FIG. 1726.

[1783] FIG. 1728 shows a nucleotide sequence (SEQ ID NO:1728) of a native sequence PRO11861 cDNA, wherein SEQ ID NO:1728 is a clone designated herein as “DNA151516”.

[1784] FIG. 1729 shows the amino acid sequence (SEQ ID NO:1729) derived from the coding sequence of SEQ ID NO:1728 shown in FIG. 1728.

[1785] FIG. 1730 shows a nucleotide sequence (SEQ ID NO:1730) of a native sequence PRO83968 cDNA, wherein SEQ ID NO:1730 is a clone designated herein as “DNA328054”.

[1786] FIG. 1731 shows the amino acid sequence (SEQ ID NO:1731) derived from the coding sequence of SEQ ID NO:1730 shown in FIG. 1730.

[1787] FIG. 1732 shows a nucleotide sequence (SEQ ID NO:1732) of a native sequence PRO83969 cDNA, wherein SEQ ID NO:1732 is a clone designated herein as “DNA328055”.

[1788] FIG. 1733 shows the amino acid sequence (SEQ ID NO:1733) derived from the coding sequence of SEQ ID NO:1732 shown in FIG. 1732.

[1789] FIG. 1734 shows a nucleotide sequence (SEQ ID NO:1734) of a native sequence PRO83970 cDNA, wherein SEQ ID NO:1734 is a clone designated herein as “DNA328056”.

[1790] FIG. 1735 shows the amino acid sequence (SEQ ID NO:1735) derived from the coding sequence of SEQ ID NO:1734 shown in FIG. 1734.

[1791] FIG. 1736 shows a nucleotide sequence (SEQ ID NO:1736) of a native sequence cDNA, wherein SEQ ID NO:1736 is a clone designated herein as “DNA328057”.

[1792] FIG. 1737 shows a nucleotide sequence (SEQ ID NO:1737) of a native sequence PRO83971 cDNA, wherein SEQ ID NO:1737 is a clone designated herein as “DNA328058”.

[1793] FIG. 1738 shows the amino acid sequence (SEQ ID NO:1738) derived from the coding sequence of SEQ ID NO:1737 shown in FIG. 1737.

[1794] FIG. 1739 shows a nucleotide sequence (SEQ ID NO:1739) of a native sequence PRO52268 cDNA, wherein SEQ ID NO:1739 is a clone designated herein as “DNA257714”.

[1795] FIG. 1740 shows the amino acid sequence (SEQ ID NO:1740) derived from the coding sequence of SEQ ID NO:1739 shown in FIG. 1739.

[1796] FIG. 1741 shows a nucleotide sequence (SEQ ID NO:1741) of a native sequence PRO83972 cDNA, wherein SEQ ID NO:1741 is a clone designated herein as “DNA328059”.

[1797] FIG. 1742 shows the amino acid sequence (SEQ ID NO:1742) derived from the coding sequence of SEQ ID NO:1741 shown in FIG. 1741.

[1798] FIG. 1743 shows a nucleotide sequence (SEQ ID NO:1743) of a native sequence PRO83973 cDNA, wherein SEQ ID NO:1743 is a clone designated herein as “DNA328060”.

[1799] FIG. 1744 shows the amino acid sequence (SEQ ID NO:1744) derived from the coding sequence of SEQ ID NO:1743 shown in FIG. 1743.

[1800] FIG. 1745 shows a nucleotide sequence (SEQ ID NO:1745) of a native sequence PRO83974 cDNA, wherein SEQ ID NO:1745 is a clone designated herein as “DNA328061”.

[1801] FIG. 1746 shows the amino acid sequence (SEQ ID NO:1746) derived from the coding sequence of SEQ ID NO:1745 shown in FIG. 1745.

[1802] FIG. 1747 shows a nucleotide sequence (SEQ ID NO:1747) of a native sequence PRO83975 cDNA, wherein SEQ ID NO:1747 is a clone designated herein as “DNA328062”.

[1803] FIG. 1748 shows the amino acid sequence (SEQ ID NO:1748) derived from the coding sequence of SEQ ID NO:1747 shown in FIG. 1747.

[1804] FIG. 1749 shows a nucleotide sequence (SEQ ID NO:1749) of a native sequence PRO83976 cDNA, wherein SEQ ID NO:1749 is a clone designated herein as “DNA328063”.

[1805] FIG. 1750 shows the amino acid sequence (SEQ ID NO:1750) derived from the coding sequence of SEQ ID NO:1749 shown in FIG. 1749.

[1806] FIG. 1751 shows a nucleotide sequence (SEQ ID NO:1751) of a native sequence PRO3446 cDNA, wherein SEQ ID NO:1751 is a clone designated herein as “DNA92219”.

[1807] FIG. 1752 shows the amino acid sequence (SEQ ID NO:1752) derived from the coding sequence of SEQ ID NO:1751 shown in FIG. 1751.

[1808] FIG. 1753 shows a nucleotide sequence (SEQ ID NO:1753) of a native sequence PRO83977 cDNA, wherein SEQ ID NO:1753 is a clone designated herein as “DNA328064”.

[1809] FIG. 1754 shows the amino acid sequence (SEQ ID NO:1754) derived from the coding sequence of SEQ ID NO:1753 shown in FIG. 1753.

[1810] FIG. 1755 shows a nucleotide sequence (SEQ ID NO:1755) of a native sequence PRO83978 cDNA, wherein SEQ ID NO:1755 is a clone designated herein as “DNA328065”.

[1811] FIG. 1756 shows the amino acid sequence (SEQ ID NO:1756) derived from the coding sequence of SEQ ID NO:1755 shown in FIG. 1755.

[1812] FIG. 1757 shows a nucleotide sequence (SEQ ID NO:1757) of a native sequence PRO1107 cDNA, wherein SEQ ID NO:1757 is a clone designated herein as “DNA59606”.

[1813] FIG. 1758 shows the amino acid sequence (SEQ ID NO:1758) derived from the coding sequence of SEQ ID NO:1757 shown in FIG. 1757.

[1814] FIG. 1759 shows a nucleotide sequence (SEQ ID NO:1759) of a native sequence PRO83979 cDNA, wherein SEQ ID NO:1759 is a clone designated herein as “DNA328066”.

[1815] FIG. 1760 shows the amino acid sequence (SEQ ID NO:1760) derived from the coding sequence of SEQ ID NO:1759 shown in FIG. 1759.

[1816] FIG. 1761 shows a nucleotide sequence (SEQ ID NO:1761) of a native sequence PRO83980 cDNA, wherein SEQ ID NO:1761 is a clone designated herein as “DNA328067”.

[1817] FIG. 1762 shows the amino acid sequence (SEQ ID NO:1762) derived from the coding sequence of SEQ ID NO:1761 shown in FIG. 1761.

[1818] FIG. 1763 shows a nucleotide sequence (SEQ ID NO:1763) of a native sequence PRO83981 cDNA, wherein SEQ ID NO:1763 is a clone designated herein as “DNA328068”.

[1819] FIG. 1764 shows the amino acid sequence (SEQ ID NO:1764) derived from the coding sequence of SEQ ID NO:1763 shown in FIG. 1763.

[1820] FIG. 1765 shows a nucleotide sequence (SEQ ID NO:1765) of a native sequence cDNA, wherein SEQ ID NO:1765 is a clone designated herein as “DNA161182”.

[1821] FIG. 1766 shows a nucleotide sequence (SEQ ID NO:1766) of a native sequence PRO363 cDNA, wherein SEQ ID NO:1766 is a clone designated herein as “DNA328069”.

[1822] FIG. 1767 shows the amino acid sequence (SEQ ID NO:1767) derived from the coding sequence of SEQ ID NO:1766 shown in FIG. 1766.

[1823] FIG. 1768 shows a nucleotide sequence (SEQ ID NO:1768) of a native sequence PRO83982 cDNA, wherein SEQ ID NO:1768 is a clone designated herein as “DNA328070”.

[1824] FIG. 1769 shows the amino acid sequence (SEQ ID NO:1769) derived from the coding sequence of SEQ ID NO:1768 shown in FIG. 1768.

[1825] FIG. 1770 shows a nucleotide sequence (SEQ ID NO:1770) of a native sequence PRO83983 cDNA, wherein SEQ ID NO:1770 is a clone designated herein as “DNA328071”.

[1826] FIG. 1771 shows the amino acid sequence (SEQ ID NO:1771) derived from the coding sequence of SEQ ID NO:1770 shown in FIG. 1770.

[1827] FIG. 1772 shows a nucleotide sequence (SEQ ID NO:1772) of a native sequence cDNA, wherein SEQ ID NO:1772 is a clone designated herein as “DNA328072”.

[1828] FIG. 1773 shows a nucleotide sequence (SEQ ID NO:1773) of a native sequence PRO83985 cDNA, wherein SEQ ID NO:1773 is a clone designated herein as “DNA328073”.

[1829] FIG. 1774 shows the amino acid sequence (SEQ ID NO:1774) derived from the coding sequence of SEQ ID NO:1773 shown in FIG. 1773.

[1830] FIG. 1775 shows a nucleotide sequence (SEQ ID NO:1775) of a native sequence PRO54700 cDNA, wherein SEQ ID NO:1775 is a clone designated herein as “DNA260948”.

[1831] FIG. 1776 shows the amino acid sequence (SEQ ID NO:1776) derived from the coding sequence of SEQ ID NO:1775 shown in FIG. 1775.

[1832] FIG. 1777 shows a nucleotide sequence (SEQ ID NO:1777) of a native sequence cDNA, wherein SEQ ID NO:1777 is a clone designated herein as “DNA328074”.

[1833] FIG. 1778 shows a nucleotide sequence (SEQ ID NO:1778) of a native sequence PRO23594 cDNA, wherein SEQ ID NO:1778 is a clone designated herein as “DNA194202”.

[1834] FIG. 1779 shows the amino acid sequence (SEQ ID NO:1779) derived from the coding sequence of SEQ ID NO:1778 shown in FIG. 1778.

[1835] FIG. 1780 shows a nucleotide sequence (SEQ ID NO:1780) of a native sequence cDNA, wherein SEQ ID NO:1780 is a clone designated herein as “DNA328075”.

[1836] FIG. 1781 shows a nucleotide sequence (SEQ ID NO:1781) of a native sequence PRO83988 cDNA, wherein SEQ ID NO:1781 is a clone designated herein as “DNA328076”.

[1837] FIG. 1782 shows the amino acid sequence (SEQ ID NO:1782) derived from the coding sequence of SEQ ID NO:1781 shown in FIG. 1781.

[1838] FIG. 1783 shows a nucleotide sequence (SEQ ID NO:1783) of a native sequence PRO83989 cDNA, wherein SEQ ID NO:1783 is a clone designated herein as “DNA328077”.

[1839] FIG. 1784 shows the amino acid sequence (SEQ ID NO:1784) derived from the coding sequence of SEQ ID NO:1783 shown in FIG. 1783.

[1840] FIG. 1785 shows a nucleotide sequence (SEQ ID NO:1785) of a native sequence PRO11946 cDNA, wherein SEQ ID NO:1785 is a clone designated herein as “DNA151638”.

[1841] FIG. 1786 shows the amino acid sequence (SEQ ID NO:1786) derived from the coding sequence of SEQ ID NO:1785 shown in FIG. 1785.

[1842] FIG. 1787 shows a nucleotide sequence (SEQ ID NO:1787) of a native sequence cDNA, wherein SEQ ID NO:1787 is a clone designated herein as “DNA195938”.

[1843] FIG. 1788 shows a nucleotide sequence (SEQ ID NO:1788) of a native sequence PRO83990 cDNA, wherein SEQ ID NO:1788 is a clone designated herein as “DNA328078”.

[1844] FIG. 1789 shows the amino acid sequence (SEQ ID NO:1789) derived from the coding sequence of SEQ ID NO:1788 shown in FIG. 1788.

[1845] FIG. 1790 shows a nucleotide sequence (SEQ ID NO:1790) of a native sequence PRO83991 cDNA, wherein SEQ ID NO:1790 is a clone designated herein as “DNA328079”.

[1846] FIG. 1791 shows the amino acid sequence (SEQ ID NO:1791) derived from the coding sequence of SEQ ID NO:1790 shown in FIG. 1790.

[1847] FIG. 1792 shows a nucleotide sequence (SEQ ID NO:1792) of a native sequence cDNA, wherein SEQ ID NO:1792 is a clone designated herein as “DNA257517”.

[1848] FIG. 1793 shows a nucleotide sequence (SEQ ID NO:1793) of a native sequence PRO83992 cDNA, wherein SEQ ID NO:1793 is a clone designated herein as “DNA328080”.

[1849] FIG. 1794 shows the amino acid sequence (SEQ ID NO:1794) derived from the coding sequence of SEQ ID NO:1793 shown in FIG. 1793.

[1850] FIG. 1795 shows a nucleotide sequence (SEQ ID NO:1795) of a native sequence PRO83993 cDNA, wherein SEQ ID NO:1795 is a clone designated herein as “DNA328081”.

[1851] FIG. 1796 shows the amino acid sequence (SEQ ID NO:1796) derived from the coding sequence of SEQ ID NO:1795 shown in FIG. 1795.

[1852] FIG. 1797 shows a nucleotide sequence (SEQ ID NO:1797) of a native sequence PRO83994 cDNA, wherein SEQ ID NO:1797 is a clone designated herein as “DNA328082”.

[1853] FIG. 1798 shows the amino acid sequence (SEQ ID NO:1798) derived from the coding sequence of SEQ ID NO:1797 shown in FIG. 1797.

[1854] FIG. 1799 shows a nucleotide sequence (SEQ ID NO:1799) of a native sequence PRO83995 cDNA, wherein SEQ ID NO:1799 is a clone designated herein as “DNA328083”.

[1855] FIG. 1800 shows the amino acid sequence (SEQ ID NO:1800) derived from the coding sequence of SEQ ID NO:1799 shown in FIG. 1799.

[1856] FIG. 1801 shows a nucleotide sequence (SEQ ID NO:1801) of a native sequence PRO37611 cDNA, wherein SEQ ID NO:1801 is a clone designated herein as “DNA227148”.

[1857] FIG. 1802 shows the amino acid sequence (SEQ ID NO:1802) derived from the coding sequence of SEQ ID NO:1801 shown in FIG. 1801.

[1858] FIG. 1803 shows a nucleotide sequence (SEQ ID NO:1803) of a native sequence PRO83996 cDNA, wherein SEQ ID NO:1803 is a clone designated herein as “DNA328084”.

[1859] FIG. 1804 shows the amino acid sequence (SEQ ID NO:1804) derived from the coding sequence of SEQ ID NO:1803 shown in FIG. 1803.

[1860] FIG. 1805 shows a nucleotide sequence (SEQ ID NO:1805) of a native sequence PRO83997 cDNA, wherein SEQ ID NO:1805 is a clone designated herein as “DNA328085”.

[1861] FIG. 1806 shows the amino acid sequence (SEQ ID NO:1806) derived from the coding sequence of SEQ ID NO:1805 shown in FIG. 1805.

[1862] FIG. 1807 shows a nucleotide sequence (SEQ ID NO:1807) of a native sequence PRO34934 cDNA, wherein SEQ ID NO:1807 is a clone designated herein as “DNA328086”.

[1863] FIG. 1808 shows the amino acid sequence (SEQ ID NO:1808) derived from the coding sequence of SEQ ID NO:1807 shown in FIG. 1807.

[1864] FIG. 1809 shows a nucleotide sequence (SEQ ID NO:1809) of a native sequence PRO83998 cDNA, wherein SEQ ID NO:1809 is a clone designated herein as “DNA328087”.

[1865] FIG. 1810 shows the amino acid sequence (SEQ ID NO:1810) derived from the coding sequence of SEQ ID NO:1809 shown in FIG. 1809.

[1866] FIG. 1811 shows a nucleotide sequence (SEQ ID NO:1811) of a native sequence PRO83999 cDNA, wherein SEQ ID NO:1811 is a clone designated herein as “DNA328088”.

[1867] FIG. 1812 shows the amino acid sequence (SEQ ID NO:1812) derived from the coding sequence of SEQ ID NO:1811 shown in FIG. 1811.

[1868] FIG. 1813 shows a nucleotide sequence (SEQ ID NO:1813) of a native sequence PRO84000 cDNA, wherein SEQ ID NO:1813 is a clone designated herein as “DNA328089”.

[1869] FIG. 1814 shows the amino acid sequence (SEQ ID NO:1814) derived from the coding sequence of SEQ ID NO:1813 shown in FIG. 1813.

[1870] FIG. 1815 shows a nucleotide sequence (SEQ ID NO:1815) of a native sequence PRO84001 cDNA, wherein SEQ ID NO:1815 is a clone designated herein as “DNA328090”.

[1871] FIG. 1816 shows the amino acid sequence (SEQ ID NO:1816) derived from the coding sequence of SEQ ID NO:1815 shown in FIG. 1815.

[1872] FIG. 1817 shows a nucleotide sequence (SEQ ID NO:1817) of a native sequence PRO84002 cDNA, wherein SEQ ID NO:1817 is a clone designated herein as “DNA328091”.

[1873] FIG. 1818 shows the amino acid sequence (SEQ ID NO:1818) derived from the coding sequence of SEQ ID NO:1817 shown in FIG. 1817.

[1874] FIG. 1819 shows a nucleotide sequence (SEQ ID NO:1819) of a native sequence PRO84003 cDNA, wherein SEQ ID NO:1819 is a clone designated herein as “DNA328092”.

[1875] FIG. 1820 shows the amino acid sequence (SEQ ID NO:1820) derived from the coding sequence of SEQ ID NO:1819 shown in FIG. 1819.

[1876] FIG. 1821 shows a nucleotide sequence (SEQ ID NO:1821) of a native sequence PRO37631 cDNA, wherein SEQ ID NO:1821 is a clone designated herein as “DNA227168”.

[1877] FIG. 1822 shows the amino acid sequence (SEQ ID NO:1822) derived from the coding sequence of SEQ ID NO:1821 shown in FIG. 1821.

[1878] FIG. 1823 shows a nucleotide sequence (SEQ ID NO:1823) of a native sequence PRO84004 cDNA, wherein SEQ ID NO:1823 is a clone designated herein as “DNA328093”.

[1879] FIG. 1824 shows the amino acid sequence (SEQ ID NO:1824) derived from the coding sequence of SEQ ID NO:1823 shown in FIG. 1823.

[1880] FIG. 1825 shows a nucleotide sequence (SEQ ID NO:1825) of a native sequence PRO84005 cDNA, wherein SEQ ID NO:1825 is a clone designated herein as “DNA328094”.

[1881] FIG. 1826 shows the amino acid sequence (SEQ ID NO:1826) derived from the coding sequence of SEQ ID NO:1825 shown in FIG. 1825.

[1882] FIG. 1827 shows a nucleotide sequence (SEQ ID NO:1827) of a native sequence PRO50404 cDNA, wherein SEQ ID NO:1827 is a clone designated herein as “DNA255334”.

[1883] FIG. 1828 shows the amino acid sequence (SEQ ID NO:1828) derived from the coding sequence of SEQ ID NO:1827 shown in FIG. 1827.

[1884] FIG. 1829 shows a nucleotide sequence (SEQ ID NO:1829) of a native sequence PRO84006 cDNA, wherein SEQ ID NO:1829 is a clone designated herein as “DNA328095”.

[1885] FIG. 1830 shows the amino acid sequence (SEQ ID NO:1830) derived from the coding sequence of SEQ ID NO:1829 shown in FIG. 1829.

[1886] FIG. 1831 shows a nucleotide sequence (SEQ ID NO:1831) of a native sequence PRO84007 cDNA, wherein SEQ ID NO:1831 is a clone designated herein as “DNA328096”.

[1887] FIG. 1832 shows the amino acid sequence (SEQ ID NO:1832) derived from the coding sequence of SEQ ID NO:1831 shown in FIG. 1831.

[1888] FIG. 1833 shows a nucleotide sequence (SEQ ID NO:1833) of a native sequence PRO1192 cDNA, wherein SEQ ID NO:1833 is a clone designated herein as “DNA328097”.

[1889] FIG. 1834 shows the amino acid sequence (SEQ ID NO:1834) derived from the coding sequence of SEQ ID NO: shown in FIG. 1833.

[1890] FIG. 1835 shows a nucleotide sequence (SEQ ID NO:1835) of a native sequence PRO84008 cDNA, wherein SEQ ID NO:1835 is a clone designated herein as “DNA328098”.

[1891] FIG. 1836 shows the amino acid sequence (SEQ ID NO:1836) derived from the coding sequence of SEQ ID NO:1835 shown in FIG. 1835.

[1892] FIG. 1837 shows a nucleotide sequence (SEQ ID NO:1837) of a native sequence PRO84009 cDNA, wherein SEQ ID NO:1837 is a clone designated herein as “DNA328099”.

[1893] FIG. 1838 shows the amino acid sequence (SEQ ID NO:1838) derived from the coding sequence of SEQ ID NO:1837 shown in FIG. 1837.

[1894] FIG. 1839 shows a nucleotide sequence (SEQ ID NO:1839) of a native sequence PRO84010 cDNA, wherein SEQ ID NO:1839 is a clone designated herein as “DNA328100”.

[1895] FIG. 1840 shows the amino acid sequence (SEQ ID NO:1840) derived from the coding sequence of SEQ ID NO:1839 shown in FIG. 1839.

[1896] FIG. 1841 shows a nucleotide sequence (SEQ ID NO:1841) of a native sequence PRO84011 cDNA, wherein SEQ ID NO:1841 is a clone designated herein as “DNA328101”.

[1897] FIG. 1842 shows the amino acid sequence (SEQ ID NO:1842) derived from the coding sequence of SEQ ID NO:1841 shown in FIG. 1841.

[1898] FIG. 1843 shows a nucleotide sequence (SEQ ID NO:1843) of a native sequence PRO84012 cDNA, wherein SEQ ID NO:1843 is a clone designated herein as “DNA328102”.

[1899] FIG. 1844 shows the amino acid sequence (SEQ ID NO:1844) derived from the coding sequence of SEQ ID NO:1843 shown in FIG. 1843.

[1900] FIG. 1845 shows a nucleotide sequence (SEQ ID NO:1845) of a native sequence PRO84013 cDNA, wherein SEQ ID NO:1845 is a clone designated herein as “DNA328103”.

[1901] FIG. 1846 shows the amino acid sequence (SEQ ID NO:1846) derived from the coding sequence of SEQ ID NO:1845 shown in FIG. 1845.

[1902] FIG. 1847 shows a nucleotide sequence (SEQ ID NO:1847) of a native sequence PRO84014 cDNA, wherein SEQ ID NO:1847 is a clone designated herein as “DNA328104”.

[1903] FIG. 1848 shows the amino acid sequence (SEQ ID NO:1848) derived from the coding sequence of SEQ ID NO:1847 shown in FIG. 1847.

[1904] FIG. 1849 shows a nucleotide sequence (SEQ ID NO:1849) of a native sequence PRO84015 cDNA, wherein SEQ ID NO:1849 is a clone designated herein as “DNA328105”.

[1905] FIG. 1850 shows the amino acid sequence (SEQ ID NO:1850) derived from the coding sequence of SEQ ID NO:1849 shown in FIG. 1849.

[1906] FIG. 1851 shows a nucleotide sequence (SEQ ID NO:1851) of a native sequence PRO19611 cDNA, wherein SEQ ID NO:1851 is a clone designated herein as “DNA328106”.

[1907] FIG. 1852 shows the amino acid sequence (SEQ ID NO:1852) derived from the coding sequence of SEQ ID NO:1851 shown in FIG. 1851.

[1908] FIG. 1853 shows a nucleotide sequence (SEQ ID NO:1853) of a native sequence cDNA, wherein SEQ ID NO:1853 is a clone designated herein as “DNA195707”.

[1909] FIG. 1854 shows a nucleotide sequence (SEQ ID NO:1854) of a native sequence cDNA, wherein SEQ ID NO:1854 is a clone designated herein as “DNA328107”.

[1910] FIG. 1855 shows a nucleotide sequence (SEQ ID NO:1855) of a native sequence PRO84016 cDNA, wherein SEQ ID NO:1855 is a clone designated herein as “DNA328108”.

[1911] FIG. 1856 shows the amino acid sequence (SEQ ID NO:1856) derived from the coding sequence of SEQ ID NO:1855 shown in FIG. 1855.

[1912] FIG. 1857 shows a nucleotide sequence (SEQ ID NO:1857) of a native sequence PRO84017 cDNA, wherein SEQ ID NO:1857 is a clone designated herein as “DNA328109”.

[1913] FIG. 1858 shows the amino acid sequence (SEQ ID NO:1858) derived from the coding sequence of SEQ ID NO:1857 shown in FIG. 1857.

[1914] FIG. 1859 shows a nucleotide sequence (SEQ ID NO:1859) of a native sequence PRO84018 cDNA, wherein SEQ ID NO:1859 is a clone designated herein as “DNA328 110”.

[1915] FIG. 1860 shows the amino acid sequence (SEQ ID NO:1860) derived from the coding sequence of SEQ ID NO:1859 shown in FIG. 1859.

[1916] FIG. 1861 shows a nucleotide sequence (SEQ ID NO:1861) of a native sequence PRO4327 cDNA, wherein SEQ ID NO:1861 is a clone designated herein as “DNA328111”.

[1917] FIG. 1862 shows the amino acid sequence (SEQ ID NO:1862) derived from the coding sequence of SEQ ID NO:1861 shown in FIG. 1861.

[1918] FIG. 1863 shows a nucleotide sequence (SEQ ID NO:1863) of a native sequence PRO60060 cDNA, wherein SEQ ID NO:1863 is a clone designated herein as “DNA271776”.

[1919] FIG. 1864 shows the amino acid sequence (SEQ ID NO:1864) derived from the coding sequence of SEQ ID NO:1863 shown in FIG. 1863.

[1920] FIG. 1865 shows a nucleotide sequence (SEQ ID NO:1865) of a native sequence cDNA, wherein SEQ ID NO:1865 is a clone designated herein as “DNA328112”.

[1921] FIG. 1866 shows a nucleotide sequence (SEQ ID NO:1866) of a native sequence PRO84020 cDNA, wherein SEQ ID NO:1866 is a clone designated herein as “DNA328113”.

[1922] FIG. 1867 shows the amino acid sequence (SEQ ID NO:1867) derived from the coding sequence of SEQ ID NO:1866 shown in FIG. 1866.

[1923] FIG. 1868 shows a nucleotide sequence (SEQ ID NO:1868) of a native sequence PRO84021 cDNA, wherein SEQ ID NO:1868 is a clone designated herein as “DNA328114”.

[1924] FIG. 1869 shows the amino acid sequence (SEQ ID NO:1869) derived from the coding sequence of SEQ ID NO:1868 shown in FIG. 1868.

[1925] FIG. 1870 shows a nucleotide sequence (SEQ ID NO:1870) of a native sequence PRO84022 cDNA, wherein SEQ ID NO:1870 is a clone designated herein as “DNA328115”.

[1926] FIG. 1871 shows the amino acid sequence (SEQ ID NO:1871) derived from the coding sequence of SEQ ID NO:1870 shown in FIG. 1870.

[1927] FIG. 1872 shows a nucleotide sequence (SEQ ID NO:1872) of a native sequence PRO84023 cDNA, wherein SEQ ID NO:1872 is a clone designated herein as “DNA328116”.

[1928] FIG. 1873 shows the amino acid sequence (SEQ ID NO:1873) derived from the coding sequence of SEQ ID NO:1872 shown in FIG. 1872.

[1929] FIG. 1874 shows a nucleotide sequence (SEQ ID NO:1874) of a native sequence cDNA, wherein SEQ ID NO:1874 is a clone designated herein as “DNA256068”.

[1930] FIG. 1875 shows a nucleotide sequence (SEQ ID NO:1875) of a native sequence PRO84024 cDNA, wherein SEQ ID NO:1875 is a clone designated herein as “DNA328117”.

[1931] FIG. 1876 shows the amino acid sequence (SEQ ID NO:1876) derived from the coding sequence of SEQ ID NO:1875 shown in FIG. 1875.

[1932] FIG. 1877 shows a nucleotide sequence (SEQ ID NO:1877) of a native sequence PRO84025 cDNA, wherein SEQ ID NO:1877 is a clone designated herein as “DNA328118”.

[1933] FIG. 1878 shows the amino acid sequence (SEQ ID NO:1878) derived from the coding sequence of SEQ ID NO:1877 shown in FIG. 1877.

[1934] FIG. 1879 shows a nucleotide sequence (SEQ ID NO:1879) of a native sequence PRO84026 cDNA, wherein SEQ ID NO:1879 is a clone designated herein as “DNA328119”.

[1935] FIG. 1880 shows the amino acid sequence (SEQ ID NO:1880) derived from the coding sequence of SEQ ID NO:1879 shown in FIG. 1879.

[1936] FIG. 1881 shows a nucleotide sequence (SEQ ID NO:1881) of a native sequence cDNA, wherein SEQ ID NO:1881 is a clone designated herein as “DNA328120”.

[1937] FIG. 1882 shows a nucleotide sequence (SEQ ID NO:1882) of a native sequence PRO84028 cDNA, wherein SEQ ID NO:1882 is a clone designated herein as “DNA328121”.

[1938] FIG. 1883 shows the amino acid sequence (SEQ ID NO:1883) derived from the coding sequence of SEQ ID NO:1882 shown in FIG. 1882.

[1939] FIG. 1884 shows a nucleotide sequence (SEQ ID NO:1884) of a native sequence PRO84029 cDNA, wherein SEQ ID NO:1884 is a clone designated herein as “DNA328122”.

[1940] FIG. 1885 shows the amino acid sequence (SEQ ID NO:1885) derived from the coding sequence of SEQ ID NO:1884 shown in FIG. 1884.

[1941] FIG. 1886 shows a nucleotide sequence (SEQ ID NO:1886) of a native sequence PRO84030 cDNA, wherein SEQ ID NO:1886 is a clone designated herein as “DNA328123”.

[1942] FIG. 1887 shows the amino acid sequence (SEQ ID NO:1887) derived from the coding sequence of SEQ ID NO:1886 shown in FIG. 1886.

[1943] FIG. 1888 shows a nucleotide sequence (SEQ ID NO:1888) of a native sequence cDNA, wherein SEQ ID NO:1888 is a clone designated herein as “DNA328124”.

[1944] FIG. 1889 shows a nucleotide sequence (SEQ ID NO:1889) of a native sequence PRO84031 cDNA, wherein SEQ ID NO:1889 is a clone designated herein as “DNA328125”.

[1945] FIG. 1890 shows the amino acid sequence (SEQ ID NO:1890) derived from the coding sequence of SEQ ID NO:1889 shown in FIG. 1889.

[1946] FIG. 1891 shows a nucleotide sequence (SEQ ID NO:1891) of a native sequence PRO84032 cDNA, wherein SEQ ID NO:1891 is a clone designated herein as “DNA328126”.

[1947] FIG. 1892 shows the amino acid sequence (SEQ ID NO:1892) derived from the coding sequence of SEQ ID NO:1891 shown in FIG. 1891.

[1948] FIG. 1893 shows a nucleotide sequence (SEQ ID NO:1893) of a native sequence PRO84033 cDNA, wherein SEQ ID NO:1893 is a clone designated herein as “DNA328127”.

[1949] FIG. 1894 shows the amino acid sequence (SEQ ID NO:1894) derived from the coding sequence of SEQ ID NO:1893 shown in FIG. 1893.

[1950] FIG. 1895 shows a nucleotide sequence (SEQ ID NO:1895) of a native sequence PRO84034 cDNA, wherein SEQ ID NO:1895 is a clone designated herein as “DNA328128”.

[1951] FIG. 1896 shows the amino acid sequence (SEQ ID NO:1896) derived from the coding sequence of SEQ ID NO:1895 shown in FIG. 1895.

[1952] FIG. 1897 shows a nucleotide sequence (SEQ ID NO:1897) of a native sequence PRO84035 cDNA, wherein SEQ ID NO:1897 is a clone designated herein as “DNA328129”.

[1953] FIG. 1898 shows the amino acid sequence (SEQ ID NO:1898) derived from the coding sequence of SEQ ID NO:1897 shown in FIG. 1897.

[1954] FIG. 1899 shows a nucleotide sequence (SEQ ID NO:1899) of a native sequence PRO84036 cDNA, wherein SEQ ID NO:1899 is a clone designated herein as “DNA328130”.

[1955] FIG. 1900 shows the amino acid sequence (SEQ ID NO:1900) derived from the coding sequence of SEQ ID NO:1899 shown in FIG. 1899.

[1956] FIG. 1901 shows a nucleotide sequence (SEQ ID NO:1901) of a native sequence PRO84037 cDNA, wherein SEQ ID NO:1901 is a clone designated herein as “DNA328131”.

[1957] FIG. 1902 shows the amino acid sequence (SEQ ID NO:1902) derived from the coding sequence of SEQ ID NO:1901 shown in FIG. 1901.

[1958] FIG. 1903 shows a nucleotide sequence (SEQ ID NO:1903) of a native sequence PRO84038 cDNA, wherein SEQ ID NO:1903 is a clone designated herein as “DNA328132”.

[1959] FIG. 1904 shows the amino acid sequence (SEQ ID NO:1904) derived from the coding sequence of SEQ ID NO:1903 shown in FIG. 1903.

[1960] FIG. 1905 shows a nucleotide sequence (SEQ ID NO:1905) of a native sequence PRO84039 cDNA, wherein SEQ ID NO:1905 is a clone designated herein as “DNA328133”.

[1961] FIG. 1906 shows the amino acid sequence (SEQ ID NO:1906) derived from the coding sequence of SEQ ID NO:1905 shown in FIG. 1905.

[1962] FIG. 1907 shows a nucleotide sequence (SEQ ID NO:1907) of a native sequence PRO84040 cDNA, wherein SEQ ID NO:1907 is a clone designated herein as “DNA328134”.

[1963] FIG. 1908 shows the amino acid sequence (SEQ ID NO:1908) derived from the coding sequence of SEQ ID NO:1907 shown in FIG. 1907.

[1964] FIG. 1909 shows a nucleotide sequence (SEQ ID NO:1909) of a native sequence PRO84041 cDNA, wherein SEQ ID NO:1909 is a clone designated herein as “DNA328135”.

[1965] FIG. 1910 shows the amino acid sequence (SEQ ID NO:1910) derived from the coding sequence of SEQ ID NO:1909 shown in FIG. 1909.

[1966] FIG. 1911 shows a nucleotide sequence (SEQ ID NO:1911) of a native sequence PRO84082 cDNA, wherein SEQ ID NO:1911 is a clone designated herein as “DNA328136”.

[1967] FIG. 1912 shows the amino acid sequence (SEQ ID NO:1912) derived from the coding sequence of SEQ ID NO:1911 shown in FIG. 1911.

[1968] FIG. 1913 shows a nucleotide sequence (SEQ ID NO:1913) of a native sequence PRO45876 cDNA, wherein SEQ ID NO:1913 is a clone designated herein as “DNA210491”.

[1969] FIG. 1914 shows the amino acid sequence (SEQ ID NO:1914) derived from the coding sequence of SEQ ID NO:1913 shown in FIG. 1913.

[1970] FIG. 1915 shows a nucleotide sequence (SEQ ID NO:1915) of a native sequence PRO84043 cDNA, wherein SEQ ID NO:1915 is a clone designated herein as “DNA328137”.

[1971] FIG. 1916 shows the amino acid sequence (SEQ ID NO:1916) derived from the coding sequence of SEQ ID NO:1915 shown in FIG. 1915.

[1972] FIG. 1917 shows a nucleotide sequence (SEQ ID NO:1917) of a native sequence PRO84044 cDNA, wherein SEQ ID NO:1917 is a clone designated herein as “DNA328138”.

[1973] FIG. 1918 shows the amino acid sequence (SEQ ID NO:1918) derived from the coding sequence of SEQ ID NO:1917 shown in FIG. 1917.

[1974] FIG. 1919 shows a nucleotide sequence (SEQ ID NO:1919) of a native sequence PRO6006 cDNA, wherein SEQ ID NO:1919 is a clone designated herein as “DNA328139”.

[1975] FIG. 1920 shows the amino acid sequence (SEQ ID NO:1920) derived from the coding sequence of SEQ ID NO:1919 shown in FIG. 1919.

[1976] FIG. 1921 shows a nucleotide sequence (SEQ ID NO:1921) of a native sequence PRO84045 cDNA, wherein SEQ ID NO:1921 is a clone designated herein as “DNA328140”.

[1977] FIG. 1922 shows the amino acid sequence (SEQ ID NO:1922) derived from the coding sequence of SEQ ID NO:1921 shown in FIG. 1921.

[1978] FIG. 1923 shows a nucleotide sequence (SEQ ID NO:1923) of a native sequence PRO84046 cDNA, wherein SEQ ID NO:1923 is a clone designated herein as “DNA328141”.

[1979] FIG. 1924 shows the amino acid sequence (SEQ ID NO:1924) derived from the coding sequence of SEQ ID NO:1923 shown in FIG. 1923.

[1980] FIG. 1925 shows a nucleotide sequence (SEQ ID NO:1925) of a native sequence PRO84047 cDNA, wherein SEQ ID NO:1925 is a clone designated herein as “DNA328142”.

[1981] FIG. 1926 shows the amino acid sequence (SEQ ID NO:1926) derived from the coding sequence of SEQ ID NO:1925 shown in FIG. 1925.

[1982] FIG. 1927 shows a nucleotide sequence (SEQ ID NO:1927) of a native sequence PRO84048 cDNA, wherein SEQ ID NO:1927 is a clone designated herein as “DNA328143”.

[1983] FIG. 1928 shows the amino acid sequence (SEQ ID NO:1928) derived from the coding sequence of SEQ ID NO:1927 shown in FIG. 1927.

[1984] FIG. 1929 shows a nucleotide sequence (SEQ ID NO:1929) of a native sequence PRO84049 cDNA, wherein SEQ ID NO:1929 is a clone designated herein as “DNA328144”.

[1985] FIG. 1930 shows the amino acid sequence (SEQ ID NO:1930) derived from the coding sequence of SEQ ID NO:1929 shown in FIG. 1929.

[1986] FIG. 1931 shows a nucleotide sequence (SEQ ID NO:1931) of a native sequence PRO84050 cDNA, wherein SEQ ID NO:1931 is a clone designated herein as “DNA328145”.

[1987] FIG. 1932 shows the amino acid sequence (SEQ ID NO:1932) derived from the coding sequence of SEQ ID NO:1931 shown in FIG. 1931.

[1988] FIG. 1933 shows a nucleotide sequence (SEQ ID NO:1933) of a native sequence PRO84051 cDNA, wherein SEQ ID NO:1933 is a clone designated herein as “DNA328146”.

[1989] FIG. 1934 shows the amino acid sequence (SEQ ID NO:1934) derived from the coding sequence of SEQ ID NO:1933 shown in FIG. 1933.

[1990] FIG. 1935 shows a nucleotide sequence (SEQ ID NO:1935) of a native sequence PRO84052 cDNA, wherein SEQ ID NO:1.935 is a clone designated herein as “DNA328147”.

[1991] FIG. 1936 shows the amino acid sequence (SEQ ID NO:1936) derived from the coding sequence of SEQ ID NO:1935 shown in FIG. 1935.

[1992] FIG. 1937 shows a nucleotide sequence (SEQ ID NO:1937) of a native sequence PRO84053 cDNA, wherein SEQ ID NO:1937 is a clone designated herein as “DNA328148”.

[1993] FIG. 1938 shows the amino acid sequence (SEQ ID NO:1938) derived from the coding sequence of SEQ ID NO:1937 shown in FIG. 1937.

[1994] FIG. 1939 shows a nucleotide sequence (SEQ ID NO:1939) of a native sequence PRO84054 cDNA, wherein SEQ ID NO:1939 is a clone designated herein as “DNA328149”.

[1995] FIG. 1940 shows the amino acid sequence (SEQ ID NO:1940) derived from the coding sequence of SEQ ID NO:1939 shown in FIG. 1939.

[1996] FIG. 1941 shows a nucleotide sequence (SEQ ID NO:1941) of a native sequence PRO1343 cDNA, wherein SEQ ID NO:1941 is a clone designated herein as “DNA66675”.

[1997] FIG. 1942 shows the amino acid sequence (SEQ ID NO:1942) derived from the coding sequence of SEQ ID NO:1941 shown in FIG. 1941.

[1998] FIG. 1943 shows a nucleotide sequence (SEQ ID NO:1943) of a native sequence PRO84055 cDNA, wherein SEQ ID NO:1943 is a clone designated herein as “DNA328150”.

[1999] FIG. 1944 shows the amino acid sequence (SEQ ID NO:1944) derived from the coding sequence of SEQ ID NO:1943 shown in FIG. 1943.

[2000] FIG. 1945 shows a nucleotide sequence (SEQ ID NO:1945) of a native sequence PRO84056 cDNA, wherein SEQ ID NO:1945 is a clone designated herein as “DNA328151”.

[2001] FIG. 1946 shows the amino acid sequence (SEQ ID NO:1946) derived from the coding sequence of SEQ ID NO:1945 shown in FIG. 1945.

[2002] FIG. 1947 shows a nucleotide sequence (SEQ ID NO:1947) of a native sequence PRO84057 cDNA, wherein SEQ ID NO:1947 is a clone designated herein as “DNA328152”.

[2003] FIG. 1948 shows the amino acid sequence (SEQ ID NO:1948) derived from the coding sequence of SEQ ID NO:1947 shown in FIG. 1947.

[2004] FIG. 1949 shows a nucleotide sequence (SEQ ID NO:1949) of a native sequence cDNA, wherein SEQ ID NO:1949 is a clone designated herein as “DNA257872”.

[2005] FIG. 1950 shows a nucleotide sequence (SEQ ID NO:1950) of a native sequence PRO84058 cDNA, wherein SEQ ID NO:1950 is a clone designated herein as “DNA328153”.

[2006] FIG. 1951 shows the amino acid sequence (SEQ ID NO:1951) derived from the coding sequence of SEQ ID NO:1950 shown in FIG. 1950.

[2007] FIG. 1952 shows a nucleotide sequence (SEQ ID NO:1952) of a native sequence PRO84059 cDNA, wherein SEQ ID NO:1952 is a clone designated herein as “DNA328154”.

[2008] FIG. 1953 shows the amino acid sequence (SEQ ID NO:1953) derived from the coding sequence of SEQ ID NO:1952 shown in FIG. 1952.

[2009] FIG. 1954 shows a nucleotide sequence (SEQ ID NO:1954) of a native sequence PRO84060 cDNA, wherein SEQ ID NO:1954 is a clone designated herein as “DNA328155”.

[2010] FIG. 1955 shows the amino acid sequence (SEQ ID NO:1955) derived from the coding sequence of SEQ ID NO:1954 shown in FIG. 1954.

[2011] FIG. 1956 shows a nucleotide sequence (SEQ ID NO:1956) of a native sequence PRO84061 cDNA, wherein SEQ ID NO:1956 is a clone designated herein as “DNA328156”.

[2012] FIG. 1957 shows the amino acid sequence (SEQ ID NO:1957) derived from the coding sequence of SEQ ID NO:1956 shown in FIG. 1956.

[2013] FIG. 1958 shows a nucleotide sequence (SEQ ID NO:1958) of a native sequence PRO84062 cDNA, wherein SEQ ID NO:1958 is a clone designated herein as “DNA328157”.

[2014] FIG. 1959 shows the amino acid sequence (SEQ ID NO:1959) derived from the coding sequence of SEQ ID NO:1958 shown in FIG. 1958.

[2015] FIG. 1960 shows a nucleotide sequence (SEQ ID NO:1960) of a native sequence PRO84063 cDNA, wherein SEQ ID NO:1960 is a clone designated herein as “DNA328158”.

[2016] FIG. 1961 shows the amino acid sequence (SEQ ID NO:1961) derived from the coding sequence of SEQ ID NO:1960 shown in FIG. 1960.

[2017] FIG. 1962 shows a nucleotide sequence (SEQ ID NO:1962) of a native sequence cDNA, wherein SEQ ID NO:1962 is a clone designated herein as “DNA328159”.

[2018] FIG. 1963 shows a nucleotide sequence (SEQ ID NO:1963) of a native sequence PRO84064 cDNA, wherein SEQ ID NO:1963 is a clone designated herein as “DNA328160”.

[2019] FIG. 1964 shows the amino acid sequence (SEQ ID NO:1964) derived from the coding sequence of SEQ ID NO:1963 shown in FIG. 1963.

[2020] FIG. 1965 shows a nucleotide sequence (SEQ ID NO:1965) of a native sequence PRO84065 cDNA, wherein SEQ ID NO:1965 is a clone designated herein as “DNA328161”.

[2021] FIG. 1966 shows the amino acid sequence (SEQ ID NO:1966) derived from the coding sequence of SEQ ID NO:1965 shown in FIG. 1965.

[2022] FIG. 1967 shows a nucleotide sequence (SEQ ID NO:1967) of a native sequence PRO84066 cDNA, wherein SEQ ID NO:1967 is a clone designated herein as “DNA328162”.

[2023] FIG. 1968 shows the amino acid sequence (SEQ ID NO:1968) derived from the coding sequence of SEQ ID NO:1967 shown in FIG. 1967.

[2024] FIG. 1969 shows a nucleotide sequence (SEQ ID NO:1969) of a native sequence PRO84067 cDNA, wherein SEQ ID NO:1969 is a clone designated herein as “DNA328163”.

[2025] FIG. 1970 shows the amino acid sequence (SEQ ID NO:1970) derived from the coding sequence of SEQ ID NO:1969 shown in FIG. 1969.

[2026] FIG. 1971 shows a nucleotide sequence (SEQ ID NO:1971) of a native sequence PRO84068 cDNA, wherein SEQ ID NO:1971 is a clone designated herein as “DNA328164”.

[2027] FIG. 1972 shows the amino acid sequence (SEQ ID NO:1972) derived from the coding sequence of SEQ ID NO:1971 shown in FIG. 1971.

[2028] FIG. 1973 shows a nucleotide sequence (SEQ ID NO:1973) of a native sequence PRO38220 cDNA, wherein SEQ ID NO:1973 is a clone designated herein as “DNA328165”.

[2029] FIG. 1974 shows the amino acid sequence (SEQ ID NO:1974) derived from the coding sequence of SEQ ID NO:1973 shown in FIG. 1973.

[2030] FIG. 1975 shows a nucleotide sequence (SEQ ID NO:1975) of a native sequence PRO84069 cDNA, wherein SEQ ID NO:1975 is a clone designated herein as “DNA328166”.

[2031] FIG. 1976 shows the amino acid sequence (SEQ ID NO:1976) derived from the coding sequence of SEQ ID NO:1975 shown in FIG. 1975.

[2032] FIG. 1977 shows a nucleotide sequence (SEQ ID NO:1977) of a native sequence PRO84070 cDNA, wherein SEQ ID NO:1977 is a clone designated herein as “DNA328167”.

[2033] FIG. 1978 shows the amino acid sequence (SEQ ID NO:1978) derived from the coding sequence of SEQ ID NO:1977 shown in FIG. 1977.

[2034] FIG. 1979 shows a nucleotide sequence (SEQ ID NO:1979) of a native sequence PRO84071 cDNA, wherein SEQ ID NO:1979 is a clone designated herein as “DNA328168”.

[2035] FIG. 1980 shows the amino acid sequence (SEQ ID NO:1980) derived from the coding sequence of SEQ ID NO:1979 shown in FIG. 1979.

[2036] FIG. 1981 shows a nucleotide sequence (SEQ ID NO:1981) of a native sequence PRO84072 cDNA, wherein SEQ ID NO:1981 is a clone designated herein as “DNA328169”.

[2037] FIG. 1982 shows the amino acid sequence (SEQ ID NO:1982) derived from the coding sequence of SEQ ID NO:1981 shown in FIG. 1981.

[2038] FIG. 1983 shows a nucleotide sequence (SEQ ID NO:1983) of a native sequence PRO84073 cDNA, wherein SEQ ID NO:1983 is a clone designated herein as “DNA328170”.

[2039] FIG. 1984 shows the amino acid sequence (SEQ ID NO:1984) derived from the coding sequence of SEQ ID NO:1983 shown in FIG. 1983.

[2040] FIG. 1985 shows a nucleotide sequence (SEQ ID NO:1985) of a native sequence PRO84074 cDNA, wherein SEQ ID NO:1985 is a clone designated herein as “DNA328171”.

[2041] FIG. 1986 shows the amino acid sequence (SEQ ID NO:1986) derived from the coding sequence of SEQ ID NO:1985 shown in FIG. 1985.

[2042] FIG. 1987 shows a nucleotide sequence (SEQ ID NO:1987) of a native sequence PRO84075 cDNA, wherein SEQ ID NO:1987 is a clone designated herein as “DNA328172”.

[2043] FIG. 1988 shows the amino acid sequence (SEQ ID NO:1988) derived from the coding sequence of SEQ ID NO:1987 shown in FIG. 1987.

[2044] FIG. 1989 shows a nucleotide sequence (SEQ ID NO:1989) of a native sequence PRO84076 cDNA, wherein SEQ ID NO:1989 is a clone designated herein as “DNA328173”.

[2045] FIG. 1990 shows the amino acid sequence (SEQ ID NO:1990) derived from the coding sequence of SEQ ID NO:1989 shown in FIG. 1989.

[2046] FIG. 1991 shows a nucleotide sequence (SEQ ID NO:1991) of a native sequence PRO84077 cDNA, wherein SEQ ID NO:1991 is a clone designated herein as “DNA328174”.

[2047] FIG. 1992 shows the amino acid sequence (SEQ ID NO:1992) derived from the coding sequence of SEQ ID NO:1991 shown in FIG. 1991.

[2048] FIG. 1993 shows a nucleotide sequence (SEQ ID NO:1993) of a native sequence PRO84078 cDNA, wherein SEQ ID NO:1993 is a clone designated herein as “DNA328175”.

[2049] FIG. 1994 shows the amino acid sequence (SEQ ID NO:1994) derived from the coding sequence of SEQ ID NO:1993 shown in FIG. 1993.

[2050] FIG. 1995 shows a nucleotide sequence (SEQ ID NO:1995) of a native sequence PRO84079 cDNA, wherein SEQ ID NO:1995 is a clone designated herein as “DNA328176”.

[2051] FIG. 1996 shows the amino acid sequence (SEQ ID NO:1996) derived from the coding sequence of SEQ ID NO:1995 shown in FIG. 1995.

[2052] FIG. 1997 shows a nucleotide sequence (SEQ ID NO-1997) of a native sequence PRO84080 cDNA, wherein SEQ ID NO:1997 is a clone designated herein as “DNA328177”.

[2053] FIG. 1998 shows the amino acid sequence (SEQ ID NO:1998) derived from the coding sequence of SEQ ID NO:1997 shown in FIG. 1997.

[2054] FIG. 1999 shows a nucleotide sequence (SEQ ID NO:1999) of a native sequence PRO84081 cDNA, wherein SEQ ID NO:1999 is a clone designated herein as “DNA328178”.

[2055] FIG. 2000 shows the amino acid sequence (SEQ ID NO:2000) derived from the coding sequence of SEQ ID NO:1999 shown in FIG. 1999.

[2056] FIG. 2001 shows a nucleotide sequence (SEQ ID NO:2001) of a native sequence PRO84082 cDNA, wherein SEQ ID NO:2001 is a clone designated herein as “DNA328179”.

[2057] FIG. 2002 shows the amino acid sequence (SEQ ID NO:2002) derived from the coding sequence of SEQ ID NO:2001 shown in FIG. 2001.

[2058] FIG. 2003 shows a nucleotide sequence (SEQ ID NO:2003) of a native sequence PRO84083 cDNA, wherein SEQ ID NO:2003 is a clone designated herein as “DNA328180”.

[2059] FIG. 2004 shows the amino acid sequence (SEQ ID NO:2004) derived from the coding sequence of SEQ ID NO:2003 shown in FIG. 2003.

[2060] FIG. 2005 shows a nucleotide sequence (SEQ ID NO:2005) of a native sequence PRO84084 cDNA, wherein SEQ ID NO:2005 is a clone designated herein as “DNA328181”.

[2061] FIG. 2006 shows the amino acid sequence (SEQ ID NO:2006) derived from the coding sequence of SEQ ID NO:2005 shown in FIG. 2005.

[2062] FIG. 2007 shows a nucleotide sequence (SEQ ID NO:2007) of a native sequence PRO84085 cDNA, wherein SEQ ID NO:2007 is a clone designated herein as “DNA328182”.

[2063] FIG. 2008 shows the amino acid sequence (SEQ ID NO:2008) derived from the coding sequence of SEQ ID NO:2007 shown in FIG. 2007.

[2064] FIG. 2009 shows a nucleotide sequence (SEQ ID NO:2009) of a native sequence PRO84086 cDNA, wherein SEQ ID NO:2009 is a clone designated herein as “DNA328183”.

[2065] FIG. 2010 shows the amino acid sequence (SEQ ID NO:2010) derived from the coding sequence of SEQ ID NO:2009 shown in FIG. 2009.

[2066] FIG. 2011 shows a nucleotide sequence (SEQ ID NO:2011) of a native sequence PRO84087 cDNA, wherein SEQ ID NO:2011 is a clone designated herein as “DNA328184”.

[2067] FIG. 2012 shows the amino acid sequence (SEQ ID NO:2012) derived from the coding sequence of SEQ ID NO:2011 shown in FIG. 2011.

[2068] FIG. 2013 shows a nucleotide sequence (SEQ ID NO:2013) of a native sequence PRO52486 cDNA, wherein SEQ ID NO:2013 is a clone designated herein as “DNA257959”.

[2069] FIG. 2014 shows the amino acid sequence (SEQ ID NO:2014) derived from the coding sequence of SEQ ID NO:2013 shown in FIG. 2013.

[2070] FIG. 2015 shows a nucleotide sequence (SEQ ID NO:2015) of a native sequence PRO84088 cDNA, wherein SEQ ID NO:2015 is a clone designated herein as “DNA328185”.

[2071] FIG. 2016 shows the amino acid sequence (SEQ ID NO:2016) derived from the coding sequence of SEQ ID NO:2015 shown in FIG. 2015.

[2072] FIG. 2017 shows a nucleotide sequence (SEQ ID NO:2017) of a native sequence PRO84089 cDNA, wherein SEQ ID NO:2017 is a clone designated herein as “DNA328186”.

[2073] FIG. 2018 shows the amino acid sequence (SEQ ID NO:2018) derived from the coding sequence of SEQ ID NO:2017 shown in FIG. 2017.

[2074] FIG. 2019 shows a nucleotide sequence (SEQ ID NO:2019) of a native sequence PRO84090 cDNA, wherein SEQ ID NO:2019 is a clone designated herein as “DNA328187”.

[2075] FIG. 2020 shows the amino acid sequence (SEQ ID NO:2020) derived from the coding sequence of SEQ ID NO:2019 shown in FIG. 2019.

[2076] FIG. 2021 shows a nucleotide sequence (SEQ ID NO:2021) of a native sequence PRO84091 cDNA, wherein SEQ ID NO:2021 is a clone designated herein as “DNA328188”.

[2077] FIG. 2022 shows the amino acid sequence (SEQ ID NO:2022) derived from the coding sequence of SEQ ID NO:2021 shown in FIG. 2021.

[2078] FIG. 2023 shows a nucleotide sequence (SEQ ID NO:2023) of a native sequence PRO84092 cDNA, wherein SEQ ID NO:2023 is a clone designated herein as “DNA328189”.

[2079] FIG. 2024 shows the amino acid sequence (SEQ ID NO:2024) derived from the coding sequence of SEQ ID NO:2023 shown in FIG. 2023.

[2080] FIG. 2025 shows a nucleotide sequence (SEQ ID NO:2025) of a native sequence PRO84093 cDNA, wherein SEQ ID NO:2025 is a clone designated herein as “DNA328190”.

[2081] FIG. 2026 shows the amino acid sequence (SEQ ID NO:2026) derived from the coding sequence of SEQ ID NO:2025 shown in FIG. 2025.

[2082] FIG. 2027 shows a nucleotide sequence (SEQ ID NO:2027) of a native sequence PRO84094 cDNA, wherein SEQ ID NO:2027 is a clone designated herein as “DNA328191”.

[2083] FIG. 2028 shows the amino acid sequence (SEQ ID NO:2028) derived from the coding sequence of SEQ ID NO:2027 shown in FIG. 2027.

[2084] FIG. 2029 shows a nucleotide sequence (SEQ ID NO:2029) of a native sequence PRO84095 cDNA, wherein SEQ ID NO:2029 is a clone designated herein as “DNA328192”.

[2085] FIG. 2030 shows the amino acid sequence (SEQ ID NO:2030) derived from the coding sequence of SEQ ID NO:2029 shown in FIG. 2029.

[2086] FIG. 2031 shows a nucleotide sequence (SEQ ID NO:2031) of a native sequence PRO84096 cDNA, wherein SEQ ID NO:2031 is a clone designated herein as “DNA328193”.

[2087] FIG. 2032 shows the amino acid sequence (SEQ ID NO:2032) derived from the coding sequence of SEQ ID NO:2031 shown in FIG. 2031.

[2088] FIG. 2033 shows a nucleotide sequence (SEQ ID NO:2033) of a native sequence PRO84097 cDNA, wherein SEQ ID NO:2033 is a clone designated herein as “DNA328194”.

[2089] FIG. 2034 shows the amino acid sequence (SEQ ID NO:2034) derived from the coding sequence of SEQ ID NO:2033 shown in FIG. 2033.

[2090] FIG. 2035 shows a nucleotide sequence (SEQ ID NO:2035) of a native sequence PRO84098 cDNA, wherein SEQ ID NO:2035 is a clone designated herein as “DNA328195”.

[2091] FIG. 2036 shows the amino acid sequence (SEQ ID NO:2036) derived from the coding sequence of SEQ ID NO:2035 shown in FIG. 2035.

[2092] FIG. 2037 shows a nucleotide sequence (SEQ ID NO:2037) of a native sequence PRO84099 cDNA, wherein SEQ ID NO:2037 is a clone designated herein as “DNA328196”.

[2093] FIG. 2038 shows the amino acid sequence (SEQ ID NO:2038) derived from the coding sequence of SEQ ID NO:2037 shown in FIG. 2037.

[2094] FIG. 2039 shows a nucleotide sequence (SEQ ID NO:2039) of a native sequence PRO84100 cDNA, wherein SEQ ID NO:2039 is a clone designated herein as “DNA328197”.

[2095] FIG. 2040 shows the amino acid sequence (SEQ ID NO:2040) derived from the coding sequence of SEQ ID NO:2039 shown in FIG. 2039.

[2096] FIG. 2041 shows a nucleotide sequence (SEQ ID NO:2041) of a native sequence PRO84101 cDNA, wherein SEQ ID NO:2041 is a clone designated herein as “DNA328198”.

[2097] FIG. 2042 shows the amino acid sequence (SEQ ID NO:2042) derived from the coding sequence of SEQ ID NO:2041 shown in FIG. 2041.

[2098] FIG. 2043 shows a nucleotide sequence (SEQ ID NO:2043) of a native sequence PRO84102 cDNA, wherein SEQ ID NO:2043 is a clone designated herein as “DNA328199”.

[2099] FIG. 2044 shows the amino acid sequence (SEQ ID NO:2044) derived from the coding sequence of SEQ ID NO:2043 shown in FIG. 2043.

[2100] FIG. 2045 shows a nucleotide sequence (SEQ ID NO:2045) of a native sequence PRO1274 cDNA, wherein SEQ ID NO:2045 is a clone designated herein as “DNA64889”.

[2101] FIG. 2046 shows the amino acid sequence (SEQ ID NO:2046) derived from the coding sequence of SEQ ID NO:2045 shown in FIG. 2045.

[2102] FIG. 2047 shows a nucleotide sequence (SEQ ID NO:2047) of a native sequence PRO84103 cDNA, wherein SEQ ID NO:2047 is a clone designated herein as “DNA328200”.

[2103] FIG. 2048 shows the amino acid sequence (SEQ ID NO:2048) derived from the coding sequence of SEQ ID NO:2047 shown in FIG. 2047.

[2104] FIG. 2049 shows a nucleotide sequence (SEQ ID NO:2049) of a native sequence PRO84104 cDNA, wherein SEQ ID NO:2049 is a clone designated herein as “DNA328201”.

[2105] FIG. 2050 shows the amino acid sequence (SEQ ID NO:2050) derived from the coding sequence of SEQ ID NO:2049 shown in FIG. 2049.

[2106] FIG. 2051 shows a nucleotide sequence (SEQ ID NO:2051) of a native sequence PRO69126 cDNA, wherein SEQ ID NO:2051 is a clone designated herein as “DNA285363”.

[2107] FIG. 2052 shows the amino acid sequence (SEQ ID NO:5052) derived from the coding sequence of SEQ ID NO:2051 shown in FIG. 2051.

[2108] FIG. 2053 shows a nucleotide sequence (SEQ ID NO:2053) of a native sequence PRO84105 cDNA, wherein SEQ ID NO:2053 is a clone designated herein as “DNA328202”.

[2109] FIG. 2054 shows the amino acid sequence (SEQ ID NO:2054) derived from the coding sequence of SEQ ID NO:2053 shown in FIG. 2053.

[2110] FIG. 2055 shows a nucleotide sequence (SEQ ID NO:2055) of a native sequence PRO84106 cDNA, wherein SEQ ID NO:2055 is a clone designated herein as “DNA328203”.

[2111] FIG. 2056 shows the amino acid sequence (SEQ ID NO:2056) derived from the coding sequence of SEQ ID NO:2055 shown in FIG. 2055.

[2112] FIG. 2057 shows a nucleotide sequence (SEQ ID NO:2057) of a native sequence PRO84107 cDNA, wherein SEQ ID NO:2057 is a clone designated herein as “DNA328204”.

[2113] FIG. 2058 shows the amino acid sequence (SEQ ID NO:2058) derived from the coding sequence of SEQ ID NO:2057 shown in FIG. 2057.

[2114] FIG. 2059 shows a nucleotide sequence (SEQ ID NO:2059) of a native sequence PRO84108 cDNA, wherein SEQ ID NO:2059 is a clone designated herein as “DNA328205”.

[2115] FIG. 2060 shows the amino acid sequence (SEQ ID NO:2060) derived from the coding sequence of SEQ ID NO:2059 shown in FIG. 2059.

[2116] FIG. 2061 shows a nucleotide sequence (SEQ ID NO:2061) of a native sequence PRO84109 cDNA, wherein SEQ ID NO:2061 is a clone designated herein as “DNA328206”.

[2117] FIG. 2062 shows the amino acid sequence (SEQ ID NO:2062) derived from the coding sequence of SEQ ID NO:2061 shown in FIG. 2061.

[2118] FIG. 2063 shows a nucleotide sequence (SEQ ID NO:2063) of a native sequence PRO84110 cDNA, wherein SEQ ID NO:2063 is a clone designated herein as “DNA328207”.

[2119] FIG. 2064 shows the amino acid sequence (SEQ ID NO:2064) derived from the coding sequence of SEQ ID NO:2063 shown in FIG. 2063.

[2120] FIG. 2065 shows a nucleotide sequence (SEQ ID NO:2065) of a native sequence PRO84111 cDNA, wherein SEQ ID NO:2065 is a clone designated herein as “DNA328208”.

[2121] FIG. 2066 shows the amino acid sequence (SEQ ID NO:2066) derived from the coding sequence of SEQ ID NO:2065 shown in FIG. 2065.

[2122] FIG. 2067 shows a nucleotide sequence (SEQ ID NO:2067) of a native sequence PRO84112 cDNA, wherein SEQ ID NO:2067 is a clone designated herein as “DNA328209”.

[2123] FIG. 2068 shows the amino acid sequence (SEQ ID NO:2068) derived from the coding sequence of SEQ ID NO:2067 shown in FIG. 2067.

[2124] FIG. 2069 shows a nucleotide sequence (SEQ ID NO:2069) of a native sequence PRO84113 cDNA, wherein SEQ ID NO:2069 is a clone designated herein as “DNA328210”.

[2125] FIG. 2070 shows the amino acid sequence (SEQ ID NO:2070) derived from the coding sequence of SEQ ID NO:2070 shown in Figure.

[2126] FIG. 2071 shows a nucleotide sequence (SEQ ID NO:2071) of a native sequence PRO84114 cDNA, wherein SEQ ID NO:2071 is a clone designated herein as “DNA32821 1”.

[2127] FIG. 2072 shows the amino acid sequence (SEQ ID NO:2072) derived from the coding sequence of SEQ ID NO:2071 shown in FIG. 2071.

[2128] FIG. 2073 shows a nucleotide sequence (SEQ ID NO:2073) of a native sequence PRO84115 cDNA, wherein SEQ ID NO:2073 is a clone designated herein as “DNA328212”.

[2129] FIG. 2074 shows the amino acid sequence (SEQ ID NO:2074) derived from the coding sequence of SEQ ID NO:2073 shown in FIG. 2073.

[2130] FIG. 2075 shows a nucleotide sequence (SEQ ID NO:2075) of a native sequence PRO84116 cDNA, wherein SEQ ID NO:2075 is a clone designated herein as “DNA328213”.

[2131] FIG. 2076 shows the amino acid sequence (SEQ ID NO:2076) derived from the coding sequence of SEQ ID NO:2075 shown in FIG. 2075.

[2132] FIG. 2077 shows a nucleotide sequence (SEQ ID NO:2077) of a native sequence PRO84117 cDNA, wherein SEQ ID NO:2077 is a clone designated herein as “DNA328214”.

[2133] FIG. 2078 shows the amino acid sequence (SEQ ID NO:2078) derived from the coding sequence of SEQ ID NO:2077 shown in FIG. 2077.

[2134] FIG. 2079 shows a nucleotide sequence (SEQ ID NO:2079) of a native sequence PRO84118 cDNA, wherein SEQ ID NO:2079 is a clone designated herein as “DNA328215”.

[2135] FIG. 2080 shows the amino acid sequence (SEQ ID NO:2080) derived from the coding sequence of SEQ ID NO:2079 shown in FIG. 2079.

[2136] FIG. 2081 shows a nucleotide sequence (SEQ ID NO:2081) of a native sequence PRO84119 cDNA, wherein SEQ ID NO:2081 is a clone designated herein as “DNA328216”.

[2137] FIG. 2082 shows the amino acid sequence (SEQ ID NO:2082) derived from the coding sequence of SEQ ID NO:2081 shown in FIG. 2081.

[2138] FIG. 2083 shows a nucleotide sequence (SEQ ID NO:2083) of a native sequence PRO84120 cDNA, wherein SEQ ID NO:2083 is a clone designated herein as “DNA328217”.

[2139] FIG. 2084 shows the amino acid sequence (SEQ ID NO:2084) derived from the coding sequence of SEQ ID NO:2083 shown in FIG. 2083.

[2140] FIG. 2085 shows a nucleotide sequence (SEQ ID NO:2085) of a native sequence PRO84121 cDNA, wherein SEQ ID NO:2085 is a clone designated herein as “DNA328218”.

[2141] FIG. 2086 shows the amino acid sequence (SEQ ID NO:2086) derived from the coding sequence of SEQ ID NO:2085 shown in FIG. 2085.

[2142] FIG. 2087 shows a nucleotide sequence (SEQ ID NO:2087) of a native sequence PRO84122 cDNA, wherein SEQ ID NO:2087 is a clone designated herein as “DNA328219”.

[2143] FIG. 2088 shows the amino acid sequence (SEQ ID NO:2088) derived from the coding sequence of SEQ ID NO:2087 shown in FIG. 2087.

[2144] FIG. 2089 shows a nucleotide sequence (SEQ ID NO:2089) of a native sequence PRO84123 cDNA, wherein SEQ ID NO:2089 is a clone designated herein as “DNA328220”.

[2145] FIG. 2090 shows the amino acid sequence (SEQ ID NO:2090) derived from the coding sequence of SEQ ID NO:2089 shown in FIG. 2089.

[2146] FIG. 2091 shows a nucleotide sequence (SEQ ID NO:2091) of a native sequence PRO84124 cDNA, wherein SEQ ID NO:2091 is a clone designated herein as “DNA328221”.

[2147] FIG. 2092 shows the amino acid sequence (SEQ ID NO:2092) derived from the coding sequence of SEQ ID NO:2091 shown in FIG. 2091.

[2148] FIG. 2093 shows a nucleotide sequence (SEQ ID NO:2093) of a native sequence PRO84125 cDNA, wherein SEQ ID NO:2093 is a clone designated herein as “DNA328222”.

[2149] FIG. 2094 shows the amino acid sequence (SEQ ID NO:2094) derived from the coding sequence of SEQ ID NO:2093 shown in FIG. 2093.

[2150] FIG. 2095 shows a nucleotide sequence (SEQ ID NO:2095) of a native sequence PRO84126 cDNA, wherein SEQ ID NO:2095 is a clone designated herein as “DNA328223”.

[2151] FIG. 2096 shows the amino acid sequence (SEQ ID NO:2096) derived from the coding sequence of SEQ ID NO:2095 shown in FIG. 2095.

[2152] FIG. 2097 shows a nucleotide sequence (SEQ ID NO:2097) of a native sequence PRO23265 cDNA, wherein SEQ ID NO:2097 is a clone designated herein as “DNA176718”.

[2153] FIG. 2098 shows the amino acid sequence (SEQ ID NO:2098) derived from the coding sequence of SEQ ID NO:2097 shown in FIG. 2097.

[2154] FIG. 2099 shows a nucleotide sequence (SEQ ID NO:2099) of a native sequence PRO84127 cDNA, wherein SEQ ID NO:2099 is a clone designated herein as “DNA328224”.

[2155] FIG. 2100 shows the amino acid sequence (SEQ ID NO:2100) derived from the coding sequence of SEQ ID NO:2099 shown in FIG. 2099.

[2156] FIG. 2101 shows a nucleotide sequence (SEQ ID NO:2101) of a native sequence PRO84128 cDNA, wherein SEQ ID NO:2101 is a clone designated herein as “DNA328225”.

[2157] FIG. 2102 shows the amino acid sequence (SEQ ID NO:2102) derived from the coding sequence of SEQ ID NO:2101 shown in FIG. 2101.

[2158] FIG. 2103 shows a nucleotide sequence (SEQ ID NO:2103) of a native sequence PRO84129 cDNA, wherein SEQ ID NO:2103 is a clone designated herein as “DNA328226”.

[2159] FIG. 2104 shows the amino acid sequence (SEQ ID NO:2104) derived from the coding sequence of SEQ ID NO:2103 shown in FIG. 2103.

[2160] FIG. 2105 shows a nucleotide sequence (SEQ ID NO:2105) of a native sequence PRO84130 cDNA, wherein SEQ ID NO:2105 is a clone designated herein as “DNA328227”.

[2161] FIG. 2106 shows the amino acid sequence (SEQ ID NO:2106) derived from the coding sequence of SEQ ID NO:2105 shown in FIG. 2105.

[2162] FIG. 2107 shows a nucleotide sequence (SEQ ID NO:2107) of a native sequence PRO84131 cDNA, wherein SEQ ID NO:2107 is a clone designated herein as “DNA328228”.

[2163] FIG. 2108 shows the amino acid sequence (SEQ ID NO:2108) derived from the coding sequence of SEQ ID NO:2107 shown in FIG. 2107.

[2164] FIG. 2109 shows a nucleotide sequence (SEQ ID NO:2109) of a native sequence PRO84132 cDNA, wherein SEQ ID NO:2109 is a clone designated herein as “DNA328229”.

[2165] FIG. 2110 shows the amino acid sequence (SEQ ID NO:2110) derived from the coding sequence of SEQ ID NO:2109 shown in FIG. 2109.

[2166] FIG. 2111 shows a nucleotide sequence (SEQ ID NO:2111) of a native sequence PRO84133 cDNA, wherein SEQ ID NO:2111 is a clone designated herein as “DNA328230”.

[2167] FIG. 2112 shows the amino acid sequence (SEQ ID NO:2112) derived from the coding sequence of SEQ ID NO:2111 shown in FIG. 2111.

[2168] FIG. 2113 shows a nucleotide sequence (SEQ ID NO:2113) of a native sequence PRO84134 cDNA, wherein SEQ ID NO:2113 is a clone designated herein as “DNA32823 1”.

[2169] FIG. 2114 shows the amino acid sequence (SEQ ID NO:2114) derived from the coding sequence of SEQ ID NO:2113 shown in FIG. 2113.

[2170] FIG. 2115 shows a nucleotide sequence (SEQ ID NO:2115) of a native sequence PRO84135 cDNA, wherein SEQ ID NO:2115 is a clone designated herein as “DNA328232”.

[2171] FIG. 2116 shows the amino acid sequence (SEQ ID NO:2116) derived from the coding sequence of SEQ ID NO:2115 shown in FIG. 2115.

[2172] FIG. 2117 shows a nucleotide sequence (SEQ ID NO:2117) of a native sequence PRO84136 cDNA, wherein SEQ ID NO:2117 is a clone designated herein as “DNA328233”.

[2173] FIG. 2118 shows the amino acid sequence (SEQ ID NO:2118) derived from the coding sequence of SEQ ID NO:2117 shown in FIG. 2117.

[2174] FIG. 2119 shows a nucleotide sequence (SEQ ID NO:2119) of a native sequence PRO84137 cDNA, wherein SEQ ID NO:2119 is a clone designated herein as “DNA328234”.

[2175] FIG. 2120 shows the amino acid sequence (SEQ ID NO:2120) derived from the coding sequence of SEQ ID NO:2119 shown in FIG. 2119.

[2176] FIG. 2121 shows a nucleotide sequence (SEQ ID NO:2121) of a native sequence PRO84138 cDNA, wherein SEQ ID NO:2121 is a clone designated herein as “DNA328235”.

[2177] FIG. 2122 shows the amino acid sequence (SEQ ID NO:2122) derived from the coding sequence of SEQ ID NO:2121 shown in FIG. 2121.

[2178] FIG. 2123 shows a nucleotide sequence (SEQ ID NO:2123) of a native sequence PRO84139 cDNA, wherein SEQ ID NO:2123 is a clone designated herein as “DNA328236”.

[2179] FIG. 2124 shows the amino acid sequence (SEQ ID NO:2124) derived from the coding sequence of SEQ ID NO:2123 shown in FIG. 2123.

[2180] FIG. 2125 shows a nucleotide sequence (SEQ ID NO:2125) of a native sequence PRO84140 cDNA, wherein SEQ ID NO:2125 is a clone designated herein as “DNA328237”.

[2181] FIG. 2126 shows the amino acid sequence (SEQ ID NO:2126) derived from the coding sequence of SEQ ID NO:2125 shown in FIG. 2125.

[2182] FIG. 2127 shows a nucleotide sequence (SEQ ID NO:2127) of a native sequence PRO84141 cDNA, wherein SEQ ID NO:2127 is a clone designated herein as “DNA328238”.

[2183] FIG. 2128 shows the amino acid sequence (SEQ ID NO:2128) derived from the coding sequence of SEQ ID NO:2127 shown in FIG. 2127.

[2184] FIG. 2129 shows a nucleotide sequence (SEQ ID NO:2129) of a native sequence PRO84142 cDNA, wherein SEQ ID NO:2129 is a clone designated herein as “DNA328239”.

[2185] FIG. 2130 shows the amino acid sequence (SEQ ID NO:2130) derived from the coding sequence of SEQ ID NO:2129 shown in FIG. 2129.

[2186] FIG. 2131 shows a nucleotide sequence (SEQ ID NO:2131) of a native sequence PRO84143 cDNA, wherein SEQ ID NO:2131 is a clone designated herein as “DNA328240”.

[2187] FIG. 2132 shows the amino acid sequence (SEQ ID NO:2132) derived from the coding sequence of SEQ ID NO:2131 shown in FIG. 2131.

[2188] FIG. 2133 shows a nucleotide sequence (SEQ ID NO:2133) of a native sequence PRO84144 cDNA, wherein SEQ ID NO:2133 is a clone designated herein as “DNA328241”.

[2189] FIG. 2134 shows the amino acid sequence (SEQ ID NO:2134) derived from the coding sequence of SEQ ID NO:2133 shown in FIG. 2133.

[2190] FIG. 2135 shows a nucleotide sequence (SEQ ID NO:2135) of a native sequence PRO84145 cDNA, wherein SEQ ID NO:2135 is a clone designated herein as “DNA328242”.

[2191] FIG. 2136 shows the amino acid sequence (SEQ ID NO:2136) derived from the coding sequence of SEQ ID NO:2135 shown in FIG. 2135.

[2192] FIG. 2137 shows a nucleotide sequence (SEQ ID NO:2137) of a native sequence cDNA, wherein SEQ ID NO:2137 is a clone designated herein as “DNA328243”.

[2193] FIG. 2138 shows a nucleotide sequence (SEQ ID NO:2138) of a native sequence PRO1889 cDNA, wherein SEQ ID NO:2138 is a clone designated herein as “DNA77623”.

[2194] FIG. 2139 shows the amino acid sequence (SEQ ID NO:2139) derived from the coding sequence of SEQ ID NO:2138 shown in FIG. 2138.

[2195] FIG. 2140 shows a nucleotide sequence (SEQ ID NO:2140) of a native sequence PRO1918 cDNA, wherein SEQ ID NO:2140 is a clone designated herein as “DNA328244”.

[2196] FIG. 2141 shows the amino acid sequence (SEQ ID NO:2141) derived from the coding sequence of SEQ ID NO:2140 shown in FIG. 2140.

[2197] FIG. 2142 shows a nucleotide sequence (SEQ ID NO:2142) of a native sequence PRO84146 cDNA, wherein SEQ ID NO:2142 is a clone designated herein as “DNA328245”.

[2198] FIG. 2143 shows the amino acid sequence (SEQ ID NO:2143) derived from the coding sequence of SEQ ID NO:2142 shown in FIG. 2142.

[2199] FIG. 2144 shows a nucleotide sequence (SEQ ID NO:2144) of a native sequence PRO83476 cDNA, wherein SEQ ID NO:2144 is a clone designated herein as “DNA327201”.

[2200] FIG. 2145 shows the amino acid sequence (SEQ ID NO:2145) derived from the coding sequence of SEQ ID NO:2144 shown in FIG. 2144.

[2201] FIG. 2146 shows a nucleotide sequence (SEQ ID NO:2146) of a native sequence cDNA, wherein SEQ ID NO:2146 is a clone designated herein as “DNA328246”.

[2202] FIG. 2147 shows a nucleotide sequence (SEQ ID NO:2147) of a native sequence cDNA, wherein SEQ ID NO:2147 is a clone designated herein as “DNA328247”.

[2203] FIG. 2148 shows a nucleotide sequence (SEQ ID NO:2148) of a native sequence PRO9871 cDNA, wherein SEQ ID NO:2148 is a clone designated herein as “DNA141423”.

[2204] FIG. 2149 shows the amino acid sequence (SEQ ID NO:2149) derived from the coding sequence of SEQ ID NO:2148 shown in FIG. 2148.

[2205] FIG. 2150 shows a nucleotide sequence (SEQ ID NO:2150) of a native sequence PRO19597 cDNA, wherein SEQ ID NO:2150 is a clone designated herein as “DNA143292”.

[2206] FIG. 2151 shows the amino acid sequence (SEQ ID NO:2151) derived from the coding sequence of SEQ ID NO:2150 shown in FIG. 2150.

[2207] FIG. 2152 shows a nucleotide sequence (SEQ ID NO:2152) of a native sequence PRO19600 cDNA, wherein SEQ ID NO:2152 is a clone designated herein as “DNA149876”.

[2208] FIG. 2153 shows the amino acid sequence (SEQ ID NO:2153) derived from the coding sequence of SEQ ID NO:2152 shown in FIG. 2152.

[2209] FIG. 2154 shows a nucleotide sequence (SEQ ID NO:2154) of a native sequence PRO28700 cDNA, wherein SEQ ID NO:2154 is a clone designated herein as “DNA176108”.

[2210] FIG. 2155 shows the amino acid sequence (SEQ ID NO:2155) derived from the coding sequence of SEQ ID NO:2154 shown in FIG. 2154.

[2211] FIG. 2156 shows a nucleotide sequence (SEQ ID NO:2156) of a native sequence PRO617 cDNA, wherein SEQ ID NO:2156 is a clone designated herein as “DNA48309”.

[2212] FIG. 2157 shows the amino acid sequence (SEQ ID NO:2157) derived from the coding sequence of SEQ ID NO:2156 shown in FIG. 2156.

[2213] FIG. 2158 shows a nucleotide sequence (SEQ ID NO:2158) of a native sequence PRO844 cDNA, wherein SEQ ID NO:2158 is a clone designated herein as “DNA328248”.

[2214] FIG. 2159 shows the amino acid sequence (SEQ ID NO:2159) derived from the coding sequence of SEQ ID NO:2158 shown in FIG. 2158.

[2215] FIG. 2160 shows a nucleotide sequence (SEQ ID NO:2160) of a native sequence PRO71057 cDNA, wherein SEQ ID NO:2160 is a clone designated herein as “DNA304488”.

[2216] FIG. 2161 shows the amino acid sequence (SEQ ID NO:2161) derived from the coding sequence of SEQ ID NO:2160 shown in FIG. 2160.

[2217] FIG. 2162 shows a nucleotide sequence (SEQ ID NO:2162) of a native sequence PRO1160 cDNA, wherein SEQ ID NO:2162 is a clone designated herein as “DNA328249”.

[2218] FIG. 2163 shows the amino acid sequence (SEQ ID NO:2163) derived from the coding sequence of SEQ ID NO:2162 shown in FIG. 2162.

[2219] FIG. 2164 shows a nucleotide sequence (SEQ ID NO:2164) of a native sequence PRO1246 cDNA, wherein SEQ ID NO:2164 is a clone designated herein as “DNA64885”.

[2220] FIG. 2165 shows the amino acid sequence (SEQ ID NO:2165) derived from the coding sequence of SEQ ID NO:2164 shown in FIG. 2164.

[2221] FIG. 2166 shows a nucleotide sequence (SEQ ID NO:2166) of a native sequence PRO82061 cDNA, wherein SEQ ID NO:2166 is a clone designated herein as “DNA328250”.

[2222] FIG. 2167 shows the amino acid sequence (SEQ ID NO:2167) derived from the coding sequence of SEQ ID NO:2166 shown in FIG. 2166.

[2223] FIG. 2168 shows a nucleotide sequence (SEQ ID NO:2168) of a native sequence PRO84147 cDNA, wherein SEQ ID NO:2168 is a clone designated herein as “DNA328251”.

[2224] FIG. 2169 shows the amino acid sequence (SEQ ID NO:2169) derived from the coding sequence of SEQ ID NO:2168 shown in FIG. 2168.

[2225] FIG. 2170 shows a nucleotide sequence (SEQ ID NO:2170) of a native sequence PRO37534 cDNA, wherein SEQ ID NO:2170 is a clone designated herein as “DNA227071”.

[2226] FIG. 2171 shows the amino acid sequence (SEQ ID NO:2171) derived from the coding sequence of SEQ ID NO:2170 shown in FIG. 2170.

[2227] FIG. 2172 shows a nucleotide sequence (SEQ ID NO:2172) of a native sequence PRO84148 cDNA, wherein SEQ ID NO:2172 is a clone designated herein as “DNA328252”.

[2228] FIG. 2173 shows the amino acid sequence (SEQ ID NO:2173) derived from the coding sequence of SEQ ID NO:2172 shown in FIG. 2172.

[2229] FIG. 2174 shows a nucleotide sequence (SEQ ID NO2174) of a native sequence PRO2561 cDNA, wherein SEQ ID NO:2174 is a clone designated herein as “DNA83020”.

[2230] FIG. 2175 shows the amino acid sequence (SEQ ID NO:2175) derived from the coding sequence of SEQ ID NO:2174 shown in FIG. 2174.

[2231] FIG. 2176 shows a nucleotide sequence (SEQ ID NO:2176) of a native sequence PRO37544 cDNA, wherein SEQ ID NO:2176 is a clone designated herein as “DNA227081”.

[2232] FIG. 2177 shows the amino acid sequence (SEQ ID NO:2177) derived from the coding sequence of SEQ ID NO:2176 shown in FIG. 2176.

[2233] FIG. 2178 shows a nucleotide sequence (SEQ ID NO:2178) of a native sequence PRO34252 cDNA, wherein SEQ ID NO:2178 is a clone designated herein as “DNA216500”.

[2234] FIG. 2179 shows the amino acid sequence (SEQ ID NO:2179) derived from the coding sequence of SEQ ID NO:2178 shown in FIG. 2178.

[2235] FIG. 2180 shows a nucleotide sequence (SEQ ID NO:2180) of a native sequence PRO84149 cDNA, wherein SEQ ID NO:2180 is a clone designated herein as “DNA328253”.

[2236] FIG. 2181 shows the amino acid sequence (SEQ ID NO:2181) derived from the coding sequence of SEQ ID NO:2180 shown in FIG. 2180.

[2237] FIG. 2182 shows a nucleotide sequence (SEQ ID NO:2182) of a native sequence PRO2763 cDNA, wherein SEQ ID NO:2182 is a clone designated herein as “DNA88359”.

[2238] FIG. 2183 shows the amino acid sequence (SEQ ID NO:2183) derived from the coding sequence of SEQ ID NO:2182 shown in FIG. 2182.

[2239] FIG. 2184 shows a nucleotide sequence (SEQ ID NO:2184) of a native sequence PRO11581 cDNA, wherein SEQ ID NO:2184 is a clone designated herein as “DNA328254”.

[2240] FIG. 2185 shows the amino acid sequence (SEQ ID NO:2185) derived from the coding sequence of SEQ ID NO:2184 shown in FIG. 2184.

[2241] FIG. 2186 shows a nucleotide sequence (SEQ ID NO:2186) of a native sequence PRO35988 cDNA, wherein SEQ ID NO:2186 is a clone designated herein as “DNA225525”.

[2242] FIG. 2187 shows the amino acid sequence (SEQ ID NO:2187) derived from the coding sequence of SEQ ID NO:2186 shown in FIG. 2186.

[2243] FIG. 2188 shows a nucleotide sequence (SEQ ID NO:2188) of a native sequence PRO34253 cDNA, wherein SEQ ID NO:2188 is a clone designated herein as “DNA216501”.

[2244] FIG. 2189 shows the amino acid sequence (SEQ ID NO:2189) derived from the coding sequence of SEQ ID NO:2188 shown in FIG. 2188.

[2245] FIG. 2190 shows a nucleotide sequence (SEQ ID NO:2190) of a native sequence PRO36305 cDNA, wherein SEQ ID NO:2190 is a clone designated herein as “DNA324774”.

[2246] FIG. 2191 shows the amino acid sequence (SEQ ID NO:2191) derived from the coding sequence of SEQ ID NO:2190 shown in FIG. 2190.

[2247] FIG. 2192 shows a nucleotide sequence (SEQ ID NO:2192) of a native sequence PRO36134 cDNA, wherein SEQ ID NO:2192 is a clone designated herein as “DNA22567 1”.

[2248] FIG. 2193 shows the amino acid sequence (SEQ ID NO:2193) derived from the coding sequence of SEQ ID NO:2192 shown in FIG. 2192.

[2249] FIG. 2194 shows a nucleotide sequence (SEQ ID NO:2194) of a native sequence PRO37076 cDNA, wherein SEQ ID NO:2194 is a clone designated herein as “DNA226613”.

[2250] FIG. 2195 shows the amino acid sequence (SEQ ID NO:2195) derived from the coding sequence of SEQ ID NO:2194 shown in FIG. 2194.

[2251] FIG. 2196 shows a nucleotide sequence (SEQ ID NO:2196) of a native sequence PRO84150 cDNA, wherein SEQ ID NO:2196 is a clone designated herein as “DNA328255”.

[2252] FIG. 2197 shows the amino acid sequence (SEQ ID NO:2197) derived from the coding sequence of SEQ ID NO:2196 shown in FIG. 2196.

[2253] FIG. 2198 shows a nucleotide sequence (SEQ ID NO:2198) of a native sequence PRO12564 cDNA, wherein SEQ ID NO:2198 is a clone designated herein as “DNA150971”.

[2254] FIG. 2199 shows the amino acid sequence (SEQ ID NO:2199) derived from the coding sequence of SEQ ID NO:2198 shown in FIG. 2198.

[2255] FIG. 2200 shows a nucleotide sequence (SEQ ID NO:2200) of a native sequence PRO2892 cDNA, wherein SEQ ID NO:2200 is a clone designated herein as “DNA88666”.

[2256] FIG. 2201 shows the amino acid sequence (SEQ ID NO:2201) derived from the coding sequence of SEQ ID NO:2200 shown in FIG. 2200.

[2257] FIG. 2202 shows a nucleotide sequence (SEQ ID NO:2202) of a native sequence PRO2712 cDNA, wherein SEQ ID NO:2202 is a clone designated herein as “DNA88240”.

[2258] FIG. 2203 shows the amino acid sequence (SEQ ID NO:2203) derived from the coding sequence of SEQ ID NO:2202 shown in FIG. 2202.

[2259] FIG. 2204 shows a nucleotide sequence (SEQ ID NO:2204) of a native sequence PRO2114 cDNA, wherein SEQ ID NO:2204 is a clone designated herein as “DNA328256”.

[2260] FIG. 2205 shows the amino acid sequence (SEQ ID NO:2205) derived from the coding sequence of SEQ ID NO:2204 shown in FIG. 2204.

[2261] FIG. 2206 shows a nucleotide sequence (SEQ ID NO:2206) of a native sequence PRO4815 cDNA, wherein SEQ ID NO:2206 is a clone designated herein as “DNA103488”.

[2262] FIG. 2207 shows the amino acid sequence (SEQ ID NO:2207) derived from the coding sequence of SEQ ID NO:2206 shown in FIG. 2206.

[2263] FIG. 2208 shows a nucleotide sequence (SEQ ID NO:2208) of a native sequence PRO11711 cDNA, wherein SEQ ID NO:2208 is a clone designated herein as “DNA151333”.

[2264] FIG. 2209 shows the amino acid sequence (SEQ ID NO:2209) derived from the coding sequence of SEQ ID NO:2208 shown in FIG. 2208.

[2265] FIG. 2210 shows a nucleotide sequence (SEQ ID NO:2210) of a native sequence PRO70862 cDNA, wherein SEQ ID NO:2210 is a clone designated herein as “DNA328257”.

[2266] FIG. 2211 shows the amino acid sequence (SEQ ID NO:2211) derived from the coding sequence of SEQ ID NO:2210 shown in FIG. 2210.

[2267] FIG. 2212 shows a nucleotide sequence (SEQ ID NO:2212) of a native sequence PRO21960 cDNA, wherein SEQ ID NO:2212 is a clone designated herein as “DNA192060”.

[2268] FIG. 2213 shows the amino acid sequence (SEQ ID NO:2213) derived from the coding sequence of SEQ ID NO:2212 shown in FIG. 2212.

[2269] FIG. 2214 shows a nucleotide sequence (SEQ ID NO:) of a native sequence PRO84151 cDNA, wherein SEQ ID NO:2214 is a clone designated herein as “DNA328258”.

[2270] FIG. 2215 shows the amino acid sequence (SEQ ID NO:2215) derived from the coding sequence of SEQ ID NO:2214 shown in FIG. 2214.

[2271] FIG. 2216 shows a nucleotide sequence (SEQ ID NO:2216) of a native sequence PRO2620 cDNA, wherein SEQ ID NO:2216 is a clone designated herein as “DNA328259”.

[2272] FIG. 2217A-B shows a nucleotide sequence (SEQ ID NO:2217) of a native sequence PRO62620 cDNA, wherein SEQ ID NO:2217 is a clone designated herein as “DNA83176”.

[2273] FIG. 2218 shows the amino acid sequence (SEQ ID NO:2218) derived from the coding sequence of SEQ ID NO:2217 shown in FIG. 2217A-B.

[2274] FIG. 2219 shows a nucleotide sequence (SEQ ID NO:2219) of a native sequence PRO37793 cDNA, wherein SEQ ID NO:2219 is a clone designated herein as “DNA227330”.

[2275] FIG. 2220 shows the amino acid sequence (SEQ ID NO:2220) derived from the coding sequence of SEQ ID NO:2219 shown in FIG. 2219.

[2276] FIG. 2221 shows a nucleotide sequence (SEQ ID NO:2221) of a native sequence PRO84152 cDNA, wherein SEQ ID NO:2221 is a clone designated herein as “DNA328260”.

[2277] FIG. 2222 shows the amino acid sequence (SEQ ID NO:2222) derived from the coding sequence of SEQ ID NO:2221 shown in FIG. 2221.

[2278] FIG. 2223 shows a nucleotide sequence (SEQ ID NO:2223) of a native sequence PRO37676 cDNA, wherein SEQ ID NO:2223 is a clone designated herein as “DNA227213”.

[2279] FIG. 2224 shows the amino acid sequence (SEQ ID NO:2224) derived from the coding sequence of SEQ ID NO:2223 shown in FIG. 2223.

[2280] FIG. 2225 shows a nucleotide sequence (SEQ ID NO:2225) of a native sequence PRO83477 cDNA, wherein SEQ ID NO:2225 is a clone designated herein as “DNA327204”.

[2281] FIG. 2226 shows the amino acid sequence (SEQ ID NO:2226) derived from the coding sequence of SEQ ID NO:2225 shown in FIG. 2225.

[2282] FIG. 2227 shows a nucleotide sequence (SEQ ID NO:2227) of a native sequence PRO37316 cDNA, wherein SEQ ID NO:2227 is a clone designated herein as “DNA226853”.

[2283] FIG. 2228 shows the amino acid sequence (SEQ ID NO:2228) derived from the coding sequence of SEQ ID NO:2227 shown in FIG. 2227.

[2284] FIG. 2229 shows a nucleotide sequence (SEQ ID NO:2229) of a native sequence cDNA, wherein SEQ ID NO:2229 is a clone designated herein as “DNA328261”.

[2285] FIG. 2230 shows a nucleotide sequence (SEQ ID NO:2230) of a native sequence PRO20129 cDNA, wherein SEQ ID NO: is a clone designated herein as “DNA171401”.

[2286] FIG. 2231 shows the amino acid sequence (SEQ ID NO:2231) derived from the coding sequence of SEQ ID NO:2230 shown in FIG. 2230.

[2287] FIG. 2232 shows a nucleotide sequence (SEQ ID NO:2232) of a native sequence PRO84153 cDNA, wherein SEQ ID NO:2232 is a clone designated herein as “DNA328262”.

[2288] FIG. 2233 shows the amino acid sequence (SEQ ID NO:2233) derived from the coding sequence of SEQ ID NO:2232 shown in FIG. 2232.

[2289] FIG. 2234 shows a nucleotide sequence (SEQ ID NO:2234) of a native sequence PRO4645 cDNA, wherein SEQ ID NO:2234 is a clone designated herein as “DNA328263”.

[2290] FIG. 2235 shows the amino acid sequence (SEQ ID NO:2235) derived from the coding sequence of SEQ ID NO:2234 shown in FIG. 2234.

[2291] FIG. 2236A-B shows a nucleotide sequence (SEQ ID NO:2236) of a native sequence PRO37137 cDNA, wherein SEQ ID NO:2236 is a clone designated herein as “DNA226674”.

[2292] FIG. 2237 shows the amino acid sequence (SEQ ID NO:2237) derived from the coding sequence of SEQ ID NO:2236 shown in FIG. 2236A-B.

[2293] FIG. 2238 shows a nucleotide sequence (SEQ ID NO:2238) of a native sequence PRO36538 cDNA, wherein SEQ ID NO:2238 is a clone designated herein as “DNA226075”.

[2294] FIG. 2239 shows the amino acid sequence (SEQ ID NO:2239) derived from the coding sequence of SEQ ID NO:2238 shown in FIG. 2238.

[2295] FIG. 2240 shows a nucleotide sequence (SEQ ID NO:2240) of a native sequence PRO12087 cDNA, wherein SEQ ID NO:2240 is a clone designated herein as “DNA328264”.

[2296] FIG. 2241 shows the amino acid sequence (SEQ ID NO:2241) derived from the coding sequence of SEQ ID NO:2240 shown in FIG. 2240.

[2297] FIG. 2242 shows a nucleotide sequence (SEQ ID NO:2242) of a native sequence PRO4805 cDNA, wherein SEQ ID NO:2242 is a clone designated herein as “DNA103478”.

[2298] FIG. 2243 shows the amino acid sequence (SEQ ID NO:2243) derived from the coding sequence of SEQ ID NO:2242 shown in FIG. 2242.

[2299] FIG. 2244 shows a nucleotide sequence (SEQ ID NO:2244) of a native sequence PRO1192 cDNA, wherein SEQ ID NO:2244 is a clone designated herein as “DNA328265”.

[2300] FIG. 2245 shows the amino acid sequence (SEQ ID NO:2245) derived from the coding sequence of SEQ ID NO:2244 shown in FIG. 2244.

[2301] FIG. 2246 shows a nucleotide sequence (SEQ ID NO:2246) of a native sequence PRO12125 cDNA, wherein SEQ ID NO:2246 is a clone designated herein as “DNA328266”.

[2302] FIG. 2247 shows the amino acid sequence (SEQ ID NO:2247) derived from the coding sequence of SEQ ID NO: 2246 shown in FIG. 2246.

[2303] FIG. 2248A-B shows a nucleotide sequence (SEQ ID NO:2248) of a native sequence PRO12864 cDNA, wherein SEQ ID NO:2248 is a clone designated herein as “DNA328267”.

[2304] FIG. 2249 shows the amino acid sequence (SEQ ID NO:2249) derived from the coding sequence of SEQ ID NO:2248 shown in FIG. 2248A-B.

[2305] FIG. 2250A-B shows a nucleotide sequence (SEQ ID NO:2250) of a native sequence PRO21704 cDNA, wherein SEQ ID NO:2250 is a clone designated herein as “DNA188192”.

[2306] FIG. 2251 shows the amino acid sequence (SEQ ID NO:2251) derived from the coding sequence of SEQ ID NO:2250 shown in FIG. 2250A-B.

[2307] FIG. 2252 shows a nucleotide sequence (SEQ ID NO:2252) of a native sequence PRO84154 cDNA, wherein SEQ ID NO:2252 is a clone designated herein as “DNA328268”.

[2308] FIG. 2253 shows the amino acid sequence (SEQ ID NO:2253) derived from the coding sequence of SEQ ID NO:2252 shown in FIG. 2252.

[2309] FIG. 2254 shows a nucleotide sequence (SEQ ID NO:2254) of a native sequence PRO2115 cDNA, wherein SEQ ID NO:2254 is a clone designated herein as “DNA328269”.

[2310] FIG. 2255 shows the amino acid sequence (SEQ ID NO:2255) derived from the coding sequence of SEQ ID NO:2254 shown in FIG. 2254.

[2311] FIG. 2256 shows a nucleotide sequence (SEQ ID NO:2256) of a native sequence PRO4583 cDNA, wherein SEQ ID NO:2256 is a clone designated herein as “DNA103253”.

[2312] FIG. 2257 shows the amino acid sequence (SEQ ID NO:2257) derived from the coding sequence of SEQ ID NO:2256 shown in FIG. 2256.

[2313] FIG. 2258 shows a nucleotide sequence (SEQ ID NO:2258) of a native sequence PRO118 cDNA, wherein SEQ ID NO:2258 is a clone designated herein as “DNA52749”.

[2314] FIG. 2259 shows the amino acid sequence (SEQ ID NO:2259) derived from the coding sequence of SEQ ID NO:2258 shown in FIG. 2258.

[2315] FIG. 2260 shows a nucleotide sequence (SEQ ID NO:2260) of a native sequence PRO69926 cDNA, wherein SEQ ID NO:2260 is a clone designated herein as “DNA287951”.

[2316] FIG. 2261 shows the amino acid sequence (SEQ ID NO:2261) derived from the coding sequence of SEQ ID NO:2260 shown in FIG. 2260.

[2317] FIG. 2262 shows a nucleotide sequence (SEQ ID NO:2262) of a native sequence PRO38180 cDNA, wherein SEQ ID NO:2262 is a clone designated herein as “DNA227717”.

[2318] FIG. 2263 shows the amino acid sequence (SEQ ID NO:2263) derived from the coding sequence of SEQ ID NO:2262 shown in FIG. 2262.

[2319] FIG. 2264 shows a nucleotide sequence (SEQ ID NO:2264) of a native sequence PRO9901 cDNA, wherein SEQ ID NO:2264 is a clone designated herein as “DNA328270”.

[2320] FIG. 2265 shows the amino acid sequence (SEQ ID NO:2265) derived from the coding sequence of SEQ ID NO:2264 shown in FIG. 2264.

[2321] FIG. 2266 shows a nucleotide sequence (SEQ ID NO:2266) of a native sequence PRO81868 cDNA, wherein SEQ ID NO:2266 is a clone designated herein as “DNA328271”.

[2322] FIG. 2267 shows the amino acid sequence (SEQ ID NO:2267) derived from the coding sequence of SEQ ID NO:2266 shown in FIG. 2266.

[2323] FIG. 2268 shows a nucleotide sequence (SEQ ID NO:2268) of a native sequence PRO36024 cDNA, wherein SEQ ID NO:2268 is a clone designated herein as “DNA225561”.

[2324] FIG. 2269 shows the amino acid sequence (SEQ ID NO:2269) derived from the coding sequence of SEQ ID NO:2268 shown in FIG. 2268.

[2325] FIG. 2270 shows a nucleotide sequence (SEQ ID NO:2270) of a native sequence PRO70976 cDNA, wherein SEQ ID NO:2270 is a clone designated herein as “DNA328272”.

[2326] FIG. 2271 shows the amino acid sequence (SEQ ID NO:2271) derived from the coding sequence of SEQ ID NO:2270 shown in FIG. 2270.

[2327] FIG. 2272 shows a nucleotide sequence (SEQ ID NO:2272) of a native sequence PRO23248 cDNA, wherein SEQ ID NO:2272 is a clone designated herein as “DNA325 110”.

[2328] FIG. 2273 shows the amino acid sequence (SEQ ID NO:2273) derived from the coding sequence of SEQ ID NO: 2272 shown in FIG. 2272.

[2329] FIG. 2274 shows a nucleotide sequence (SEQ ID NO:2274) of a native sequence PRO84155 cDNA, wherein SEQ ID NO:2274 is a clone designated herein as “DNA328273”.

[2330] FIG. 2275 shows the amino acid sequence (SEQ ID NO:2275) derived from the coding sequence of SEQ ID NO:2274 shown in FIG. 2274.

[2331] FIG. 2276 shows a nucleotide sequence (SEQ ID NO:2276) of a native sequence PRO33683 cDNA, wherein SEQ ID NO:2276 is a clone designated herein as “DNA210138”.

[2332] FIG. 2277 shows the amino acid sequence (SEQ ID NO:2277) derived from the coding sequence of SEQ ID NO:2276 shown in FIG. 2276.

[2333] FIG. 2278A-B shows a nucleotide sequence (SEQ ID NO:2278) of a native sequence PRO37368 cDNA, wherein SEQ ID NO:2278 is a clone designated herein as “DNA226905”.

[2334] FIG. 2279 shows the amino acid sequence (SEQ ID NO:2279) derived from the coding sequence of SEQ ID NO:2278 shown in FIG. 2278A-B.

[2335] FIG. 2280 shows a nucleotide sequence (SEQ ID NO:2280) of a native sequence PRO12912 cDNA, wherein SEQ ID NO:2280 is a clone designated herein as “DNA328274”.

[2336] FIG. 2281 shows the amino acid sequence (SEQ ID NO:2281) derived from the coding sequence of SEQ ID NO:2280 shown in FIG. 2280.

[2337] FIG. 2282 shows a nucleotide sequence (SEQ ID NO:2282) of a native sequence PRO12752 cDNA, wherein SEQ ID NO:2282 is a clone designated herein as “DNA151907”.

[2338] FIG. 2283 shows the amino acid sequence (SEQ ID NO:2283) derived from the coding sequence of SEQ ID NO:2282 shown in FIG. 2282.

[2339] FIG. 2284 shows a nucleotide sequence (SEQ ID NO:2284) of a native sequence PRO21687 cDNA, wherein SEQ ID NO:2284 is a clone designated herein as “DNA188181”.

[2340] FIG. 2285 shows the amino acid sequence (SEQ ID NO:2285) derived from the coding sequence of SEQ ID NO:2284 shown in FIG. 2284.

[2341] FIG. 2286 shows a nucleotide sequence (SEQ ID NO:2286) of a native sequence PRO200 cDNA, wherein SEQ ID NO:2286 is a clone designated herein as “DNA327202”.

[2342] FIG. 2287 shows the amino acid sequence (SEQ ID NO:2287) derived from the coding sequence of SEQ ID NO:2286 shown in FIG. 2286.

[2343] FIG. 2288 shows a nucleotide sequence (SEQ ID NO:2288) of a native sequence PRO36003 cDNA, wherein SEQ ID NO:2288 is a clone designated herein as “DNA225540”.

[2344] FIG. 2289 shows the amino acid sequence (SEQ ID NO:2289) derived from the coding sequence of SEQ ID NO:2288 shown in FIG. 2288.

[2345] FIG. 2290 shows a nucleotide sequence (SEQ ID NO:2290) of a native sequence PRO84156 cDNA, wherein SEQ ID NO:2290 is a clone designated herein as “DNA328275”.

[2346] FIG. 2291 shows the amino acid sequence (SEQ ID NO:2291) derived from the coding sequence of SEQ ID NO:2290 shown in FIG. 2290.

[2347] FIG. 2292 shows a nucleotide sequence (SEQ ID NO:2292) of a native sequence PRO84157 cDNA, wherein SEQ ID NO:2292 is a clone designated herein as “DNA328276”.

[2348] FIG. 2293 shows the amino acid sequence (SEQ ID NO:2293) derived from the coding sequence of SEQ ID NO:2292 shown in FIG. 2292.

[2349] FIG. 2294 shows a nucleotide sequence (SEQ ID NO:2294) of a native sequence PRO36079 cDNA, wherein SEQ ID NO:2294 is a clone designated herein as “DNA328277”.

[2350] FIG. 2295 shows the amino acid sequence (SEQ ID NO:2295) derived from the coding sequence of SEQ ID NO:2294 shown in FIG. 2294.

[2351] FIG. 2296A-B shows a nucleotide sequence (SEQ ID NO:2296) of a native sequence PRO12450 cDNA, wherein SEQ ID NO:2296 is a clone designated herein as “DNA328278”.

[2352] FIG. 2297 shows the amino acid sequence (SEQ ID NO:2297) derived from the coding sequence of SEQ ID NO:2296 shown in FIG. 2296A-B

[2353] FIG. 2298 shows a nucleotide sequence (SEQ ID NO:2298) of a native sequence PRO83475 cDNA, wherein SEQ ID NO:2298 is a clone designated herein as “DNA327199”.

[2354] FIG. 2299 shows the amino acid sequence (SEQ ID NO:2299) derived from the coding sequence of SEQ ID NO:2298 shown in FIG. 2298.

[2355] FIG. 2300 shows a nucleotide sequence (SEQ ID NO:2300) of a native sequence cDNA, wherein SEQ ID NO:2300 is a clone designated herein as “DNA328279”.

[2356] FIG. 2301 shows a nucleotide sequence (SEQ ID NO:2301) of a native sequence PRO1213 cDNA, wherein SEQ ID NO:2301 is a clone designated herein as “DNA66487”.

[2357] FIG. 2302 shows the amino acid sequence (SEQ ID NO:2302) derived from the coding sequence of SEQ ID NO:2301 shown in FIG. 2301.

[2358] FIG. 2303 shows a nucleotide sequence (SEQ ID NO:2303) of a native sequence PRO82992 cDNA, wherein SEQ ID NO:2303 is a clone designated herein as “DNA326639”.

[2359] FIG. 2304 shows the amino acid sequence (SEQ ID NO:2304) derived from the coding sequence of SEQ ID NO:2303 shown in FIG. 2303.

[2360] FIG. 2305A-B shows a nucleotide sequence (SEQ ID NO:2305) of a native sequence PRO38492 cDNA, wherein SEQ ID NO:2305 is a clone designated herein as “DNA228029”.

[2361] FIG. 2306 shows the amino acid sequence (SEQ ID NO:2306) derived from the coding sequence of SEQ ID NO:2305 shown in FIG. 2305A-B.

[2362] FIG. 2307 shows a nucleotide sequence (SEQ ID NO:2307) of a native sequence cDNA, wherein SEQ ID NO:2307 is a clone designated herein as “DNA150981”.

[2363] FIG. 2308 shows a nucleotide sequence (SEQ ID NO:2308) of a native sequence cDNA, wherein SEQ ID NO:2308 is a clone designated herein as “DNA154390”.

[2364] FIG. 2309A-B shows a nucleotide sequence (SEQ ID NO:2309) of a native sequence PRO84158 cDNA, wherein SEQ ID NO:2309 is a clone designated herein as “DNA328280”.

[2365] FIG. 2310 shows the amino acid sequence (SEQ ID NO:2310) derived from the coding sequence of SEQ ID NO:2309 shown in FIG. 2309A-B.

[2366] FIG. 2311 shows a nucleotide sequence (SEQ ID NO:2311) of a native sequence cDNA, wherein SEQ ID NO:2311 is a clone designated herein as “DNA328281”.

[2367] FIG. 2312 shows a nucleotide sequence (SEQ ID NO:2312) of a native sequence PRO11738 cDNA, wherein SEQ ID NO:2312 is a clone designated herein as “DNA151360”.

[2368] FIG. 2313 shows the amino acid sequence (SEQ ID NO:2313) derived from the coding sequence of SEQ ID NO:2312 shown in FIG. 2312.

[2369] FIG. 2314 shows a nucleotide sequence (SEQ ID NO:2314) of a native sequence PRO11820 cDNA, wherein SEQ ID NO:2314 is a clone designated herein as “DNA151466”.

[2370] FIG. 2315 shows the amino acid sequence (SEQ ID NO:2315) derived from the coding sequence of SEQ ID NO:2314 shown in FIG. 2314.

[2371] FIG. 2316 shows a nucleotide sequence (SEQ ID NO:2316) of a native sequence PRO11863 cDNA, wherein SEQ ID NO:2316 is a clone designated herein as “DNA151518”.

[2372] FIG. 2317 shows the amino acid sequence (SEQ ID NO:2317) derived from the coding sequence of SEQ ID NO:2316 shown in FIG. 2316.

[2373] FIG. 2318A-B shows a nucleotide sequence (SEQ ID NO:2318) of a native sequence PRO84159 cDNA, wherein SEQ ID NO:2318 is a clone designated herein as “DNA328282”.

[2374] FIG. 2319 shows the amino acid sequence (SEQ ID NO:2319) derived from the coding sequence of SEQ ID NO:2318 shown in FIG. 2319A-B.

[2375] FIG. 2320 shows a nucleotide sequence (SEQ ID NO:2320) of a native sequence PRO11899 cDNA, wherein SEQ ID NO:2320 is a clone designated herein as “DNA151578”.

[2376] FIG. 2321 shows the amino acid sequence (SEQ ID NO:2321) derived from the coding sequence of SEQ ID NO:2320 shown in FIG. 2320.

[2377] FIG. 2322A-B shows a nucleotide sequence (SEQ ID NO:2322) of a native sequence cDNA, wherein SEQ ID NO:2322 is a clone designated herein as “DNA328283”.

[2378] FIG. 2323A-B shows a nucleotide sequence (SEQ ID NO:2323) of a native sequence PRO84160 cDNA, wherein SEQ ID NO:2323 is a clone designated herein as “DNA328284”.

[2379] FIG. 2324 shows the amino acid sequence (SEQ ID NO:2324) derived from the coding sequence of SEQ ID NO:2323 shown in FIG. 2323A-B.

[2380] FIG. 2325 shows a nucleotide sequence (SEQ ID NO:2325) of a native sequence PRO12039 cDNA, wherein SEQ ID NO:2325 is a clone designated herein as “DNA151761”.

[2381] FIG. 2326 shows the amino acid sequence (SEQ ID NO:2326) derived from the coding sequence of SEQ ID NO:2325 shown in FIG. 2325.

[2382] FIG. 2327 shows a nucleotide sequence (SEQ ID NO:2327) of a native sequence PRO12052 cDNA, wherein SEQ ID NO:2327 is a clone designated herein as “DNA151774”.

[2383] FIG. 2328 shows the amino acid sequence (SEQ ID NO:2328) derived from the coding sequence of SEQ ID NO:2327 shown in FIG. 2327.

[2384] FIG. 2329 shows a nucleotide sequence (SEQ ID NO:2329) of a native sequence PRO84161 cDNA, wherein SEQ ID NO:2329 is a clone designated herein as “DNA328285”.

[2385] FIG. 2330 shows the amino acid sequence (SEQ ID NO:2330) derived from the coding sequence of SEQ ID NO:2329 shown in FIG. 2329.

[2386] FIG. 2331A-B shows a nucleotide sequence (SEQ ID NO:2331) of a native sequence PRO69594 cDNA, wherein SEQ ID NO:2331 is a clone designated herein as “DNA287330”.

[2387] FIG. 2332 shows the amino acid sequence (SEQ ID NO:2332) derived from the coding sequence of SEQ ID NO:2331 shown in FIG. 2331A-B.

[2388] FIG. 2333 shows a nucleotide sequence (SEQ ID NO:2333) of a native sequence PRO84162 cDNA, wherein SEQ ID NO:2333 is a clone designated herein as “DNA328286”.

[2389] FIG. 2334 shows the amino acid sequence (SEQ ID NO:2334) derived from the coding sequence of SEQ ID NO:2333 shown in FIG. 2333.

[2390] FIG. 2335 shows a nucleotide sequence (SEQ ID NO:2335) of a native sequence PRO23605 cDNA, wherein SEQ ID NO:2335 is a clone designated herein as “DNA194213”.

[2391] FIG. 2336 shows the amino acid sequence (SEQ ID NO:2336) derived from the coding sequence of SEQ ID NO:2335 shown in FIG. 2335.

[2392] FIG. 2337 shows a nucleotide sequence (SEQ ID NO:2337) of a native sequence PRO23896 cDNA, wherein SEQ ID NO:2337 is a clone designated herein as “DNA194541”.

[2393] FIG. 2338 shows the amino acid sequence (SEQ ID NO:2338) derived from the coding sequence of SEQ ID NO:2337 shown in FIG. 2337.

[2394] FIG. 2339A-B shows a nucleotide sequence (SEQ ID NO:2339) of a native sequence PRO24103 cDNA, wherein SEQ ID NO:2339 is a clone designated herein as “DNA194840”.

[2395] FIG. 2340 shows the amino acid sequence (SEQ ID NO:2340) derived from the coding sequence of SEQ ID NO:2339 shown in FIG. 2339A-B.

[2396] FIG. 2341A-C shows a nucleotide sequence (SEQ ID NO:2341) of a native sequence PRO84163 cDNA, wherein SEQ ID NO:2341 is a clone designated herein as “DNA328287”.

[2397] FIG. 2342 shows the amino acid sequence (SEQ ID NO:2342) derived from the coding sequence of SEQ ID NO:2341 shown in FIG. 2341A-C.

[2398] FIG. 2343 shows a nucleotide sequence (SEQ ID NO:2343) of a native sequence PRO69876 cDNA, wherein SEQ ID NO:2343 is a clone designated herein as “DNA328288”.

[2399] FIG. 2344 shows the amino acid sequence (SEQ ID NO:2344) derived from the coding sequence of SEQ ID NO:2343 shown in FIG. 2343.

[2400] FIG. 2345 shows a nucleotide sequence (SEQ ID NO:2345) of a native sequence cDNA, wherein SEQ ID NO:2345 is a clone designated herein as “DNA196275”.

[2401] FIG. 2346 shows a nucleotide sequence (SEQ ID NO:2346) of a native sequence PRO28564 cDNA, wherein SEQ ID NO:2346 is a clone designated herein as “DNA199066”.

[2402] FIG. 2347 shows the amino acid sequence (SEQ ID NO:2347) derived from the coding sequence of SEQ ID NO:2346 shown in FIG. 2346.

[2403] FIG. 2348 shows a nucleotide sequence (SEQ ID NO:2348) of a native sequence cDNA, wherein SEQ ID NO:2348 is a clone designated herein as “DNA328289”.

[2404] FIG. 2349 shows a nucleotide sequence (SEQ ID NO:2349) of a native sequence PRO33767 cDNA, wherein SEQ ID NO:2349 is a clone designated herein as “DNA210233”.

[2405] FIG. 2350 shows the amino acid sequence (SEQ ID NO:2350) derived from the coding sequence of SEQ ID NO:2349 shown in FIG. 2349.

[2406] FIG. 2351 shows a nucleotide sequence (SEQ ID NO:2351) of a native sequence PRO84164 cDNA, wherein SEQ ID NO:2351 is a clone designated herein as “DNA328290”.

[2407] FIG. 2352 shows the amino acid sequence (SEQ ID NO:2352) derived from the coding sequence of SEQ ID NO:2351 shown in FIG. 2351.

[2408] FIG. 2353A-B shows a nucleotide sequence (SEQ ID NO:2353) of a native sequence PRO19724 cDNA, wherein SEQ ID NO:2353 is a clone designated herein as “DNA73873”.

[2409] FIG. 2354 shows the amino acid sequence (SEQ ID NO:2354) derived from the coding sequence of SEQ ID NO:2353 shown in FIG. 2353A-B.

[2410] FIG. 2355A-C shows a nucleotide sequence (SEQ ID NO:2355) of a native sequence PRO84165 cDNA, wherein SEQ ID NO:2355 is a clone designated herein as “DNA32829 1”.

[2411] FIG. 2356 shows the amino acid sequence (SEQ ID NO:2356) derived from the coding sequence of SEQ ID NO:2355 shown in FIG. 2355A-C.

[2412] FIG. 2357 shows a nucleotide sequence (SEQ ID NO:2357) of a native sequence PRO84166 cDNA, wherein SEQ ID NO:2357 is a clone designated herein as “DNA328292”.

[2413] FIG. 2358 shows the amino acid sequence (SEQ ID NO:2358) derived from the coding sequence of SEQ ID NO:2357 shown in FIG. 2357.

[2414] FIG. 2359 shows a nucleotide sequence (SEQ ID NO:2359) of a native sequence PRO63135 cDNA, wherein SEQ ID NO:2359 is a clone designated herein as “DNA328293”.

[2415] FIG. 2360 shows the amino acid sequence (SEQ ID NO:2360) derived from the coding sequence of SEQ ID NO:2359 shown in FIG. 2359.

[2416] FIG. 2361 shows a nucleotide sequence (SEQ ID NO:2361) of a native sequence PRO58823 cDNA, wherein SEQ ID NO:2361 is a clone designated herein as “DNA270444”.

[2417] FIG. 2362 shows the amino acid sequence (SEQ ID NO:2362) derived from the coding sequence of SEQ ID NO:2361 shown in FIG. 2361.

[2418] FIG. 2363 shows a nucleotide sequence (SEQ ID NO:2363) of a native sequence PRO51466 cDNA, wherein SEQ ID NO:2363 is a clone designated herein as “DNA256405”.

[2419] FIG. 2364 shows the amino acid sequence (SEQ ID NO:2364) derived from the coding sequence of SEQ ID NO:2363 shown in FIG. 2363.

[2420] FIG. 2365 shows a nucleotide sequence (SEQ ID NO:2365) of a native sequence PRO51081 cDNA, wherein SEQ ID NO:2365 is a clone designated herein as “DNA256033”.

[2421] FIG. 2366 shows the amino acid sequence (SEQ ID NO:2366) derived from the coding sequence of SEQ ID NO:2365 shown in FIG. 2365.

[2422] FIG. 2367 shows a nucleotide sequence (SEQ ID NO:2367) of a native sequence PRO49244 cDNA, wherein SEQ ID NO:2367 is a clone designated herein as “DNA254129”.

[2423] FIG. 2368 shows the amino acid sequence (SEQ ID NO:2368) derived from the coding sequence of SEQ ID NO:2367 shown in FIG. 2367.

[2424] FIG. 2369 shows a nucleotide sequence (SEQ ID NO:2369) of a native sequence PRO84167 cDNA, wherein SEQ ID NO:2369 is a clone designated herein as “DNA328294”.

[2425] FIG. 2370 shows the amino acid sequence (SEQ ID NO:2370) derived from the coding sequence of SEQ ID NO:2369 shown in FIG. 2396.

[2426] FIG. 2371 shows a nucleotide sequence (SEQ ID NO:2371) of a native sequence PRO49824 cDNA, wherein SEQ ID NO:2371 is a clone designated herein as “DNA254725”.

[2427] FIG. 2372 shows the amino acid sequence (SEQ ID NO:2372) derived from the coding sequence of SEQ ID NO:2371 shown in FIG. 2371.

[2428] FIG. 2373 shows a nucleotide sequence (SEQ ID NO:2373) of a native sequence PRO84168 cDNA, wherein SEQ ID NO:2373 is a clone designated herein as “DNA328295”.

[2429] FIG. 2374 shows the amino acid sequence (SEQ ID NO:2374) derived from the coding sequence of SEQ ID NO:2373 shown in FIG. 2373.

[2430] FIG. 2375 shows a nucleotide sequence (SEQ ID NO:2375) of a native sequence PRO51817 cDNA, wherein SEQ ID NO:2375 is a clone designated herein as “DNA328296”.

[2431] FIG. 2376 shows the amino acid sequence (SEQ ID NO:2376) derived from the coding sequence of SEQ ID NO:2375 shown in FIG. 2375.

[2432] FIG. 2377 shows a nucleotide sequence (SEQ ID NO:2377) of a native sequence PRO59418 cDNA, wherein SEQ ID NO:2377 is a clone designated herein as “DNA328297”.

[2433] FIG. 2378 shows the amino acid sequence (SEQ ID NO:2378) derived from the coding sequence of SEQ ID NO:2377 shown in FIG. 2377.

[2434] FIG. 2379 shows a nucleotide sequence (SEQ ID NO:2379) of a native sequence PRO84169 cDNA, wherein SEQ ID NO:2379 is a clone designated herein as “DNA328298”.

[2435] FIG. 2380 shows the amino acid sequence (SEQ ID NO:2380) derived from the coding sequence of SEQ ID NO:2379 shown in FIG. 2379.

[2436] FIG. 2381 shows a nucleotide sequence (SEQ ID NO:2381) of a native sequence PRO132 cDNA, wherein SEQ ID NO:2381 is a clone designated herein as “DNA53532”.

[2437] FIG. 2382 shows the amino acid sequence (SEQ ID NO:2382) derived from the coding sequence of SEQ ID NO:2381 shown in FIG. 2381.

[2438] FIG. 2383 shows a nucleotide sequence (SEQ ID NO:2383) of a native sequence PRO51331 cDNA, wherein SEQ ID NO:2383 is a clone designated herein as “DNA256287”.

[2439] FIG. 2384 shows the amino acid sequence (SEQ ID NO:2384) derived from the coding sequence of SEQ ID NO:2383 shown in FIG. 2383.

[2440] FIG. 2385 shows a nucleotide sequence (SEQ ID NO:2385) of a native sequence PRO50371 cDNA, wherein SEQ ID NO:2385 is a clone designated herein as “DNA255298”.

[2441] FIG. 2386 shows the amino acid sequence (SEQ ID NO:2386) derived from the coding sequence of SEQ ID NO:2385 shown in FIG. 2385.

[2442] FIG. 2387 shows a nucleotide sequence (SEQ ID NO:2387) of a native sequence PRO84170 cDNA, wherein SEQ ID NO:2387 is a clone designated herein as “DNA328299”.

[2443] FIG. 2388 shows the amino acid sequence (SEQ ID NO:2388) derived from the coding sequence of SEQ ID NO:2387 shown in FIG. 2387.

[2444] FIG. 2389 shows a nucleotide sequence (SEQ ID NO:2389) of a native sequence PRO84171 cDNA, wherein SEQ ID NO:2389 is a clone designated herein as “DNA328300”.

[2445] FIG. 2390 shows the amino acid sequence (SEQ ID NO:2390) derived from the coding sequence of SEQ ID NO:2389 shown in FIG. 2389.

[2446] FIG. 2391 shows a nucleotide sequence (SEQ ID NO:2391) of a native sequence PRO70371 cDNA, wherein SEQ ID NO:2391 is a clone designated herein as “DNA328301”.

[2447] FIG. 2392 shows the amino acid sequence (SEQ ID NO:2392) derived from the coding sequence of SEQ ID NO:2391 shown in FIG. 2391.

[2448] FIG. 2393 shows a nucleotide sequence (SEQ ID NO:2393) of a native sequence PRO58796 cDNA, wherein SEQ ID NO:2393 is a clone designated herein as “DNA270415”.

[2449] FIG. 2394 shows the amino acid sequence (SEQ ID NO:2394) derived from the coding sequence of SEQ ID NO:2393 shown in FIG. 2393.

[2450] FIG. 2395 shows a nucleotide sequence (SEQ ID NO:2395) of a native sequence PRO84172 cDNA, wherein SEQ ID NO:2395 is a clone designated herein as “DNA328302”.

[2451] FIG. 2396 shows the amino acid sequence (SEQ ID NO:2396) derived from the coding sequence of SEQ ID NO:2395 shown in FIG. 2395.

[2452] FIG. 2397 shows a nucleotide sequence (SEQ ID NO:2397) of a native sequence PRO69467 cDNA, wherein SEQ ID NO:2397 is a clone designated herein as “DNA287178”.

[2453] FIG. 2398 shows the amino acid sequence (SEQ ID NO:2398) derived from the coding sequence of SEQ ID NO:2397 shown in FIG. 2397.

[2454] FIG. 2399 shows a nucleotide sequence (SEQ ID NO:2399) of a native sequence PRO84173 cDNA, wherein SEQ ID NO:2399 is a clone designated herein as “DNA328303”.

[2455] FIG. 2400 shows the amino acid sequence (SEQ ID NO:2400) derived from the coding sequence of SEQ ID NO:2399 shown in FIG. 2399.

[2456] FIG. 2401 shows a nucleotide sequence (SEQ ID NO:2401) of a native sequence PRO81319 cDNA, wherein SEQ ID NO:2401 is a clone designated herein as “DNA324684”.

[2457] FIG. 2402 shows the amino acid sequence (SEQ ID NO:2402) derived from the coding sequence of SEQ ID NO:2401 shown in FIG. 2401.

[2458] FIG. 2403 shows a nucleotide sequence (SEQ ID NO:2403) of a native sequence PRO84174 cDNA, wherein SEQ ID NO:2403 is a clone designated herein as “DNA328304”.

[2459] FIG. 2404 shows the amino acid sequence (SEQ ID NO:2404) derived from the coding sequence of SEQ ID NO:2403 shown in FIG. 2403.

[2460] FIG. 2405A-B shows a nucleotide sequence (SEQ ID NO:2405) of a native sequence cDNA, wherein SEQ ID NO:2405 is a clone designated herein as “DNA256131”.

[2461] FIG. 2406 shows a nucleotide sequence (SEQ ID NO:2406) of a native sequence PRO90 cDNA, wherein SEQ ID NO:2406 is a clone designated herein as “DNA328305”.

[2462] FIG. 2407 shows the amino acid sequence (SEQ ID NO:2407) derived from the coding sequence of SEQ ID NO:2406 shown in FIG. 2406.

[2463] FIG. 2408 shows a nucleotide sequence (SEQ ID NO:2408) of a native sequence PRO84175 cDNA, wherein SEQ ID NO:2408 is a clone designated herein as “DNA328306”.

[2464] FIG. 2409 shows the amino acid sequence (SEQ ID NO:2409) derived from the coding sequence of SEQ ID NO:2408 shown in FIG. 2408.

[2465] FIG. 2410A-B shows a nucleotide sequence (SEQ ID NO:2410) of a native sequence cDNA, wherein SEQ ID NO:2410 is a clone designated herein as “DNA255654”.

[2466] FIG. 2411 shows a nucleotide sequence (SEQ ID NO:2411) of a native sequence PRO84176 cDNA, wherein SEQ ID NO:2411 is a clone designated herein as “DNA328307”.

[2467] FIG. 2412 shows the amino acid sequence (SEQ ID NO:2412) derived from the coding sequence of SEQ ID NO:2411 shown in FIG. 2411.

[2468] FIG. 2413 shows a nucleotide sequence (SEQ ID NO:2413) of a native sequence cDNA, wherein SEQ ID NO:2413 is a clone designated herein as “DNA254447”.

[2469] FIG. 2414 shows a nucleotide sequence (SEQ ID NO:2414) of a native sequence PRO84177 cDNA, wherein SEQ ID NO:2414 is a clone designated herein as “DNA328308”.

[2470] FIG. 2415 shows the amino acid sequence (SEQ ID NO:2415) derived from the coding sequence of SEQ ID NO:2415 shown in Figure.

[2471] FIG. 2416 shows a nucleotide sequence (SEQ ID NO:2416) of a native sequence cDNA, wherein SEQ ID NO:2416 is a clone designated herein as “DNA256422”.

[2472] FIG. 2417 shows a nucleotide sequence (SEQ ID NO:2417) of a native sequence cDNA, wherein SEQ ID NO:2417 is a clone designated herein as “DNA255754”.

[2473] FIG. 2418 shows a nucleotide sequence (SEQ ID NO:2418) of a native sequence PRO50081 cDNA, wherein SEQ ID NO:2418 is a clone designated herein as “DNA328309”.

[2474] FIG. 2419 shows the amino acid sequence (SEQ ID NO:2419) derived from the coding sequence of SEQ ID NO:2418 shown in FIG. 2418.

[2475] FIG. 2420 shows a nucleotide sequence (SEQ ID NO:2420) of a native sequence cDNA, wherein SEQ ID NO:2420 is a clone designated herein as “DNA254286”.

[2476] FIG. 2421 shows a nucleotide sequence (SEQ ID NO:2421) of a native sequence cDNA, wherein SEQ ID NO:2421 is a clone designated herein as “DNA3283 10”.

[2477] FIG. 2422 shows a nucleotide sequence (SEQ ID NO:2422) of a native sequence PRO84179 cDNA, wherein SEQ ID NO:2422 is a clone designated herein as “DNA328311”.

[2478] FIG. 2423 shows the amino acid sequence (SEQ ID NO:2423) derived from the coding sequence of SEQ ID NO:2422 shown in FIG. 2422.

[2479] FIG. 2424 shows a nucleotide sequence (SEQ ID NO:2424) of a native sequence PRO82369 cDNA, wherein SEQ ID NO:2424 is a clone designated herein as “DNA325915”.

[2480] FIG. 2425 shows the amino acid sequence (SEQ ID NO:2425) derived from the coding sequence of SEQ ID NO:2424 shown in FIG. 2424.

[2481] FIG. 2426A-B shows a nucleotide sequence (SEQ ID NO:2426) of a native sequence PRO58642 cDNA, wherein SEQ ID NO:2426 is a clone designated herein as “DNA270254”.

[2482] FIG. 2427 shows the amino acid sequence (SEQ ID NO:2427) derived from the coding sequence of SEQ ID NO:2426 shown in FIG. 2426A-B.

[2483] FIG. 2428 shows a nucleotide sequence (SEQ ID NO:2428) of a native sequence PRO63223 cDNA, wherein SEQ ID NO:2428 is a clone designated herein as “DNA275594”.

[2484] FIG. 2429 shows the amino acid sequence (SEQ ID NO:2429) derived from the coding sequence of SEQ ID NO:2428 shown in FIG. 2428.

[2485] FIG. 2430 shows a nucleotide sequence (SEQ ID NO:2430) of a native sequence PRO50363 cDNA, wherein SEQ ID NO:2430 is a clone designated herein as “DNA255289”.

[2486] FIG. 2431 shows the amino acid sequence (SEQ ID NO:2431) derived from the coding sequence of SEQ ID NO:2430 shown in FIG. 2430.

[2487] FIG. 2432A-B shows a nucleotide sequence (SEQ ID NO:2432) of a native sequence PRO84180 cDNA, wherein SEQ ID NO:2432 is a clone designated herein as “DNA328312”.

[2488] FIG. 2433 shows the amino acid sequence (SEQ ID NO:2433) derived from the coding sequence of SEQ ID NO:2432 shown in FIG. 2432.

[2489] FIG. 2434 shows a nucleotide sequence (SEQ ID NO:2434) of a native sequence PRO82174 cDNA, wherein SEQ ID NO:2434 is a clone designated herein as “DNA325685”.

[2490] FIG. 2435 shows the amino acid sequence (SEQ ID NO:2435) derived from the coding sequence of SEQ ID NO:2434 shown in FIG. 2434.

[2491] FIG. 2436 shows a nucleotide sequence (SEQ ID NO:2436) of a native sequence PRO50218 cDNA, wherein SEQ ID NO:2436 is a clone designated herein as “DNA255137”.

[2492] FIG. 2437 shows the amino acid sequence (SEQ ID NO:2437) derived from the coding sequence of SEQ ID NO:2436 shown in FIG. 2436.

[2493] FIG. 2438 shows a nucleotide sequence (SEQ ID NO:2438) of a native sequence PRO84181 cDNA, wherein SEQ ID NO:2438 is a clone designated herein as “DNA328313”.

[2494] FIG. 2439 shows the amino acid sequence (SEQ ID NO:2439) derived from the coding sequence of SEQ ID NO:2438 shown in FIG. 2438.

[2495] FIG. 2440 shows a nucleotide sequence (SEQ ID NO:2440) of a native sequence PRO84182 cDNA, wherein SEQ ID NO:2440 is a clone designated herein as “DNA328314”.

[2496] FIG. 2441 shows the amino acid sequence (SEQ ID NO:2441) derived from the coding sequence of SEQ ID NO:2440 shown in FIG. 2440.

[2497] FIG. 2442 shows a nucleotide sequence (SEQ ID NO:2442) of a native sequence PRO84183 cDNA, wherein SEQ ID NO:2442 is a clone designated herein as “DNA328315”.

[2498] FIG. 2443 shows the amino acid sequence (SEQ ID NO:2443) derived from the coding sequence of SEQ ID NO:2442 shown in FIG. 2442.

[2499] FIG. 2444 shows a nucleotide sequence (SEQ ID NO:2444) of a native sequence PRO50231 cDNA, wherein SEQ ID NO:2444 is a clone designated herein as “DNA255151”.

[2500] FIG. 2445 shows the amino acid sequence (SEQ ID NO:2445) derived from the coding sequence of SEQ ID NO:2444 shown in FIG. 2444.

[2501] FIG. 2446 shows a nucleotide sequence (SEQ ID NO:2446) of a native sequence cDNA, wherein SEQ ID NO:2446 is a clone designated herein as “DNA256055”.

[2502] FIG. 2447 shows a nucleotide sequence (SEQ ID NO:2447) of a native sequence PRO84184 cDNA, wherein SEQ ID NO:2447 is a clone designated herein as “DNA328316”.

[2503] FIG. 2448 shows the amino acid sequence (SEQ ID NO:2448) derived from the coding sequence of SEQ ID NO:2447 shown in FIG. 2447.

[2504] FIG. 2449 shows a nucleotide sequence (SEQ ID NO:2449) of a native sequence PRO69493 cDNA, wherein SEQ ID NO:2449 is a clone designated herein as “DNA328317”.

[2505] FIG. 2450 shows the amino acid sequence (SEQ ID NO:2450) derived from the coding sequence of SEQ ID NO:2449 shown in FIG. 2449.

[2506] FIG. 2451 shows a nucleotide sequence (SEQ ID NO:2451) of a native sequence PRO84185 cDNA, wherein SEQ ID NO:2451 is a clone designated herein as “DNA328318”.

[2507] FIG. 2452 shows the amino acid sequence (SEQ ID NO:2452) derived from the coding sequence of SEQ ID NO:2451 shown in FIG. 2451.

[2508] FIG. 2453 shows a nucleotide sequence (SEQ ID NO:2453) of a native sequence PRO38240 cDNA, wherein SEQ ID NO:2453 is a clone designated herein as “DNA227777”.

[2509] FIG. 2454 shows the amino acid sequence (SEQ ID NO:2454) derived from the coding sequence of SEQ ID NO:2453 shown in FIG. 2453.

[2510] FIG. 2455 shows a nucleotide sequence (SEQ ID NO:2455) of a native sequence cDNA, wherein SEQ ID NO:2455 is a clone designated herein as “DNA328319”.

[2511] FIG. 2456A-B shows a nucleotide sequence (SEQ ID NO:2456) of a native sequence PRO84187 cDNA, wherein SEQ ID NO:2456 is a clone designated herein as “DNA328320”.

[2512] FIG. 2457 shows the amino acid sequence (SEQ ID NO:2457) derived from the coding sequence of SEQ ID NO:2457 shown in Figure.

[2513] FIG. 2458 shows a nucleotide sequence (SEQ ID NO:2458) of a native sequence PRO84188 cDNA, wherein SEQ ID NO: 2458 is a clone designated herein as “DNA328321”.

[2514] FIG. 2459 shows the amino acid sequence (SEQ ID NO:2459) derived from the coding sequence of SEQ ID NO:2458 shown in FIG. 2458.

[2515] FIG. 2460 shows a nucleotide sequence (SEQ ID NO:2460) of a native sequence PRO54445 cDNA, wherein SEQ ID NO:2460 is a clone designated herein as “DNA260519”.

[2516] FIG. 2461 shows the amino acid sequence (SEQ ID NO:2461) derived from the coding sequence of SEQ ID NO:2460 shown in FIG. 2460.

[2517] FIG. 2462 shows a nucleotide sequence (SEQ ID NO:2462) of a native sequence cDNA, wherein SEQ ID NO:2462 is a clone designated herein as “DNA328322”.

[2518] FIG. 2463 shows a nucleotide sequence (SEQ ID NO:2463) of a native sequence cDNA, wherein SEQ ID NO:2463 is a clone designated herein as “DNA257960”.

[2519] FIG. 2464 shows a nucleotide sequence (SEQ ID NO:2464) of a native sequence PRO69531 cDNA, wherein SEQ ID NO:2464 is a clone designated herein as “DNA328323”.

[2520] FIG. 2465 shows the amino acid sequence (SEQ ID NO:2465) derived from the coding sequence of SEQ ID NO:2464 shown in FIG. 2464.

[2521] FIG. 2466 shows a nucleotide sequence (SEQ ID NO:2466) of a native sequence cDNA, wherein SEQ ID NO:2466 is a clone designated herein as “DNA262448”.

[2522] FIG. 2467 shows a nucleotide sequence (SEQ ID NO:2467) of a native sequence PRO84189 cDNA, wherein SEQ ID NO:2467 is a clone designated herein as “DNA328324”.

[2523] FIG. 2468 shows the amino acid sequence (SEQ ID NO:2468) derived from the coding sequence of SEQ ID NO:2467 shown in FIG. 2467.

[2524] FIG. 2469 shows a nucleotide sequence (SEQ ID NO:2469) of a native sequence cDNA, wherein SEQ ID NO:2469 is a clone designated herein as “DNA25923 1”.

[2525] FIG. 2470 shows a nucleotide sequence (SEQ ID NO:2470) of a native sequence cDNA, wherein SEQ ID NO:2470 is a clone designated herein as “DNA259493”.

[2526] FIG. 2471A-B shows a nucleotide sequence (SEQ ID NO:2471) of a native sequence PRO84190 cDNA, wherein SEQ ID NO:2471 is a clone designated herein as “DNA328325”.

[2527] FIG. 2472 shows the amino acid sequence (SEQ ID NO:2472) derived from the coding sequence of SEQ ID NO:2471 shown in FIG. 2471.

[2528] FIG. 2473 shows a nucleotide sequence (SEQ ID NO:2473) of a native sequence PRO84191 cDNA, wherein SEQ ID NO:2473 is a clone designated herein as “DNA328326”.

[2529] FIG. 2474 shows the amino acid sequence (SEQ ID NO:2474) derived from the coding sequence of SEQ ID NO:2473 shown in FIG. 2473.

[2530] FIG. 2475 shows a nucleotide sequence (SEQ ID NO:2475) of a native sequence cDNA, wherein SEQ ID NO:2475 is a clone designated herein as “DNA260507”.

[2531] FIG. 2476 shows a nucleotide sequence (SEQ ID NO:2476) of a native sequence cDNA, wherein SEQ ID NO:2476 is a clone designated herein as “DNA262598”.

[2532] FIG. 2477 shows a nucleotide sequence (SEQ ID NO:2477) of a native sequence cDNA, wherein SEQ ID NO:2477 is a clone designated herein as “DNA259663”.

[2533] FIG. 2478 shows a nucleotide sequence (SEQ ID NO:2478) of a native sequence cDNA, wherein SEQ ID NO:2478 is a clone designated herein as “DNA260543”.

[2534] FIG. 2479 shows a nucleotide sequence (SEQ ID NO:2479) of a native sequence cDNA, wherein SEQ ID NO:2479 is a clone designated herein as “DNA262755”.

[2535] FIG. 2480 shows a nucleotide sequence (SEQ ID NO:2480) of a native sequence cDNA, wherein SEQ ID NO:2480 is a clone designated herein as “DNA262761”.

[2536] FIG. 2481 shows a nucleotide sequence (SEQ ID NO:2481) of a native sequence PRO84192 cDNA, wherein SEQ ID NO:2481 is a clone designated herein as “DNA328327”.

[2537] FIG. 2482 shows the amino acid sequence (SEQ ID NO:2482) derived from the coding sequence of SEQ ID NO:2481 shown in FIG. 2481.

[2538] FIG. 2483 shows a nucleotide sequence (SEQ ID NO:2483) of a native sequence PRO84193 cDNA, wherein SEQ ID NO:2483 is a clone designated herein as “DNA328328”.

[2539] FIG. 2484 shows the amino acid sequence (SEQ ID NO:2484) derived from the coding sequence of SEQ ID NO:2483 shown in FIG. 2483.

### DETAILED DESCRIPTION OF THE PREFERRED EMBODIMENTS

I. Definitions

[2540] The terms “PRO polypeptide” and “PRO” as used herein and when immediately followed by a numerical designation refer to various polypeptides, wherein the complete designation (i.e., PRO/number) refers to specific polypeptide sequences as described herein. The terms “PRO/number polypeptide” and “PRO/number” wherein the term “number” is provided as an actual numerical designation as used herein encompass native sequence polypeptides and polypeptide variants (which are further defined herein). The PRO polypeptides described herein may be isolated from a variety of sources, such as from human tissue types or from another source, or prepared by recombinant or synthetic methods. The term “PRO polypeptide” refers to each individual PRO/number polypeptide disclosed herein. All disclosures in this specification which refer to the “PRO polypeptide” refer to each of the polypeptides individually as well as jointly. For example, descriptions of the preparation of, purification of, derivation of, formation of antibodies to or against, administration of, compositions containing, treatment of a disease with, etc., pertain to each polypeptide of the invention individually. The term “PRO polypeptide” also includes variants of the PRO/number polypeptides disclosed herein.

[2541] A “native sequence PRO polypeptide” comprises a polypeptide having the same amino acid sequence as the corresponding PRO polypeptide derived from nature. Such native sequence PRO polypeptides can be isolated from nature or can be produced by recombinant or synthetic means. The term “native sequence PRO polypeptide” specifically encompasses naturally-occurring truncated or secreted forms of the specific PRO polypeptide (e.g., an extracellular domain sequence), naturally-occurring variant forms (e.g., alternatively spliced forms) and naturally-occurring allelic variants of the polypeptide. In various embodiments of the invention, the native sequence PRO polypeptides disclosed herein are mature or full-length native sequence polypeptides comprising the full-length amino acids sequences shown in the accompanying figures. Start and stop codons are shown in bold font and underlined in the figures. However, while the PRO polypeptide disclosed in the accompanying figures are shown to begin with methionine residues designated herein as amino acid position 1 in the figures, it is conceivable and possible that other methionine residues located either upstream or downstream from the amino acid position 1 in the figures may be employed as the starting amino acid residue for the PRO polypeptides.

[2542] The PRO polypeptide “extracellular domain” or “ECD” refers to a form of the PRO polypeptide which is essentially free of the transmembrane and cytoplasmic domains. Ordinarily, a PRO polypeptide ECD will have less than 1% of such transmembrane and/or cytoplasmic domains and preferably, will have less than 0.5% of such domains. It will be understood that any transmembrane domains identified for the PRO polypeptides of the present invention are identified pursuant to criteria routinely employed in the art for identifying that type of hydrophobic domain. The exact boundaries of a transmembrane domain may vary but most likely by no more than about 5 amino acids at either end of the domain as initially identified herein. Optionally, therefore, an extracellular domain of a PRO polypeptide may contain from about 5 or fewer amino acids on either side of the transmembrane domain/extracellular domain boundary as identified in the Examples or specification and such polypeptides, with or without the associated signal peptide, and nucleic acid encoding them, are contemplated by the present invention.

[2543] The approximate location of the “signal peptides” of the various PRO polypeptides disclosed herein are shown in the present specification and/or the accompanying figures. It is noted, however, that the C-terminal boundary of a signal peptide may vary, but most likely by no more than about 5 amino acids on either side of the signal peptide C-terminal boundary as initially identified herein, wherein the C-terminal boundary of the signal peptide may be identified pursuant to criteria routinely employed in the art for identifying that type of amino acid sequence element (e.g., Nielsen et al., Prot. Eng. 10:1-6 (1997) and von Heinje et al., Nucl. Acids. Res. 14:4683-4690 (1986)). Moreover, it is also recognized that, in some cases, cleavage of a signal sequence from a secreted polypeptide is not entirely uniform, resulting in more than one secreted species. These mature polypeptides, where the signal peptide is cleaved within no more than about 5 amino acids on either side of the C-terminal boundary of the signal peptide as identified herein, and the polynucleotides encoding them, are contemplated by the present invention.

[2544] “PRO polypeptide variant” means an active PRO polypeptide as defined above or below having at least about 80% amino acid sequence identity with a full-length native sequence PRO polypeptide sequence as disclosed herein, a PRO polypeptide sequence lacking the signal peptide as disclosed herein, an extracellular domain of a PRO polypeptide, with or without the signal peptide, as disclosed herein or any other fragment of a full-length PRO polypeptide sequence as disclosed herein. Such PRO polypeptide variants include, for instance, PRO polypeptides wherein one or more amino acid residues are added, or deleted, at the N- or C-terminus of the full-length native amino acid sequence. Ordinarily, a PRO polypeptide variant will have at least about 80% amino acid sequence identity, alternatively at least about 81% amino acid sequence identity, alternatively at least about 82% amino acid sequence identity, alternatively at least about 83% amino acid sequence identity, alternatively at least about 84% amino acid sequence identity, alternatively at least about 85% amino acid sequence identity, alternatively at least about 86% amino acid sequence identity, alternatively at least about 87% amino acid sequence identity, alternatively at least about 88% amino acid sequence identity, alternatively at least about 89% amino acid sequence identity, alternatively at least about 90% amino acid sequence identity, alternatively at least about 91% amino acid sequence identity, alternatively at least about 92% amino acid sequence identity, alternatively at least about 93% amino acid sequence identity, alternatively at least about 94% amino acid sequence identity, alternatively at least about 95% amino acid sequence identity, alternatively at least about 96% amino acid sequence identity, alternatively at least about 97% amino acid sequence identity, alternatively at least about 98% amino acid sequence identity and alternatively at least about 99% amino acid sequence identity to a full-length native sequence PRO polypeptide sequence as disclosed herein, a PRO polypeptide sequence lacking the signal peptide as disclosed herein, an extracellular domain of a PRO polypeptide, with or without the signal peptide, as disclosed herein or any other specifically defined fragment of a full-length PRO polypeptide sequence as disclosed herein. Ordinarily, PRO variant polypeptides are at least about 10 amino acids in length, alternatively at least about 20 amino acids in length, alternatively at least about 30 amino acids in length, alternatively at least about 40 amino acids in length, alternatively at least about 50 amino acids in length, alternatively at least about 60 amino acids in length, alternatively at least about 70 amino acids in length, alternatively at least about 80 amino acids in length, alternatively at least about 90 amino acids in length, alternatively at least about 100 amino acids in length, alternatively at least about 150 amino acids in length, alternatively at least about 200 amino acids in length, alternatively at least about 300 amino acids in length, or more.

[2545] “Percent (%) amino acid sequence identity” with respect to the PRO polypeptide sequences identified herein is defined as the percentage of amino acid residues in a candidate sequence that are identical with the amino acid residues in the specific PRO polypeptide sequence, after aligning the sequences and introducing gaps, if necessary, to achieve the maximum percent sequence identity, and not considering any conservative substitutions as part of the sequence identity. Alignment for purposes of determining percent amino acid sequence identity can be achieved in various ways that are within the skill in the art, for instance, using publicly available computer software such as BLAST, BLAST-2, ALIGN or Megalign (DNASTAR) software. Those skilled in the art can determine appropriate parameters for measuring alignment, including any algorithms needed to achieve maximal alignment over the full length of the sequences being compared. For purposes herein, however, % amino acid sequence identity values are generated using the sequence comparison computer program ALIGN-2, wherein the complete source code for the ALIGN-2 program is provided in Table 1 below. The ALIGN-2 sequence comparison computer program was authored by Genentech, Inc. and the source code shown in Table 1 below has been filed with user documentation in the U.S. Copyright Office, Washington D.C., 20559, where it is registered under U.S. Copyright Registration No. TXU510087. The ALIGN-2 program is publicly available through Genentech, Inc., South San Francisco, Calif. or may be compiled from the source code provided in Table 1 below. The ALIGN-2 program should be compiled for use on a UNIX operating system, preferably digital UNIX V4.0D. All sequence comparison parameters are set by the ALIGN-2 program and do not vary.

[2546] In situations where ALIGN-2 is employed for amino acid sequence comparisons, the % amino acid sequence identity of a given amino acid sequence A to, with, or against a given amino acid sequence B (which can alternatively be phrased as a given amino acid sequence A that has or comprises a certain % amino acid sequence identity to, with, or against a given amino acid sequence B) is calculated as follows:
100 times the fraction X/Y
where X is the number of amino acid residues scored as identical matches by the sequence alignment program ALIGN-2 in that program's alignment of A and B, and where Y is the total number of amino acid residues in B. It will be appreciated that where the length of amino acid sequence A is not equal to the length of amino acid sequence B, the % amino acid sequence identity of A to B will not equal the % amino acid sequence identity of B to A. As examples of % amino acid sequence identity calculations using this method, Tables 2 and 3 demonstrate how to calculate the % amino acid sequence identity of the amino acid sequence designated “Comparison Protein” to the amino acid sequence designated “PRO”, wherein “PRO” represents the amino acid sequence of a hypothetical PRO polypeptide of interest, “Comparison Protein” represents the amino acid sequence of a polypeptide against which the “PRO” polypeptide of interest is being compared, and “X, “Y” and “Z” each represent different hypothetical amino acid residues.

[2547] Unless specifically stated otherwise, all % amino acid sequence identity values used herein are obtained as described in the immediately preceding paragraph using the ALIGN-2 computer program. However, % amino acid sequence identity values may also be obtained as described below by using the WU-BLAST-2 computer program (Altschul et al., Methods in Enzymology 266:460-480 (1996)). Most of the WU-BLAST-2 search parameters are set to the default values. Those not set to default values, i.e., the adjustable parameters, are set with the following values: overlap span=1, overlap fraction=0.125, word threshold (T)=11, and scoring matrix=BLOSUM62. When WU-BLAST-2 is employed, a % amino acid sequence identity value is determined by dividing (a) the number of matching identical amino acid residues between the amino acid sequence of the PRO polypeptide of interest having a sequence derived from the native PRO polypeptide and the comparison amino acid sequence of interest (i.e., the sequence against which the PRO polypeptide of interest is being compared which may be a PRO variant polypeptide) as determined by WU-BLAST-2 by (b) the total number of amino acid residues of the PRO polypeptide of interest. For example, in the statement “a polypeptide comprising an the amino acid sequence A which has or having at least 80% amino acid sequence identity to the amino acid sequence B”, the amino acid sequence A is the comparison amino acid sequence of interest and the amino acid sequence B is the amino acid sequence of the PRO polypeptide of interest.

[2548] Percent amino acid sequence identity may also be determined using the sequence comparison program NCBI-BLAST2 (Altschul et al., Nucleic Acids Res. 25:3389-3402 (1997)). The NCBI-BLAST2 sequence comparison program may be downloaded from http://www.ncbi.nlm.nih.gov or otherwise obtained from the National Institute of Health, Bethesda, Md. NCBI-BLAST2 uses several search parameters, wherein all of those search parameters are set to default values including, for example, unmask=yes, strand=all, expected occurrences=10, minimum low complexity length=15/5, multi-pass e-value=0.01, constant for multi-pass=25, dropoff for final gapped alignment=25 and scoring matrix=BLOSUM62.

[2549] In situations where NCBI-BLAST2 is employed for amino acid sequence comparisons, the % amino acid sequence identity of a given amino acid sequence A to, with, or against a given amino acid sequence B (which can alternatively be phrased as a given amino acid sequence A that has or comprises a certain % amino acid sequence identity to, with, or against a given amino acid sequence B) is calculated as follows:
100 times the fraction X/Y
where X is the number of amino acid residues scored as identical matches by the sequence alignment program NCBI-BLAST2 in that program's alignment of A and B, and where Y is the total number of amino acid residues in B. It will be appreciated that where the length of amino acid sequence A is not equal to the length of amino acid sequence B, the % amino acid sequence identity of A to B will not equal the % amino acid sequence identity of B to A.

[2550] “PRO variant polynucleotide” or “PRO variant nucleic acid sequence” means a nucleic acid molecule which encodes an active PRO polypeptide as defined below and which has at least about 80% nucleic acid sequence identity with a nucleotide acid sequence encoding a full-length native sequence PRO polypeptide sequence as disclosed herein, a full-length native sequence PRO polypeptide sequence lacking the signal peptide as disclosed herein, an extracellular domain of a PRO polypeptide, with or without the signal peptide, as disclosed herein or any other fragment of a full-length PRO polypeptide sequence as disclosed herein. Ordinarily, a PRO variant polynucleotide will have at least about 80% nucleic acid sequence identity, alternatively at least about 81% nucleic acid sequence identity, alternatively at least about 82% nucleic acid sequence identity, alternatively at least about 83% nucleic acid sequence identity, alternatively at least about 84% nucleic acid sequence identity, alternatively at least about 85% nucleic acid sequence identity, alternatively at least about 86% nucleic acid sequence identity, alternatively at least about 87% nucleic acid sequence identity, alternatively at least about 88% nucleic acid sequence identity, alternatively at least about 89% nucleic acid sequence identity, alternatively at least about 90% nucleic acid sequence identity, alternatively at least about 91% nucleic acid sequence identity, alternatively at least about 92% nucleic acid sequence identity, alternatively at least about 93% nucleic acid sequence identity, alternatively at least about 94% nucleic acid sequence identity, alternatively at least about 95% nucleic acid sequence identity, alternatively at least about 96% nucleic acid sequence identity, alternatively at least about 97% nucleic acid sequence identity, alternatively at least about 98% nucleic acid sequence identity and alternatively at least about 99% nucleic acid sequence identity with a nucleic acid sequence encoding a full-length native sequence PRO polypeptide sequence as disclosed herein, a full-length native sequence PRO polypeptide sequence lacking the signal peptide as disclosed herein, an extracellular domain of a PRO polypeptide, with or without the signal sequence, as disclosed herein or any other fragment of a full-length PRO polypeptide sequence as disclosed herein. Variants do not encompass the native nucleotide sequence.

[2551] Ordinarily, PRO variant polynucleotides are at least about 30 nucleotides in length, alternatively at least about 60 nucleotides in length, alternatively at least about 90 nucleotides in length, alternatively at least about 120 nucleotides in length, alternatively at least about 150 nucleotides in length, alternatively at least about 180 nucleotides in length, alternatively at least about 210 nucleotides in length, alternatively at least about 240 nucleotides in length, alternatively at least about 270 nucleotides in length, alternatively at least about 300 nucleotides in length, alternatively at least about 450 nucleotides in length, alternatively at least about 600 nucleotides in length, alternatively at least about 900 nucleotides in length, or more.

[2552] “Percent (%) nucleic acid sequence identity” with respect to PRO-encoding nucleic acid sequences identified herein is defined as the percentage of nucleotides in a candidate sequence that are identical with the nucleotides in the PRO nucleic acid sequence of interest, after aligning the sequences and introducing gaps, if necessary, to achieve the maximum percent sequence identity. Alignment for purposes of determining percent nucleic acid sequence identity can be achieved in various ways that are within the skill in the art, for instance, using publicly available computer software such as BLAST, BLAST-2, ALIGN or Megalign (DNASTAR) software. For purposes herein, however, % nucleic acid sequence identity values are generated using the sequence comparison computer program ALIGN-2, wherein the complete source code for the ALIGN-2 program is provided in Table 1 below. The ALIGN-2 sequence comparison computer program was authored by Genentech, Inc. and the source code shown in Table 1 below has been filed with user documentation in the U.S. Copyright Office, Washington D.C., 20559, where it is registered under U.S. Copyright Registration No. TXU510087. The ALIGN-2 program is publicly available through Genentech, Inc., South San Francisco, Calif. or may be compiled from the source code provided in Table 1 below. The ALIGN-2 program should be compiled for use on a UNIX operating system, preferably digital UNIX V4.0D. All sequence comparison parameters are set by the ALIGN-2 program and do not vary.

[2553] In situations where ALIGN-2 is employed for nucleic acid sequence comparisons, the % nucleic acid sequence identity of a given nucleic acid sequence C to, with, or against a given nucleic acid sequence D (which can alternatively be phrased as a given nucleic acid sequence C that has or comprises a certain % nucleic acid sequence identity to, with, or against a given nucleic acid sequence D) is calculated as follows:
100 times the fraction W/Z
where W is the number of nucleotides scored as identical matches by the sequence alignment program ALIGN-2 in that program's alignment of C and D, and where Z is the total number of nucleotides in D. It will be appreciated that where the length of nucleic acid sequence C is not equal to the length of nucleic acid sequence D, the % nucleic acid sequence identity of C to D will not equal the % nucleic acid sequence identity of D to C. As examples of % nucleic acid sequence identity calculations, Tables 4 and 5, demonstrate how to calculate the % nucleic acid sequence identity of the nucleic acid sequence designated “Comparison DNA” to the nucleic acid sequence designated “PRO-DNA”, wherein “PRO-DNA” represents a hypothetical PRO-encoding nucleic acid sequence of interest, “Comparison DNA” represents the nucleotide sequence of a nucleic acid molecule against which the “PRO-DNA” nucleic acid molecule of interest is being compared, and “N”, “L” and “V” each represent different hypothetical nucleotides.

[2554] Unless specifically stated otherwise, all % nucleic acid sequence identity values used herein are obtained as described in the immediately preceding paragraph using the ALIGN-2 computer program. However, % nucleic acid sequence identity values may also be obtained as described below by using the WU-BLAST-2 computer program (Altschul et al., Methods in Enzymology 266:460-480 (1996)). Most of the WU-BLAST-2 search parameters are set to the default values. Those not set to default values, i.e., the adjustable parameters, are set with the following values: overlap span=1, overlap fraction=0.125, word threshold (T)=11, and scoring matrix=BLOSUM62. When WU-BLAST-2 is employed, a % nucleic acid sequence identity value is determined by dividing (a) the number of matching identical nucleotides between the nucleic acid sequence of the PRO polypeptide-encoding nucleic acid molecule of interest having a sequence derived from the native sequence PRO polypeptide-encoding nucleic acid and the comparison nucleic acid molecule of interest (i.e., the sequence against which the PRO polypeptide-encoding nucleic acid molecule of interest is being compared which may be a variant PRO polynucleotide) as determined by WU-BLAST-2 by (b) the total number of nucleotides of the PRO polypeptide-encoding nucleic acid molecule of interest. For example, in the statement “an isolated nucleic acid molecule comprising a nucleic acid sequence A which has or having at least 80% nucleic acid sequence identity to the nucleic acid sequence B”, the nucleic acid sequence A is the comparison nucleic acid molecule of interest and the nucleic acid sequence B is the nucleic acid sequence of the PRO polypeptide-encoding nucleic acid molecule of interest.

[2555] Percent nucleic acid sequence identity may also be determined using the sequence comparison program NCBI-BLAST2 (Altschul et al., Nucleic Acids Res. 25:3389-3402 (1997)). The NCBI-BLAST2 sequence comparison program may be downloaded from http://www.ncbi.nlm.nih.gov or otherwise obtained from the National Institute of Health, Bethesda, Md. NCBI-BLAST2 uses several search parameters, wherein all of those search parameters are set to default values including, for example, unmask=yes, strand=all, expected occurrences=10, minimum low complexity length=15/5, multi-pass e-value=0.01, constant for multi-pass=25, dropoff for final gapped alignment=25 and scoring matrix=BLOSUM62.

[2556] In situations where NCBI-BLAST2 is employed for sequence comparisons, the % nucleic acid sequence identity of a given nucleic acid sequence C to, with, or against a given nucleic acid sequence D (which can alternatively be phrased as a given nucleic acid sequence C that has or comprises a certain % nucleic acid sequence identity to, with, or against a given nucleic acid sequence D) is calculated as follows:
100 times the fraction W/Z
where W is the number of nucleotides scored as identical matches by the sequence alignment program NCBI-BLAST2 in that program's alignment of C and D, and where Z is the total number of nucleotides in D. It will be appreciated that where the length of nucleic acid sequence C is not equal to the length of nucleic acid sequence D, the % nucleic acid sequence identity of C to D will not equal the % nucleic acid sequence identity of D to C.

[2557] In other embodiments, PRO variant polynucleotides are nucleic acid molecules that encode an active PRO polypeptide and which are capable of hybridizing, preferably under stringent hybridization and wash conditions, to nucleotide sequences encoding a full-length PRO polypeptide as disclosed herein. PRO variant polypeptides may be those that are encoded by a PRO variant polynucleotide.

[2558] “Isolated,” when used to describe the various polypeptides disclosed herein, means polypeptide that has been identified and separated and/or recovered from a component of its natural environment. Contaminant components of its natural environment are materials that would typically interfere with diagnostic or therapeutic uses for the polypeptide, and may include enzymes, hormones, and other proteinaceous or non-proteinaceous solutes. In preferred embodiments, the polypeptide will be purified (1) to a degree sufficient to obtain at least 15 residues of N-terminal or internal amino acid sequence by use of a spinning cup sequenator, or (2) to homogeneity by SDS-PAGE under non-reducing or reducing conditions using Coomassie blue or, preferably, silver stain. Isolated polypeptide includes polypeptide in situ within recombinant cells, since at least one component of the PRO polypeptide natural environment will not be present. Ordinarily, however, isolated polypeptide will be prepared by at least one purification step.

[2559] An “isolated” PRO polypeptide-encoding nucleic acid or other polypeptide-encoding nucleic acid is a nucleic acid molecule that is identified and separated from at least one contaminant nucleic acid molecule with which it is ordinarily associated in the natural source of the polypeptide-encoding nucleic acid. An isolated polypeptide-encoding nucleic acid molecule is other than in the form or setting in which it is found in nature. Isolated polypeptide-encoding nucleic acid molecules therefore are distinguished from the specific polypeptide-encoding nucleic acid molecule as it exists in natural cells. However, an isolated polypeptide-encoding nucleic acid molecule includes polypeptide-encoding nucleic acid molecules contained in cells that ordinarily express the polypeptide where, for example, the nucleic acid molecule is in a chromosomal location different from that of natural cells.

[2560] The term “control sequences” refers to DNA sequences necessary for the expression of an operably linked coding sequence in a particular host organism. The control sequences that are suitable for prokaryotes, for example, include a promoter, optionally an operator sequence, and a ribosome binding site. Eukaryotic cells are known to utilize promoters, polyadenylation signals, and enhancers.

[2561] Nucleic acid is “operably linked” when it is placed into a functional relationship with another nucleic acid sequence. For example, DNA for a presequence or secretory leader is operably linked to DNA for a polypeptide if it is expressed as a preprotein that participates in the secretion of the polypeptide; a promoter or enhancer is operably linked to a coding sequence if it affects the transcription of the sequence; or a ribosome binding site is operably linked to a coding sequence if it is positioned so as to facilitate translation. Generally, “operably linked” means that the DNA sequences being linked are contiguous, and, in the case of a secretory leader, contiguous and in reading phase. However, enhancers do not have to be contiguous. Linking is accomplished by ligation at convenient restriction sites. If such sites do not exist, the synthetic oligonucleotide adaptors or linkers are used in accordance with conventional practice.

[2562] The term “antibody” is used in the broadest sense and specifically covers, for example, single anti-PRO monoclonal antibodies (including agonist, antagonist, and neutralizing antibodies), anti-PRO antibody compositions with polyepitopic specificity, single chain anti-PRO antibodies, and fragments of anti-PRO antibodies (see below). The term “monoclonal antibody” as used herein refers to an antibody obtained from a population of substantially homogeneous antibodies, i.e., the individual antibodies comprising the population are identical except for possible naturally-occurring mutations that may be present in minor amounts.

[2563] “Stringency” of hybridization reactions is readily determinable by one of ordinary skill in the art, and generally is an empirical calculation dependent upon probe length, washing temperature, and salt concentration. In general, longer probes require higher temperatures for proper annealing, while shorter probes need lower temperatures. Hybridization generally depends on the ability of denatured DNA to reanneal when complementary strands are present in an environment below their melting temperature. The higher the degree of desired homology between the probe and hybridizable sequence, the higher the relative temperature which can be used. As a result, it follows that higher relative temperatures would tend to make the reaction conditions more stringent, while lower temperatures less so. For additional details and explanation of stringency of hybridization reactions, see Ausubel et al., Current Protocols in Molecular Biology, Wiley Interscience Publishers, (1995).

[2564] “Stringent conditions” or “high stringency conditions”, as defined herein, may be identified by those that: (1) employ low ionic strength and high temperature for washing, for example 0.015 M sodium chloride/0.0015 M sodium citrate/0.1% sodium dodecyl sulfate at 50° C.; (2) employ during hybridization a denaturing agent, such as formamide, for example, 50% (v/v) formamide with 0.1% bovine serum albumin/0.1% Ficoll/0.1% polyvinylpyrrolidone/50 mM sodium phosphate buffer at pH 6.5 with 750 mM sodium chloride, 75 mM sodium citrate at 42° C.; or (3) employ 50% formamide, 5×SSC (0.75 M NaCl, 0.075 M sodium citrate), 50 mM sodium phosphate (pH 6.8), 0.1% sodium pyrophosphate, 5× Denhardt's solution, sonicated salmon sperm DNA (50 μg/ml), 0.1% SDS, and 10% dextran sulfate at 42° C., with washes at 42° C. in 0.2×SSC (sodium chloride/sodium citrate) and 50% formamide at 55° C., followed by a high-stringency wash consisting of 0.1×SSC containing EDTA at 55° C.

[2565] “Moderately stringent conditions” may be identified as described by Sambrook et al., Molecular Cloning: A Laboratory Manual, New York: Cold Spring Harbor Press, 1989, and include the use of washing solution and hybridization conditions (e.g., temperature, ionic strength and % SDS) less stringent that those described above. An example of moderately stringent conditions is overnight incubation at 37° C. in a solution comprising: 20% formamide, 5×SSC (150 mM NaCl, 15 mM trisodium citrate), 50 mM sodium phosphate (pH 7.6), 5× Denhardt's solution, 10% dextran sulfate, and 20 mg/ml denatured sheared salmon sperm DNA, followed by washing the filters in 1×SSC at about 37-50° C. The skilled artisan will recognize how to adjust the temperature, ionic strength, etc. as necessary to accommodate factors such as probe length and the like.

[2566] The term “epitope tagged” when used herein refers to a chimeric polypeptide comprising a PRO polypeptide fused to a “tag polypeptide”. The tag polypeptide has enough residues to provide an epitope against which an antibody can be made, yet is short enough such that it does not interfere with activity of the polypeptide to which it is fused. The tag polypeptide preferably also is fairly unique so that the antibody does not substantially cross-react with other epitopes. Suitable tag polypeptides generally have at least six amino acid residues and usually between about 8 and 50 amino acid residues (preferably, between about 10 and 20 amino acid residues).

[2567] As used herein, the term “immunoadhesin” designates antibody-like molecules which combine the binding specificity of a heterologous protein (an “adhesin”) with the effector functions of immunoglobulin constant domains. Structurally, the immunoadhesins comprise a fusion of an amino acid sequence with the desired binding specificity which is other than the antigen recognition and binding site of an antibody (i.e., is “heterologous”), and an immunoglobulin constant domain sequence. The adhesin part of an immunoadhesin molecule typically is a contiguous amino acid sequence comprising at least the binding site of a receptor or a ligand. The immunoglobulin constant domain sequence in the immunoadhesin may be obtained from any immunoglobulin, such as IgG-1, IgG-2, IgG-3, or IgG-4 subtypes, IgA (including IgA-1 and IgA-2), IgE, IgD or IgM.

[2568] “Active” or “activity” for the purposes herein refers to form(s) of a PRO polypeptide which retain a biological and/or an immunological activity of native or naturally-occurring PRO, wherein “biological” activity refers to a biological function (either inhibitory or stimulatory) caused by a native or naturally-occurring PRO other than the ability to induce the production of an antibody against an antigenic epitope possessed by a native or naturally-occurring PRO and an “immunological” activity refers to the ability to induce the production of an antibody against an antigenic epitope possessed by a native or naturally-occurring PRO.

[2569] The term “antagonist” is used in the broadest sense, and includes any molecule that partially or fully blocks, inhibits, or neutralizes a biological activity of a native PRO polypeptide disclosed herein. In a similar manner, the term “agonist” is used in the broadest sense and includes any molecule that mimics a biological activity of a native PRO polypeptide disclosed herein. Suitable agonist or antagonist molecules specifically include agonist or antagonist antibodies or antibody fragments, fragments or amino acid sequence variants of native PRO polypeptides, peptides, antisense oligonucleotides, small organic molecules, etc. Methods for identifying agonists or antagonists of a PRO polypeptide may comprise contacting a PRO polypeptide with a candidate agonist or antagonist molecule and measuring a detectable change in one or more biological activities normally associated with the PRO polypeptide.

[2570] “Treatment” refers to both therapeutic treatment and prophylactic or preventative measures, wherein the object is to prevent or slow down (lessen) the targeted pathologic condition or disorder. Those in need of treatment include those already with the disorder as well as those prone to have the disorder or those in whom the disorder is to be prevented.

[2571] “Chronic” administration refers to administration of the agent(s) in a continuous mode as opposed to an acute mode, so as to maintain the initial therapeutic effect (activity) for an extended period of time. “Intermittent” administration is treatment that is not consecutively done without interruption, but rather is cyclic in nature.

[2572] “Mammal” for purposes of treatment refers to any animal classified as a mammal, including humans, domestic and farm animals, and zoo, sports, or pet animals, such as dogs, cats, cattle, horses, sheep, pigs, goats, rabbits, etc. Preferably, the mammal is human.

[2573] Administration “in combination with” one or more further therapeutic agents includes simultaneous (concurrent) and consecutive administration in any order.

[2574] “Carriers” as used herein include pharmaceutically acceptable carriers, excipients, or stabilizers which are nontoxic to the cell or mammal being exposed thereto at the dosages and concentrations employed. Often the physiologically acceptable carrier is an aqueous pH buffered solution. Examples of physiologically acceptable carriers include buffers such as phosphate, citrate, and other organic acids; antioxidants including ascorbic acid; low molecular weight (less than about 10 residues) polypeptide; proteins, such as serum albumin, gelatin, or immunoglobulins; hydrophilic polymers such as polyvinylpyrrolidone; amino acids such as glycine, glutamine, asparagine, arginine or lysine; monosaccharides, disaccharides, and other carbohydrates including glucose, mannose, or dextrins; chelating agents such as EDTA; sugar alcohols such as mannitol or sorbitol; salt-forming counterions such as sodium; and/or nonionic surfactants such as TWEEN™, polyethylene glycol (PEG), and PLURONICS™.

[2575] “Antibody fragments” comprise a portion of an intact antibody, preferably the antigen binding or variable region of the intact antibody. Examples of antibody fragments include Fab, Fab′, F(ab′)₂, and Fv fragments; diabodies; linear antibodies (Zapata et al., Protein Eng. 8(10): 1057-1062 [1995]); single-chain antibody molecules; and multispecific antibodies formed from antibody fragments.

[2576] Papain digestion of antibodies produces two identical antigen-binding fragments, called “Fab” fragments, each with a single antigen-binding site, and a residual “Fc” fragment, a designation reflecting the ability to crystallize readily. Pepsin treatment yields an F(ab′)₂ fragment that has two antigen-combining sites and is still capable of cross-linking antigen.

[2577] “Fv” is the minimum antibody fragment which contains a complete antigen-recognition and -binding site. This region consists of a dimer of one heavy- and one light-chain variable domain in tight, non-covalent association. It is in this configuration that the three CDRs of each variable domain interact to define an antigen-binding site on the surface of the V_{H}-V_{L} dimer. Collectively, the six CDRs confer antigen-binding specificity to the antibody. However, even a single variable domain (or half of an Fv comprising only three CDRs specific for an antigen) has the ability to recognize and bind antigen, although at a lower affinity than the entire binding site.

[2578] The Fab fragment also contains the constant domain of the light chain and the first constant domain (CH1) of the heavy chain. Fab fragments differ from Fab′ fragments by the addition of a few residues at the carboxy terminus of the heavy chain CH1 domain including one or more cysteines from the antibody hinge region. Fab′-SH is the designation herein for Fab′ in which the cysteine residue(s) of the constant domains bear a free thiol group. F(ab)₂ antibody fragments originally were produced as pairs of Fab′ fragments which have hinge cysteines between them. Other chemical couplings of antibody fragments are also known.

[2579] The “light chains” of antibodies (immunoglobulins) from any vertebrate species can be assigned to one of two clearly distinct types, called kappa and lambda, based on the amino acid sequences of their constant domains.

[2580] Depending on the amino acid sequence of the constant domain of their heavy chains, immunoglobulins can be assigned to different classes. There are five major classes of immunoglobulins: IgA, IgD, IgE, IgG, and IgM, and several of these may be further divided into subclasses (isotypes), e.g., IgG1, IgG2, IgG3, IgG4, IgA, and IgA2.

[2581] “Single-chain Fv” or “sFv” antibody fragments comprise the V_{H} and V_{L} domains of antibody, wherein these domains are present in a single polypeptide chain. Preferably, the Fv polypeptide further comprises a polypeptide linker between the V_{H} and V_{L} domains which enables the sFv to form the desired structure for antigen binding. For a review of sFv, see Pluckthun in The Pharmacology of Monoclonal Antibodies, vol. 113, Rosenburg and Moore eds., Springer-Verlag, New York, pp. 269-315 (1994).

[2582] The term “diabodies” refers to small antibody fragments with two antigen-binding sites, which fragments comprise a heavy-chain variable domain (V_{H}) connected to a light-chain variable domain (V_{L}) in the same polypeptide chain (V_{H}-V_{L}). By using a linker that is too short to allow pairing between the two domains on the same chain, the domains are forced to pair with the complementary domains of another chain and create two antigen-binding sites. Diabodies are described more fully in, for example, EP 404,097; WO 93/11161; and Hollinger et al., Proc. Natl. Acad. Sci. USA, 90:6444-6448 (1993).

[2583] An “isolated” antibody is one which has been identified and separated and/or recovered from a component of its natural environment. Contaminant components of its natural environment are materials which would interfere with diagnostic or therapeutic uses for the antibody, and may include enzymes, hormones, and other proteinaceous or nonproteinaceous solutes. In preferred embodiments, the antibody will be purified (1) to greater than 95% by weight of antibody as determined by the Lowry method, and most preferably more than 99% by weight, (2) to a degree sufficient to obtain at least 15 residues of N-terminal or internal amino acid sequence by use of a spinning cup sequenator, or (3) to homogeneity by SDS-PAGE under reducing or nonreducing conditions using Coomassie blue or, preferably, silver stain. Isolated antibody includes the antibody in situ within recombinant cells since at least one component of the antibody's natural environment will not be present. Ordinarily, however, isolated antibody will be prepared by at least one purification step.

[2584] An antibody that “specifically binds to” or is “specific for” a particular polypeptide or an epitope on a particular polypeptide is one that binds to that particular polypeptide or epitope on a particular polypeptide without substantially binding to any other polypeptide or polypeptide epitope.

[2585] The word “label” when used herein refers to a detectable compound or composition which is conjugated directly or indirectly to the antibody so as to generate a “labeled” antibody. The label may be detectable by itself (e.g. radioisotope labels or fluorescent labels) or, in the case of an enzymatic label, may catalyze chemical alteration of a substrate compound or composition which is detectable.

[2586] By “solid phase” is meant a non-aqueous matrix to which the antibody of the present invention can adhere. Examples of solid phases encompassed herein include those formed partially or entirely of glass (e.g., controlled pore glass), polysaccharides (e.g., agarose), polyacrylamides, polystyrene, polyvinyl alcohol and silicones. In certain embodiments, depending on the context, the solid phase can comprise the well of an assay plate; in others it is a purification column (e.g., an affinity chromatography column). This term also includes a discontinuous solid phase of discrete particles, such as those described in U.S. Pat. No. 4,275,149.

[2587] A “liposome” is a small vesicle composed of various types of lipids, phospholipids and/or surfactant which is useful for delivery of a drug (such as a PRO polypeptide or antibody thereto) to a mammal. The components of the liposome are commonly arranged in a bilayer formation, similar to the lipid arrangement of biological membranes.

[2588] A “small molecule” is defined herein to have a molecular weight below about 500 Daltons.

[2589] The term “immune related disease” means a disease in which a component of the immune system of a mammal causes, mediates or otherwise contributes to a morbidity in the mammal. Also included are diseases in which stimulation or intervention of the immune response has an ameliorative effect on progression of the disease. Included within this term are immune-mediated inflammatory diseases, non-immune-mediated inflammatory diseases, infectious diseases, immunodeficiency diseases, neoplasia, etc.

[2590] The term “T cell mediated disease” means a disease in which T cells directly or indirectly mediate or otherwise contribute to a morbidity in a mammal. The T cell mediated disease may be associated with cell mediated effects, lymphokine mediated effects, etc., and even effects associated with B cells if the B cells are stimulated, for example, by the lymphokines secreted by T cells.

[2591] As used herein the term “psoriasis” is defined as a condition characterized by the eruption of circumscribed, discreet and confluent, reddish, silvery-scaled macropapules preeminently on the elbows, knees, scalp or trunk.

[2592] The term “effective amount” is a concentration or amount of a PRO polypeptide and/or agonist/antagonist which results in achieving a particular stated purpose. An “effective amount” of a PRO polypeptide or agonist or antagonist thereof may be determined empirically. Furthermore, a “therapeutically effective amount” is a concentration or amount of a PRO polypeptide and/or agonist/antagonist which is effective for achieving a stated therapeutic effect. This amount may also be determined empirically.

[2593] The term “cytotoxic agent” as used herein refers to a substance that inhibits or prevents the function of cells and/or causes destruction of cells. The term is intended to include radioactive isotopes (e.g., I¹³¹, I¹²⁵, Y⁹⁰ and Re¹⁸⁶), chemotherapeutic agents, and toxins such as enzymatically active toxins of bacterial, fungal, plant or animal origin, or fragments thereof.

[2594] A “chemotherapeutic agent” is a chemical compound useful in the treatment of cancer. Examples of chemotherapeutic agents include adriamycin, doxorubicin, epirubicin, 5-fluorouracil, cytosine arabinoside (“Ara-C”), cyclophosphamide, thiotepa, busulfan, cytoxin, taxoids, e.g., paclitaxel (Taxol, Bristol-Myers Squibb Oncology, Princeton, N.J.), and doxetaxel (Taxotere, Rhône-Poulenc Rorer, Antony, France), toxotere, methotrexate, cisplatin, melphalan, vinblastine, bleomycin, etoposide, ifosfamide, mitomycin C, mitoxantrone, vincristine, vinorelbine, carboplatin, teniposide, daunomycin, carminomycin, aminopterin, dactinomycin, mitomycins, esperamicins (see U.S. Pat. No. 4,675,187), melphalan and other related nitrogen mustards. Also included in this definition are hormonal agents that act to regulate or inhibit hormone action on tumors such as tamoxifen and onapristone.

[2595] A “growth inhibitory agent” when used herein refers to a compound or composition which inhibits growth of a cell, especially cancer cell overexpressing any of the genes identified herein, either in vitro or in vivo. Thus, the growth inhibitory agent is one which significantly reduces the percentage of cells overexpressing such genes in S phase. Examples of growth inhibitory agents include agents that block cell cycle progression (at a place other than S phase), such as agents that induce G1 arrest and M-phase arrest. Classical M-phase blockers include the vincas (vincristine and vinblastine), taxol, and topo II inhibitors such as doxorubicin, epirubicin, daunorubicin, etoposide, and bleomycin. Those agents that arrest G1 also spill over into S-phase arrest, for example, DNA alkylating agents such as tamoxifen, prednisone, dacarbazine, mechlorethamine, cisplatin, methotrexate, 5-fluorouracil, and ara-C. Further information can be found in The Molecular Basis of Cancer, Mendelsohn and Israel, eds., Chapter 1, entitled “Cell cycle regulation, oncogens, and antineoplastic drugs” by Murakami et al. (WB Saunders: Philadelphia, 1995), especially p. 13.

[2596] The term “cytokine” is a generic term for proteins released by one cell population which act on another cell as intercellular mediators. Examples of such cytokines are lymphokines, monokines, and traditional polypeptide hormones. Included among the cytokines are growth hormone such as human growth hormone, N-methionyl human growth hormone, and bovine growth hormone; parathyroid hormone; thyroxine; insulin; proinsulin; relaxin; prorelaxin; glycoprotein hormones such as follicle stimulating hormone (FSH), thyroid stimulating hormone (TSH), and luteinizing hormone (LH); hepatic growth factor; fibroblast growth factor; prolactin; placental lactogen; tumor necrosis factor-α and -β; mullerian-inhibiting substance; mouse gonadotropin-associated peptide; inhibin; activin; vascular endothelial growth factor; integrin; thrombopoietin (TPO); nerve growth factors such as NGF-β; platelet-growth factor; transforming growth factors (TGFs) such as TGF-α and TGF-β; insulin-like growth factor-I and -II; erythropoietin (EPO); osteoinductive factors; interferons such as interferon-α, -β, and -γ, colony stimulating factors (CSFs) such as macrophage-CSF (M-CSF); granulocyte-macrophage-CSF (GM-CSF); and granulocyte-CSF (G-CSF); interleukins (ILs) such as IL-1, IL-1α, IL-2, IL-3, IL-4, IL-5, IL-6, IL-7, IL-8, IL-9, IL-11, IL-12; a tumor necrosis factor such as TNF-α or TNF-β; and other polypeptide factors including LIF and kit ligand (KL). As used herein, the term cytokine includes proteins from natural sources or from recombinant cell culture and biologically active equivalents of the native sequence cytokines.

[2597] As used herein, the term “immunoadhesin” designates antibody-like molecules which combine the binding specificity of a heterologous protein (an “adhesin”) with the effector functions of immunoglobulin constant domains. Structurally, the immunoadhesins comprise a fusion of an amino acid sequence with the desired binding specificity which is other than the antigen recognition and binding site of an antibody (i.e., is “heterologous”), and an immunoglobulin constant domain sequence. The adhesin part of an immunoadhesin molecule typically is a contiguous amino acid sequence comprising at least the binding site of a receptor or a ligand. The immunoglobulin constant domain sequence in the immunoadhesin may be obtained from any immunoglobulin, such as IgG-1, IgG-2, IgG-3, or IgG-4 subtypes, IgA (including IgA-1 and IgA-2), IgE, IgD or IgM.

[2598] As used herein, the term “inflammatory cells” designates cells that enhance the inflammatory response such as mononuclear cells, eosinophils, macrophages, and polymorphonuclear neutrophils (PMN).

TABLE 2

| | | |
|---|---|---|
| PRO | XXXXXXXXXXXXXXX | (Length = 15 amino acids) |
| Comparison | XXXXXYYYYYYY | (Length = 12 amino acids) |
| Protein | | |

% amino acid sequence identity = (the number of identically matching amino acid residues between the two polypeptide sequences as determined by ALIGN-2) divided by (the total number of amino acid residues of the PRO polypeptide) = 5 divided by 15 = 33.3%

[2599] TABLE 3

| | | |
|---|---|---|
| PRO | XXXXXXXXXX | (Length = 10 amino acids) |
| Comparison | XXXXXYYYYYYZZYZ | (Length = 15 amino acids) |
| Protein | | |

% amino acid sequence identity = (the number of identically matching amino acid residues between the two polypeptide sequences as determined by ALIGN-2) divided by (the total number of amino acid residues of the PRO polypeptide) = 5 divided by 10 = 50%

[2600] TABLE 4

| | | |
|---|---|---|
| PRO-DNA | NNNNNNNNNNNNNN | (Length = 14 nucleotides) |
| Comparison | NNNNNNLLLLLLLLLL | (Length = 16 nucleotides) |
| DNA | | |

% nucleic acid sequence identity = (the number of identically matching nucleotides between the two nucleic acid sequences as determined by ALIGN-2) divided by (the total number of nucleotides of the PRO-DNA nucleic acid sequence) = 6 divided by 14 = 42.9%

[2601] TABLE 5

| | | |
|---|---|---|
| PRO-DNA | NNNNNNNNNNNN | (Length = 12 nucleotides) |
| Comparison DNA | NNNNLLLVV | (Length = 9 nucleotides) |

% nucleic acid sequence identity = (the number of identically matching nucleotides between the two nucleic acid sequences as determined by ALIGN-2) divided by (the total number of nucleotides of the PRO-DNA nucleic acid sequence) = 4 divided by 12 = 33.3%

II. Compositions and Methods of the Invention

[2602] A. Full-Length PRO Polypeptides

[2603] The present invention provides newly identified and isolated nucleotide sequences encoding polypeptides referred to in the present application as PRO polypeptides. In particular, cDNAs encoding various PRO polypeptides have been identified and isolated, as disclosed in further detail in the Examples below. However, for sake of simplicity, in the present specification the protein encoded by the full length native nucleic acid molecules disclosed herein as well as all further native homologues and variants included in the foregoing definition of PRO, will be referred to as “PRO/number”, regardless of their origin or mode of preparation.

[2604] As disclosed in the Examples below, the sequence of various cDNA clones have been disclosed. The predicted amino acid sequence can be determined from the nucleotide sequence using routine skill. For the PRO polypeptides and encoding nucleic acids described herein, Applicants have identified what is believed to be the reading frame best identifiable with the sequence information available at the time.

[2605] B. PRO Polypeptide Variants

[2606] In addition to the full-length native sequence PRO polypeptides described herein, it is contemplated that PRO variants can be prepared. PRO variants can be prepared by introducing appropriate nucleotide changes into the PRO DNA, and/or by synthesis of the desired PRO polypeptide. Those skilled in the art will appreciate that amino acid changes may alter post-translational processes of the PRO, such as changing the number or position of glycosylation sites or altering the membrane anchoring characteristics.

[2607] Variations in the native full-length sequence PRO or in various domains of the PRO described herein, can be made, for example, using any of the techniques and guidelines for conservative and non-conservative mutations set forth, for instance, in U.S. Pat. No. 5,364,934. Variations may be a substitution, deletion or insertion of one or more codons encoding the PRO that results in a change in the amino acid sequence of the PRO as compared with the native sequence PRO. Optionally, the variation is by substitution of at least one amino acid with any other amino acid in one or more of the domains of the PRO. Guidance in determining which amino acid residue may be inserted, substituted or deleted without adversely affecting the desired activity may be found by comparing the sequence of the PRO with that of homologous known protein molecules and minimizing the number of amino acid sequence changes made in regions of high homology. Amino acid substitutions can be the result of replacing one amino acid with another amino acid having similar structural and/or chemical properties, such as the replacement of a leucine with a serine, i.e., conservative amino acid replacements. Insertions or deletions may optionally be in the range of about 1 to 5 amino acids. The variation allowed may be determined by systematically making insertions, deletions or substitutions of amino acids in the sequence and testing the resulting variants for activity exhibited by the full-length or mature native sequence.

[2608] PRO polypeptide fragments are provided herein. Such fragments may be truncated at the N-terminus or C-terminus, or may lack internal residues, for example, when compared with a full length native protein. Certain fragments lack amino acid residues that are not essential for a desired biological activity of the PRO polypeptide.

[2609] PRO fragments may be prepared by any of a number of conventional techniques. Desired peptide fragments may be chemically synthesized. An alternative approach involves generating PRO fragments by enzymatic digestion, e.g., by treating the protein with an enzyme known to cleave proteins at sites defined by particular amino acid residues, or by digesting the DNA with suitable restriction enzymes and isolating the desired fragment. Yet another suitable technique involves isolating and amplifying a DNA fragment encoding a desired polypeptide fragment, by polymerase chain reaction (PCR). Oligonucleotides that define the desired termini of the DNA fragment are employed at the 5′ and 3′ primers in the PCR. Preferably, PRO polypeptide fragments share at least one biological and/or immunological activity with the native PRO polypeptide disclosed herein.

[2610] In particular embodiments, conservative substitutions of interest are shown in Table 6 under the heading of preferred substitutions. If such substitutions result in a change in biological activity, then more substantial changes, denominated exemplary substitutions in Table 6, or as further described below in reference to amino acid classes, are introduced and the products screened.

TABLE 6

| Original | Exemplary | Preferred |
|---|---|---|
| Residue | Substitutions | Substitutions |
| Ala (A) | val; leu; ile | val |
| Arg (R) | lys; gln; asn | lys |
| Asn (N) | gln; his; lys; arg | gln |
| Asp (D) | glu | glu |
| Cys (C) | ser | ser |
| Gln (Q) | asn | asn |
| Glu (E) | asp | asp |
| Gly (G) | pro; ala | ala |
| His (H) | asn; gln; lys; arg | arg |
| Ile (I) | leu; val; met; ala; phe; | leu |
| | norleucine | |
| Leu (L) | norleucine; ile; val; | ile |
| | met; ala; phe | |
| Lys (K) | arg; gln; asn | arg |
| Met (M) | leu; phe; ile | leu |
| Phe (F) | leu; val; ile; ala; tyr | leu |
| Pro (P) | ala | ala |
| Ser (S) | thr | thr |
| Thr (T) | ser | ser |
| Trp (W) | tyr; phe | tyr |
| Tyr (Y) | trp; phe; thr; ser | phe |
| Val (V) | ile; leu; met; phe; | leu |
| | ala; norleucine | |

[2611] Substantial modifications in function or immunological identity of the PRO polypeptide are accomplished by selecting substitutions that differ significantly in their effect on maintaining (a) the structure of the polypeptide backbone in the area of the substitution, for example, as a sheet or helical conformation, (b) the charge or hydrophobicity of the molecule at the target site, or (c) the bulk of the side chain. Naturally occurring residues are divided into groups based on common side-chain properties:

(1) hydrophobic: norleucine, met, ala, val, leu, ile;

(2) neutral hydrophilic: cys, ser, thr;

(3) acidic: asp, glu;

(4) basic: asn, gln, his, lys, arg;

(5) residues that influence chain orientation: gly, pro; and

(6) aromatic: trp, tyr, phe.

[2612] Non-conservative substitutions will entail exchanging a member of one of these classes for another class. Such substituted residues also may be introduced into the conservative substitution sites or, more preferably, into the remaining (non-conserved) sites.

[2613] The variations can be made using methods known in the art such as oligonucleotide-mediated (site-directed) mutagenesis, alanine scanning, and PCR mutagenesis. Site-directed mutagenesis [Carter et al., Nucl. Acids Res., 13:4331 (1986); Zoller et al., Nucl. Acids Res., 10:6487 (1987)], cassette mutagenesis [Wells et al., Gene, 34:315 (1985)], restriction selection mutagenesis [Wells et al., Philos. Trans. R. Soc. London SerA, 317:415 (1986)] or other known techniques can be performed on the cloned DNA to produce the PRO variant DNA.

[2614] Scanning amino acid analysis can also be employed to identify one or more amino acids along a contiguous sequence. Among the preferred scanning amino acids are relatively small, neutral amino acids. Such amino acids include alanine, glycine, serine, and cysteine. Alanine is typically a preferred scanning amino acid among this group because it eliminates the side-chain beyond the beta-carbon and is less likely to alter the main-chain conformation of the variant [Cunningham and Wells, Science, 244: 1081-1085 (1989)]. Alanine is also typically preferred because it is the most common amino acid. Further, it is frequently found in both buried and exposed positions [Creighton, The Proteins, (W.H. Freeman & Co., N.Y.); Chothia, J. Mol. Biol., 150:1 (1976)]. If alanine substitution does not yield adequate amounts of variant, an isoteric amino acid can be used.

[2615] C. Modifications of PRO

[2616] Covalent modifications of PRO are included within the scope of this invention. One type of covalent modification includes reacting targeted amino acid residues of a PRO polypeptide with an organic derivatizing agent that is capable of reacting with selected side chains or the N- or C-terminal residues of the PRO. Derivatization with bifunctional agents is useful, for instance, for crosslinking PRO to a water-insoluble support matrix or surface for use in the method for purifying anti-PRO antibodies, and vice-versa. Commonly used crosslinking agents include, e.g., 1,1-bis(diazoacetyl)-2-phenylethane, glutaraldehyde, N-hydroxysuccinimide esters, for example, esters with 4-azidosalicylic acid, homobifunctional imidoesters, including disuccinimidyl esters such as 3,3′-dithiobis(succinimidylpropionate), bifunctional maleimides such as bis-N-maleimido-1,8-octane and agents such as methyl-3-[(p-azidophenyl)dithio]propioimidate.

[2617] Other modifications include deamidation of glutaminyl and asparaginyl residues to the corresponding glutamyl and aspartyl residues, respectively, hydroxylation of proline and lysine, phosphorylation of hydroxyl groups of seryl or threonyl residues, methylation of the α-amino groups of lysine, arginine, and histidine side chains [T. E. Creighton, Proteins: Structure and Molecular Properties, W.H. Freeman & Co., San Francisco, pp. 79-86 (1983)], acetylation of the N-terminal amine, and amidation of any C-terminal carboxyl group.

[2618] Another type of covalent modification of the PRO polypeptide included within the scope of this invention comprises altering the native glycosylation pattern of the polypeptide. “Altering the native glycosylation pattern” is intended for purposes herein to mean deleting one or more carbohydrate moieties found in native sequence PRO (either by removing the underlying glycosylation site or by deleting the glycosylation by chemical and/or enzymatic means), and/or adding one or more glycosylation sites that are not present in the native sequence PRO. In addition, the phrase includes qualitative changes in the glycosylation of the native proteins, involving a change in the nature and proportions of the various carbohydrate moieties present.

[2619] Addition of glycosylation sites to the PRO polypeptide may be accomplished by altering the amino acid sequence. The alteration may be made, for example, by the addition of, or substitution by, one or more serine or threonine residues to the native sequence PRO (for O-linked glycosylation sites). The PRO amino acid sequence may optionally be altered through changes at the DNA level, particularly by mutating the DNA encoding the PRO polypeptide at preselected bases such that codons are generated that will translate into the desired amino acids.

[2620] Another means of increasing the number of carbohydrate moieties on the PRO polypeptide is by chemical or enzymatic coupling of glycosides to the polypeptide. Such methods are described in the art, e.g., in WO 87/05330 published 11 Sep. 1987, and in Aplin and Wriston, CRC Crit. Rev. Biochem., pp. 259-306 (1981).

[2621] Removal of carbohydrate moieties present on the PRO polypeptide may be accomplished chemically or enzymatically or by mutational substitution of codons encoding for amino acid residues that serve as targets for glycosylation. Chemical deglycosylation techniques are known in the art and described, for instance, by Hakimuddin, et al., Arch. Biochem. Biophys., 259:52 (1987) and by Edge et al., Anal. Biochem., 118:131 (1981). Enzymatic cleavage of carbohydrate moieties on polypeptides can be achieved by the use of a variety of endo- and exo-glycosidases as described by Thotakura et al., Meth. Enzymol., 138:350 (1987).

[2622] Another type of covalent modification of PRO comprises linking the PRO polypeptide to one of a variety of nonproteinaceous polymers, e.g., polyethylene glycol (PEG), polypropylene glycol, or polyoxyalkylenes, in the manner set forth in U.S. Pat. No. 4,640,835; 4,496,689; 4,301,144; 4,670,417; 4,791,192 or 4,179,337.

[2623] The PRO of the present invention may also be modified in a way to form a chimeric molecule comprising PRO fused to another, heterologous polypeptide or amino acid sequence.

[2624] In one embodiment, such a chimeric molecule comprises a fusion of the PRO with a tag polypeptide which provides an epitope to which an anti-tag antibody can selectively bind. The epitope tag is generally placed at the amino- or carboxyl-terminus of the PRO. The presence of such epitope-tagged forms of the PRO can be detected using an antibody against the tag polypeptide. Also, provision of the epitope tag enables the PRO to be readily purified by affinity purification using an anti-tag antibody or another type of affinity matrix that binds to the epitope tag. Various tag polypeptides and their respective antibodies are well known in the art. Examples include poly-histidine (poly-his) or poly-histidine-glycine (poly-his-gly) tags; the flu HA tag polypeptide and its antibody 12CA5 [Field et al., Mol. Cell. Biol., 8:2159-2165 (1988)]; the c-myc tag and the 8F9, 3C7, 6E10, G4, B7 and 9E10 antibodies thereto [Evan et al., Molecular and Cellular Biology, 5:3610-3616 (1985)]; and the Herpes Simplex virus glycoprotein D (gD) tag and its antibody [Paborsky et al., Protein Engineering, 3(6):547-553 (1990)]. Other tag polypeptides include the Flag-peptide [Hopp et al., BioTechnology, 6:1204-1210 (1988)]; the KT3 epitope peptide [Martin et al., Science, 255:192-194 (1992)]; an alpha-tubulin epitope peptide [Skinner et al., J. Biol. Chem., 266:15163-15166 (1991)]; and the T7 gene 10 protein peptide tag [Lutz-Freyermuth et al., Proc. Natl. Acad. Sci. USA, 87:6393-6397 (1990)].

[2625] In an alternative embodiment, the chimeric molecule may comprise a fusion of the PRO with an immunoglobulin or a particular region of an immunoglobulin. For a bivalent form of the chimeric molecule (also referred to as an “immunoadhesin”), such a fusion could be to the Fc region of an IgG molecule. The Ig fusions preferably include the substitution of a soluble (transmembrane domain deleted or inactivated) form of a PRO polypeptide in place of at least one variable region within an Ig molecule. In a particularly preferred embodiment, the immunoglobulin fusion includes the hinge, CH2 and CH3, or the hinge, CH1, CH2 and CH3 regions of an IgG1 molecule. For the production of immunoglobulin fusions see also U.S. Pat. No. 5,428,130 issued Jun. 27, 1995.

[2626] D. Preparation of PRO

[2627] The description below relates primarily to production of PRO by culturing cells transformed or transfected with a vector containing PRO nucleic acid. It is, of course, contemplated that alternative methods, which are well known in the art, may be employed to prepare PRO. For instance, the PRO sequence, or portions thereof, may be produced by direct peptide synthesis using solid-phase techniques [see, e.g., Stewart et al., Solid-Phase Peptide Synthesis, W.H. Freeman Co., San Francisco, Calif. (1969); Merrifield, J. Am. Chem. Soc., 85:2149-2154 (1963)]. In vitro protein synthesis may be performed using manual techniques or by automation. Automated synthesis may be accomplished, for instance, using an Applied Biosystems Peptide Synthesizer (Foster City, Calif.) using manufacturer's instructions. Various portions of the PRO may be chemically synthesized separately and combined using chemical or enzymatic methods to produce the full-length PRO.

[2628] 1. Isolation of DNA Encoding PRO

[2629] DNA encoding PRO may be obtained from a cDNA library prepared from tissue believed to possess the PRO mRNA and to express it at a detectable level. Accordingly, human PRO DNA can be conveniently obtained from a cDNA library prepared from human tissue, such as described in the Examples. The PRO-encoding gene may also be obtained from a genomic library or by known synthetic procedures (e.g., automated nucleic acid synthesis).

[2630] Libraries can be screened with probes (such as antibodies to the PRO or oligonucleotides of at least about 20-80 bases) designed to identify the gene of interest or the protein encoded by it. Screening the cDNA or genomic library with the selected probe may be conducted using standard procedures, such as described in Sambrook et al., Molecular Cloning: A Laboratory Manual (New York: Cold Spring Harbor Laboratory Press, 1989). An alternative means to isolate the gene encoding PRO is to use PCR methodology [Sambrook et al., supra; Dieffenbach et al., PCR Primer: A Laboratory Manual (Cold Spring Harbor Laboratory Press, 1995)].

[2631] The Examples below describe techniques for screening a cDNA library. The oligonucleotide sequences selected as probes should be of sufficient length and sufficiently unambiguous that false positives are minimized. The oligonucleotide is preferably labeled such that it can be detected upon hybridization to DNA in the library being screened. Methods of labeling are well known in the art, and include the use of radiolabels like ³²P-labeled ATP, biotinylation or enzyme labeling. Hybridization conditions, including moderate stringency and high stringency, are provided in Sambrook et al., supra.

[2632] Sequences identified in such library screening methods can be compared and aligned to other known sequences deposited and available in public databases such as GenBank or other private sequence databases. Sequence identity (at either the amino acid or nucleotide level) within defined regions of the molecule or across the full-length sequence can be determined using methods known in the art and as described herein.

[2633] Nucleic acid having protein coding sequence may be obtained by screening selected cDNA or genomic libraries using the deduced amino acid sequence disclosed herein for the first time, and, if necessary, using conventional primer extension procedures as described in Sambrook et al., supra, to detect precursors and processing intermediates of mRNA that may not have been reverse-transcribed into cDNA.

[2634] 2. Selection and Transformation of Host Cells

[2635] Host cells are transfected or transformed with expression or cloning vectors described herein for PRO production and cultured in conventional nutrient media modified as appropriate for inducing promoters, selecting transformants, or amplifying the genes encoding the desired sequences. The culture conditions, such as media, temperature, pH and the like, can be selected by the skilled artisan without undue experimentation. In general, principles, protocols, and practical techniques for maximizing the productivity of cell cultures can be found in Mammalian Cell Biotechnology: a Practical Approach, M. Butler, ed. (IRL Press, 1991) and Sambrook et al., supra.

[2636] Methods of eukaryotic cell transfection and prokaryotic cell transformation are known to the ordinarily skilled artisan, for example, CaCl₂, CaPO₄, liposome-mediated and electroporation. Depending on the host cell used, transformation is performed using standard techniques appropriate to such cells. The calcium treatment employing calcium chloride, as described in Sambrook et al., supra, or electroporation is generally used for prokaryotes. Infection with Agrobacterium tumefaciens is used for transformation of certain plant cells, as described by Shaw et al., Gene 23:315 (1983) and WO 89/05859 published 29 Jun. 1989. For mammalian cells without such cell walls, the calcium phosphate precipitation method of Graham and van der Eb, Virology, 52:456-457 (1978) can be employed. General aspects of mammalian cell host system transfections have been described in U.S. Pat. No. 4,399,216. Transformations into yeast are typically carried out according to the method of Van Solingen et al., J. Bact., 130:946 (1977) and Hsiao et al., Proc. Natl. Acad. Sci. (USA), 76:3829 (1979). However, other methods for introducing DNA into cells, such as by nuclear microinjection, electroporation, bacterial protoplast fusion with intact cells, or polycations, e.g., polybrene, polyornithine, may also be used. For various techniques for transforming mammalian cells, see Keown et al., Methods in Enzymology, 185:527-537 (1990) and Mansour et al., Nature, 336:348-352 (1988).

[2637] Suitable host cells for cloning or expressing the DNA in the vectors herein include prokaryote, yeast, or higher eukaryote cells. Suitable prokaryotes include but are not limited to eubacteria, such as Gram-negative or Gram-positive organisms, for example, Enterobacteriaceae such as E. coli. Various E. coli strains are publicly available, such as E. coli K12 strain MM294 (ATCC 31,446); E. coli X1776 (ATCC 31,537); E. coli strain W3110 (ATCC 27,325) and K5 772 (ATCC 53,635). Other suitable prokaryotic host cells include Enterobacteriaceae such as Escherichia, e.g., E. coli, Enterobacter, Erwinia, Klebsiella, Proteus, Salmonella, e.g., Salmonella typhimurium, Serratia, e.g., Serratia marcescans, and Shigella, as well as Bacilli such as B. subtilis and B. licheniformis (e.g., B. licheniformis 41P disclosed in DD 266,710 published 12 Apr. 1989), Pseudomonas such as P. aeruginosa, and Streptomyces. These examples are illustrative rather than limiting. Strain W3110 is one particularly preferred host or parent host because it is a common host strain for recombinant DNA product fermentations. Preferably, the host cell secretes minimal amounts of proteolytic enzymes. For example, strain W3110 may be modified to effect a genetic mutation in the genes encoding proteins endogenous to the host, with examples of such hosts including E. coli W3110 strain 1A2, which has the complete genotype tonA; E. coli W3110 strain 9E4, which has the complete genotype tonA ptr3; E. coli W3110 strain 27C7 (ATCC 55,244), which has the complete genotype tonA ptr3 phoA E15 (argF-lac)169 degP ompT kan^{r}; E. coli W3110 strain 37D6, which has the complete genotype tonA ptr3 phoA E15 (argF-lac)169 degP ompT rbs7 ilvG kan^{r}; E. coli W3110 strain 40B4, which is strain 37D6 with a non-kanamycin resistant degP deletion mutation; and an E. coli strain having mutant periplasmic protease disclosed in U.S. Pat. No. 4,946,783 issued 7 Aug. 1990. Alternatively, in vitro methods of cloning, e.g., PCR or other nucleic acid polymerase reactions, are suitable.

[2638] In addition to prokaryotes, eukaryotic microbes such as filamentous fungi or yeast are suitable cloning or expression hosts for PRO-encoding vectors. Saccharomyces cerevisiae is a commonly used lower eukaryotic host microorganism. Others include Schizosaccharomyces pombe (Beach and Nurse, Nature, 290: 140 [1981]; EP 139,383 published 2 May 1985); Kluyveromyces hosts (U.S. Pat. No. 4,943,529; Fleer et al., Bio/Technology, 9:968-975 (1991)) such as, e.g., K. lactis (MW98-8C, CBS683, CBS4574; Louvencourt et al., J. Bacteriol., 154(2):737-742 [1983]), K. fragilis (ATCC 12,424), K. bulgaricus (ATCC 16,045), K. wickeramii (ATCC 24,178), K. waltii (ATCC 56,500), K. drosophilarum (ATCC 36,906; Van den Berg et al., Bio/Technology, 8:135 (1990)), K. thermotolerans, and K. marxianus; yarrowia (EP 402,226); Pichia pastoris (EP 183,070; Sreekrishna et al., J. Basic Microbiol., 28:265-278 [1988]); Candida; Trichoderma reesia (EP 244,234); Neurospora crassa (Case et al., Proc. Natl. Acad. Sci. USA, 76:5259-5263 [1979]); Schwanniomyces such as Schwanniomyces occidentalis (EP 394,538 published 31 Oct. 1990); and filamentous fungi such as, e.g., Neurospora, Penicillium, Tolypocladium (WO 91/00357 published 10 Jan. 1991), and Aspergillus hosts such as A. nidulans (Ballance et al., Biochem. Biophys. Res. Commun., 112:284-289 [1983]; Tilburn et al., Gene, 26:205-221 [1983]; Yelton et al., Proc. Natl. Acad. Sci. USA, 81: 1470-1474 [1984]) and A. niger (Kelly and Hynes, EMBO J., 4:475-479 [1985]). Methylotropic yeasts are suitable herein and include, but are not limited to, yeast capable of growth on methanol selected from the genera consisting of Hansenula, Candida, Kloeckera, Pichia, Saccharomyces, Torulopsis, and Rhodotorula. A list of specific species that are exemplary of this class of yeasts may be found in C. Anthony, The Biochemistry of Methylotrophs, 269 (1982).

[2639] Suitable host cells for the expression of glycosylated PRO are derived from multicellular organisms. Examples of invertebrate cells include insect cells such as Drosophila 52 and Spodoptera Sf9, as well as plant cells. Examples of useful mammalian host cell lines include Chinese hamster ovary (CHO) and COS cells. More specific examples include monkey kidney CV1 line transformed by SV40 (COS-7, ATCC CRL 1651); human embryonic kidney line (293 or 293 cells subcloned for growth in suspension culture, Graham et al., J. Gen Virol., 36:59 (1977)); Chinese hamster ovary cells/-DHFR (CHO, Urlaub and Chasin, Proc. Natl. Acad. Sci. USA, 77:4216 (1980)); mouse sertoli cells (TM4, Mather, Biol. Reprod., 23:243-251 (1980)); human lung cells (W138, ATCC CCL 75); human liver cells (Hep G2, HB 8065); and mouse mammary tumor (MMT 060562, ATCC CCL51). The selection of the appropriate host cell is deemed to be within the skill in the art.

[2640] 3. Selection and Use of a Replicable Vector

[2641] The nucleic acid (e.g., cDNA or genomic DNA) encoding PRO may be inserted into a replicable vector for cloning (amplification of the DNA) or for expression. Various vectors are publicly available. The vector may, for example, be in the form of a plasmid, cosmid, viral particle, or phage. The appropriate nucleic acid sequence may be inserted into the vector by a variety of procedures. In general, DNA is inserted into an appropriate restriction endonuclease site(s) using techniques known in the art. Vector components generally include, but are not limited to, one or more of a signal sequence, an origin of replication, one or more marker genes, an enhancer element, a promoter, and a transcription termination sequence. Construction of suitable vectors containing one or more of these components employs standard ligation techniques which are known to the skilled artisan.

[2642] The PRO may be produced recombinantly not only directly, but also as a fusion polypeptide with a heterologous polypeptide, which may be a signal sequence or other polypeptide having a specific cleavage site at the N-terminus of the mature protein or polypeptide. In general, the signal sequence may be a component of the vector, or it may be a part of the PRO-encoding DNA that is inserted into the vector. The signal sequence may be a prokaryotic signal sequence selected, for example, from the group of the alkaline phosphatase, penicillinase, lpp, or heat-stable enterotoxin II leaders. For yeast secretion the signal sequence may be, e.g., the yeast invertase leader, alpha factor leader (including Saccharomyces and Kluyveromyces α-factor leaders, the latter described in U.S. Pat. No. 5,010,182), or acid phosphatase leader, the C. albicans glucoamylase leader (EP 362,179 published 4 Apr. 1990), or the signal described in WO 90/13646 published 15 Nov. 1990. In mammalian cell expression, mammalian signal sequences may be used to direct secretion of the protein, such as signal sequences from secreted polypeptides of the same or related species, as well as viral secretory leaders.

[2643] Both expression and cloning vectors contain a nucleic acid sequence that enables the vector to replicate in one or more selected host cells. Such sequences are well known for a variety of bacteria, yeast, and viruses. The origin of replication from the plasmid pBR322 is suitable for most Gram-negative bacteria, the 2μ plasmid origin is suitable for yeast, and various viral origins (SV40, polyoma, adenovirus, VSV or BPV) are useful for cloning vectors in mammalian cells.

[2644] Expression and cloning vectors will typically contain a selection gene, also termed a selectable marker. Typical selection genes encode proteins that (a) confer resistance to antibiotics or other toxins, e.g., ampicillin, neomycin, methotrexate, or tetracycline, (b) complement auxotrophic deficiencies, or (c) supply critical nutrients not available from complex media, e.g., the gene encoding D-alanine racemase for Bacilli.

[2645] An example of suitable selectable markers for mammalian cells are those that enable the identification of cells competent to take up the PRO-encoding nucleic acid, such as DHFR or thymidine kinase. An appropriate host cell when wild-type DHFR is employed is the CHO cell line deficient in DHFR activity, prepared and propagated as described by Urlaub et al., Proc. Natl. Acad. Sci. USA, 77:4216 (1980). A suitable selection gene for use in yeast is the trp1 gene present in the yeast plasmid YRp7 [Stinchcomb et al., Nature, 282:39 (1979); Kingsman et al., Gene, 7:141 (1979); Tschemper et al., Gene, 10:157 (1980)]. The trp1 gene provides a selection marker for a mutant strain of yeast lacking the ability to grow in tryptophan, for example, ATCC No. 44076 or PEP4-1 [Jones, Genetics, 85:12 (1977)].

[2646] Expression and cloning vectors usually contain a promoter operably linked to the PRO-encoding nucleic acid sequence to direct mRNA synthesis. Promoters recognized by a variety of potential host cells are well known. Promoters suitable for use with prokaryotic hosts include the β-lactamase and lactose promoter systems [Chang et al., Nature, 275:615 (1978); Goeddel et al., Nature, 281:544 (1979)], alkaline phosphatase, a tryptophan (trp) promoter system [Goeddel, Nucleic Acids Res., 8:4057 (1980); EP 36,776], and hybrid promoters such as the tac promoter [deBoer et al., Proc. Natl. Acad. Sci. USA, 80:21-25 (1983)]. Promoters for use in bacterial systems also will contain a Shine-Dalgarno (S.D.) sequence operably linked to the DNA encoding PRO.

[2647] Examples of suitable promoting sequences for use with yeast hosts include the promoters for 3-phosphoglycerate kinase [Hitzeman et al., J. Biol. Chem., 255:2073 (1980)] or other glycolytic enzymes [Hess et al., J. Adv. Enzyme Reg., 7:149 (1968); Holland, Biochemistry, 17:4900 (1978)], such as enolase, glyceraldehyde-3-phosphate dehydrogenase, hexokinase, pyruvate decarboxylase, phosphofructokinase, glucose-6-phosphate isomerase, 3-phosphoglycerate mutase, pyruvate kinase, triosephosphate isomerase, phosphoglucose isomerase, and glucokinase.

[2648] Other yeast promoters, which are inducible promoters having the additional advantage of transcription controlled by growth conditions, are the promoter regions for alcohol dehydrogenase 2, isocytochrome C, acid phosphatase, degradative enzymes associated with nitrogen metabolism, metallothionein, glyceraldehyde-3-phosphate dehydrogenase, and enzymes responsible for maltose and galactose utilization. Suitable vectors and promoters for use in yeast expression are further described in EP 73,657.

[2649] PRO transcription from vectors in mammalian host cells is controlled, for example, by promoters obtained from the genomes of viruses such as polyoma virus, fowlpox virus (UK 2,211,504 published 5 Jul. 1989), adenovirus (such as Adenovirus 2), bovine papilloma virus, avian sarcoma virus, cytomegalovirus, a retrovirus, hepatitis-B virus and Simian Virus 40 (SV40), from heterologous mammalian promoters, e.g., the actin promoter or an immunoglobulin promoter, and from heat-shock promoters, provided such promoters are compatible with the host cell systems.

[2650] Transcription of a DNA encoding the PRO by higher eukaryotes may be increased by inserting an enhancer sequence into the vector. Enhancers are cis-acting elements of DNA, usually about from 10 to 300 bp, that act on a promoter to increase its transcription. Many enhancer sequences are now known from mammalian genes (globin, elastase, albumin, α-fetoprotein, and insulin). Typically, however, one will use an enhancer from a eukaryotic cell virus. Examples include the SV40 enhancer on the late side of the replication origin (bp 100-270), the cytomegalovirus early promoter enhancer, the polyoma enhancer on the late side of the replication origin, and adenovirus enhancers. The enhancer may be spliced into the vector at a position 5′ or 3′ to the PRO coding sequence, but is preferably located at a site 5′ from the promoter.

[2651] Expression vectors used in eukaryotic host cells (yeast, fungi, insect, plant, animal, human, or nucleated cells from other multicellular organisms) will also contain sequences necessary for the termination of transcription and for stabilizing the mRNA. Such sequences are commonly available from the 5′ and, occasionally 3′, untranslated regions of eukaryotic or viral DNAs or cDNAs. These regions contain nucleotide segments transcribed as polyadenylated fragments in the untranslated portion of the mRNA encoding PRO.

[2652] Still other methods, vectors, and host cells suitable for adaptation to the synthesis of PRO in recombinant vertebrate cell culture are described in Gething et al., Nature, 293:620-625 (1981); Mantei et al., Nature, 281:40-46 (1979); EP 117,060; and EP 117,058.

[2653] 4. Detecting Gene Amplification/Expression

[2654] Gene amplification and/or expression may be measured in a sample directly, for example, by conventional Southern blotting, Northern blotting to quantitate the transcription of mRNA [Thomas, Proc. Natl. Acad. Sci. USA, 77:5201-5205 (1980)], dot blotting (DNA analysis), or in situ hybridization, using an appropriately labeled probe, based on the sequences provided herein. Alternatively, antibodies may be employed that can recognize specific duplexes, including DNA duplexes, RNA duplexes, and DNA-RNA hybrid duplexes or DNA-protein duplexes. The antibodies in turn may be labeled and the assay may be carried out where the duplex is bound to a surface, so that upon the formation of duplex on the surface, the presence of antibody bound to the duplex can be detected.

[2655] Gene expression, alternatively, may be measured by immunological methods, such as immunohistochemical staining of cells or tissue sections and assay of cell culture or body fluids, to quantitate directly the expression of gene product. Antibodies useful for immunohistochemical staining and/or assay of sample fluids may be either monoclonal or polyclonal, and may be prepared in any mammal. Conveniently, the antibodies may be prepared against a native sequence PRO polypeptide or against a synthetic peptide based on the DNA sequences provided herein or against exogenous sequence fused to PRO DNA and encoding a specific antibody epitope.

[2656] 5. Purification of Polypeptide

[2657] Forms of PRO may be recovered from culture medium or from host cell lysates. If membrane-bound, it can be released from the membrane using a suitable detergent solution (e.g. Triton-X 100) or by enzymatic cleavage. Cells employed in expression of PRO can be disrupted by various physical or chemical means, such as freeze-thaw cycling, sonication, mechanical disruption, or cell lysing agents.

[2658] It may be desired to purify PRO from recombinant cell proteins or polypeptides. The following procedures are exemplary of suitable purification procedures: by fractionation on an ion-exchange column; ethanol precipitation; reverse phase HPLC; chromatography on silica or on a cation-exchange resin such as DEAE; chromatofocusing; SDS-PAGE; ammonium sulfate precipitation; gel filtration using, for example, Sephadex G-75; protein A Sepharose columns to remove contaminants such as IgG; and metal chelating columns to bind epitope-tagged forms of the PRO. Various methods of protein purification may be employed and such methods are known in the art and described for example in Deutscher, Methods in Enzymology, 182 (1990); Scopes, Protein Purification: Principles and Practice, Springer-Verlag, New York (1982). The purification step(s) selected will depend, for example, on the nature of the production process used and the particular PRO produced.

[2659] E. Tissue Distribution

[2660] The location of tissues expressing the PRO can be identified by determining mRNA expression in various human tissues. The location of such genes provides information about which tissues are most likely to be affected by the stimulating and inhibiting activities of the PRO polypeptides. The location of a gene in a specific tissue also provides sample tissue for the activity blocking assays discussed below.

[2661] As noted before, gene expression in various tissues may be measured by conventional Southern blotting, Northern blotting to quantitate the transcription of mRNA (Thomas, Proc. Natl. Acad. Sci. USA, 77:5201-5205 [1980]), dot blotting (DNA analysis), or in situ hybridization, using an appropriately labeled probe, based on the sequences provided herein. Alternatively, antibodies may be employed that can recognize specific duplexes, including DNA duplexes, RNA duplexes, and DNA-RNA hybrid duplexes or DNA-protein duplexes.

[2662] Gene expression in various tissues, alternatively, may be measured by immunological methods, such as immunohistochemical staining of tissue sections and assay of cell culture or body fluids, to quantitate directly the expression of gene product. Antibodies useful for immunohistochemical staining and/or assay of sample fluids may be either monoclonal or polyclonal, and may be prepared in any mammal. Conveniently, the antibodies may be prepared against a native sequence of a PRO polypeptide or against a synthetic peptide based on the DNA sequences encoding the PRO polypeptide or against an exogenous sequence fused to a DNA encoding a PRO polypeptide and encoding a specific antibody epitope. General techniques for generating antibodies, and special protocols for Northern blotting and in situ hybridization are provided below.

[2663] F. Antibody Binding Studies

[2664] The activity of the PRO polypeptides can be further verified by antibody binding studies, in which the ability of anti-PRO antibodies to inhibit the effect of the PRO polypeptides, respectively, on tissue cells is tested. Exemplary antibodies include polyclonal, monoclonal, humanized, bispecific, and heteroconjugate antibodies, the preparation of which will be described hereinbelow.

[2665] Antibody binding studies may be carried out in any known assay method, such as competitive binding assays, direct and indirect sandwich assays, and immunoprecipitation assays. Zola, Monoclonal Antibodies: A Manual of Techniques, pp. 147-158 (CRC Press, Inc., 1987).

[2666] Competitive binding assays rely on the ability of a labeled standard to compete with the test sample analyte for binding with a limited amount of antibody. The amount of target protein in the test sample is inversely proportional to the amount of standard that becomes bound to the antibodies. To facilitate determining the amount of standard that becomes bound, the antibodies preferably are insolubilized before or after the competition, so that the standard and analyte that are bound to the antibodies may conveniently be separated from the standard and analyte which remain unbound.

[2667] Sandwich assays involve the use of two antibodies, each capable of binding to a different immunogenic portion, or epitope, of the protein to be detected. In a sandwich assay, the test sample analyte is bound by a first antibody which is immobilized on a solid support, and thereafter a second antibody binds to the analyte, thus forming an insoluble three-part complex. See, e.g., U.S. Pat. No. 4,376,110. The second antibody may itself be labeled with a detectable moiety (direct sandwich assays) or may be measured using an anti-immunoglobulin antibody that is labeled with a detectable moiety (indirect sandwich assay). For example, one type of sandwich assay is an ELISA assay, in which case the detectable moiety is an enzyme.

[2668] For immunohistochemistry, the tissue sample may be fresh or frozen or may be embedded in paraffin and fixed with a preservative such as formalin, for example.

[2669] G. Cell-Based Assays

[2670] Cell-based assays and animal models for immune related diseases such as psoriasis can be used to further understand the relationship between the genes and polypeptides identified herein and the development and pathogenesis psoriasis.

[2671] In a different approach, cells of a cell type known to be involved in psoraisis are transfected with the cDNAs described herein, and the ability of these cDNAs to stimulate or inhibit psoriasis is analyzed. Suitable cells can be transfected with the desired gene, and monitored for such functional activity. Such transfected cell lines can then be used to test the ability of poly- or monoclonal antibodies or antibody compositions to inhibit or stimulate psoraisis. Cells transfected with the coding sequences of the genes identified herein can further be used to identify drug candidates for the treatment of psoraisis.

[2672] In addition, primary cultures derived from transgenic animals (as described below) can be used in the cell-based assays herein, although stable cell lines are preferred. Techniques to derive continuous cell lines from transgenic animals are well known in the art (see, e.g., Small et al., Mol. Cell. Biol. 5: 642-648 [1985]).

[2673] H. Animal Models

[2674] The results of cell based in vitro assays can be further verified using in vivo animal models and assays for psoraisis. A variety of well known animal models can be used to further understand the role of the genes identified herein in the development and pathogenesis of psoriasis, and to test the efficacy of candidate therapeutic agents, including antibodies, and other antagonists of the native polypeptides, including small molecule antagonists. The in vivo nature of such models makes them predictive of responses in human patients. Animal models of immune related diseases include both non-recombinant and recombinant (transgenic) animals. Non-recombinant animal models include, for example, rodent, e.g., murine models. Such models can be generated by introducing cells into syngeneic mice using standard techniques, e.g., subcutaneous injection, tail vein injection, spleen implantation, intraperitoneal implantation, implantation under the renal capsule, etc.

[2675] Graft-versus-host disease occurs when immunocompetent cells are transplanted into immunosuppressed or tolerant patients. The donor cells recognize and respond to host antigens. The response can vary from life threatening severe inflammation to mild cases of diarrhea and weight loss. Graft-versus-host disease models provide a means of assessing T cell reactivity against MHC antigens and minor transplant antigens. A suitable procedure is described in detail in Current Protocols in Immunology, above, unit 4.3.

[2676] An animal model for skin allograft rejection is a means of testing the ability of T cells to mediate in vivo tissue destruction and a measure of their role in transplant rejection. The most common and accepted models use murine tail-skin grafts. Repeated experiments have shown that skin allograft rejection is mediated by T cells, helper T cells and killer-effector T cells, and not antibodies. Auchincloss, H. Jr. and Sachs, D. H., Fundamental Immunology, 2nd ed., W. E. Paul ed., Raven Press, NY, 1989, 889-992. A suitable procedure is described in detail in Current Protocols in Immunology, above, unit 4.4. Other transplant rejection models which can be used to test the compounds of the invention are the allogeneic heart transplant models described by Tanabe, M. et al, Transplantation (1994) 58:23 and Tinubu, S. A. et al, J. Immunol. (1994) 4330-4338.

[2677] Contact hypersensitivity is a simple delayed type hypersensitivity in vivo assay of cell mediated immune function. In this procedure, cutaneous exposure to exogenous haptens which gives rise to a delayed type hypersensitivity reaction which is measured and quantitated. Contact sensitivity involves an initial sensitizing phase followed by an elicitation phase. The elicitation phase occurs when the T lymphocytes encounter an antigen to which they have had previous contact. Swelling and inflammation occur, making this an excellent model of human allergic contact dermatitis. A suitable procedure is described in detail in Current Protocols in Immunology, Eds. J. E. Cologan, A. M. Kruisbeek, D. H. Margulies, B. M. Shevach and W. Strober, John Wiley & Sons, Inc., 1994, unit 4.2. See also Grabbe, S. and Schwarz, T, Immun. Today 19 (1): 3744 (1998).

[2678] Additionally, the compounds of the invention can be tested on animal models for psoriasis like diseases. Evidence suggests a T cell pathogenesis for psoriasis. The compounds of the invention can be tested in the scid/scid mouse model described by Schon, M. P. et al, Nat. Med. (1997) 3:183, in which the mice demonstrate histopathologic skin lesions resembling psoriasis. Another suitable model is the human skin/scid mouse chimera prepared as described by Nickoloff, B. J. et al, Am. J. Path. (1995) 146:580.

[2679] Recombinant (transgenic) animal models can be engineered by introducing the coding portion of the genes identified herein into the genome of animals of interest, using standard techniques for producing transgenic animals. Animals that can serve as a target for transgenic manipulation include, without limitation, mice, rats, rabbits, guinea pigs, sheep, goats, pigs, and non-human primates, e.g., baboons, chimpanzees and monkeys. Techniques known in the art to introduce a transgene into such animals include pronucleic microinjection (Hoppe and Wanger, U.S. Pat. No. 4,873,191); retrovirus-mediated gene transfer into germ lines (e.g., Van der Putten et al., Proc. Natl. Acad. Sci USA 82, 6148-615 [1985]); gene targeting in embryonic stem cells (Thompson et al., Cell 56, 313-321 [1989]); electroporation of embryos (Lo, Mol. Cel. Biol. 3, 1803-1814 [1983]); sperm-mediated gene transfer (Lavitrano et al., Cell 57, 717-73 [1989]). For review, see, for example, U.S. Pat. No. 4,736,866.

[2680] For the purpose of the present invention, transgenic animals include those that carry the transgene only in part of their cells (“mosaic animals”). The transgene can be integrated either as a single transgene, or in concatamers, e.g., head-to-head or head-to-tail tandems. Selective introduction of a transgene into a particular cell type is also possible by following, for example, the technique of Lasko et al., Proc. Natl. Acad. Sci. USA 89, 6232-636 (1992).

[2681] The expression of the transgene in transgenic animals can be monitored by standard techniques. For example, Southern blot analysis or PCR amplification can be used to verify the integration of the transgene. The level of mRNA expression can then be analyzed using techniques such as in situ hybridization, Northern blot analysis, PCR, or immunocytochemistry.

[2682] The animals may be further examined for signs of immune disease pathology, for example by histological examination to determine infiltration of immune cells into specific tissues. Blocking experiments can also be performed in which the transgenic animals are treated with the compounds of the invention to determine the extent of the T cell proliferation stimulation or inhibition of the compounds. In these experiments, blocking antibodies which bind to the PRO polypeptide, prepared as described above, are administered to the animal and the effect on immune function is determined.

[2683] Alternatively, “knock out” animals can be constructed which have a defective or altered gene encoding a polypeptide identified herein, as a result of homologous recombination between the endogenous gene encoding the polypeptide and altered genomic DNA encoding the same polypeptide introduced into an embryonic cell of the animal. For example, cDNA encoding a particular polypeptide can be used to clone genomic DNA encoding that polypeptide in accordance with established techniques. A portion of the genomic DNA encoding a particular polypeptide can be deleted or replaced with another gene, such as a gene encoding a selectable marker which can be used to monitor integration. Typically, several kilobases of unaltered flanking DNA (both at the 5′ and 3′ ends) are included in the vector [see e.g., Thomas and Capecchi, Cell, 51:503 (1987) for a description of homologous recombination vectors]. The vector is introduced into an embryonic stem cell line (e.g., by electroporation) and cells in which the introduced DNA has homologously recombined with the endogenous DNA are selected [see e.g., Li et al., Cell, 69:915 (1992)]. The selected cells are then injected into a blastocyst of an animal (e.g., a mouse or rat) to form aggregation chimeras [see e.g., Bradley, in Teratocarcinonias and Embryonic Stem Cells: A Practical Approach, E. J. Robertson, ed. (IRL, Oxford, 1987), pp. 113-152]. A chimeric embryo can then be implanted into a suitable pseudopregnant female foster animal and the embryo brought to term to create a “knock out” animal. Progeny harboring the homologously recombined DNA in their germ cells can be identified by standard techniques and used to breed animals in which all cells of the animal contain the homologously recombined DNA. Knockout animals can be characterized for instance, for their ability to defend against certain pathological conditions and for their development of pathological conditions due to absence of the polypeptide.

[2684] I. ImmunoAdjuvant Therapy

[2685] In one embodiment, the immunostimulating compounds of the invention can be used in immunoadjuvant therapy for the treatment of tumors (cancer). It is now well established that T cells recognize human tumor specific antigens. One group of tumor antigens, encoded by the MAGE, BAGE and GAGE families of genes, are silent in all adult normal tissues, but are expressed in significant amounts in tumors, such as melanomas, lung tumors, head and neck tumors, and bladder carcinomas. DeSmet, C. et al., (1996) Proc. Natl. Acad. Sci. USA, 93:7149. It has been shown that costimulation of T cells induces tumor regression and an antitumor response both in vitro and in vivo. Melero, I. et al., Nature Medicine (1997) 3:682; Kwon, E. D. et al., Proc. Natl. Acad. Sci. USA (1997) 94: 8099; Lynch, D. H. et al, Nature Medicine (1997) 3:625; Finn, O. J. and Lotze, M. T., J. Immunol. (1998) 21:114. The stimulatory compounds of the invention can be administered as adjuvants, alone or together with a growth regulating agent, cytotoxic agent or chemotherapeutic agent, to stimulate T cell proliferation/activation and an antitumor response to tumor antigens. The growth regulating, cytotoxic, or chemotherapeutic agent may be administered in conventional amounts using known administration regimes. Immunostimulating activity by the compounds of the invention allows reduced amounts of the growth regulating, cytotoxic, or chemotherapeutic agents thereby potentially lowering the toxicity to the patient.

[2686] J. Screening Assays for Drug Candidates

[2687] Screening assays for drug candidates are designed to identify compounds that bind to or complex with the polypeptides encoded by the genes identified herein or a biologically active fragment thereof, or otherwise interfere with the interaction of the encoded polypeptides with other cellular proteins. Such screening assays will include assays amenable to high-throughput screening of chemical libraries, making them particularly suitable for identifying small molecule drug candidates. Small molecules contemplated include synthetic organic or inorganic compounds, including peptides, preferably soluble peptides, (poly)peptide-immunoglobulin fusions, and, in particular, antibodies including, without limitation, poly- and monoclonal antibodies and antibody fragments, single-chain antibodies, anti-idiotypic antibodies, and chimeric or humanized versions of such antibodies or fragments, as well as human antibodies and antibody fragments. The assays can be performed in a variety of formats, including protein-protein binding assays, biochemical screening assays, immunoassays and cell based assays, which are well characterized in the art. All assays are common in that they call for contacting the drug candidate with a polypeptide encoded by a nucleic acid identified herein under conditions and for a time sufficient to allow these two components to interact.

[2688] In binding assays, the interaction is binding and the complex formed can be isolated or detected in the reaction mixture. In a particular embodiment, the polypeptide encoded by the gene identified herein or the drug candidate is immobilized on a solid phase, e.g., on a microtiter plate, by covalent or non-covalent attachments. Non-covalent attachment generally is accomplished by coating the solid surface with a solution of the polypeptide and drying. Alternatively, an immobilized antibody, e.g., a monoclonal antibody, specific for the polypeptide to be immobilized can be used to anchor it to a solid surface. The assay is performed by adding the non-immobilized component, which may be labeled by a detectable label, to the immobilized component, e.g., the coated surface containing the anchored component. When the reaction is complete, the non-reacted components are removed, e.g., by washing, and complexes anchored on the solid surface are detected. When the originally non-immobilized component carries a detectable label, the detection of label immobilized on the surface indicates that complexing occurred. Where the originally non-immobilized component does not carry a label, complexing can be detected, for example, by using a labelled antibody specifically binding the immobilized complex.

[2689] If the candidate compound interacts with but does not bind to a particular protein encoded by a gene identified herein, its interaction with that protein can be assayed by methods well known for detecting protein-protein interactions. Such assays include traditional approaches, such as, cross-linking, co-immunoprecipitation, and co-purification through gradients or chromatographic columns. In addition, protein-protein interactions can be monitored by using a yeast-based genetic system described by Fields and co-workers [Fields and Song, Nature (London) 340, 245-246 (1989); Chien et al., Proc. Natl. Acad. Sci. USA 88, 9578-9582 (1991)] as disclosed by Chevray and Nathans, Proc. Natl. Acad. Sci. USA 89, 5789-5793 (1991). Many transcriptional activators, such as yeast GAL4, consist of two physically discrete modular domains, one acting as the DNA-binding domain, while the other one functioning as the transcription activation domain. The yeast expression system described in the foregoing publications (generally referred to as the “two-hybrid system”) takes advantage of this property, and employs two hybrid proteins, one in which the target protein is fused to the DNA-binding domain of GAL4, and another, in which candidate activating proteins are fused to the activation domain. The expression of a GAL1-lacZ reporter gene under control of a GAL4-activated promoter depends on reconstitution of GAL4 activity via protein-protein interaction. Colonies containing interacting polypeptides are detected with a chromogenic substrate for β-galactosidase. A complete kit (MATCHMAKER™) for identifying protein-protein interactions between two specific proteins using the two-hybrid technique is commercially available from Clontech. This system can also be extended to map protein domains involved in specific protein interactions as well as to pinpoint amino acid residues that are crucial for these interactions.

[2690] In order to find compounds that interfere with the interaction of a gene identified herein and other intra- or extracellular components can be tested, a reaction mixture is usually prepared containing the product of the gene and the intra- or extracellular component under conditions and for a time allowing for the interaction and binding of the two products. To test the ability of a test compound to inhibit binding, the reaction is run in the absence and in the presence of the test compound. In addition, a placebo may be added to a third reaction mixture, to serve as positive control. The binding (complex formation) between the test compound and the intra- or extracellular component present in the mixture is monitored as described above. The formation of a complex in the control reaction(s) but not in the reaction mixture containing the test compound indicates that the test compound interferes with the interaction of the test compound and its reaction partner.

[2691] K. Compositions and Methods for the Treatment of Psoriasis

[2692] The compositions useful in the treatment of psoriasis include, without limitation, proteins, antibodies, small organic molecules, peptides, phosphopeptides, antisense and ribozyme molecules, triple helix molecules, etc. that inhibit immune function, for example, T cell proliferation/activation, lymphokine release, or immune cell infiltration.

[2693] For example, antisense RNA and RNA molecules act to directly block the translation of mRNA by hybridizing to targeted mRNA and preventing protein translation. When antisense DNA is used, oligodeoxyribonucleotides derived from the translation initiation site, e.g., between about −10 and +10 positions of the target gene nucleotide sequence, are preferred.

[2694] Ribozymes are enzymatic RNA molecules capable of catalyzing the specific cleavage of RNA. Ribozymes act by sequence-specific hybridization to the complementary target RNA, followed by endonucleolytic cleavage. Specific ribozyme cleavage sites within a potential RNA target can be identified by known techniques. For further details see, e.g., Rossi, Current Biology 4, 469-471 (1994), and PCT publication No. WO 97/33551 (published Sep. 18, 1997).

[2695] Nucleic acid molecules in triple helix formation used to inhibit transcription should be single-stranded and composed of deoxynucleotides. The base composition of these oligonucleotides is designed such that it promotes triple helix formation via Hoogsteen base pairing rules, which generally require sizeable stretches of purines or pyrimidines on one strand of a duplex. For further details see, e.g., PCT publication No. WO 97/33551, supra.

[2696] These molecules can be identified by any or any combination of the screening assays discussed above and/or by any other screening techniques well known for those skilled in the art.

[2697] L. Anti-PRO Antibodies

[2698] The present invention further provides anti-PRO antibodies. Exemplary antibodies include polyclonal, monoclonal, humanized, bispecific, and heteroconjugate antibodies.

[2699] 1. Polyclonal Antibodies

[2700] The anti-PRO antibodies may comprise polyclonal antibodies. Methods of preparing polyclonal antibodies are known to the skilled artisan. Polyclonal antibodies can be raised in a mammal, for example, by one or more injections of an immunizing agent and, if desired, an adjuvant. Typically, the immunizing agent and/or adjuvant will be injected in the mammal by multiple subcutaneous or intraperitoneal injections. The immunizing agent may include the PRO polypeptide or a fusion protein thereof. It may be useful to conjugate the immunizing agent to a protein known to be immunogenic in the mammal being immunized. Examples of such immunogenic proteins include but are not limited to keyhole limpet hemocyanin, serum albumin, bovine thyroglobulin, and soybean trypsin inhibitor. Examples of adjuvants which may be employed include Freund's complete adjuvant and MPL-TDM adjuvant (monophosphoryl Lipid A, synthetic trehalose dicorynomycolate). The immunization protocol may be selected by one skilled in the art without undue experimentation.

[2701] 2. Monoclonal Antibodies

[2702] The anti-PRO antibodies may, alternatively, be monoclonal antibodies. Monoclonal antibodies may be prepared using hybridoma methods, such as those described by Kohler and Milstein, Nature, 256:495 (1975). In a hybridoma method, a mouse, hamster, or other appropriate host animal, is typically immunized with an immunizing agent to elicit lymphocytes that produce or are capable of producing antibodies that will specifically bind to the immunizing agent. Alternatively, the lymphocytes may be immunized in vitro.

[2703] The immunizing agent will typically include the PRO polypeptide or a fusion protein thereof. Generally, either peripheral blood lymphocytes (“PBLs”) are used if cells of human origin are desired, or spleen cells or lymph node cells are used if non-human mammalian sources are desired. The lymphocytes are then fused with an immortalized cell line using a suitable fusing agent, such as polyethylene glycol, to form a hybridoma cell [Goding, Monoclonal Antibodies: Principles and Practice, Academic Press, (1986) pp. 59-103]. Immortalized cell lines are usually transformed mammalian cells, particularly myeloma cells of rodent, bovine and human origin. Usually, rat or mouse myeloma cell lines are employed. The hybridoma cells may be cultured in a suitable culture medium that preferably contains one or more substances that inhibit the growth or survival of the unfused, immortalized cells. For example, if the parental cells lack the enzyme hypoxanthine guanine phosphoribosyl transferase (HGPRT or HPRT), the culture medium for the hybridomas typically will include hypoxanthine, aminopterin, and thymidine (“HAT medium”), which substances prevent the growth of HGPRT-deficient cells.

[2704] Preferred immortalized cell lines are those that fuse efficiently, support stable high level expression of antibody by the selected antibody-producing cells, and are sensitive to a medium such as HAT medium. More preferred immortalized cell lines are murine myeloma lines, which can be obtained, for instance, from the Salk Institute Cell Distribution Center, San Diego, Calif. and the American Type Culture Collection, Manassas, Va. Human myeloma and mouse-human heteromyeloma cell lines also have been described for the production of human monoclonal antibodies [Kozbor, J. Immunol., 133:3001 (1984); Brodeur et al., Monoclonal Antibody Production Techniques and Applications, Marcel Dekker, Inc., New York, (1987) pp. 51-63].

[2705] The culture medium in which the hybridoma cells are cultured can then be assayed for the presence of monoclonal antibodies directed against PRO. Preferably, the binding specificity of monoclonal antibodies produced by the hybridoma cells is determined by immunoprecipitation or by an in vitro binding assay, such as radioimmunoassay (RIA) or enzyme-linked immunoabsorbent assay (ELISA). Such techniques and assays are known in the art. The binding affinity of the monoclonal antibody can, for example, be determined by the Scatchard analysis of Munson and Pollard, Anal. Biochem., 107:220 (1980).

[2706] After the desired hybridoma cells are identified, the clones may be subcloned by limiting dilution procedures and grown by standard methods [Goding, supra]. Suitable culture media for this purpose include, for example, Dulbecco's Modified Eagle's Medium and RPMI-1640 medium. Alternatively, the hybridoma cells may be grown in vivo as ascites in a mammal.

[2707] The monoclonal antibodies secreted by the subclones may be isolated or purified from the culture medium or ascites fluid by conventional immunoglobulin purification procedures such as, for example, protein A-Sepharose, hydroxylapatite chromatography, gel electrophoresis, dialysis, or affinity chromatography.

[2708] The monoclonal antibodies may also be made by recombinant DNA methods, such as those described in U.S. Pat. No. 4,816,567. DNA encoding the monoclonal antibodies of the invention can be readily isolated and sequenced using conventional procedures (e.g., by using oligonucleotide probes that are capable of binding specifically to genes encoding the heavy and light chains of murine antibodies). The hybridoma cells of the invention serve as a preferred source of such DNA. Once isolated, the DNA may be placed into expression vectors, which are then transfected into host cells such as simian COS cells, Chinese hamster ovary (CHO) cells, or myeloma cells that do not otherwise produce immunoglobulin protein, to obtain the synthesis of monoclonal antibodies in the recombinant host cells. The DNA also may be modified, for example, by substituting the coding sequence for human heavy and light chain constant domains in place of the homologous murine sequences [U.S. Pat. No. 4,816,567; Morrison et al., supra] or by covalently joining to the immunoglobulin coding sequence all or part of the coding sequence for a non-immunoglobulin polypeptide. Such a non-immunoglobulin polypeptide can be substituted for the constant domains of an antibody of the invention, or can be substituted for the variable domains of one antigen-combining site of an antibody of the invention to create a chimeric bivalent antibody.

[2709] The antibodies may be monovalent antibodies. Methods for preparing monovalent antibodies are well known in the art For example, one method involves recombinant expression of immunoglobulin light chain and modified heavy chain. The heavy chain is truncated generally at any point in the Fc region so as to prevent heavy chain crosslinking. Alternatively, the relevant cysteine residues are substituted with another amino acid residue or are deleted so as to prevent crosslinking.

[2710] In vitro methods are also suitable for preparing monovalent antibodies. Digestion of antibodies to produce fragments thereof, particularly, Fab fragments, can be accomplished using routine techniques known in the art.

[2711] 3. Human and Humanized Antibodies

[2712] The anti-PRO antibodies of the invention may further comprise humanized antibodies or human antibodies. Humanized forms of non-human (e.g., murine) antibodies are chimeric immunoglobulins, immunoglobulin chains or fragments thereof (such as Fv, Fab, Fab, F(ab)₂ or other antigen-binding subsequences of antibodies) which contain minimal sequence derived from non-human immunoglobulin. Humanized antibodies include human immunoglobulins (recipient antibody) in which residues from a complementary determining region (CDR) of the recipient are replaced by residues from a CDR of a non-human species (donor antibody) such as mouse, rat or rabbit having the desired specificity, affinity and capacity. In some instances, Fv framework residues of the human immunoglobulin are replaced by corresponding non-human residues. Humanized antibodies may also comprise residues which are found neither in the recipient antibody nor in the imported CDR or framework sequences. In general, the humanized antibody will comprise substantially all of at least one, and typically two, variable domains, in which all or substantially all of the CDR regions correspond to those of a non-human immunoglobulin and all or substantially all of the FR regions are those of a human immunoglobulin consensus sequence. The humanized antibody optimally also will comprise at least a portion of an immunoglobulin constant region (Fc), typically that of a human immunoglobulin [Jones et al., Nature, 321:522-525 (1986); Riechmann et al., Nature, 332:323-329 (1988); and Presta, Curr. Op. Struct. Biol., 2:593-596 (1992)].

[2713] Methods for humanizing non-human antibodies are well known in the art. Generally, a humanized antibody has one or more amino acid residues introduced into it from a source which is non-human. These non-human amino acid residues are often referred to as “import” residues, which are typically taken from an “import” variable domain. Humanization can be essentially performed following the method of Winter and co-workers [Jones et al., Nature, 321:522-525 (1986); Riechmann et al., Nature, 332:323-327 (1988); Verhoeyen et al., Science, 239:1534-1536 (1988)], by substituting rodent CDRs or CDR sequences for the corresponding sequences of a human antibody. Accordingly, such “humanized” antibodies are chimeric antibodies (U.S. Pat. No. 4,816,567), wherein substantially less than an intact human variable domain has been substituted by the corresponding sequence from a non-human species. In practice, humanized antibodies are typically human antibodies in which some CDR residues and possibly some FR residues are substituted by residues from analogous sites in rodent antibodies.

[2714] Human antibodies can also be produced using various techniques known in the art, including phage display libraries [Hoogenboom and Winter, J. Mol. Biol. 227:381 (1991); Marks et al., J. Mol. Biol., 222:581 (1991)]. The techniques of Cole et al. and Boerner et al. are also available for the preparation of human monoclonal antibodies (Cole et al., Monoclonal Antibodies and Cancer Therapy, Alan R. Liss, p. 77 (1985) and Boerner et al., J. Immunol., 147(1):86-95 (1991)]. Similarly, human antibodies can be made by introducing of human immunoglobulin loci into transgenic animals, e.g., mice in which the endogenous immunoglobulin genes have been partially or completely inactivated. Upon challenge, human antibody production is observed, which closely resembles that seen in humans in all respects, including gene rearrangement, assembly, and antibody repertoire. This approach is described, for example, in U.S. Pat. Nos. 5,545,807; 5,545,806; 5,569,825; 5,625,126; 5,633,425; 5,661,016, and in the following scientific publications: Marks et al., Bio/Technology 10, 779-783 (1992); Lonberg et al., Nature 368 856-859 (1994); Morrison, Nature 368, 812-13 (1994); Fishwild et al., Nature Biotechnology 14, 845-51 (1996); Neuberger, Nature Biotechnology 14, 826 (1996); Lonberg and Huszar, Intern. Rev. Immunol. 13 65-93 (1995).

[2715] The antibodies may also be affinity matured using known selection and/or mutagenesis methods as described above. Preferred affinity matured antibodies have an affinity which is five times, more preferably 10 times, even more preferably 20 or 30 times greater than the starting antibody (generally murine, humanized or human) from which the matured antibody is prepared.

[2716] 4. Bispecific Antibodies

[2717] Bispecific antibodies are monoclonal, preferably human or humanized, antibodies that have binding specificities for at least two different antigens. In the present case, one of the binding specificities is for the PRO, the other one is for any other antigen, and preferably for a cell-surface protein or receptor or receptor subunit.

[2718] Methods for making bispecific antibodies are known in the art. Traditionally, the recombinant production of bispecific antibodies is based on the co-expression of two immunoglobulin heavy-chain/light-chain pairs, where the two heavy chains have different specificities [Milstein and Cuello, Nature, 305:537-539 (1983)]. Because of the random assortment of immunoglobulin heavy and light chains, these hybridomas (quadromas) produce a potential mixture of ten different antibody molecules, of which only one has the correct bispecific structure. The purification of the correct molecule is usually accomplished by affinity chromatography steps. Similar procedures are disclosed in WO 93/08829, published 13 May 1993, and in Traunecker et al., EMBO J., 10:3655-3659 (1991).

[2719] Antibody variable domains with the desired binding specificities (antibody-antigen combining sites) can be fused to immunoglobulin constant domain sequences. The fusion preferably is with an immunoglobulin heavy-chain constant domain, comprising at least part of the hinge, CH2, and CH3 regions. It is preferred to have the first heavy-chain constant region (CH1) containing the site necessary for light-chain binding present in at least one of the fusions. DNAs encoding the immunoglobulin heavy-chain fusions and, if desired, the immunoglobulin light chain, are inserted into separate expression vectors, and are co-transfected into a suitable host organism. For further details of generating bispecific antibodies see, for example, Suresh et al., Methods in Enzymology, 121:210 (1986).

[2720] According to another approach described in WO 96/27011, the interface between a pair of antibody molecules can be engineered to maximize the percentage of heterodimers which are recovered from recombinant cell culture. The preferred interface comprises at least a part of the CH3 region of an antibody constant domain. In this method, one or more small amino acid side chains from the interface of the first antibody molecule are replaced with larger side chains (e.g. tyrosine or tryptophan). Compensatory “cavities” of identical or similar size to the large side chain(s) are created on the interface of the second antibody molecule by replacing large amino acid side chains with smaller ones (e.g. alanine or threonine). This provides a mechanism for increasing the yield of the heterodimer over other unwanted end-products such as homodimers.

[2721] Bispecific antibodies can be prepared as full length antibodies or antibody fragments (e.g. F(ab′)₂ bispecific antibodies). Techniques for generating bispecific antibodies from antibody fragments have been described in the literature. For example, bispecific antibodies can be prepared can be prepared using chemical linkage. Brennan et al., Science 229:81 (1985) describe a procedure wherein intact antibodies are proteolytically cleaved to generate F(ab′)₂ fragments. These fragments are reduced in the presence of the dithiol complexing agent sodium arsenite to stabilize vicinal dithiols and prevent intermolecular disulfide formation. The Fab′ fragments generated are then converted to thionitrobenzoate (TNB) derivatives. One of the Fab′-TNB derivatives is then reconverted to the Fab′-thiol by reduction with mercaptoethylamine and is mixed with an equimolar amount of the other Fab′-TNB derivative to form the bispecific antibody. The bispecific antibodies produced can be used as agents for the selective immobilization of enzymes.

[2722] Fab′ fragments may be directly recovered from E. coli and chemically coupled to form bispecific antibodies. Shalaby et al., J. Exp. Med. 175:217-225 (1992) describe the production of a fully humanized bispecific antibody F(ab′)₂ molecule. Each Fab′ fragment was separately secreted from E. coli and subjected to directed chemical coupling in vitro to form the bispecific antibody. The bispecific antibody thus formed was able to bind to cells overexpressing the ErbB2 receptor and normal human T cells, as well as trigger the lytic activity of human cytotoxic lymphocytes against human breast tumor targets.

[2723] Various technique for making and isolating bispecific antibody fragments directly from recombinant cell culture have also been described. For example, bispecific antibodies have been produced using leucine zippers. Kostelny et al., J. Immunol. 148(5):1547-1553 (1992). The leucine zipper peptides from the Fos and Jun proteins were linked to the Fab′ portions of two different antibodies by gene fusion. The antibody homodimers were reduced at the hinge region to form monomers and then re-oxidized to form the antibody heterodimers. This method can also be utilized for the production of antibody homodimers. The “diabody” technology described by Hollinger et al., Proc. Natl. Acad. Sci. USA 90:6444-6448 (1993) has provided an alternative mechanism for making bispecific antibody fragments. The fragments comprise a heavy-chain variable domain (V_{H}) connected to a light-chain variable domain (V_{L}) by a linker which is too short to allow pairing between the two domains on the same chain. Accordingly, the V_{H} and V_{L} domains of one fragment are forced to pair with the complementary V_{L} and V_{H} domains of another fragment, thereby forming two antigen-binding sites. Another strategy for making bispecific antibody fragments by the use of single-chain Fv (sFv) dimers has also been reported. See, Gruber et al., J. Immunol. 152:5368 (1994). Antibodies with more than two valencies are contemplated. For example, trispecific antibodies can be prepared. Tutt et al., J. Immunol. 147:60 (1991).

[2724] Exemplary bispecific antibodies may bind to two different epitopes on a given PRO polypeptide herein. Alternatively, an anti-PRO polypeptide arm may be combined with an arm which binds to a triggering molecule on a leukocyte such as a T-cell receptor molecule (e.g. CD2, CD3, CD28, or B7), or Fc receptors for IgG (FcγR), such as FcγRI (CD64), FcγRII (CD32) and FcγRIII (CD16) so as to focus cellular defense mechanisms to the cell expressing the particular PRO polypeptide. Bispecific antibodies may also be used to localize cytotoxic agents to cells which express a particular PRO polypeptide. These antibodies possess a PRO-binding arm and an arm which binds a cytotoxic agent or a radionuclide chelator, such as EOTUBE, DPTA, DOTA, or TETA. Another bispecific antibody of interest binds the PRO polypeptide and further binds tissue factor (TF).

[2725] 5. Heteroconjugate Antibodies

[2726] Heteroconjugate antibodies are also within the scope of the present invention. Heteroconjugate antibodies are composed of two covalently joined antibodies. Such antibodies have, for example, been proposed to target immune system cells to unwanted cells [U.S. Pat. No. 4,676,980], and for treatment of HIV infection [WO 91/00360; WO 92/200373; EP 03089]. It is contemplated that the antibodies may be prepared in vitro using known methods in synthetic protein chemistry, including those involving crosslinking agents. For example, immunotoxins may be constructed using a disulfide exchange reaction or by forming a thioether bond. Examples of suitable reagents for this purpose include iminothiolate and methyl-4-mercaptobutyrimidate and those disclosed, for example, in U.S. Pat. No. 4,676,980.

[2727] 6. Effector Function Engineering

[2728] It may be desirable to modify the antibody of the invention with respect to effector function, so as to enhance, e.g., the effectiveness of the antibody in treating cancer. For example, cysteine residue(s) may be introduced into the Fc region, thereby allowing interchain disulfide bond formation in this region. The homodimeric antibody thus generated may have improved internalization capability and/or increased complement-mediated cell killing and antibody-dependent cellular cytotoxicity (ADCC). See Caron et al., J. Exp Med., 176: 1191-1195 (1992) and Shopes, J. Immunol., 148: 2918-2922 (1992). Homodimeric antibodies with enhanced anti-tumor activity may also be prepared using heterobifunctional cross-linkers as described in Wolff et al. Cancer Research, 53: 2560-2565 (1993). Alternatively, an antibody can be engineered that has dual Fc regions and may thereby have enhanced complement lysis and ADCC capabilities. See Stevenson et al., Anti-Cancer Drug Design. 3: 219-230 (1989).

[2729] 7. Immunoconjugates

[2730] The invention also pertains to immunoconjugates comprising an antibody conjugated to a cytotoxic agent such as a chemotherapeutic agent, toxin (e.g., an enzymatically active toxin of bacterial, fungal, plant, or animal origin, or fragments thereof), or a radioactive isotope (i.e., a radioconjugate).

[2731] Chemotherapeutic agents useful in the generation of such immunoconjugates have been described above. Enzymatically active toxins and fragments thereof that can be used include diphtheria A chain, nonbinding active fragments of diphtheria toxin, exotoxin A chain (from Pseudomonas aeruginosa), ricin A chain, abrin A chain, modeccin A chain, alpha-sarcin, Aleurites fordii proteins, dianthin proteins, Phytolaca americana proteins (PAPI, PAPII, and PAP-S), momordica charantia inhibitor, curcin, crotin, sapaonaria officinalis inhibitor, gelonin, mitogellin, restrictocin, phenomycin, enomycin, and the tricothecenes. A variety of radionuclides are available for the production of radioconjugated antibodies. Examples include ²¹²Bi, ¹³¹I, ¹³¹In, ⁹⁰Y, and ¹⁸⁶Re.

[2732] Conjugates of the antibody and cytotoxic agent are made using a variety of bifunctional protein-coupling agents such as N-succinimidyl-3-(2-pyridyldithiol) propionate (SPDP), iminothiolane (IT), bifunctional derivatives of imidoesters (such as dimethyl adipimidate HCL), active esters (such as disuccinimidyl suberate), aldehydes (such as glutareldehyde), bis-azido compounds (such as bis(p-azidobenzoyl)hexanediamine), bis-diazonium derivatives (such as bis-(p-diazoniumbenzoyl)ethylenediamine), diisocyanates (such as tolyene 2,6-diisocyanate), and bis-active fluorine compounds (such as 1,5-difluoro-2,4-dinitrobenzene). For example, a ricin immunotoxin can be prepared as described in Vitetta et al., Science, 238: 1098 (1987). Carbon-14-labeled 1-isothiocyanatobenzyl-3-methyldiethylene triaminepentaacetic acid (MX-DTPA) is an exemplary chelating agent for conjugation of radionucleotide to the antibody. See WO94/11026.

[2733] In another embodiment, the antibody may be conjugated to a “receptor” (such streptavidin) for utilization in tumor pretargeting wherein the antibody-receptor conjugate is administered to the patient, followed by removal of unbound conjugate from the circulation using a clearing agent and then administration of a “ligand” (e.g., avidin) that is conjugated to a cytotoxic agent (e.g., a radionucleotide).

[2734] 8. Immunoliposomes

[2735] The antibodies disclosed herein may also be formulated as immunoliposomes. Liposomes containing the antibody are prepared by methods known in the art, such as described in Epstein et al., Proc. Natl. Acad. Sci. USA, 82: 3688 (1985); Hwang et al., Proc. Natl. Acad. Sci. USA, 77: 4030 (1980); and U.S. Pat. Nos. 4,485,045 and 4,544,545. Liposomes with enhanced circulation time are disclosed in U.S. Pat. No. 5,013,556.

[2736] Particularly useful liposomes can be generated by the reverse-phase evaporation method with a lipid composition comprising phosphatidylcholine, cholesterol, and PEG-derivatized phosphatidylethanolamine (PEG-PE). Liposomes are extruded through filters of defined pore size to yield liposomes with the desired diameter. Fab′ fragments of the antibody of the present invention can be conjugated to the liposomes as described in Martin et al., J. Biol. Chem., 257: 286-288 (1982) via a disulfide-interchange reaction. A chemotherapeutic agent (such as Doxorubicin) is optionally contained within the liposome. See Gabizon et al., J. National Cancer Inst., 81(19): 1484 (1989).

[2737] M. Pharmaceutical Compositions

[2738] The active PRO molecules of the invention (e.g., PRO polypeptides, anti-PRO antibodies, and/or variants of each) as well as other molecules identified by the screening assays disclosed above, can be administered for the treatment of psoraisis, in the form of pharmaceutical compositions.

[2739] Therapeutic formulations of the active PRO molecule, preferably a polypeptide or antibody of the invention, are prepared for storage by mixing the active molecule having the desired degree of purity with optional pharmaceutically acceptable carriers, excipients or stabilizers (Remington's Pharmaceutical Sciences 16th edition, Osol, A. Ed. [1980]), in the form of lyophilized formulations or aqueous solutions. Acceptable carriers, excipients, or stabilizers are nontoxic to recipients at the dosages and concentrations employed, and include buffers such as phosphate, citrate, and other organic acids; antioxidants including ascorbic acid and methionine; preservatives (such as octadecyldimethylbenzyl ammonium chloride; hexamethonium chloride; benzalkonium chloride, benzethonium chloride; phenol, butyl or benzyl alcohol; alkyl parabens such as methyl or propyl paraben; catechol; resorcinol; cyclohexanol; 3-pentanol; and m-cresol); low molecular weight (less than about 10 residues) polypeptides; proteins, such as serum albumin, gelatin, or immunoglobulins; hydrophilic polymers such as polyvinylpyrrolidone; amino acids such as glycine, glutamine, asparagine, histidine, arginine, or lysine; monosaccharides, disaccharides, and other carbohydrates including glucose, mannose, or dextrins; chelating agents such as EDTA; sugars such as sucrose, mannitol, trehalose or sorbitol; salt-forming counter-ions such as sodium; metal complexes (e.g., Zn-protein complexes); and/or non-ionic surfactants such as TWEEN™, PLURONICS™ or polyethylene glycol (PEG).

[2740] Compounds identified by the screening assays disclosed herein can be formulated in an analogous manner, using standard techniques well known in the art.

[2741] Lipofections or liposomes can also be used to deliver the PRO molecule into cells. Where antibody fragments are used, the smallest inhibitory fragment which specifically binds to the binding domain of the target protein is preferred. For example, based upon the variable region sequences of an antibody, peptide molecules can be designed which retain the ability to bind the target protein sequence. Such peptides can be synthesized chemically and/or produced by recombinant DNA technology (see, e.g., Marasco et al., Proc. Natl. Acad. Sci. USA 90, 7889-7893 [1993]).

[2742] The formulation herein may also contain more than one active compound as necessary for the particular indication being treated, preferably those with complementary activities that do not adversely affect each other. Alternatively, or in addition, the composition may comprise a cytotoxic agent, cytokine or growth inhibitory agent. Such molecules are suitably present in combination in amounts that are effective for the purpose intended.

[2743] The active PRO molecules may also be entrapped in microcapsules prepared, for example, by coacervation techniques or by interfacial polymerization, for example, hydroxymethylcellulose or gelatin-microcapsules and poly-(methylmethacylate) microcapsules, respectively, in colloidal drug delivery systems (for example, liposomes, albumin microspheres, microemulsions, nano-particles and nanocapsules) or in macroemulsions. Such techniques are disclosed in Remington's Pharmaceutical Sciences 16th edition, Osol, A. Ed. (1980).

[2744] The formulations to be used for in vivo administration must be sterile. This is readily accomplished by filtration through sterile filtration membranes.

[2745] Sustained-release preparations of the PRO molecules may be prepared. Suitable examples of sustained-release preparations include semipermeable matrices of solid hydrophobic polymers containing the antibody, which matrices are in the form of shaped articles, e.g., films, or microcapsules. Examples of sustained-release matrices include polyesters, hydrogels (for example, poly(2-hydroxyethyl-methacrylate), or poly(vinylalcohol)), polylactides (U.S. Pat. No. 3,773,919), copolymers of L-glutamic acid and γ-ethyl-L-glutamate, non-degradable ethylene-vinyl acetate, degradable lactic acid-glycolic acid copolymers such as the LUPRON DEPOT™ (injectable microspheres composed of lactic acid-glycolic acid copolymer and leuprolide acetate), and poly-D-(−)-3-hydroxybutyric acid. While polymers such as ethylene-vinyl acetate and lactic acid-glycolic acid enable release of molecules for over 100 days, certain hydrogels release proteins for shorter time periods. When encapsulated antibodies remain in the body for a long time, they may denature or aggregate as a result of exposure to moisture at 37° C., resulting in a loss of biological activity and possible changes in immunogenicity. Rational strategies can be devised for stabilization depending on the mechanism involved. For example, if the aggregation mechanism is discovered to be intermolecular S—S bond formation through thio-disulfide interchange, stabilization may be achieved by modifying sulfhydryl residues, lyophilizing from acidic solutions, controlling moisture content, using appropriate additives, and developing specific polymer matrix compositions.

[2746] N. Methods of Treatment

[2747] It is contemplated that the polypeptides, antibodies and other active compounds of the present invention may be used to treat psoriasis and related conditions, such as T cell mediated diseases, including those characterized by infiltration of inflammatory cells into a tissue.

[2748] Spondyloarthropathies are a group of disorders with some common clinical features and the common association with the expression of HLA-B27 gene product. The disorders include: ankylosing sponylitis, Reiter's syndrome (reactive arthritis), arthritis associated with inflammatory bowel disease, spondylitis associated with psoriasis, juvenile onset spondyloarthropathy and undifferentiated spondyloarthropathy. Distinguishing features include sacroileitis with or without spondylitis; inflammatory asymmetric arthritis; association with HLA-B27 (a serologically defined allele of the HLA-B locus of class I MHC); ocular inflammation, and absence of autoantibodies associated with other rheumatoid disease. The cell most implicated as key to induction of the disease is the CD8+ T lymphocyte, a cell which targets antigen presented by class I MHC molecules. CD8+ T cells may react against the class I MHC allele HLA-B27 as if it were a foreign peptide expressed by MHC class I molecules. It has been hypothesized that an epitope of HLA-B27 may mimic a bacterial or other microbial antigenic epitope and thus induce a CD8+ T cells response.

[2749] Systemic sclerosis (scleroderma) has an unknown etiology. A hallmark of the disease is induration of the skin; likely this is induced by an active inflammatory process. Scleroderma can be localized or systemic; vascular lesions are common and endothelial cell injury in the microvasculature is an early and important event in the development of systemic sclerosis; the vascular injury may be immune mediated. An immunologic basis is implied by the presence of mononuclear cell infiltrates in the cutaneous lesions and the presence of anti-nuclear antibodies in many patients. ICAM-1 is often upregulated on the cell surface of fibroblasts in skin lesions suggesting that T cell interaction with these cells may have a role in the pathogenesis of the disease. Other organs involved include: the gastrointestinal tract: smooth muscle atrophy and fibrosis resulting in abnormal peristalsis/motility; kidney: concentric subendothelial intimal proliferation affecting small arcuate and interlobular arteries with resultant reduced renal cortical blood flow, results in proteinuria, azotemia and hypertension; skeletal muscle: atrophy, interstitial fibrosis; inflammation; lung: interstitial pneumonitis and interstitial fibrosis; and heart: contraction band necrosis, scarring/fibrosis.

[2750] Autoimmune or Immune-mediated Skin Disease including Bullous Skin Diseases, Erythema Multiforme, and Contact Dermatitis are mediated by auto-antibodies, the genesis of which is T lymphocyte-dependent.

[2751] Psoriasis is proposed to be a T lymphocyte-mediated inflammatory disease. Lesions contain infiltrates of T lymphocytes, macrophages and antigen processing cells, and some neutrophils.

[2752] Transplantation associated diseases, including Graft rejection and Graft-Versus-Host-Disease (GVHD) are T lymphocyte-dependent; inhibition of T lymphocyte function is ameliorative.

[2753] The compounds of the present invention, e.g., polypeptides or antibodies, are administered to a mammal, preferably a human, in accord with known methods, such as intravenous administration as a bolus or by continuous infusion over a period of time, by intramuscular, intraperitoneal, intracerobrospinal, subcutaneous, intra-articular, intrasynovial, intrathecal, oral, topical, or inhalation (intranasal, intrapulmonary) routes. Intravenous or inhaled administration of polypeptides and antibodies is preferred.

[2754] In immunoadjuvant therapy, other therapeutic regimens, such administration of an anti-cancer agent, may be combined with the administration of the proteins, antibodies or compounds of the instant invention. For example, the patient to be treated with a the immunoadjuvant of the invention may also receive an anti-cancer agent (chemotherapeutic agent) or radiation therapy. Preparation and dosing schedules for such chemotherapeutic agents may be used according to manufacturers' instructions or as determined empirically by the skilled practitioner. Preparation and dosing schedules for such chemotherapy are also described in Chemotherapy Service Ed., M. C. Perry, Williams & Wilkins, Baltimore, Md. (1992). The chemotherapeutic agent may precede, or follow administration of the immunoadjuvant or may be given simultaneously therewith. Additionally, an anti-estrogen compound such as tamoxifen or an anti-progesterone such as onapristone (see, EP 616812) may be given in dosages known for such molecules.

[2755] It may be desirable to also administer antibodies against other immune disease associated or tumor associated antigens, such as antibodies which bind to CD20, CD11a, CD18, ErbB2, EGFR, ErbB3, ErbB4, or vascular endothelial factor (VEGF). Alternatively, or in addition, two or more antibodies binding the same or two or more different antigens disclosed herein may be coadministered to the patient. Sometimes, it may be beneficial to also administer one or more cytokines to the patient. In one embodiment, the PRO polypeptides are coadministered with a growth inhibitory agent. For example, the growth inhibitory agent may be administered first, followed by a PRO polypeptide. However, simultaneous administration or administration first is also contemplated. Suitable dosages for the growth inhibitory agent are those presently used and may be lowered due to the combined action (synergy) of the growth inhibitory agent and the PRO polypeptide.

[2756] For the treatment or reduction in the severity of immune related disease, the appropriate dosage of an a compound of the invention will depend on the type of disease to be treated, as defined above, the severity and course of the disease, whether the agent is administered for preventive or therapeutic purposes, previous therapy, the patient's clinical history and response to the compound, and the discretion of the attending physician. The compound is suitably administered to the patient at one time or over a series of treatments.

[2757] For example, depending on the type and severity of the disease, about 1 μg/kg to 15 mg/kg (e.g., 0.1-20 mg/kg) of polypeptide or antibody is an initial candidate dosage for administration to the patient, whether, for example, by one or more separate administrations, or by continuous infusion. A typical daily dosage might range from about 1 μg/kg to 100 mg/kg or more, depending on the factors mentioned above. For repeated administrations over several days or longer, depending on the condition, the treatment is sustained until a desired suppression of disease symptoms occurs. However, other dosage regimens may be useful. The progress of this therapy is easily monitored by conventional techniques and assays.

[2758] O. Articles of Manufacture

[2759] In another embodiment of the invention, an article of manufacture containing materials (e.g., comprising a PRO molecule) useful for the diagnosis or treatment of the disorders described above is provided. The article of manufacture comprises a container and an instruction. Suitable containers include, for example, bottles, vials, syringes, and test tubes. The containers may be formed from a variety of materials such as glass or plastic. The container holds a composition which is effective for diagnosing or treating the condition and may have a sterile access port (for example the container may be an intravenous solution bag or a vial having a stopper pierceable by a hypodermic injection needle). The active agent in the composition is usually a polypeptide or an antibody of the invention. An instruction or label on, or associated with, the container indicates that the composition is used for diagnosing or treating the condition of choice. The article of manufacture may further comprise a second container comprising a pharmaceutically-acceptable buffer, such as phosphate-buffered saline, Ringer's solution and dextrose solution. It may further include other materials desirable from a commercial and user standpoint, including other buffers, diluents, filters, needles, syringes, and package inserts with instructions for use.

[2760] P. Diagnosis and Prognosis of Immune Related Disease

[2761] Cell surface proteins, such as proteins which are overexpressed in psoriasis, are excellent targets for drug candidates or disease treatment. The same proteins along with secreted proteins encoded by the genes amplified in psoriasis find additional use in the diagnosis and prognosis of this disease. For example, antibodies directed against the protein products of genes amplified psoriasis, can be used as diagnostics or prognostics.

[2762] For example, antibodies, including antibody fragments, can be used to qualitatively or quantitatively detect the expression of proteins encoded by amplified or overexpressed genes (“marker gene products”). The antibody preferably is equipped with a detectable, e.g., fluorescent label, and binding can be monitored by light microscopy, flow cytometry, fluorimetry, or other techniques known in the art. These techniques are particularly suitable, if the overexpressed gene encodes a cell surface protein. Such binding assays are performed essentially as described above.

[2763] In situ detection of antibody binding to the marker gene products can be performed, for example, by immunofluorescence or immunoelectron microscopy. For this purpose, a histological specimen is removed from the patient, and a labeled antibody is applied to it, preferably by overlaying the antibody on a biological sample. This procedure also allows for determining the distribution of the marker gene product in the tissue examined. It will be apparent for those skilled in the art that a wide variety of histological methods are readily available for in situ detection.

[2764] The following examples are offered for illustrative purposes only, and are not intended to limit the scope of the present invention in any way.

[2765] All patent and literature references cited in the present specification are hereby incorporated by reference in their entirety.

### EXAMPLES

[2766] Commercially available reagents referred to in the examples were used according to manufacturer's instructions unless otherwise indicated. The source of those cells identified in the following examples, and throughout the specification, by ATCC accession numbers is the American Type Culture Collection, Manassas, Va.

### Example 1

### Microarray Analysis of PRO in Psoriasis

[2767] Skin biopsies from psoriatic patients and from healthy donors (henceforth, “normal skin”) were obtained. For each psoriatic patient, skin samples were taken from lesional and non-lesional sites, in order to identify disease specific genes which are differentially expressed in psoriatic tissue. All of the psoriatic skin samples were analyzed for Keratin 16 staining via immunohistochemistry and epidermal thickness. All samples were stored at −70° C. until ready for RNA isolation. The skin biopsies were homogenized in 600 μl of RLT buffer (+BME) and RNA was isolated using Qiagen™ Rneasy Mini columns (Qiagen) with on-column DNase treatment following the manufacturerís guidelines. Following RNA isolation, RNA was quantitated using RiboGreen™ (Molecular Probes) following the manufacturer's guidelines and checked on agarose gels for integrity. The RNA yields ranged from 19 to 54 μg for psoriatic lesional skin, 7.7 to 24 μg for non-lesional matched control skin and 5.4 to 10 μg for normal skin. 4 μg of RNA was labeled for microarray analysis and samples were run on proprietary Genentech microarray and Affymetrics microarrays. Genes were compared whose expression was upregulated or downregulated in psoritic skin vs non-lesional skin, thus comparing expression profiles of non-lesional skin and psoritic skin from the same patient, and also comparing against normal skin biopsies of normal healthy donors as a further control. The conclusion of this experiment is that the nucleic acids and encoded proteins of FIGS. 1-2484 are differentially expressed in psoriasis lesional skin in comparison to matched non-lesional skin from psoriasis patients and normal skin taken from subjects without psoriasis. The nucleic acids and encoded proteins of FIG. 13, FIG. 336, FIG. 393, FIG. 477, FIG. 513, FIG. 593, FIG. 853, FIG. 1004, FIG. 1283, FIG. 1730, FIG. 1861 and FIG. 2227 are significantly overexpressed in psoriasis lesional skin compared to matched non-lesional skin from psoriasis patients and normal skin taken from subjects without psoriasis.

### Example 2

### Use of PRO as a Hybridization Probe

[2768] The following method describes use of a nucleotide sequence encoding PRO as a hybridization probe.

[2769] DNA comprising the coding sequence of full-length or mature PRO as disclosed herein is employed as a probe to screen for homologous DNAs (such as those encoding naturally-occurring variants of PRO) in human tissue cDNA libraries or human tissue genomic libraries.

[2770] Hybridization and washing of filters containing either library DNAs is performed under the following high stringency conditions. Hybridization of radiolabeled PRO-derived probe to the filters is performed in a solution of 50% formamide, 5×SSC, 0.1% SDS, 0.1% sodium pyrophosphate, 50 mM sodium phosphate, pH 6.8, 2× Denhardt's solution, and 10% dextran sulfate at 42° C. for 20 hours. Washing of the filters is performed in an aqueous solution of 0.1×SSC and 0.1% SDS at 42° C.

[2771] DNAs having a desired sequence identity with the DNA encoding full-length native sequence PRO can then be identified using standard techniques known in the art.

### Example 3

### Expression of PRO in E. coli

[2772] This example illustrates preparation of an unglycosylated form of PRO by recombinant expression in E. coli.

[2773] The DNA sequence encoding PRO is initially amplified using selected PCR primers. The primers should contain restriction enzyme sites which correspond to the restriction enzyme sites on the selected expression vector. A variety of expression vectors may be employed. An example of a suitable vector is pBR322 (derived from E. coli; see Bolivar et al., Gene, 2:95 (1977)) which contains genes for ampicillin and tetracycline resistance. The vector is digested with restriction enzyme and dephosphorylated. The PCR amplified sequences are then ligated into the vector. The vector will preferably include sequences which encode for an antibiotic resistance gene, a trp promoter, a polyhis leader (including the first six STII codons, polyhis sequence, and enterokinase cleavage site), the PRO coding region, lambda transcriptional terminator, and an argU gene.

[2774] The ligation mixture is then used to transform a selected E. coli strain using the methods described in Sambrook et al., supra. Transformants are identified by their ability to grow on LB plates and antibiotic resistant colonies are then selected. Plasmid DNA can be isolated and confirmed by restriction analysis and DNA sequencing.

[2775] Selected clones can be grown overnight in liquid culture medium such as LB broth supplemented with antibiotics. The overnight culture may subsequently be used to inoculate a larger scale culture. The cells are then grown to a desired optical density, during which the expression promoter is turned on.

[2776] After culturing the cells for several more hours, the cells can be harvested by centrifugation. The cell pellet obtained by the centrifugation can be solubilized using various agents known in the art, and the solubilized PRO protein can then be purified using a metal chelating column under conditions that allow tight binding of the protein.

[2777] PRO may be expressed in E. coli in a poly-His tagged form, using the following procedure. The DNA encoding PRO is initially amplified using selected PCR primers. The primers will contain restriction enzyme sites which correspond to the restriction enzyme sites on the selected expression vector, and other useful sequences providing for efficient and reliable translation initiation, rapid purification on a metal chelation column, and proteolytic removal with enterokinase. The PCR-amplified, poly-His tagged sequences are then ligated into an expression vector, which is used to transform an E. coli host based on strain 52 (W3110 fuhA(tonA) Ion galE rpoHts(htpRts) clpP(lacIq). Transformants are first grown in LB containing 50 mg/ml carbenicillin at 30° C. with shaking until an O.D.600 of 3-5 is reached. Cultures are then diluted 50-100 fold into CRAP media (prepared by mixing 3.57 g (NH₄)₂SO₄, 0.71 g sodium citrate.2H2O, 1.07 g KCl, 5.36 g Difco yeast extract, 5.36 g Sheffield hycase SF in 500 mL water, as well as 110 mM MPOS, pH 7.3, 0.55% (w/v) glucose and 7 mM MgSO₄) and grown for approximately 20-30 hours at 30° C. with shaking. Samples are removed to verify expression by SDS-PAGE analysis, and the bulk culture is centrifuged to pellet the cells. Cell pellets are frozen until purification and refolding.

[2778] E. coli paste from 0.5 to 1 L fermentations (6-10 g pellets) is resuspended in 10 volumes (w/v) in 7 M guanidine, 20 mM Tris, pH 8 buffer. Solid sodium sulfite and sodium tetrathionate is added to make final concentrations of 0.1M and 0.02 M, respectively, and the solution is stirred overnight at 4° C. This step results in a denatured protein with all cysteine residues blocked by sulfitolization. The solution is centrifuged at 40,000 rpm in a Beckman Ultracentifuge for 30 min. The supernatant is diluted with 3-5 volumes of metal chelate column buffer (6 M guanidine, 20 mM Tris, pH 7.4) and filtered through 0.22 micron filters to clarify. The clarified extract is loaded onto a 5 ml Qiagen Ni-NTA metal chelate column equilibrated in the metal chelate column buffer. The column is washed with additional buffer containing 50 mM imidazole (Calbiochem, Utrol grade), pH 7.4. The protein is eluted with buffer containing 250 mM imidazole. Fractions containing the desired protein are pooled and stored at 4° C. Protein concentration is estimated by its absorbance at 280 nm using the calculated extinction coefficient based on its amino acid sequence.

[2779] The proteins are refolded by diluting the sample slowly into freshly prepared refolding buffer consisting of: 20 mM Tris, pH 8.6, 0.3 M NaCl, 2.5 M urea, 5 mM cysteine, 20 mM glycine and 1 mM EDTA. Refolding volumes are chosen so that the final protein concentration is between 50 to 100 micrograms/ml. The refolding solution is stirred gently at 4° C. for 12-36 hours. The refolding reaction is quenched by the addition of TFA to a final concentration of 0.4% (pH of approximately 3). Before further purification of the protein, the solution is filtered through a 0.22 micron filter and acetonitrile is added to 2-10% final concentration. The refolded protein is chromatographed on a Poros R1/H reversed phase column using a mobile buffer of 0.1% TFA with elution with a gradient of acetonitrile from 10 to 80%. Aliquots of fractions with A280 absorbance are analyzed on SDS polyacrylamide gels and fractions containing homogeneous refolded protein are pooled. Generally, the properly refolded species of most proteins are eluted at the lowest concentrations of acetonitrile since those species are the most compact with their hydrophobic interiors shielded from interaction with the reversed phase resin. Aggregated species are usually eluted at higher acetonitrile concentrations. In addition to resolving misfolded forms of proteins from the desired form, the reversed phase step also removes endotoxin from the samples.

[2780] Fractions containing the desired folded PRO polypeptide are pooled and the acetonitrile removed using a gentle stream of nitrogen directed at the solution. Proteins are formulated into 20 mM Hepes, pH 6.8 with 0.14 M sodium chloride and 4% mannitol by dialysis or by gel filtration using G25 Superfine (Pharmacia) resins equilibrated in the formulation buffer and sterile filtered.

[2781] Many of the PRO polypeptides disclosed herein were successfully expressed as described above.

### Example 4

### Expression of PRO in Mammalian Cells

[2782] This example illustrates preparation of a potentially glycosylated form of PRO by recombinant expression in mammalian cells.

[2783] The vector, pRK5 (see EP 307,247, published Mar. 15, 1989), is employed as the expression vector. Optionally, the PRO DNA is ligated into pRK5 with selected restriction enzymes to allow insertion of the PRO DNA using ligation methods such as described in Sambrook et al., supra. The resulting vector is called pRK5-PRO.

[2784] In one embodiment, the selected host cells may be 293 cells. Human 293 cells (ATCC CCL 1573) are grown to confluence in tissue culture plates in medium such as DMEM supplemented with fetal calf serum and optionally, nutrient components and/or antibiotics. About 10 μg pRK5-PRO DNA is mixed with about 1 μg DNA encoding the VA RNA gene [Thimmappaya et al., Cell, 31:543 (1982)] and dissolved in 500 μl of 1 mM Tris-HCl, 0.1 mM EDTA, 0.227 M CaCl₂. To this mixture is added, dropwise, 500 μl of 50 mM HEPES (pH 7.35), 280 mM NaCl, 1.5 mM NaPO₄, and a precipitate is allowed to form for 10 minutes at 25° C. The precipitate is suspended and added to the 293 cells and allowed to settle for about four hours at 37° C. The culture medium is aspirated off and 2 ml of 20% glycerol in PBS is added for 30 seconds. The 293 cells are then washed with serum free medium, fresh medium is added and the cells are incubated for about 5 days.

[2785] Approximately 24 hours after the transfections, the culture medium is removed and replaced with culture medium (alone) or culture medium containing 200 μCi/ml ³⁵S-cysteine and 200 μCi/ml ³⁵S-methionine. After a 12 hour incubation, the conditioned medium is collected, concentrated on a spin filter, and loaded onto a 15% SDS gel. The processed gel may be dried and exposed to film for a selected period of time to reveal the presence of PRO polypeptide. The cultures containing transfected cells may undergo further incubation (in serum free medium) and the medium is tested in selected bioassays.

[2786] In an alternative technique, PRO may be introduced into 293 cells transiently using the dextran sulfate method described by Somparyrac et al., Proc. Natl. Acad. Sci., 12:7575 (1981). 293 cells are grown to maximal density in a spinner flask and 700 μg pRK5-PRO DNA is added. The cells are first concentrated from the spinner flask by centrifugation and washed with PBS. The DNA-dextran precipitate is incubated on the cell pellet for four hours. The cells are treated with 20% glycerol for 90 seconds, washed with tissue culture medium, and re-introduced into the spinner flask containing tissue culture medium, 5 μg/ml bovine insulin and 0.1 μg/ml bovine transferrin. After about four days, the conditioned media is centrifuged and filtered to remove cells and debris. The sample containing expressed PRO can then be concentrated and purified by any selected method, such as dialysis and/or column chromatography.

[2787] In another embodiment, PRO can be expressed in CHO cells. The pRK5-PRO can be transfected into CHO cells using known reagents such as CaPO₄ or DEAE-dextran. As described above, the cell cultures can be incubated, and the medium replaced with culture medium (alone) or medium containing a radiolabel such as ³⁵S-methionine. After determining the presence of PRO polypeptide, the culture medium may be replaced with serum free medium. Preferably, the cultures are incubated for about 6 days, and then the conditioned medium is harvested. The medium containing the expressed PRO can then be concentrated and purified by any selected method.

[2788] Epitope-tagged PRO may also be expressed in host CHO cells. The PRO may be subcloned out of the pRK5 vector. The subclone insert can undergo PCR to fuse in frame with a selected epitope tag such as a poly-his tag into a Baculovirus expression vector. The poly-his tagged PRO insert can then be subcloned into a SV40 promoter/enhancer containing vector containing a selection marker such as DHFR for selection of stable clones. Finally, the CHO cells can be transfected (as described above) with the SV40 promoter/enhancer containing vector. Labeling may be performed, as described above, to verify expression. The culture medium containing the expressed poly-His tagged PRO can then be concentrated and purified by any selected method, such as by Ni²⁺-chelate affinity chromatography.

[2789] PRO may also be expressed in CHO and/or COS cells by a transient expression procedure or in CHO cells by another stable expression procedure.

[2790] Stable expression in CHO cells is performed using the following procedure. The proteins are expressed as an IgG construct (immunoadhesin), in which the coding sequences for the soluble forms (e.g. extracellular domains) of the respective proteins are fused to an IgG1 constant region sequence containing the hinge, CH2 and CH2 domains and/or is a poly-His tagged form.

[2791] Following PCR amplification, the respective DNAs are subcloned in a CHO expression vector using standard techniques as described in Ausubel et al., Current Protocols of Molecular Biology, Unit 3.16, John Wiley and Sons (1997). CHO expression vectors are constructed to have compatible restriction sites 5′ and 3′ of the DNA of interest to allow the convenient shuttling of cDNA's. The vector used expression in CHO cells is as described in Lucas et al., Nucl. Acids Res. 24:9 (1774-1779 (1996), and uses the SV40 early promoter/enhancer to drive expression of the cDNA of interest and dihydrofolate reductase (DHFR). DHFR expression permits selection for stable maintenance of the plasmid following transfection.

[2792] Twelve micrograms of the desired plasmid DNA is introduced into approximately 10 million CHO cells using commercially available transfection reagents Superfect® (Quiagen), Dosper® or Fugene® (Boehringer Mannheim). The cells are grown as described in Lucas et al., supra. Approximately 3×10⁻⁷ cells are frozen in an ampule for further growth and production as described below.

[2793] The ampules containing the plasmid DNA are thawed by placement into water bath and mixed by vortexing. The contents are pipetted into a centrifuge tube containing 10 mL of media and centrifuged at 1000 rpm for 5 minutes. The supernatant is aspirated and the cells are resuspended in 10 mL of selective media (0.2 μm filtered PS20 with 5% 0.2 μm diafiltered fetal bovine serum). The cells are then aliquoted into a 100 mL spinner containing 90 mL of selective media. After 1-2 days, the cells are transferred into a 250 mL spinner filled with 150 mL selective growth medium and incubated at 37° C. After another 2-3 days, 250 mL, 500 mL and 2000 mL spinners are seeded with 3×10⁵ cells/mL. The cell media is exchanged with fresh media by centrifugation and resuspension in production medium. Although any suitable CHO media may be employed, a production medium described in U.S. Pat. No. 5,122,469, issued Jun. 16, 1992 may actually be used. A 3 L production spinner is seeded at 1.2×10⁶ cells/mL. On day 0, pH is determined. On day 1, the spinner is sampled and sparging with filtered air is commenced. On day 2, the spinner is sampled, the temperature shifted to 33° C., and 30 mL of 500 g/L glucose and 0.6 mL of 10% antifoam (e.g., 35% polydimethylsiloxane emulsion, Dow Corning 365 Medical Grade Emulsion) taken. Throughout the production, the pH is adjusted as necessary to keep it at around 7.2. After 10 days, or until the viability dropped below 70%, the cell culture is harvested by centrifugation and filtering through a 0.22 μm filter. The filtrate was either stored at 4° C. or immediately loaded onto columns for purification.

[2794] For the poly-His tagged constructs, the proteins are purified using a Ni-NTA column (Qiagen). Before purification, imidazole is added to the conditioned media to a concentration of 5 mM. The conditioned media is pumped onto a 6 ml Ni-NTA column equilibrated in 20 mM Hepes, pH 7.4, buffer containing 0.3 M NaCl and 5 mM imidazole at a flow rate of 4-5 ml/min. at 4° C. After loading, the column is washed with additional equilibration buffer and the protein eluted with equilibration buffer containing 0.25 M imidazole. The highly purified protein is subsequently desalted into a storage buffer containing 10 mM Hepes, 0.14 M NaCl and 4% mannitol, pH 6.8, with a 25 ml G25 Superfine (Pharmacia) column and stored at −80° C.

[2795] Immunoadhesin (Fc-containing) constructs are purified from the conditioned media as follows. The conditioned medium is pumped onto a 5 ml Protein A column (Pharmacia) which had been equilibrated in 20 mM Na phosphate buffer, pH 6.8. After loading, the column is washed extensively with equilibration buffer before elution with 100 mM citric acid, pH 3.5. The eluted protein is immediately neutralized by collecting 1 ml fractions into tubes containing 275 μl of 1 M Tris buffer, pH 9. The highly purified protein is subsequently desalted into storage buffer as described above for the poly-His tagged proteins. The homogeneity is assessed by SDS polyacrylamide gels and by N-terminal amino acid sequencing by Edman degradation.

[2796] Many of the PRO polypeptides disclosed herein were successfully expressed as described above.

### Example 5

### Expression of PRO in Yeast

[2797] The following method describes recombinant expression of PRO in yeast.

[2798] First, yeast expression vectors are constructed for intracellular production or secretion of PRO from the ADH2/GAPDH promoter. DNA encoding PRO and the promoter is inserted into suitable restriction enzyme sites in the selected plasmid to direct intracellular expression of PRO. For secretion, DNA encoding PRO can be cloned into the selected plasmid, together with DNA encoding the ADH2/GAPDH promoter, a native PRO signal peptide or other mammalian signal peptide, or, for example, a yeast alpha-factor or invertase secretory signal/leader sequence, and linker sequences (if needed) for expression of PRO.

[2799] Yeast cells, such as yeast strain AB110, can then be transformed with the expression plasmids described above and cultured in selected fermentation media. The transformed yeast supernatants can be analyzed by precipitation with 10% trichloroacetic acid and separation by SDS-PAGE, followed by staining of the gels with Coomassie Blue stain.

[2800] Recombinant PRO can subsequently be isolated and purified by removing the yeast cells from the fermentation medium by centrifugation and then concentrating the medium using selected cartridge filters. The concentrate containing PRO may further be purified using selected column chromatography resins.

[2801] Many of the PRO polypeptides disclosed herein were successfully expressed as described above.

### Example 6

### Expression of PRO in Baculovirus-Infected Insect Cells

[2802] The following method describes recombinant expression of PRO in Baculovirus-infected insect cells.

[2803] The sequence coding for PRO is fused upstream of an epitope tag contained within a baculovirus expression vector. Such epitope tags include poly-his tags and immunoglobulin tags (like Fc regions of IgG). A variety of plasmids may be employed, including plasmids derived from commercially available plasmids such as pVL1393 (Novagen). Briefly, the sequence encoding PRO or the desired portion of the coding sequence of PRO such as the sequence encoding the extracellular domain of a transmembrane protein or the sequence encoding the mature protein if the protein is extracellular is amplified by PCR with primers complementary to the 5′ and 3′ regions. The 5′ primer may incorporate flanking (selected) restriction enzyme sites. The product is then digested with those selected restriction enzymes and subcloned into the expression vector.

[2804] Recombinant baculovirus is generated by co-transfecting the above plasmid and BaculoGold™ virus DNA (Pharmingen) into Spodoptera frugiperda (“Sf9”) cells (ATCC CRL 1711) using lipofectin (commercially available from GIBCO-BRL). After 4-5 days of incubation at 28° C., the released viruses are harvested and used for further amplifications. Viral infection and protein expression are performed as described by O'Reilley et al., Baculovirus expression vectors: A Laboratory Manual, Oxford: Oxford University Press (1994).

[2805] Expressed poly-his tagged PRO can then be purified, for example, by Ni²⁺-chelate affinity chromatography as follows. Extracts are prepared from recombinant virus-infected Sf9 cells as described by Rupert et al., Nature, 362:175-179 (1993). Briefly, Sf9 cells are washed, resuspended in sonication buffer (25 mL Hepes, pH 7.9; 12.5 mM MgCl₂; 0.1 mM EDTA; 10% glycerol; 0.1% NP-40; 0.4 M KCl), and sonicated twice for 20 seconds on ice. The sonicates are cleared by centrifugation, and the supernatant is diluted 50-fold in loading buffer (50 mM phosphate, 300 mM NaCl, 10% glycerol, pH 7.8) and filtered through a 0.45 μm filter. A Ni²⁺-NTA agarose column (commercially available from Qiagen) is prepared with a bed volume of 5 mL, washed with 25 mL of water and equilibrated with 25 mL of loading buffer. The filtered cell extract is loaded onto the column at 0.5 mL per minute. The column is washed to baseline A₂₈₀ with loading buffer, at which point fraction collection is started. Next, the column is washed with a secondary wash buffer (50 mM phosphate; 300 mM NaCl, 10% glycerol, pH 6.0), which elutes nonspecifically bound protein. After reaching A₂₈₀ baseline again, the column is developed with a 0 to 500 mM Imidazole gradient in the secondary wash buffer. One mL fractions are collected and analyzed by SDS-PAGE and silver staining or Western blot with Ni²⁺-NTA-conjugated to alkaline phosphatase (Qiagen). Fractions containing the eluted His₁₀-tagged PRO are pooled and dialyzed against loading buffer.

[2806] Alternatively, purification of the IgG tagged (or Fc tagged) PRO can be performed using known chromatography techniques, including for instance, Protein A or protein G column chromatography.

[2807] Many of the PRO polypeptides disclosed herein were successfully expressed as described above.

### Example 7

### Preparation of Antibodies that Bind PRO

[2808] This example illustrates preparation of monoclonal antibodies which can specifically bind PRO.

[2809] Techniques for producing the monoclonal antibodies are known in the art and are described, for instance, in Goding, supra. Immunogens that may be employed include purified PRO, fusion proteins containing PRO, and cells expressing recombinant PRO on the cell surface. Selection of the immunogen can be made by the skilled artisan without undue experimentation.

[2810] Mice, such as Balb/c, are immunized with the PRO immunogen emulsified in complete Freund's adjuvant and injected subcutaneously or intraperitoneally in an amount from 1-100 micrograms. Alternatively, the immunogen is emulsified in MPL-TDM adjuvant (Ribi Immunochemical Research, Hamilton, Mont.) and injected into the animal's hind foot pads. The immunized mice are then boosted 10 to 12 days later with additional immunogen emulsified in the selected adjuvant. Thereafter, for several weeks, the mice may also be boosted with additional immunization injections. Serum samples may be periodically obtained from the mice by retro-orbital bleeding for testing in ELISA assays to detect anti-PRO antibodies.

[2811] After a suitable antibody titer has been detected, the animals “positive” for antibodies can be injected with a final intravenous injection of PRO. Three to four days later, the mice are sacrificed and the spleen cells are harvested. The spleen cells are then fused (using 35% polyethylene glycol) to a selected murine myeloma cell line such as P3X63AgU.1, available from ATCC, No. CRL 1597. The fusions generate hybridoma cells which can then be plated in 96 well tissue culture plates containing HAT (hypoxanthine, aminopterin, and thymidine) medium to inhibit proliferation of non-fused cells, myeloma hybrids, and spleen cell hybrids.

[2812] The hybridoma cells will be screened in an ELISA for reactivity against PRO. Determination of “positive” hybridoma cells secreting the desired monoclonal antibodies against PRO is within the skill in the art.

[2813] The positive hybridoma cells can be injected intraperitoneally into syngeneic Balb/c mice to produce ascites containing the anti-PRO monoclonal antibodies. Alternatively, the hybridoma cells can be grown in tissue culture flasks or roller bottles. Purification of the monoclonal antibodies produced in the ascites can be accomplished using ammonium sulfate precipitation, followed by gel exclusion chromatography. Alternatively, affinity chromatography based upon binding of antibody to protein A or protein G can be employed.

### Example 8

### Purification of PRO Polypeptides Using Specific Antibodies

[2814] Native or recombinant PRO polypeptides may be purified by a variety of standard techniques in the art of protein purification. For example, pro-PRO polypeptide, mature PRO polypeptide, or pre-PRO polypeptide is purified by immunoaffinity chromatography using antibodies specific for the PRO polypeptide of interest. In general, an immunoaffinity column is constructed by covalently coupling the anti-PRO polypeptide antibody to an activated chromatographic resin.

[2815] Polyclonal immunoglobulins are prepared from immune sera either by precipitation with ammonium sulfate or by purification on immobilized Protein A (Pharmacia LKB Biotechnology, Piscataway, N.J.). Likewise, monoclonal antibodies are prepared from mouse ascites fluid by ammonium sulfate precipitation or chromatography on immobilized Protein A. Partially purified immunoglobulin is covalently attached to a chromatographic resin such as CnBr-activated SEPHAROSE™ (Pharmacia LKB Biotechnology). The antibody is coupled to the resin, the resin is blocked, and the derivative resin is washed according to the manufacturer's instructions.

[2816] Such an immunoaffinity column is utilized in the purification of PRO polypeptide by preparing a fraction from cells containing PRO polypeptide in a soluble form. This preparation is derived by solubilization of the whole cell or of a subcellular fraction obtained via differential centrifugation by the addition of detergent or by other methods well known in the art. Alternatively, soluble PRO polypeptide containing a signal sequence may be secreted in useful quantity into the medium in which the cells are grown.

[2817] A soluble PRO polypeptide-containing preparation is passed over the immunoaffinity column, and the column is washed under conditions that allow the preferential absorbance of PRO polypeptide (e.g., high ionic strength buffers in the presence of detergent). Then, the column is eluted under conditions that disrupt antibody/PRO polypeptide binding (e.g., a low pH buffer such as approximately pH 2-3, or a high concentration of a chaotrope such as urea or thiocyanate ion), and PRO polypeptide is collected.

### Example 9

### Drug Screening

[2818] This invention is particularly useful for screening compounds by using PRO polypeptides or binding fragment thereof in any of a variety of drug screening techniques. The PRO polypeptide or fragment employed in such a test may either be free in solution, affixed to a solid support, borne on a cell surface, or located intracellularly. One method of drug screening utilizes eukaryotic or prokaryotic host cells which are stably transformed with recombinant nucleic acids expressing the PRO polypeptide or fragment. Drugs are screened against such transformed cells in competitive binding assays. Such cells, either in viable or fixed form, can be used for standard binding assays. One may measure, for example, the formation of complexes between PRO polypeptide or a fragment and the agent being tested. Alternatively, one can examine the diminution in complex formation between the PRO polypeptide and its target cell or target receptors caused by the agent being tested.

[2819] Thus, the present invention provides methods of screening for drugs or any other agents which can affect a PRO polypeptide-associated disease or disorder. These methods comprise contacting such an agent with an PRO polypeptide or fragment thereof and assaying (I) for the presence of a complex between the agent and the PRO polypeptide or fragment, or (ii) for the presence of a complex between the PRO polypeptide or fragment and the cell, by methods well known in the art. In such competitive binding assays, the PRO polypeptide or fragment is typically labeled. After suitable incubation, free PRO polypeptide or fragment is separated from that present in bound form, and the amount of free or uncomplexed label is a measure of the ability of the particular agent to bind to PRO polypeptide or to interfere with the PRO polypeptide/cell complex.

[2820] Another technique for drug screening provides high throughput screening for compounds having suitable binding affinity to a polypeptide and is described in detail in WO 84/03564, published on Sep. 13, 1984. Briefly stated, large numbers of different small peptide test compounds are synthesized on a solid substrate, such as plastic pins or some other surface. As applied to a PRO polypeptide, the peptide test compounds are reacted with PRO polypeptide and washed. Bound PRO polypeptide is detected by methods well known in the art. Purified PRO polypeptide can also be coated directly onto plates for use in the aforementioned drug screening techniques. In addition, non-neutralizing antibodies can be used to capture the peptide and immobilize it on the solid support.

[2821] This invention also contemplates the use of competitive drug screening assays in which neutralizing antibodies capable of binding PRO polypeptide specifically compete with a test compound for binding to PRO polypeptide or fragments thereof. In this manner, the antibodies can be used to detect the presence of any peptide which shares one or more antigenic determinants with PRO polypeptide.

### Example 10

### Rational Drug Design

[2822] The goal of rational drug design is to produce structural analogs of biologically active polypeptide of interest (i.e., a PRO polypeptide) or of small molecules with which they interact, e.g., agonists, antagonists, or inhibitors. Any of these examples can be used to fashion drugs which are more active or stable forms of the PRO polypeptide or which enhance or interfere with the function of the PRO polypeptide in vivo (c.f., Hodgson, Bio/Technology, 9: 19-21 (1991)).

[2823] In one approach, the three-dimensional structure of the PRO polypeptide, or of a PRO polypeptide-inhibitor complex, is determined by x-ray crystallography, by computer modeling or, most typically, by a combination of the two approaches. Both the shape and charges of the PRO polypeptide must be ascertained to elucidate the structure and to determine active site(s) of the molecule. Less often, useful information regarding the structure of the PRO polypeptide may be gained by modeling based on the structure of homologous proteins. In both cases, relevant structural information is used to design analogous PRO polypeptide-like molecules or to identify efficient inhibitors. Useful examples of rational drug design may include molecules which have improved activity or stability as shown by Braxton and Wells, Biochemistry, 31:7796-7801 (1992) or which act as inhibitors, agonists, or antagonists of native peptides as shown by Athauda et al., J. Biochem., 113:742-746 (1993).

[2824] It is also possible to isolate a target-specific antibody, selected by functional assay, as described above, and then to solve its crystal structure. This approach, in principle, yields a pharmacore upon which subsequent drug design can be based. It is possible to bypass protein crystallography altogether by generating anti-idiotypic antibodies (anti-ids) to a functional, pharmacologically active antibody. As a mirror image of a mirror image, the binding site of the anti-ids would be expected to be an analog of the original receptor. The anti-id could then be used to identify and isolate peptides from banks of chemically or biologically produced peptides. The isolated peptides would then act as the pharmacore.

[2825] By virtue of the present invention, sufficient amounts of the PRO polypeptide may be made available to perform such analytical studies as X-ray crystallography. In addition, knowledge of the PRO polypeptide amino acid sequence provided herein will provide guidance to those employing computer modeling techniques in place of or in addition to x-ray crystallography.

[2826] The foregoing written specification is considered to be sufficient to enable one skilled in the art to practice the invention. The present invention is not to be limited in scope by the construct deposited, since the deposited embodiment is intended as a single illustration of certain aspects of the invention and any constructs that are functionally equivalent are within the scope of this invention. The deposit of material herein does not constitute an admission that the written description herein contained is inadequate to enable the practice of any aspect of the invention, including the best mode thereof, nor is it to be construed as limiting the scope of the claims to the specific illustrations that it represents. Indeed, various modifications of the invention in addition to those shown and described herein will become apparent to those skilled in the art from the foregoing description and fall within the scope of the appended claims.

The application's sequence listing, which the Patent Office published only in electronic form, follows.

SEQUENCE LISTING (2484 sequences)

SEQ ID NO: 1 - DNA, 2005 bp, Homo sapien
gctctgagaagccggactacgcggcagcggctcttcaaagcggagccgggagtttttgctacagttttcgccaccatgagtcgcagctataatgatgagctgcagttcttggagaagatcaataaaaactgctggaggatcaagaagggcttcgtgcccaacatgcaggttgaaggtgttttctatgtgaatgatgctctggagaaattgatgtttgaggaattaaggaatgcctgtcgaggtggtggtgttggtggcttcctgccagccatgaaacagattggcaatgtggcagccctgcctggaattgttcatcgatctattgggcttcctgatgtccattcaggatatgggtttgctattgggaacatggcagcctttgatatgaatgaccctgaagcagtagtatccccaggtggtgtcgggtttgacatcaactgtggtgtccgcttgctaagaaccaatttagatgaaagtgatgtccagcctgtgaaggagcaacttgcccaagctatgtttgaccacattcctgttggggtggggtcaaaaggtgtcatcccaatgaatgccaaagacttggaggaggccttggagatgggggtggactggtccttaagagaagggtatgcctgggctgaagacaaggagcactgcgaggagtacggaaggatgctgcaggctgaccccaataaagtttctgcaagggcgaagaaaagaggccttcctcagttggggaccctgggagcaggcaaccattatgcagaaatccaggttgtggatgagattttcaatgagtatgctgctaaaaaaatgggcatcgaccataagggacaggtgtgtgtgatgatccacagtggaagcagaggcttgggccaccaagtagccacagatgcgctggtagctatggagaaggccatgaagagagacaagattatagtcaatgatcggcagttggcttgtgctcgaatcgcttccccagagggtcaagactatctgaagggaatggcagctgctgggaactatgcctgggtcaaccgctcttccatgaccttcttaacccgtcaggctttcgccaaggtcttcaacacaacccctgatgacttggacctacatgtgatctatgatgtttctcacaacattgccaaagtggagcagcatgtggtggacggaaaggaacggacactgttagtacacaggaagggatccacccgcgctttccctcctcaccatcccctcattgctgttgattaccaactcactggacagccagtgctcattggtggcaccatgggaacctgtagttatgttcttactggcactgaacagggcatgactgagacctttggaacaacctgtcatggagcgggccgtgcattgtcccgagcaaaatctcgacgtaatttagatttccaggatgtcttagacaaattggcagatatgggaattgcgatccgtgttgcctcacccaaactggttatggaagaggctcctgagtcctataagaatgtgacagatgtggtaaatacctgccatgatgctggaatcagcaagaaagccattaaactgagaccaattgctgtgatcaaaggatagaaccttggacagcagggctgcctgacaccaccaaccctctctgaagtggaagtggactgacatgctcttctgacatcagactcaaggcgggacaagttgcaaagtgtgcagctgtaactgctcacgccaaaatggctgatggggaggctgctgctttcaggggcccgtgcttgtaaaataaccttccaggaagaggcacattgcccacctttggaaagggaggaatatgccttctccttggttgttccacagagttttaggaaaatctgttagggatgggtagatgtcaaactgccttacgcagtcatactgatctttagccatcagattgatcttcttcacaccaagctctgtttacattccgagaggtgtcatgaagaaagttctgttcaataaggttttggaatgtttc

SEQ ID NO: 2 - protein, 505 aa, Homo sapien
MSRSYNDELQFLEKINKNCWRIKKGFVPNMQVEGVFYVNDALEKLMFEELRNACRGGGVGGFLPAMKQIGNVAALPGIVHRSIGLPDVHSGYGFAIGNMAAFDMNDPEAVVSPGGVGFDINCGVRLLRTNLDESDVQPVKEQLAQAMFDHIPVGVGSKGVIPMNAKDLEEALEMGVDWSLREGYAWAEDKEHCEEYGRMLQADPNKVSARAKKRGLPQLGTLGAGNHYAEIQVVDEIFNEYAAKKMGIDHKGQVCVMIHSGSRGLGHQVATDALVAMEKAMKRDKIIVNDRQLACARIASPEGQDYLKGMAAAGNYAWVNRSSMTFLTRQAFAKVFNTTPDDLDLHVIYDVSHNIAKVEQHVVDGKERTLLVHRKGSTRAFPPHHPLIAVDYQLTGQPVLIGGTMGTCSYVLTGTEQGMTETFGTTCHGAGRALSRAKSRRNLDFQDVLDKLADMGIAIRVASPKLVMEEAPESYKNVTDVVNTCHDAGISKKAIKLRPIAVIKG

SEQ ID NO: 3 - DNA, 1552 bp, Homo sapien
cggttggtgcggcctccattgttcgtgttttaaggcgccatgaggggtgacagaggccgtggtcgtggtgggcgctttggttccagaggaggcccaggaggagggttcaggccctttgtaccacatatcccatttgacttctatttgtgtgaaatggcctttccccgggtcaagccagcacctgatgaaacttccttcagtgaggccttgctgaagaggaatcaggacctggctcccaattctgctgaacaggcatctatcctttctctggtgacaaaaataaacaatgtgattgataatctgattgtggctccagggacatttgaagtgcaaattgaagaagttcgacaggtgggatcctataaaaaggggacaatgactacaggacacaatgtggctgacctggtggtgatactcaagattctgccaacgttggaagctgttgctgccctggggaacaaagtcgtggaaagcctaagagcacaggatccttctgaagttttaaccatgctgaccaacgaaactggctttgaaatcagttcttctgatgctacagtgaagattctcattacaacagtgccacccaatcttcgaaaactggatccagaactccatttggatatcaaagtattgcagagtgccttagcagccatccgacatgcccgctggttcgaggaaaatgcttctcagtccacagttaaagttctcatcagactactgaaggacttgaggattcgttttcctggctttgagcccctcacaccctggatccttgacctactaggccattatgctgtgatgaacaaccccaccagacagcctttggccctaaacgttgcatacaggcgctgcttgcagattctggctgcaggactgttcctgccaggttcagtgggtatcactgacccctgtgagagtggcaactttagagtacacacagtcatgaccctagaacagcaggacatggtctgctatacagctcagactctcgtccgaatcctctcacatggtggctttaggaagatccttggccaggagggtgatgccagctatcttgcttctgaaatatctacctgggatggagtgatagtaacaccttcagaaaaggcttatgagaagccaccagagaagaaggaaggagaggaagaagaggagaatacagaaagaaccacctcaaggagaggaagaagaaagcatggaaactcaggagtgacattcccttcactccttttcctacccaagggaaagactggagcctaagctgcctgctactggctttacatggtgacagacattccgtggataggaagatagcaggagaaagtaactccatagagtgtcattccactggttgatattggcttagctgccagtctcccatttgtgacctatgccatccatctataatggaggataccaacatttcttcctaatattctataatctccaactcctgaaaacccctctctcaactaatactttgctgttgaaatgttgtgaaatgttaagtgtctggaaatttttttttctaagaaaaactattaaagtactt

SEQ ID NO: 4 - protein, 406 aa, Homo sapien
MRGDRGRGRGGRFGSRGGPGGGFRPFVPHIPFDFYLCEMAFPRVKPAPDETSFSEALLKRNQDLAPNSAEQASILSLVTKINNVIDNLIVAPGTFEVQIEEVRQVGSYKKGTMTTGHNVADLVVILKILPTLEAVAALGNKVVESLRAQDPSEVLTMLTNETGFEISSSDATVKILITTVPPNLRKLDPELHLDIKVLQSALAAIRHARWFEENASQSTVKVLIRLLKDLRIRFPGFEPLTPWILDLLGHYAVMNNPTRQPLALNVAYRRCLQILAAGLFLPGSVGITDPCESGNFRVHTVMTLEQQDMVCYTAQTLVRILSHGGFRKILGQEGDASYLASEISTWDGVIVTPSEKAYEKPPEKKEGEEEEENTERTTSRRGRRKHGNSGVTFPSLLFLPKGKTGA

SEQ ID NO: 5 - DNA, 2116 bp, Homo sapien
cggttctccaagcacccagcatcctgctagacgcgccgcgcaccgacggaggggacatgggcagagcaatggtggccaggctggggctggggctgctgctgctggcactgctcctacccacgcagatttattccagtgaaacaacaactggaacttcaagtaactcctcccagagtacttccaactctgggttggccccaaatccaactaatgccaccaccaaggcggctggtggtgccctgcagtcaacagccagtctcttcgtggtctcactctctcttctgcatctctactcttaagagactcaggccaagaaacgtcttctaaatttccccatcttctaaacccaatccaaatggcgtctggaagtccaatgtggcaaggaaaaacaggtcttcatcgaatctactaattccacaccttttattgacacagaaaatgttgagaatcccaaatttgattgatttgaagaacatgtgagaggtttgactagatgatgaatgccaatattaaatctgctggagtttcatgtacaagatgaaggagaggcaacatccaaaatagttaagacatgatttccttgaatgtggcttgagaaatatggacacttaatactaccttgaaaataagaatagaaataaaggatgggattgtggaatggagattcagttttcattggttcattaattctataaggccataaaacaggtaatataaaaagcttccatcgatctatttatatgtacatgagaaggaatccccaggtgttactgtaattcctcaacgtattgtttcgacggcactaatttaatgccgatatactctagatgaatgtttacattgttgagctattgctgttctcttgggaactgaactcactttcctcctgaggctttggatttgacattgcatttgaccttttaggtagtaattgacatgtgccagggcaatgatgaatgagaatctaccccagatccaagcatcctgagcaactcttgattatccatattgagtcaaatggtaggcatttcctatcacctgtttccattcaacaagagcactacattcttttagctaaacggattccaaagagtagaattgcattgaccacgactaatttcaaaatgctttttattattattattttttagacagtctcactttgtcgcccaggccggagtgcagtggtgcgatctcagatcagtgtaccatttgcctcccgggctcaagcgattctcctgcctcagcctcccaagtagctgggattacaggcacctgccaccatgcccggctaatttttgtaattttagtagagacagggtttcaccatgttgcccaggctggtttagaactcctgacctcaggtgatccacccgcctcggcctcccaaagtgctgggattacaggcttgagcccccgcgcccagccatcaaaatgctttttatttctgcatatgtttgaatactttttacaatttaaaaaaatgatctgttttgaaggcaaaattgcaaatcttgaaattaagaaggcaaaatgtaaaggagtcaaactataaatcaagtatttgggaagtgaagactggaagctaatttgcataaattcacaaacttttatactctttctgtatatacattttttttctttaaaaaacaactatggatcagaatagcaacatttagaacactttttgttatcagtcaatatttttagatagttagaacctggtcctaagcctaaaagtgggcttgattctgcagtaaatcttttacaactgcctcgacacacataaacctttttaaaaatagacactccccgaagtcttttgtttgtatggtcacacactgatgcttagatgttccagtaatctaatatggccacagtagtcttgatgaccaaagtcctttttttccatctttagaaaactacatgggaacaaacagatcgaacagttttgaagctactgtgtgtgtgaatgaacactcttgctttattccagaatgctgtacatctattttggattgtatattgtggttgtgtatttacgctttgattcatagtaacttcttatggaattgatttgcattgaacgacaaactgtaaataaaaagaaacggtg

SEQ ID NO: 6 - protein, 80 aa, Homo sapien
MGRAMVARLGLGLLLLALLLPTQIYSSETTTGTSSNSSQSTSNSGLAPNPTNATTKAAGGALQSTASLFVVSLSLLHLYS

SEQ ID NO: 7 - DNA, 3319 bp, Homo sapien
ggcccggcccgcggcggcggcaaaggggcggaggggttcgctgccagcaattgccaagctgctgcggtcgtggcgggatggtatagccgggcctgagggcgggcggcggggcgcgggcgggggcgaggcggccgggaagggccgacgccgcctgactggcttgggagcagcggcagcaagctgagggggcgtcgccgccgccggcccccggcgccgccgcgggaggccgcgcccgccatggcggcccgggcggtgctggacgagttcactgcgccagctgagaaggcggagctgctggagcagagccgcggccgtatcgagggcctgtttggcgtgagcctagccgtgctcggcgcgctaggggctgaggagccgctgcccgcgcgcatctggctgcagctctgcggggcgcaggaggcggagcacagcgccaaggaatatattaaaggaatctgtgaacctgaactagaagaaagagaatgttaccccaaggacatgcactgcatttttgttggggcagagagcctgtttctgaaaagcttgattcaggatacttgtgctgacctctgcattctggacattggccttcttggcatcagaggaagtgctgaggctgtggtcatggctaggagtcacattcaacaatttgtaaagctctttgaaaataaagagaacctacccagtagtcagaaagaatcagaggtgaaaagggaattcaaacaatttgttgaagcccatgcagacaattacacaatggatttgttgattttgcccacttccttgaaaaaagaacttttgacactcacacaaggtgaggagaatctctttgaaacaggagatgatgaggttattgaaatgagagattctcaacaaacagagtttacacagaatgctgccacagggctgaatatttctagagatgaaactgttttgcaggaagaggcaagaaataaagctgggactcctgtttctgagcttacaaaacaaatggacacagtcctttctagctcaccagatgtgctttttgatccaataaatggtctaaccccagatgaagaggcactttccaatgagagaatttgtcagaaaaggagattttctgattctgaagaaaggcatacgaagaagcagttttctttggaaaatgttcaggagggggagattttacacgatgctaagacattggctggaaatgtaatagctgacctatctgattcttctgctgattctgaaaatttaagtccagatataaaagaaactactgaggaaatggaatacaacatcctcgtaaacttttttaaaaccatgggctactcccaagaaattgttgaaaaggtcattaaggtgtatggaccatctactgaaccattattgctcttagaggaaattgaaaaagaaaataaaagattccaagaagacagagaattttcagctggtacagtgtatccagagaccaacaaaaccaaaaataaaggtgtttatagcagcacaaatgagcttacaactgattccactccaaagaaaacacaggctcacacacagcaaaatatggtagaaaaattttctcagttaccattcaaagtggaagctaaaccatgtacctcaaattgtagaattaatactttcagaacagtgccaatagaacagaaacatgaagtctggggttcaaaccagaactacatttgtaacacagaccctgaaactgatggcctttcaccttctgttgcctctccaagtcccaaagaagtcaattttgtttcaaggggagcttcaagtcaccagcccagagttccactttttcctgaaaatggtttacaccagcagccagaacccttgcttccaaataatatgaaatctgcctgtgaaaaacgtttaggatgttgtagttctcctcattctaagccaaattgctcaaccctttctccaccaatgccactgccccagctgttaccttcggttactgatgcaaggtcggcaggaccttctgatcatattgattcctcagttactggggttcaaaggtttcgagatactctaaaaataccctacaagctggaattaaaaaatgaaccagggagaacggatttgaaacacattgttatagatgggagcaatgttgcaattacccatggtctgaaaaagttcttttcttgtcgtggaattgcaattgcagttgaatatttttggaagcttggcaacagaaacatcactgtatttgtccctcagtggagaacaaggcgtgatcctaatgtcacagaacagcacttcttaacccagctccaggagctcggaatattatctttaactcctgcccggatggtctttggagaaagaattgcttctcatgatgacaggtttctactacacttagcggacaaaactggtggcataattgtgacaaatgataatttcagagaatttgtgaatgagtcagtctcttggagagaaattattacaaaaaggctgctgcagtacacgttcgtgggggacatatttatggttcccgatgatcctctgggaagaagtggacctcgattagaggagtttcttcagaaggaagtctgtcttagagatatgcagcccctactcagtgccctgccaaatgtgggcatgtttgaccccagcttcagagtccctggcacccaggcagccagcaccagccaccagcctccgacccggattcagggagccccttcaagccactggctccctcagcagccccacttcccactgctgccagccctccccagtctccagcagaacctgcccatgccagctcagagatcttctgcagaaaccaacgagctgagggaagcccttctgaagatcttccctgactcagagcaaagactgaaaatagaccagatcttggtggcccacccatacatgaaagatctaaatgcgctttctgccatggtgttggattgaagattgtgctgagcgctgagcttgcgctcagggctggctgatcaaactcaagctcacacctgtacctgatgggaatgaacataatgtgaagaaacttatttcccagtgtaaacgcagttgtacagaaaaaaaatgttttgggtataaatctgggttttcaaaaccagcttttttctatatataaattatgctgctattacagatttaacattttctgttaaaggaaagtctacattttctgcctgttcagaactgtttaatagcagttactcttgagtgtatttacctttttatgttttttaaactattttccttaaagccgaaaatattgacaaatggatatggttagcctttataaataaataaaaaaaaaagtgttgctttcttaagg

SEQ ID NO: 8 - protein, 896 aa, Homo sapien
MAARAVLDEFTAPAEKAELLEQSRGRIEGLFGVSLAVLGALGAEEPLPARIWLQLCGAQEAEHSAKEYIKGICEPELEERECYPKDMHCIFVGAESLFLKSLIQDTCADLCILDIGLLGIRGSAEAVVMARSHIQQFVKLFENKENLPSSQKESEVKREFKQFVEAHADNYTMDLLILPTSLKKELLTLTQGEENLFETGDDEVIEMRDSQQTEFTQNAATGLNISRDETVLQEEARNKAGTPVSELTKQMDTVLSSSPDVLFDPINGLTPDEEALSNERICQKRRFSDSEERHTKKQFSLENVQEGEILHDAKTLAGNVIADLSDSSADSENLSPDIKETTEEMEYNILVNFFKTMGYSQEIVEKVIKVYGPSTEPLLLLEEIEKENKRFQEDREFSAGTVYPETNKTKNKGVYSSTNELTTDSTPKKTQAHTQQNMVEKFSQLPFKVEAKPCTSNCRINTFRTVPIEQKHEVWGSNQNYICNTDPETDGLSPSVASPSPKEVNFVSRGASSHQPRVPLFPENGLHQQPEPLLPNNMKSACEKRLGCCSSPHSKPNCSTLSPPMPLPQLLPSVTDARSAGPSDHIDSSVTGVQRFRDTLKIPYKLELKNEPGRTDLKHIVIDGSNVAITHGLKKFFSCRGIAIAVEYFWKLGNRNITVFVPQWRTRRDPNVTEQHFLTQLQELGILSLTPARMVFGERIASHDDRFLLHLADKTGGIIVTNDNFREFVNESVSWREIITKRLLQYTFVGDIFMVPDDPLGRSGPRLEEFLQKEVCLRDMQPLLSALPNVGMFDPSFRVPGTQAASTSHQPPTRIQGAPSSHWLPQQPHFPLLPALPSLQQNLPMPAQRSSAETNELREALLKIFPDSEQRLKIDQILVAHPYMKDLNALSAMVLD

SEQ ID NO: 9 - DNA, 5077 bp, Homo sapien
ctcatgcatatgcaggtgcgcgggtgacgaatgggcgagcgagctgtcagtctcgttccgaacttgttggctgcggtgccgggagcgcgggcgcgcagagccgaggccgggacccgctgccttcaccgccgccgccgtcgccgccgggtgggagccgggccgggcagccggagcgcggccgccagcgagccggagctgccgccgcccctgcacgcccgccgcccaggcccgcgcgccgcggcgctgcgctcgaccccgcccgcgccgccgccgccgccgcctctgccgctgccgctgcctctgcgggcgctcggagggcgggcgggcgctgggaggccggcgcggcggctgggagccgggcgcgggcggcggcggcggggccgggcgggcgggtcgcgggggcaatgcgggcgcagggccgggggcgccttccccggcggctgctgctgctgctggcgctctgggtgcaggcggcgcggcccatgggctatttcgagctgcagctgagcgcgctgcggaacgtgaacggggagctgctgagcggcgcctgctgtgacggcgacggccggacaacgcgcgcggggggctgcggccacgacgagtgcgacacgtacgtgcgcgtgtgccttaaggagtaccaggccaaggtgacgcccacggggccctgcagctacggccacggcgccacgcccgtgctgggcggcaactccttctacctgccgccggcgggcgctgcgggggaccgagcgcgggcgcgggcccgggccggcggcgaccaggacccgggcctcgtcgtcatccccttccagttcgcctggccgcgctcctttaccctcatcgtggaggcctgggactgggacaacgataccaccccgaatgaggagctgctgatcgagcgagtgtcgcatgccggcatgatcaacccggaggaccgctggaagagcctgcacttcagcggccacgtggcgcacctggagctgcagatccgcgtgcgctgcgacgagaactactacagcgccacttgcaacaagttctgccggccccgcaacgactttttcggccactacacctgcgaccagtacggcaacaaggcctgcatggacggctggatgggcaaggagtgcaaggaagctgtgtgtaaacaagggtgtaatttgctccacgggggatgcaccgtgcctggggagtgcaggtgcagctacggctggcaagggaggttctgcgatgagtgtgtcccctaccccggctgcgtgcatggcagttgtgtggagccctggcagtgcaactgtgagaccaactggggcggcctgctctgtgacaaagacctgaactactgtggcagccaccacccctgcaccaacggaggcacgtgcatcaacgccgagcctgaccagtaccgctgcacctgccctgacggctactcgggcaggaactgtgagaaggctgagcacgcctgcacctccaacccgtgtgccaacgggggctcttgccatgaggtgccgtccggcttcgaatgccactgcccatcgggctggagcgggcccacctgtgcccttgacatcgatgagtgtgcttcgaacccgtgtgcggccggtggcacctgtgtggaccaggtggacggctttgagtgcatctgccccgagcagtgggtgggggccacctgccagctggacgccaatgagtgtgaagggaagccatgccttaacgctttttcttgcaaaaacctgattggcggctattactgtgattgcatcccgggctggaagggcatcaactgccatatcaacgtcaacgactgtcgcgggcagtgtcagcatgggggcacctgcaaggacctggtgaacgggtaccagtgtgtgtgcccacggggcttcggaggccggcattgcgagctggaacgagacgagtgtgccagcagcccctgccacagcggcggcctctgcgaggacctggccgacggcttccactgccactgcccccagggcttctccgggcctctctgtgaggtggatgtcgacctttgtgagccaagcccctgccggaacggcgctcgctgctataacctggagggtgactattactgcgcctgccctgatgactttggtggcaagaactgctccgtgccccgcgagccgtgccctggcggggcctgcagagtgatcgatggctgcgggtcagacgcggggcctgggatgcctggcacagcagcctccggcgtgtgtggcccccatggacgctgcgtcagccagccagggggcaacttttcctgcatctgtgacagtggctttactggcacctactgccatgagaacattgacgactgcctgggccagccctgccgcaatgggggcacatgcatcgatgaggtggacgccttccgctgcttctgccccagcggctgggagggcgagctctgcgacaccaatcccaacgactgccttcccgatccctgccacagccgcggccgctgctacgacctggtcaatgacttctactgtgcgtgcgacgacggctggaagggcaagacctgccactcacgcgagttccagtgcgatgcctacacctgcagcaacggtggcacctgctacgacagcggcgacaccttccgctgcgcctgcccccccggctggaagggcagcacctgcgccgtcgccaagaacagcagctgcctgcccaacccctgtgtgaatggtggcacctgcgtgggcagcggggcctccttctcctgcatctgccgggacggctgggagggtcgtacttgcactcacaataccaacgactgcaaccctctgccttgctacaatggtggcatctgtgttgacggcgtcaactggttccgctgcgagtgtgcacctggcttcgcggggcctgactgccgcatcaacatcgacgagtgccagtcctcgccctgtgcctacggggccacgtgtgtggatgagatcaacgggtatcgctgtagctgcccacccggccgagccggcccccggtgccaggaagtgatcgggttcgggagatcctgctggtcccggggcactccgttcccacacggaagctcctgggtggaagactgcaacagctgccgctgcctggatggccgccgtgactgcagcaaggtgtggtgcggatggaagccttgtctgctggccggccagcccgaggccctgagcgcccagtgcccactggggcaaaggtgcctggagaaggccccaggccagtgtctgcgaccaccctgtgaggcctggggggagtgcggcgcagaagagccaccgagcaccccctgcctgccacgctccggccacctggacaataactgtgcccgcctcaccttgcatttcaaccgtgaccacgtgccccagggcaccacggtgggcgccatttgctccgggatccgctccctgccagccacaagggctgtggcacgggaccgcctgctggtgttgctttgcgaccgggcgtcctcgggggccagtgccgtggaggtggccgtgtccttcagccctgccagggacctgcctgacagcagcctgatccagggcgcggcccacgccatcgtggccgccatcacccagcgggggaacagctcactgctcctggctgtcaccgaggtcaaggtggagacggttgttacgggcggctcttccacaggtctgctggtgcctgtgctgtgtggtgccttcagcgtgctgtggctggcgtgcgtggtcctgtgcgtgtggtggacacgcaagcgcaggaaagagcgggagaggagccggctgccgcgggaggagagcgccaacaaccagtgggccccgctcaaccccatccgcaaccccatcgagcggccggggggccacaaggacgtgctctaccagtgcaagaacttcacgccgccgccgcgcagggcggacgaggcgctgcccgggccggccggccacgcggccgtcagggaggatgaggaggacgaggatctgggccgcggtgaggaggactccctggaggcggagaagttcctctcacacaaattcaccaaagatcctggccgctcgccggggaggccggcccactgggcctcaggccccaaagtggacaaccgcgcggtcaggagcatcaatgaggcccgctacgccggcaaggagtaggggcggctgccagctgggccgggacccagggccctcggtgggagccatgccgtctgccggacccggaggccgaggccatgtgcatagtttctttattttgtgtaaaaaaaccaccaaaaacaaaaaccaaatgtttattttctacgtttctttaaccttgtataaattattcagtaactgtcaggctgaaaacaatggagtattctcggatagttgctatttttgtaaagtttccgtgcgtggcactcgctgtatgaaaggagagagcaaagggtgtctgcgtcgtcaccaaatcgtagcgtttgttaccagaggttgtgcactgtttacagaatcttccttttattcctcactcgggtttctctgtggctccaggccaaagtgccggtgagacccatggctgtgttggtgtggcccatggctgttggtgggacccgtggctgatggtgtggcctgtggctgtcggtgggactcgtggctgtcaatgggacctgtggctgtcggtgggacctacggtggtcggtgggaccctggttattgatgtggccctggctgccggcacggcccgtggctgttgacgcacctgtggttgttagtggggcctgaggtcatcggcgtggcccaaggccggcaggtcaacctcgcgcttgctggccagtccaccctgcctgccgtctgtgcttcctcctgcccagaacgcccgctccagcgatctctccactgtgctttcagaagtgcccttcctgctgcgcagttctcccatcctgggacggcggcagtattgaagctcgtgacaagtgccttcacacagacccctcgcaactgtccacgcgtgccgtggcaccaggcgctgcccacctgccggccccggccgcccctcctcgtgaaagtgcatttttgtaaatgtgtacatattaaaggaagcactctgtatatttgattgaataatgccacca

SEQ ID NO: 10 - protein, 1238 aa, Homo sapien
MRAQGRGRLPRRLLLLLALWVQAARPMGYFELQLSALRNVNGELLSGACCDGDGRTTRAGGCGHDECDTYVRVCLKEYQAKVTPTGPCSYGHGATPVLGGNSFYLPPAGAAGDRARARARAGGDQDPGLVVIPFQFAWPRSFTLIVEAWDWDNDTTPNEELLIERVSHAGMINPEDRWKSLHFSGHVAHLELQIRVRCDENYYSATCNKFCRPRNDFFGHYTCDQYGNKACMDGWMGKECKEAVCKQGCNLLHGGCTVPGECRCSYGWQGRFCDECVPYPGCVHGSCVEPWQCNCETNWGGLLCDKDLNYCGSHHPCTNGGTCINAEPDQYRCTCPDGYSGRNCEKAEHACTSNPCANGGSCHEVPSGFECHCPSGWSGPTCALDIDECASNPCAAGGTCVDQVDGFECICPEQWVGATCQLDANECEGKPCLNAFSCKNLIGGYYCDCIPGWKGINCHINVNDCRGQCQHGGTCKDLVNGYQCVCPRGFGGRHCELERDECASSPCHSGGLCEDLADGFHCHCPQGFSGPLCEVDVDLCEPSPCRNGARCYNLEGDYYCACPDDFGGKNCSVPREPCPGGACRVIDGCGSDAGPGMPGTAASGVCGPHGRCVSQPGGNFSCICDSGFTGTYCHENIDDCLGQPCRNGGTCIDEVDAFRCFCPSGWEGELCDTNPNDCLPDPCHSRGRCYDLVNDFYCACDDGWKGKTCHSREFQCDAYTCSNGGTCYDSGDTFRCACPPGWKGSTCAVAKNSSCLPNPCVNGGTCVGSGASFSCICRDGWEGRTCTHNTNDCNPLPCYNGGICVDGVNWFRCECAPGFAGPDCRINIDECQSSPCAYGATCVDEINGYRCSCPPGRAGPRCQEVIGFGRSCWSRGTPFPHGSSWVEDCNSCRCLDGRRDCSKVWCGWKPCLLAGQPEALSAQCPLGQRCLEKAPGQCLRPPCEAWGECGAEEPPSTPCLPRSGHLDNNCARLTLHFNRDHVPQGTTVGAICSGIRSLPATRAVARDRLLVLLCDRASSGASAVEVAVSFSPARDLPDSSLIQGAAHAIVAAITQRGNSSLLLAVTEVKVETVVTGGSSTGLLVPVLCGAFSVLWLACVVLCVWWTRKRRKERERSRLPREESANNQWAPLNPIRNPIERPGGHKDVLYQCKNFTPPPRRADEALPGPAGHAAVREDEEDEDLGRGEEDSLEAEKFLSHKFTKDPGRSPGRPAHWASGPKVDNRAVRSINEARYAGKE

SEQ ID NO: 11 - DNA, 983 bp, Homo sapien
ggcacgaggcctgacatggagcctgccagctccgtcagccctgactcggcccggagctgagctccccacctgccggtagcccaggagatggagcagcccagcccacgtgcccggccttccgcccctgacttcacttgataacaaactagaaactgaaacagggtcgggatgccgatgccggcttggagttagagatgagtcaccgctgagagcagctgcagtagctgagcagtggcagcagagaggcagacgtgagctgagggcgcagaggcaggcagcatctctgagggtccccaaggagcatggctgggagccgtgaggtggtggccatggactgcgagatggtggggctggggccccaccgggagagtggcctggctcgttgcagcctcgtgaacgtccacggtgctgtgctgtacgacaagttcatccggcctgagggagagatcaccgattacagaacccgggtcagcggggtcacccctcagcacatggtgggggccacaccatttgccgtggccaggctagagatcctgcagctcctgaaaggcaagctggtggtgggtcatgacctgaagcacgacttccaggcactgaaagaggacatgagcggctacacaatctacgacacgtccactgacaggctgttgtggcgtgaggccaagctggaccactgcaggcgtgtctccctgcgggtgctgagtgagcgcctcctgcacaagagcatccagaacagcctgcttggacacagctcggtggaagatgcgagggcaacgatggagctctatcaaatctcccagagaatccgagcccgccgagggctgccccgcctggctgtgtcagactgaagccccatccagcccgttccgcagggactagaggctttcggctttttgggacagcaactaccttgcttttggaaaatacatttttaatagtaaagtggctctatattttctctacgcaaaaaaaaaaaaaaaaaa

SEQ ID NO: 12 - protein, 181 aa, Homo sapien
MAGSREVVAMDCEMVGLGPHRESGLARCSLVNVHGAVLYDKFIRPEGEITDYRTRVSGVTPQHMVGATPFAVARLEILQLLKGKLVVGHDLKHDFQALKEDMSGYTIYDTSTDRLLWREAKLDHCRRVSLRVLSERLLHKSIQNSLLGHSSVEDARATMELYQISQRIRARRGLPRLAVSD

SEQ ID NO: 13 - DNA, 2478 bp, Homo sapien
ctcagcttctttgcgtaaccaatactggaaggcatttaaaggacctctgccgcctcagaccttgcagttaactccgccctgacccacccttcccgatgcagtccctgatgcaggctcccctcctgatcgccctgggcttgcttctcgcgacccctgcgcaagcccacctgaaaaagccatcccagctcagtagcttttcctgggataactgtgatgaagggaaggaccctgcggtgatcagaagcctgactctggagcctgaccccatcgtcgttcctggaaatgtgaccctcagtgtcgtgggcagcaccagtgtccccctgagttctcctctgaaggtggatttagttttggagaaggaggtggctggcctctggatcaagatcccatgcacagactacattggcagctgtacctttgaacacttctgtgatgtgcttgacatgttaattcctactggggagccctgcccagagcccctgcgtacctatgggcttccttgccactgtcccttcaaagaaggaacctactcactgcccaagagcgaattcgttgtgcctgacctggagctgcccagttggctcaccaccgggaactaccgcatagagagcgtcctgagcagcagtgggaagcgtctgggctgcatcaagatcgctgcctctctaaagggcatatagcatggcatctgccacagcagaatggagcggtgtgaggaaggtcccttttcctctgttttgtgtttgccaaggccaaactcccactctctgcccccctttaatcccctttctacagtgagtccactaccctcactgaaaatcattttgtaccacttacattttaggctggggcaagcagccctgacctaagggagaatgagttggacagttcttgatagcccagggcatctgctgggctgaccacgttactcatccccgttaacattctctctaaagagcctcgttcatttccaaagcagttaaggaatgggaacagagtgttttaggacctgaagaatctttatgactctctctctttctctctttttttttttgtcactaagttaaaagcgaagtgagagtattaacgtttttgttctcctccggccccctgttacaatgaaggggcaaaagtatttgctcttagtctattcctcccttaacttctgtgactaatttttatttcctttctagatttgcccaattaatactagggtgcagtgtatcctggagaggtagggtgtgtgggggaggaatcccttgggggagatattaggagtgctctgttgtttacaaactcaggtacccgcagggcctagcaagagacttaaatgactgataagaaccgtgagaaacatgttgcttccaggcttgatttcgatttttcgctttttttttttgggacggagtctcgctttgtcaccaggctggagtgcagtggtgcaatctcacctcactgcaacctccgcctcctgggttcaagcaattctcctgcctcagcctcccaagtagcttggactacaggccctgccaccacgcccggctaatttgtgtatttttagtagagatggggtttcaccatgttggccaggatggtctcgatctcttgacctcgtgatccgtccaccttggccttgcaaagcgctggattacaggcatgagccactacacccagccgatttttcctttttgattaaagatgctattacaatgtaaatatttcttacacagaaagtcacagcacatgtgcccattgatacaaggctgctgaggcctggtctccagttggaaatataattaagggtggcagggactggagtcagttggagagtgcatagccagtctgtgaagacaactgccagatactggcaatactccagcctggtgacagagtgagactctgtctcaaaaaaaaagtttcaatgtttactcctagagaagccaaaaatccagatttgtatatgaaatcttaccattttaaaagattggcagctaattatttttttaaaaagctgtgcagtgtgatgtgtcccaaacggactggctcatgggtggccacgtcacaacctctgatctcagaccgtgcatgccttgtcctcttaagacaactcctgtggcaccgtttctccctccacagggccaaagccatagtgtccggtcccaaggacaaggctcttccagtgctaggagaggtatgagcagcctctcacctgtgagctgtggggatcacaaggctgcctgcctcagtcttggagtcctgttgggtgaatgaggcagatgggaaagagcctcaccagcagctgcttttggagcaggggtccaaggaagagagggtggcctcgacatcaaactgcctggatttttctaccaccctgttacatcataacaacttctgaaacacacaccagccctgagttctgggctcatttgaagcctggaatagcaataaatctttttaacttgcaaaaaaaaaaaaaaaaaa

SEQ ID NO: 14 - protein, 193 aa, Homo sapien
MQSLMQAPLLIALGLLLATPAQAHLKKPSQLSSFSWDNCDEGKDPAVIRSLTLEPDPIVVPGNVTLSVVGSTSVPLSSPLKVDLVLEKEVAGLWIKIPCTDYIGSCTFEHFCDVLDMLIPTGEPCPEPLRTYGLPCHCPFKEGTYSLPKSEFVVPDLELPSWLTTGNYRIESVLSSSGKRLGCIKIAASLKGI

SEQ ID NO: 15 - DNA, 5391 bp, Homo sapien
cgcttccctcactgggtcctgcgtccttgggcaggcgatgcccctgcggggaggggctggtccatccccggccagccacggacccacgcatggacccagcgacccacggacctgcttacctgggcgcggcgcgggtggcatgcggccacacggaaggggcgcgctgggctgctgcggcctctgcagcttctacacctgccacggggcggccggagatgaaatcatgcaccaggacatcgtcccgctctgtgctgccgacatccaggaccagctaaagaagcgctttgcttacctgtccggtgggcgggggcaggacggaagcccggttatcaccttccctgactacccggccttcagcgagattccggacaaggagttccagaatgtcatgacctacctcaccagcatccccagcctgcaggacgctggcatcggattcatcctggtgatagaccggcgacgggacaaatggacctccgtgaaggcgtccgtcctgcgcatcgcagcatctttcccggcaaacctgcagctcgtcctcgtgcttcgcccgacgggttttttccaaaggactctctccgacatcgctttcaaattcaatagagatgactttaagatgaaggtgccggtcataatgctgagctccgtaccagacttacacggttacatcgataagtcgcagctgaccgaggacctgggtgggaccctggactactgccactcccggtggctgtgccagcgcacggccatcgaaagtttcgccctcatggtgaagcagacggctcagatgctgcagtccttcgggaccgagctggctgaaacagagctgcccaatgacgtccagtcgacaagctcagtgctgtgtgcgcacacagagaagaaggacaaggcgaaggaggatttgaggctggcactgaaagaggggcacagtgtcctggagagcctcagggagctgcaggctgagggctcagagcccagtgtgaaccaggaccagcttgacaaccaggccaccgtgcagaggctcctggcccagctgaacgaaaccgaggctgccttcgatgagttctgggcaaagcatcagcagaaactggagcagtgtctgcagctccggcactttgagcagggcttccgggaggtcaaagccatcttggacgcagcgtcccagaagatagcaaccttcacagacatcggcaacagcctggcgcatgtggagcacctgctgagggacctggccagcttcgaggagaaatcaggcgtggccgtggagagggcccgggccctgtctctggacggcgagcagctcattgggaacaagcactacgcggtagactccatccgcccaaagtgccaggagctccggcacctctgtgaccagttctctgcggagatcgcaaggaggagggggctgctcagcaagtccctggagctgcaccgccgcctggagacgtccatgaagtggtgtgatgaagggatttacctgctggcctcacaacctgtggacaagtgccagtcccaggacggcgcggaggctgccctccaggaaatcgagaagtttttggagaccggtgcggaaaataagatccaggagctcaacgcgatttacaaggaatacgaatccatcctcaaccaagatctcatggagcacgtgcgaaaggtcttccagaagcaggcaagcatggaggaggtgttccaccgcaggcaggccagcctgaagaagctggcggccaggcagacgcggcccgtgcagccggtggcccccagacccgaggcactggcaaagtcgccctgcccctccccaggcattcggcgaggctctgagaactccagctccgagggcggtgcgctccggagagggccctaccggagggccaagagtgagatgagtgagagccggcagggccgcggctcagcgggggaggaggaggaaagcctggccatcctgcgcaggcacgtgatgagcgagctcctggacacagaacgggcctacgtggaggagctgctgtgcgtcctggagggctacgccgcggagatggataacccactgatggctcacctcctgtcaacaggccttcacaacaagaaggatgttttgtttggaaacatggaggaaatctatcacttccacaacaggatattcctcagggagctggaaaactacactgactgcccagaactggttggaagatgctttctggagaggatggaagatttccagatctatgagaagtactgtcagaacaagccccgctctgagagcctgtggagacagtgctccgactgcccgtttttccaggaatgccagagaaagctggaccacaagctgagcctggactcctacctgctgaagccagtgcagaggatcaccaagtaccagctgctgctcaaggaaatgctgaaatacagcaggaactgcgagggggctgaggacctgcaggaggcgctgagctccatcctgggcatcctgaaggccgtgaacgactccatgcacctcatcgctatcaccggctatgacgggaatctcggcgacctgggcaagctgctgatgcagggctcattcagcgtctggaccgaccacaagaggggccacaccaaggtgaaggagctggccaggttcaagcccatgcagcggcacctgttcctgcacgagaaggcagtgctcttctgcaagaagagggaggagaatggggaggggtatgagaaagctccctcctacagctacaagcagtccttaaacatggctgccgttggcattacggagaacgtgaagggagatgctaagaagttcgagatctggtacaacgcgcgcgaggaggtctacatcgtccaggcgccaactcctgagattaaagccgcgtgggtgaatgaaattcggaaagtgctgaccagccagctgcaggcttgtagagaagccagccagcaccgggcgctggagcagtcacagagcctgcccctgccggccccgaccagcaccagtccctcaagaggaaactcaaggaacatcaagaagctggaagaaaggaaaacagaccccctaagcctggagggatacgtcagctcagcgccactgacaaagccccccgaaaagggcaaaggttggagcaaaacgtcccactcactggaggcacctgaggacgacgggggctggtcaagtgcagaggagcagattaactcgtccgacgcagaggaggacggcgggttgggccccaagaagctggttccaggtaaatacacggtcgtggcggaccacgagaagggaggccccgatgcgctgcgcgtgaggagcggggacgtggtggagctggtgcaggagggcgacgagggcctctggtaagaccccgcgctcagccccggactgccccgcacgtggctgccgctgaccctcgccccttgcaggtacgtcagggacccgaccactggcaaggagggctgggtgccggccagcagcctgtccgtccggctcggcccgtccggctcggcccagtgcctgagcagctcaggtaaggcccacgtgccccgagcccacccgtgacgctgccaagggcccgggcgaggaagctgccccgtgtgtgcccggcagagccgacgccgaagcccgtccccgcctgatctccccgcagagtcgagcccggggtcggccgtgctgagcaactcgtccagctgcagcgagggcggccaggcccccttctccgacctgcaggggtagcgcggcctcggcgccggagacccgcgcgctgtctggggctgcggtggcgtggggagggcgcggcccccggacgccccgaggaaggggcacctcaccgccccgacccagagcgcctggccgtgcgggctgcagaggacccctccggggcagaggcaggttccacggaagaccccggcccgctggggcttccccggagactccagagcccacagaggaggggccgcagggaacagccccgggcggcaggcgccgggcagcggcatctcgtcctggctccaccgtgctgcttctgcctccggacggtgctttcaggggacgcgcggaccgtggtggagctgcttccggagaagtggaggatcctctggccaacggcctgaggagagcggggcacggggtctctttagcttttacaagttttaggattttttcaagcagggatcaatcccgtggccattttttgtggtactttggcctcaattcttcaccaggaatcactgtgtttacatgaaatgacaatttgatactgtatttgatagaaaactatttttttgttaccggggtttacatagaagcacgttgtttataccactaagtgactttggcggggctctcccatggaaacggatggcactccctgaagctccctggtcacaggtggatgaaaacgtgtccgtgggtgacatcaggtggtgtctccaccaccaaaagcagttagaagccaaggagattcctttatctacctagggttcattttcaaaagaaaatttaaactataatttaaacaattaacgttcttttctacaaaaaaaaatgcagggacttgatttttttaaagagcttcactgaattaggatatttttattgcttttaaagaaaatacaaagttgcagtttctgcagggtgtggcgtggaccagtgctgccgaccatagctcagagagccctgcccctgcctcactgcactgcagcctcctcggaggccgcacctccactccactccccacgcgccccctgcctcccacccaggtccacctgccacctggtgaccaccttgagtacagaagtgaaagtggggagagtattttattcaagtcacagcagaactggaaaaaaactcttctgttttaccaacttcttgtgtttcagaaacatattctgttcaaaacttttgaagccctttcggtgtctagtctgcagatgtttttgtatgtgtgcacctctgaccatgtgtgtacatatgtgtcttgctggaaaggacatattcgctgtccccgtgctgctgggagggccgcctcacagcctcacggttcccagccccagcacagtggaggcaggcgtggctgcattcccctcacgctaccctcccagcggcttgtagccgtcactggccagacctccagggtgcggaatcaaataggaagcatgcagagactcggcagcttttcctctgatgtgtaagttatttggaacgcgtgctgtgtcccgcgatgtccctgatgtactgtgcaggcgcggtgcctccgtctcgtcgcacagctgcgcgcccttgtgtgaccctccccataaaggcactttacagcttcatgtttcatccactgtcacttttttttaactgctgatgtaaatggaattttaaaagcagagttctttattgtatggatgacgtttgaataaatatcagcaactcctgcc

SEQ ID NO: 16 - protein, 1108 aa, Homo sapien
ASLTGSCVLGQAMPLRGGAGPSPASHGPTHGPSDPRTCLPGRGAGGMRPHGRGALGCCGLCSFYTCHGAAGDEIMHQDIVPLCAADIQDQLKKRFAYLSGGRGQDGSPVITFPDYPAFSEIPDKEFQNVMTYLTSIPSLQDAGIGFILVIDRRRDKWTSVKASVLRIAASFPANLQLVLVLRPTGFFQRTLSDIAFKFNRDDFKMKVPVIMLSSVPDLHGYIDKSQLTEDLGGTLDYCHSRWLCQRTAIESFALMVKQTAQMLQSFGTELAETELPNDVQSTSSVLCAHTEKKDKAKEDLRLALKEGHSVLESLRELQAEGSEPSVNQDQLDNQATVQRLLAQLNETEAAFDEFWAKHQQKLEQCLQLRHFEQGFREVKAILDAASQKIATFTDIGNSLAHVEHLLRDLASFEEKSGVAVERARALSLDGEQLIGNKHYAVDSIRPKCQELRHLCDQFSAEIARRRGLLSKSLELHRRLETSMKWCDEGIYLLASQPVDKCQSQDGAEAALQEIEKFLETGAENKIQELNAIYKEYESILNQDLMEHVRKVFQKQASMEEVFHRRQASLKKLAARQTRPVQPVAPRPEALAKSPCPSPGIRRGSENSSSEGGALRRGPYRRAKSEMSESRQGRGSAGEEEESLAILRRHVMSELLDTERAYVEELLCVLEGYAAEMDNPLMAHLLSTGLHNKKDVLFGNMEEIYHFHNRIFLRELENYTDCPELVGRCFLERMEDFQIYEKYCQNKPRSESLWRQCSDCPFFQECQRKLDHKLSLDSYLLKPVQRITKYQLLLKEMLKYSRNCEGAEDLQEALSSILGILKAVNDSMHLIAITGYDGNLGDLGKLLMQGSFSVWTDHKRGHTKVKELARFKPMQRHLFLHEKAVLFCKKREENGEGYEKAPSYSYKQSLNMAAVGITENVKGDAKKFEIWYNAREEVYIVQAPTPEIKAAWVNEIRKVLTSQLQACREASQHRALEQSQSLPLPAPTSTSPSRGNSRNIKKLEERKTDPLSLEGYVSSAPLTKPPEKGKGWSKTSHSLEAPEDDGGWSSAEEQINSSDAEEDGGLGPKKLVPGKYTVVADHEKGGPDALRVRSGDVVELVQEGDEGLW

SEQ ID NO: 17 - DNA, 1312 bp, Homo sapien
ctagaattcagcggccgctgaattctagaacccaggtgcaactgacatgggtgaaccccagggatccatgcggattctagtgacagggggctctgggctggtaggcaaagccatccagaaggtggtagcagatggagctggacttcctggagaggactgggtgtttgtctcctctaaagacgccgatctcacggatacagcacagacccgcgccctgtttgagaaggtccaacccacacacgtcatccatcttgctgcaatggtggggggcctgttccggaatatcaaatacaatttggacttctggaggaaaaacgtgcacatgaacgacaacgtcctgcactcggcctttgaggtgggggcccgcaaggtggtgtcctgcctgtccacctgtatcttccctgacaagacgacctacccgatagatgagaccatgatccacaatgggcctccccacaacagcaattttgggtactcgtatgccaagaggatgatcgacgtgcagaacagggcctacttccagcagtacggctgcaccttcaccgctgtcatccccaccaacgttttcgggccccacgacaacttcaacatcgaggatggccacgtgctgcctggcctcatccacaaggtgcacctggccaagagcagcggctcggccctgacggtgtggggtacagggaatccgcggaggcagttcatatactcgctggacctggcccagctctttatctgggtcctgcgggagtacaatgaagtggagcccatcatcctctccgtgggcgaggaagatgaggtctccatcaaggaggcagccgaggcggtggtggaggccatggacttccatggggaagtcacctttgatacaaccaagtcggatgggcagtttaagaagacagccagtaacagcaagctgaggacctacctgcccgacttccggttcacacccttcaagcaggcggtgaaggagacctgtgcttggttcactgacaactacgagcaggcccggaagtgaagctggaagacaggatcaggtgccagcggaccatcggctggcagagcccagcggccaccacccgtcaaccctgccaggagctgagggcaccacccagcaacctgggcctgcattccatccgctctgcagccccaagcatctttccagtggggcccccattcacgttggtcctcagggaaaccagggtccggggcaggcccggcgctttgctccccacaccagccccctgcgcgtgtccactctgatcctgcatcccactccctgggagccaataaagtgcattttcacagaaaaaaaaaa

SEQ ID NO: 18 - protein, 321 aa, Homo sapien
MGEPQGSMRILVTGGSGLVGKAIQKVVADGAGLPGEDWVFVSSKDADLTDTAQTRALFEKVQPTHVIHLAAMVGGLFRNIKYNLDFWRKNVHMNDNVLHSAFEVGARKVVSCLSTCIFPDKTTYPIDETMIHNGPPHNSNFGYSYAKRMIDVQNRAYFQQYGCTFTAVIPTNVFGPHDNFNIEDGHVLPGLIHKVHLAKSSGSALTVWGTGNPRRQFIYSLDLAQLFIWVLREYNEVEPIILSVGEEDEVSIKEAAEAVVEAMDFHGEVTFDTTKSDGQFKKTASNSKLRTYLPDFRFTPFKQAVKETCAWFTDNYEQARK

SEQ ID NO: 19 - DNA, 3301 bp, Homo sapien
  Unsure 2966-2972: Unknown base
gaattctgcggagcctgcgggacggcggcgggttggcccgtaggcagccgggacagtgttgtacagtgttttgggcatgcacgtgatactcacacagtggcttctgctcaccaacagatgaagacagatgcaccaacgagggtctggaatggtctggagtggtctggaaagcagggtcagatacccctggaaaactgaagcccgtggagcaatgatctctacaggactgcttcaaggctgatgggaaccaccctgtagaggtccatctgcgttcagacccagacgatgccagagctatgactgggcctgcaggtgtggcgccgaggggagatcagccatggagcagccacaggaggaagcccctgaggtccgggaagaggaggagaaagaggaagtggcagaggcagaaggagccccagagctcaatgggggaccacagcatgcacttccttccagcagctacacagacctctcccggagctcctcgccaccctcactgctggaccaactgcagatgggctgtgacggggcctcatgcggcagcctcaacatggagtgccgggtgtgcggggacaaggcatcgggcttccactacggtgttcatgcatgtgaggggtgcaagggcttcttccgtcgtacgatccgcatgaagctggagtacgagaagtgtgagcgcagctgcaagattcagaagaagaaccgcaacaagtgccagtactgccgcttccagaagtgcctggcactgggcatgtcacacaacgctatccgttttggtcggatgccggaggctgagaagaggaagctggtggcagggctgactgcaaacgaggggagccagtacaacccacaggtggccgacctgaaggccttctccaagcacatctacaatgcctacctgaaaaacttcaacatgaccaaaaagaaggcccgcagcatcctcaccggcaaagccagccacacggcgccctttgtgatccacgacatcgagacattgtggcaggcagagaaggggctggtgtggaagcagttggtgaatggcctgcctccctacaaggagatcagcgtgcacgtcttctaccgctgccagtgcaccacagtggagaccgtgcgggagctcactgagttcgccaagagcatccccagcttcagcagcctcttcctcaacgaccaggttacccttctcaagtatggcgtgcacgaggccatcttcgccatgctggcctctatcgtcaacaaggacgggctgctggtagccaacggcagtggctttgtcacccgtgagttcctgcgcagcctccgcaaacccttcagtgatatcattgagcctaagtttgaatttgctgtcaagttcaacgccctggaacttgatgacagtgacctggccctattcattgcggccatcattctgtgtggagaccggccaggcctcatgaacgttccacgggtggaggctatccaggacaccatcctgcgtgccctcgaattccacctgcaggccaaccaccctgatgcccagtacctcttccccaagctgctgcagaagatggctgacctgcggcaactggtcaccgagcacgcccagatgatgcagcggatcaagaagaccgaaaccgagacctcgctgcaccctctgctccaggagatctacaaggacatgtactaacggcggcacccaggcctccctgcagactccaatggggccagcactggaggggcccacccacatgacttttccattgaccagctctcttcctgtctttgttgtctccctctttctcagttcctctttcttttctaattcctgttgctctgtttcttcctttctgtaggtttctctcttcccttctcccttctcccttgccctccctttctctctcctatccccacgtctgtcctcctttcttattctgtgagatgttttgtattatttcaccagcagcatagaacaggacctctgcttttgcacaccttttccccaggagcagaagagagtgggcctgccctctgccccatcattgcacctgcaggcttaggtcctcacttctgtctcctgtcttcagagcaaaagacttgagccatccaaagaaacactaagctctctgggcctgggttccagggaaggctaagcatggcctggactgactgcagccccctatagtcatggggtccctgctgcaaaggacagtggcagaccccggcagtagagccgagatgcctccccaagactgtcattgcccctccgatcgtgaggccacccactgacccaatgatcctctccagcagcacacctcagccccactgacacccagtgtccttccatcttcacactggtttgccaggccaatgttgctgatggcccctccagcacacacacataagcactgaaatcactttacctgcaggcaccatgcacctcccttccctccctgaggcaggtgagaacccagagagaggggcctgcaggtgagcaggcagggctgggccaggtctccggggaggcaggggtcctgcaggtcctggtgggtcagcccagcacctcgcccagtgggagcttcccgggataaactgagcctgttcattctgatgtccatttgtcccaatagctctactgccctccccttcccctttactcagcccagctggccacctagaagtctccctgcacagcctctagtgtccggggaccttgtgggaccagtcccacaccgctggtccctgccctcccctgctcccaggttgaggtgcgctcacctcagagcagggccaaagcacagctgggcatgccatgtctgagcggcgcagagccctccaggcctgcaggggcaaggggctggctggagtctcagagcacagaggtaggagaactggggttcaagcccaggcttcctgggtcctgcctggtcctccctcccaaggagccattctatgtgactctgggtggaagtgcccagcccctgcctgacggnnnnnnngatcactctctgctggcaggattcttcccgctccccacctacccagctgatgggggttggggtgcttctttcagccaaggctatgaagggacagctgctgggacccacctccccccttccccggccacatgccgcgtccctgcccccacccgggtctggtgctgaggatacagctcttctcagtgtctgaacaatctccaaaattgaaatgtatatttttgctaggagccccagcttcctgtgtttttaatataaatagtgtacacagactgacgaaactttaaataaatgggaattaaatatttaaaaaaaaaagcggccgcgaattc

SEQ ID NO: 20 - protein, 441 aa, Homo sapien
  Unsure 2966-2972: Unknown amino acid
MEQPQEEAPEVREEEEKEEVAEAEGAPELNGGPQHALPSSSYTDLSRSSSPPSLLDQLQMGCDGASCGSLNMECRVCGDKASGFHYGVHACEGCKGFFRRTIRMKLEYEKCERSCKIQKKNRNKCQYCRFQKCLALGMSHNAIRFGRMPEAEKRKLVAGLTANEGSQYNPQVADLKAFSKHIYNAYLKNFNMTKKKARSILTGKASHTAPFVIHDIETLWQAEKGLVWKQLVNGLPPYKEISVHVFYRCQCTTVETVRELTEFAKSIPSFSSLFLNDQVTLLKYGVHEAIFAMLASIVNKDGLLVANGSGFVTREFLRSLRKPFSDIIEPKFEFAVKFNALELDDSDLALFIAAIILCGDRPGLMNVPRVEAIQDTILRALEFHLQANHPDAQYLFPKLLQKMADLRQLVTEHAQMMQRIKKTETETSLHPLLQEIYKDMY

SEQ ID NO: 21 - DNA, 1835 bp, Homo sapien
ctcgctgcgccaccgcctcccgccacccctgcccgcccgacagcgccgccgcctgccccgccatgggtcgacagaaggagctggtgtcccgctgcggggagatgctccacatccgctaccggctgctccgacaggcgctggccgagtgcctggggaccctcatcctggtgatgtttggctgtggctccgtggcccaggttgtgctcagccggggcacccacggtggtttcctcaccatcaacctggcctttggctttgctgtcactctgggcatcctcatcgctggccaggtctctggggcccacctgaaccctgccgtgacctttgccatgtgcttcctggctcgtgagccctggatcaagctgcccatctacaccctggcacagacgctgggagccttcttgggtgctggaatagtttttgggctgtattatgatgcaatctggcacttcgccgacaaccagctttttgtttcgggccccaatggcacagccggcatctttgctacctacccctctggacacttggatatgatcaatggcttctttgaccagttcataggcacagcctcccttatcgtgtgtgtgctggccattgttgacccctacaacaaccccgtcccccgaggcctggaggccttcaccgtgggcctggtggtcctggtcattggcacctccatgggcttcaactccggctatgccgtcaaccctgcccgggactttggcccccgcctttttacagcccttgcgggctggggctctgcagtcttcacgaccggccagcattggtggtgggtgcccatcgtgtccccactcctgggctccattgcgggtgtcttcgtgtaccagctgatgatcggctgccacctggagcagcccccaccctccaacgaggaagagaatgtgaagctggcccatgtgaagcacaaggagcagatctgagtgggcaggggccatctccccactccgctgccctggccttgagcatccactgactgtccaagggccactcccaagaagcccccttcacgatccaccctttcaggctaaggagctccctatctaccctcaccccacgagacagccccttcaggatttccactggaccttgcccaaatagcaccttaggccactgcccctaagctggggtggaaccggaatttgggtcaatacatccttttgtctcccaagggaagagaatgggcagcaggtatgtgtgtgtgtgcatgtgtgtgcatgtgtgtgcatgtgtgtgcaggggtgtgtgtgtgtggggggggttcccagatattcagggcaagggaccagtcggaagggattctggctattgggggagcccagagacaggggaaggcagcctgtccatctgtgcataaggagaggaaagttccagggtgtgtatgtttcaggggcttcacatggaggagctgcagatagatatgtgtttctgtgtatgtgtatgtctgcctttttttctaagtgggggcttctacaggcttttgggaagtagggtggatgtgggtagggctgggaggagggggccacagcttaggtttggagctctggatgtacatacataagtaggagcagtgggacgtgtttctgtcataatgcaggcatgaagggtggagtgaagtcaggtcataagtttcatgtttgcttttgttttgttttgtttttaatgtatgtagcagatgttacagtcttagggatccgggatgggagaccccactttagaaagggtcgtcactcctttaatcctctactcaacaatgtactcttttacttttatattaaaaaaaataaaataaatatgtgcctaaaaaaaaaaaaaaa

SEQ ID NO: 22 - protein, 292 aa, Homo sapien
MGRQKELVSRCGEMLHIRYRLLRQALAECLGTLILVMFGCGSVAQVVLSRGTHGGFLTINLAFGFAVTLGILIAGQVSGAHLNPAVTFAMCFLAREPWIKLPIYTLAQTLGAFLGAGIVFGLYYDAIWHFADNQLFVSGPNGTAGIFATYPSGHLDMINGFFDQFIGTASLIVCVLAIVDPYNNPVPRGLEAFTVGLVVLVIGTSMGFNSGYAVNPARDFGPRLFTALAGWGSAVFTTGQHWWWVPIVSPLLGSIAGVFVYQLMIGCHLEQPPPSNEEENVKLAHVKHKEQI

SEQ ID NO: 23 - DNA, 5576 bp, Homo sapien
caagtagaacctgaagaacctgagcagatcaacatcaacaactacagtaccagcaaccccagtatatctgtgttatctgatgggacggttgacagtggtcagggatcctctgtcttcacagaatctcgagtgagcagccaacagacagtttcatatggttcccaacatgaacaggcacattctacaggcacagtcccagggcatataccttctactgtccaagcacagtctcagccccatggggtatatccaccctcaagtgtgcagcagggaatacagcagacagcccctcctcaacagacagtgcagtattcactttcacagacatcaacctccagtgaggccactactgcacagccagtgagtcaacctcaagctccacaagtcttgcctcaagtatcagctggaaaacagggcttcccacctcgactgccaccacagtacccaggagattcaaatattgctccctcttccaacgtggcttctgtttgcatccattctacagtcctatcccctcccatgccgacagaagtactggctacacctgggtactttcccacagtggtgcagccttatgtggaatcaaatcttttagttcctatgggtggtgtaggaggacaggttcaagtgtcccagccaggagggagtttagcacaagcccccactacatcctcccagcaagcagttttggagagtactcagggagtctctcaggttgctcctgcagagccagttgcagtagcacagccccaagctacccagccgaccactttggcttcctctgtagacagtgcacattcagatgttgcttcaggtatgagtgatggcaatgagaacgtcccatcttccagtggaaggcatgaaggaagaactacaaaacggcattaccgaaaatctgtaaggagtcgctctcgacatgaaaaaacttcacgcccaaaattaagaattttgaatgtttcaaataaaggagaccgagtagtagaatgtcaattagagactcataataggaaaatggttacattcaaatttgacctagatggtgacaaccccgaggagatagcaacaattatggtgaacaatgactttattctagcaatagagagagagtcgtttgtggatcaagtgcgagaaattattgaaaaagctgatgaaatgctcagtgaggatgtcagtgtggaaccagagggtgatcagggattggagagtctacaaggaaaggatgactatggcttttcaggttctcagaaattggaaggagagttcaaacaaccaattcctgcgtcttccatgccacagcaaataggcattcctaccagttctttaactcaagttgttcattctgcgggaaggcggtttatagtgagtcctgtgccagaaagccgattacgagaatcaaaagttttccccagtgaaataacagatacagttgctgcctctacagctcagagccctggaatgaacttgtctcactctgcatcatcccttagtctacaacaggccttttctgaacttagacgtgcccaaatgacagaaggacccaacacagcacctccaaactttagtcatacaggaccaacatttccagtagtacctcctttcttaagtagcattgctggagtcccaactacagcagcagccacagcaccagtccctgcaacaagcagccctcctaatgacatttccacatcagtaattcagtctgaggttacagtgcccactgaagaggggattgctggagttgccaccagcacaggtgtggtaacttcaggtggtctccccataccacctgtgtctgaatcaccagtactttccagcgtagtttcaagtatcacaatacctgcagttgtctcaatatctactacatccccgtcacttcaagtccccacatccacatctgagatcgttgtttctagtacagcactgtatccttcagtaacagtttcagcaacttcagcctctgcagggggcagtactgctaccccaggtcctaagcctccagctgtagtatctcagcaggcagcaggcagcactactgtgggagccacattaacatcagtttctaccaccacttcattcccaagcacagcttcacagctgtccattcagcttagcagcagtacttctactcctactttagctgaaaccgtggtagttagcgcacactcactagataagacatctcatagcagtacaactggattggctttctccctctctgcaccatcttcctcttcctctcctggagcaggagtgtctagttatatttctcagcctggtgggctgcatcctttggtcattccatcagtgatagcttctactcctattcttccccaagcagcaggacctacttctacacctttattaccccaagtacctagtatcccacccttggtacagcctgttgccaatgtgcctgctgtacagcagacactaattcatagtcagcctcaaccagctttgcttcccaaccagccccatactcattgtcctgaagtagattctgatacacaacccaaagctcctggaattgatgacataaagactctagaagaaaagctgcggtctctgttcagtgaacacagctcatctggagctcagcatgcctctgtctcactggagacctcactagtcatagagagcactgtcacaccaggcatcccaactactgctgttgcaccaagcaaactcctgacttctaccacaagtacttgcttaccaccaaccaatttaccactaggaacagttgctttgccagttacaccagtggtcacacctgggcaagtttctaccccagtcagcactactacatcaggagtgaaacctggaactgctccctccaagccacctctaactaaggctccggtgctgccagtgggtactgaacttccagcaggtactctacccagcgagcagctgccaccttttccaggaccttctctaacccagtcccagcaacctctagaggatcttgatgctcaattgagaagaacacttagtccagagatgatcacagtgacttctgcggttggtcctgtgtccatggcggctccaacagcaatcacagaagcaggaacacagcctcagaagggtgtttctcaagtcaaagaaggccctgtcctagcaactagttcaggagctggtgtttttaagatgggacgatttcaggtttctgttgcagcagacggtgcccagaaagagggtaaaaataagtcagaagatgcaaagtctgttcattttgaatccagcacctcagagtcctcagtgctatcaagtagtagtccagagagtaccttggtgaaaccagagccgaatggcataaccatccctggtatctcttcagatgtgccagagagtgcccacaaaactactgcctcagaggcaaagtcagacactgggcagcctaccaaggttggacgttttcaggtgacaactacagcaaacaaagtgggtcgtttctctgtatcaaaaactgaggaccagatcactgacacaaagaaagaaggaccagtggcatctcctccttttatggatttggaacaagctgttcttcctgctgtgataccaaagaaagagaagcctgaactgtcagagccttcacatctaaatgggccgtcttctgacccggaggccgcttttttaagtagggatgtggatgatggttccggtagtccacactcgccccatcagctgagctcaaagagccttcctagccagaatctaagtcaaagccttagtaattcatttaactcctcttacatgagtagcgacaatgagtcagatatcgaagatgaagacttaaagttagagctgcgacgactacgagataaacatctcaaagagattcaggacctgcagagtcgccagaagcatgaaattgaatctttgtataccaaactgggcaaggtgccccctgctgttattattcccccagctgctcccctttcagggagaagacgacgacccactaaaagcaaaggcagcaaatctagtcgaagcagttccttggggaataaaagcccccagctttcaggtaacctgtctggtcagagtgcagcttcagtcttgcacccccagcagaccctccaccctcctggcaacatcccagagtccgggcagaatcagctgttacagccccttaagccatctccctccagtgacaacctctattcagccttcaccagtgatggtgccatttcagtaccaagcctttctgctccaggtcaaggtaataaagcaaccatcatcgtccaaaaacaataaaatggagatgttgccatacctgggacaaaagcctgttaaggcgggttgggagactagctgaccagaacacagcctgtgtgttgtacactgaagaatctgggtgaaaagggaagtggagtgataatgagaatcggtgggctcactgctcccattaggtgaaattactttttttcaaggaattacagtgaaaagttacatctgtgtggcctatatgacttgctcatttgggatttggaacttaggctttaatattaggctgagatttcctggatgaaattctaaggtgttttagcagtttctgaagctaatacattttcttagccattgtagaattttgttacttttaagtatgggagtggcatactaaaatgaataaccttacaattcagttttttatccataatctactttccaaatatagctctgtttattagtgattgctgaaaaaattcccacagaggaaagagcttttagtcatattagaacaagaattgaaaagacttgggcatctgggtgagaagaatgaaaaaaatataggtactggcttatgtgcctttgccacagtttcacagaaattagagatcagtctcttcacaggaagaatgcacttgattggtaaggagggcaaactagctagcattattcgaactaagaaaagcttccgcattttgcagatgggtagaattaagacctaatatttcatctcttacatatctgaccttccccccagaagcttgttcttctgtgtgccatcttagtgcatttcaccactccagcctcaagtttctaacatcttgtagttgtgttctgtctcttctcctctctctgttctaccctgtttttcccctctcacaggctgtgcgaagtttaactgtgcatctgaacaggtgacattcaaacctggtggcaggaggacccgatttctgagtacgccctgcttggctctttgtgtgtaacacctttactccttccttgtccttgtgtttctgctgcttggatctgatgtttcacgcagtccattttcatttgtctctttttgtatatcatctactcagtggcttggctgaattactgttaccctcagaagtttgggcccccacattaattatgataaaaaatgtcaaaataacaagttatctacaaatttcaatgtaactttctggtagaagtgcttcttcatggatctgtgacagagagtggatatggtatctaggcaatagattgctgggtcatttagaataatgaagactgaactccacagtcgtagtcagtgctgtctgtctgccctagcattagaaatgacgagaaatcagcca

SEQ ID NO: 24 - protein, 1419 aa, Homo sapien
QVEPEEPEQININNYSTSNPSISVLSDGTVDSGQGSSVFTESRVSSQQTVSYGSQHEQAHSTGTVPGHIPSTVQAQSQPHGVYPPSSVQQGIQQTAPPQQTVQYSLSQTSTSSEATTAQPVSQPQAPQVLPQVSAGKQGFPPRLPPQYPGDSNIAPSSNVASVCIHSTVLSPPMPTEVLATPGYFPTVVQPYVESNLLVPMGGVGGQVQVSQPGGSLAQAPTTSSQQAVLESTQGVSQVAPAEPVAVAQPQATQPTTLASSVDSAHSDVASGMSDGNENVPSSSGRHEGRTTKRHYRKSVRSRSRHEKTSRPKLRILNVSNKGDRVVECQLETHNRKMVTFKFDLDGDNPEEIATIMVNNDFILAIERESFVDQVREIIEKADEMLSEDVSVEPEGDQGLESLQGKDDYGFSGSQKLEGEFKQPIPASSMPQQIGIPTSSLTQVVHSAGRRFIVSPVPESRLRESKVFPSEITDTVAASTAQSPGMNLSHSASSLSLQQAFSELRRAQMTEGPNTAPPNFSHTGPTFPVVPPFLSSIAGVPTTAAATAPVPATSSPPNDISTSVIQSEVTVPTEEGIAGVATSTGVVTSGGLPIPPVSESPVLSSVVSSITIPAVVSISTTSPSLQVPTSTSEIVVSSTALYPSVTVSATSASAGGSTATPGPKPPAVVSQQAAGSTTVGATLTSVSTTTSFPSTASQLSIQLSSSTSTPTLAETVVVSAHSLDKTSHSSTTGLAFSLSAPSSSSSPGAGVSSYISQPGGLHPLVIPSVIASTPILPQAAGPTSTPLLPQVPSIPPLVQPVANVPAVQQTLIHSQPQPALLPNQPHTHCPEVDSDTQPKAPGIDDIKTLEEKLRSLFSEHSSSGAQHASVSLETSLVIESTVTPGIPTTAVAPSKLLTSTTSTCLPPTNLPLGTVALPVTPVVTPGQVSTPVSTTTSGVKPGTAPSKPPLTKAPVLPVGTELPAGTLPSEQLPPFPGPSLTQSQQPLEDLDAQLRRTLSPEMITVTSAVGPVSMAAPTAITEAGTQPQKGVSQVKEGPVLATSSGAGVFKMGRFQVSVAADGAQKEGKNKSEDAKSVHFESSTSESSVLSSSSPESTLVKPEPNGITIPGISSDVPESAHKTTASEAKSDTGQPTKVGRFQVTTTANKVGRFSVSKTEDQITDTKKEGPVASPPFMDLEQAVLPAVIPKKEKPELSEPSHLNGPSSDPEAAFLSRDVDDGSGSPHSPHQLSSKSLPSQNLSQSLSNSFNSSYMSSDNESDIEDEDLKLELRRLRDKHLKEIQDLQSRQKHEIESLYTKLGKVPPAVIIPPAAPLSGRRRRPTKSKGSKSSRSSSLGNKSPQLSGNLSGQSAASVLHPQQTLHPPGNIPESGQNQLLQPLKPSPSSDNLYSAFTSDGAISVPSLSAPGQGNKATIIVQKQ

SEQ ID NO: 25 - DNA, 631 bp, Homo sapien
caatacagctaaggaattatcccttgtaaataccacagacccgccctggagccaggccaagctggactgcataaagattggtatggccttagctcttagccaaacaccttcctgacaccatgagggccagcagcttcttgatcgtggtggtgttcctcatcgctgggacgctggttctagaggcagctgtcacgggagttcctgttaaaggtcaagacactgtcaaaggccgtgttccattcaatggacaagatcccgttaaaggacaagtttcagttaaaggtcaagataaagtcaaagcgcaagagccagtcaaaggtccagtctccactaagcctggctcctgccccattatcttgatccggtgcgccatgttgaatccccctaaccgctgcttgaaagatactgactgcccaggaatcaagaagtgctgtgaaggctcttgcgggatggcctgtttcgttccccagtgaagggagccggtccttgctgcacctgtgccgtccccagagctacaggccccatctggtcctaagtccctgctgcccttccccttcccacactgtccattcttcctcccattcaggatgcccacggctggagctgcctctctcatccactttccaataaa

SEQ ID NO: 26 - protein, 117 aa, Homo sapien
MRASSFLIVVVFLIAGTLVLEAAVTGVPVKGQDTVKGRVPFNGQDPVKGQVSVKGQDKVKAQEPVKGPVSTKPGSCPIILIRCAMLNPPNRCLKDTDCPGIKKCCEGSCGMACFVPQ

SEQ ID NO: 27 - DNA, 9162 bp, Homo sapien
  Unsure 7758-7776: Unknown base
cgggccggcctggtgctgcacgcctgtcagccatcgcccgagccgccggcgtctcctcccgcccagcagttcctccacgcaggggctccggaatcgcccgaccgcacacgttgccaccctgaggtctttctggaagtggatatctactcagacagtaagaattataagagctgtaagagctcatttggaggaataatggatgaaccatctcccttggcccaacctctggagctgaaccagcactctcgattcataataggttctgtgtctgaagataactcagaggatgagatcagcaacctggtgaagttggacctactggaggagaaggagggctccttgtcacctgcttctgttggctcagatacactctctgatttggggatctctagcctacaggatggcttggccttgcacataaggtccagcatgtctggcttgcacctagtaaagcagggccgagacagaaagaaaatagattctcaacgagatttcactgtggcttctccagcagaatttgttactcgcttgggggaaataaagtgattgagaaggttcttattgctaacaatggcattgcagcagtgaaatgcatgcggtctatccgtaggtggtcttatgaaatgtttcgaaatgaacgtgcaattagattcgttgtcatggtcacacctgaagaccttaaagccaatgcagaatacattaagatggcagatcactatgtgccagtgcctggaggaccaaacaacaacaactatgcaaatgtggaattaattcttgatattgctaaaaggatcccagtacaagcagtgtgggctggctggggtcatgcttctgagaatcccaaactaccggaacttctcttgaaaaatggcattgccttcatgggtcctccaagccaggccatgtgggctttaggggataagattgcatcttccatagtggctcaaactgcaggtatcccaactcttccctggagcggcagtggtcttcgtgtggactggcaggaaaatgatttttcaaaacgtatcttaaatgttccccaggagctatatgaaaaaggttatgtgaaagatgtggatgatgggctacaggcagctgaggaagttggatatccagtaatgatcaaggcctcagagggaggaggagggaagggaattagaaaagtcaacaatgcagatgacttccctaatctcttcagacaggttcaagctgaagttcctggatctcccatatttgtgatgagactagccaaacaatctcgtcatctggaggtgcagatcttagcggaccaatatggcaatgctatctctttgtttggtcgtgattgctctgtacaacgcaggcatcagaagattattgaagaagcacctgctactattgctactccagcagtatttgaacacatggaacagtgtgcggtgaaacttgccaaaatggtgggttatgtgagtgctgggactgtggaatacctgtacagccaggatggcagcttctactttctggaattgaatcctcggctgcaggtagagcacccttgtacagagatggtggctgatgtcaatctccctgcagcacagctccagattgccatggggattcctctatatagaatcaaggatatccgtatgatgtatggggtatctccctggggtgattctcccattgattttgaagattctgcacacgttccttgtccaaggggccatgttattgctgctcggatcactagtgaaaatccagatgagggttttaagcccagctcaggaacagttcaggagctaaatttccgcagcaataagaatgtttggggatatttcagtgttgctgctgcagggggacttcatgaattgctgattctcagtttggtcactgcttttcttggggagaaaacagagaagaggcaatttcaaacatggtggtggctttgaaggagctgtctattcggggtgactttcgaactacagttgaatacctgatcaaattgttagagactgaaagctttcagatgaacagaattgatactggctggctggacagactgatagcagaaaaagtacaggctgagcgacctgacaccatgttgggggttgtgtgtggtgccctccacgtggcagatgtgagcctgcggaatagcgtctctaacttccttcactccttagaaaggggtcaagtccttcctgctcatacacttctgaatacagtagatgttgaacttatctatgagggagtcaagtatgtacttaaggtgactcgacagtcccccaactcctatgtggtgatcatgaatggctcatgtgtagaagtagatgtacatcggctgagtgacggtggactgctcttgtcctatgatggcagcagttatactacgtatatgaaagaggaagtggatagatatcgcatcacaattggcaataaaacctgtgtgtttgagaaggaaaatgacccatcggtgatgcgctcaccttctgctgggaagttaatccagtacattgtagaagatggaggtcatgtgtttgccggccagtgctatgctgagattgaggtaatgaagatggtaatgaccttaacagctgtggagtctggctgtatccattacgtcaagcgacctggagcagctcttgaccctggctgtgtactagccaaaatgcaactggacaaccccagcaaggttcagcaggctgaacttcacacaggtagtctgccacggatccagagcacggcactcagaggcgagaaactccatcgagtgttccattatgtcctggataatctggtcaatgtaatgaatggatactgccttccagatcctttctctagcagcaaggtaaaagactggtagagcgattgatgaaaacctcagagatccctccctgcctctcctagaattgcaagatattatgaccagtgtgtctggccgcattccccccaatgtggagaagtctatcaagaaggaaatggctcagtatgctagcaacatcacatcagtcctctgtcagtttcccagccagcagattgcaaacatcctagatagccatgcagctacattgaaccggaaatctgaacgggaagtcttctttatgaatactcagagcattgttcagctggtacagaggtaccgaagtggcatccgaggccacatgaaggctgtggtgatggatctgctccggcagtacctgcgagtagagacacaattccagaatggtcactatgacaaatgtgtattcgccctccgagaagagaataaaagtgacatgaacactgtactgaactacatcttctctcacgctcaagtcaccaagaagaatcttctggtcacaatgcttattgatcagttgtgtggccgggaccctactctcactgatgagctgctgaatattctcacagagctaactcaactcagtaagaccaccaatgccaaagtagcacttcgagcacgccaggttcttattgcctcccatttgccatcatatgagcttcgccataaccaagtagagtctatcttcctatcagctattgacatgtatggacatcaattttgcattgagaacctgcagaaactcatcctatcagaaacatctatttttgatgtcctaccaaacttcttctatcacagcaaccaagtagtgaggatggcagctctggaggtgtatgttcgaagggcttatattgcctatgaacttaacagcgtacaacaccgccagcttaaggacaacacctgtgtggtggaattccagttcatgctgcccacatctcatccaaacagagggaacatccctacgctaaacagaatgtccttctcctccaacctcaaccactatggcatgacccatgtagctagtgtcagcgatgtactgttggacaactcattcactccaccttgtcagcggatgggcggaatggtctcttttcggacttttgaagattttgtcaggatctttgatgaagtgatgggctgcttctctgactccccaccccagagtcccacattccctgaggcaggtcacacgtctctttatgatgaggataaggttcccagggatgaaccaattcacattctcaatgtggctatcaagactgactgtgatattgaggatgacaggctggcagctatgttcagagaatttacccagcaaaataaagctaccctggttgaccatgggatccggcgccttactttcctggttgcacaaaggatttcagaaagcaggtcaactatgaggtggatcggagatttcatagagaattccctaaattttttacattccgagcaagggataagtttgaggaggatcgtatctatcgtcatctggagcctgctctggctttccagttagagctgaaccggatgagaaattttgacctcactgcccattccatgtgctaatcacaagatgcacctgtatctcggggcagccaaggtggaagtgggcacagaagtgacagactacaggttctttgttcgtgcaatcatcaggcattctgatctggtcaccaaggaagcttcttttgaatatctgcaaaatgaaggggagcggctactcctggaagccatggatgagttggaagttgcttttaacaatacaaatgtccgcactgactgcaaccacatcttcctcaacttcgtgcccactgtcatcatggacccctcaaagatcgaggagtccgtgcgctacatggttatgcgctacggcagccggctgtggaaactccgtgtgctacaggctgaggtcaagatcaacatccgccagaccaccaccggcagtgccgttcccatccgcctgttcatcaccaatgagtcgggctactacctggacatcagcctctacaaagaagtgactgactccagatctggaaatatcatgtttcactccttcggcaacaagcaagggccccagcacgggatgctgatcaatactccctacgtcaccaaaggatcttgctccaggccaaagcgattccaggcccagaccctgggaaccacctacatctatgacttcccggaaatgttcaggcaggctctctttaaactgtggggctccccagacaagtatcccaaagacatcctgacatacactgaattagtgttggactctcagggccagctggtggagatgaaccgacttcctggtggaaatgaggtgggcatggtggccttcaaaatgaggtttaagacccaggagtacccggaaggacgggatgtgatcgtcatcggcaatgacatcacctttcgcattggatcctttggccctggagaggaccttctgtacctgcgggcatccgagatggcccgggcagagggcattcccaaaatttacgtggcagccaacagtggcgcccgtattggcatggcagaggagatcaaacacatgttccacgtggcttgggtggacccagaagacccccacaaaggatttaaatacctgtacctgactccccaagactacaccagaatcagctccctgaactccgtccactgtaaacacatcgaggaaggaggagagtccagatacatgatcacggatatcatcgggaaggatgatggcttgggcgtggagaatctgaggggctcaggcatgattgctggggagtcctctctggcttacgaagagatcgtcaccattagcttggtgacctgccgagccattgggattggggcctacttggtgaggctgggccagcgagtgatccaggtggagaattcccacatcatcctcacaggagcaagtgctctcaacaaggtcctgggaagagaggtctacacatccaacaaccagctgggtggcgttcagatcatgcattacaatggtgtctcccacatcaccgtgccagatgactttgagggggtttataccatcctggagtggctgtcctatatgccaaaggataatcacagccctgtccctatcatcacacccactgaccccattgacagagaaattgaattcctcccatccagagctccctacgacccccggtggatgcttgcaggaaggcctcacccaactctgaagggaacgtggcagagcggattctttgaccacggcagtttcaaggaaatcatggcaccctgggcgcagaccgtggtgacaggacgagcaaggcttggggggattcccgtgggagtgattgctgtggagacacggactgtggaggtggcagtccctgcagaccctgccaacctggattctgaggccaagataattcagcaggcaggacaggtgtggttcccagactcagcctacaaaaccgcccaggccatcaaggacttcaaccgggagaagttgcccctgatgatctttgccaactggagggggttctccggtggcatgaaagacatgtatgaccaggtgctgaagtttggagcctacatcgtggacggccttagacaatacaaacagcccatcctgatctatatcccgccctatgcggagctccggggaggctcctgggtggtcatagatgccaccatcaacccgctgtgcatagaaatgtatgcagacaaagagagcaggggtggtgttctggaaccagaggggacagtggagattaagttccgaaagaaagatctgataaagtccatgagaaggatcgatccagcttacaagaagctcatggaacagctaggggaacctgatctctccgacaaggaccgaaaggacctggagggccggctaaaggctcgcgaggacctgctgctccccatctaccaccaggtggcggtgcagttcgccgacttccatgacacacccggccggatgctggagaagggcgtcatatctgacatcctggagtggaagaccgcacgcaccttcctgtattggcgtctgcgccgcctcctcctggaggaccaggtcaagcaggagatcctgcaggccagcggggagctgagtcacgtgcatatccagtccatgctgcgtcgctggttcgtggagacggagggggctgtcaaggcctacttgtgggacaacaaccaggtggttgtgcagtggctggaacagcactggcaggcaggggatggcccgcgctccaccatccgtgagaacatcacgtacctgaagcacgactctgtcctcaagaccatccgaggcctggttgaagaaaaccccgaggtggccgtggactgtgtgatatacctgagccagcacatcagcccagctgagcgggcgcaggtcgttcacctgctgtctaccatggacagcccggcctccacctgaccgtggcccacccagccactcccgggaccacggcaaaaggaaccacccagacccaccacccgtacaccctcagcagaccctgaagacttgcttttaaacaaagaaaatcctgggcacttctgcagggctgctggttccgagctgacacccgtcttaataaaaggcccaggagtgcctcttccaaacaaaaacagcctcctctccatagctgggaagtttattttgttttgtctctgaagacagcagttttattgcatcactaaatctaatcaagctaaaacatccctgtttccttttgcaaaacagtgcctggcatgtgggatccaggcgttctttaggatccttggataccacatcgtgaaatcttttatttttttactctgagaccagcaccagatgtaagtaagcatctcatatatttcagccaaataaatgggccaagggaaaaaaatatatatatatagacaggactagagaaaacctatttttgtaatgatgtttctttggatactgtctagtcacccagaaaaatgtatggatgaannnnnnnnnnnnnnnnnnngagacaaagtctccccggttgtcgtgcaggctggagttgcaggtggcattgatctcttcactgtgcaaccctccattccctcctgtgttctcaggccctccttagattaacgtggaatttacaagcgtgcccaccaccatgtgcccggcttaattttgtggtatttttgtggatagagacagagtttccaccaggtttggctcaggcgtggtctctctcaaacttctttgactttcaggttaattccacccacctttggccctcccaaaggttgctggaatttacaggcatttacgccaccattctttcagccagatgtgattttttcttatttgaaaacagttgaaagtgcttattttttgttccccaaatggcgctagtgaatcactaggagggtcccactgataggccatgtttagcactggttgccagggattctctttttgagagagggaaagcaaaatgaatggaagtacccagctggaggtttcagggcttctggaggatgctctcgcatagctcgaggtcctctgcccacctcttctctccaaggaaaatgaggactgccccttccccctgcaggattggcccccagcctgcgcatgcaccctcctcttgcccaagtggggagcacagaggcggagaggaatcccttaccacacccacggcccagcttgctcacgagtgtcacctctgtgacggtcaccactgctcccttggagggccacttgagttactgttgcttcctcgcctgctggcttgatgagcaccgatggtgggatctgaccccgaggggcagagctgtcggtgactgaggactggactgtggtgaccatgccgatttgctcagggagaacgttgcaatgcacccagcagctcctggctctgcaggcggcacagcctggggccctgtgatcctctggtttcttccattggggcggagtcgggggtggagggagctggccacaacccactgctctgatgggtggtttgtccaaggatgctgaatgtaatgcctggtcaatgtggaagcccatgaggttgcccagggaagcctccaaaagctgggatgcttgagggtatccaagttgaaaaagacaaaatctgaccatcagccagtgacagtcctggcaaatgaaggtggggcggggcagtgaggggtgggagaaggtgaatgattcattattccaccccgaggtttgctggggtgaggggaagaatcgatgctgctttgggaactgaaggtttttctgttgggaaggccctcttggttttggagagaaagacaagttatgagtagctgctaccctggaacggtgggcagagagcctactaggaaatgtgcagaataaactattttttgaaggacacaaaaaaaaaaggggg

SEQ ID NO: 28 - protein, 2206 aa, Homo sapien
  Unsure 7758-7776: Unknown amino acid
MRSIRRWSYEMFRNERAIRFVVMVTPEDLKANAEYIKMADHYVPVPGGPNNNNYANVELILDIAKRIPVQAVWAGWGHASENPKLPELLLKNGIAFMGPPSQAMWALGDKIASSIVAQTAGIPTLPWSGSGLRVDWQENDFSKRILNVPQELYEKGYVKDVDDGLQAAEEVGYPVMIKASEGGGGKGIRKVNNADDFPNLFRQVQAEVPGSPIFVMRLAKQSRHLEVQILADQYGNAISLFGRDCSVQRRHQKIIEEAPATIATPAVFEHMEQCAVKLAKMVGYVSAGTVEYLYSQDGSFYFLELNPRLQVEHPCTEMVADVNLPAAQLQIAMGIPLYRIKDIRMMYGVSPWGDSPIDFEDSAHVPCPRGHVIAARITSENPDEGFKPSSGTVQELNFRSNKNVWGYFSVAAAGGLHEIADSQFGHCFSWGENREEAISNMVVALKELSIRGDFRTTVEYLIKLLETESFQMNRIDTGWLDRLIAEKVQAERPDTMLGVVCGALHVADVSLRNSVSNFLHSLERGQVLPAHTLLNTVDVELIYEGVKYVLKVTRQSPNSYVVIMNGSCVEVDVHRLSDGGLLLSYDGSSYTTYMKEEVDRYRITIGNKTCVFEKENDPSVMRSPSAGKLIQYIVEDGGHVFAGQCYAEIEVMKMVMTLTAVESGCIHYVKRPGAALDPGCVLAKMQLDNPSKVQQAELHTGSLPRIQSTALRGEKLHRVFHYVLDNLVNVMNGYCLPDPFSSSKVKDWRAIDENLRDPSLPLLELQDIMTSVSGRIPPNVEKSIKKEMAQYASNITSVLCQFPSQQIANILDSHAATLNRKSEREVFFMNTQSIVQLVQRYRSGIRGHMKAVVMDLLRQYLRVETQFQNGHYDKCVFALREENKSDMNTVLNYIFSHAQVTKKNLLVTMLIDQLCGRDPTLTDELLNILTELTQLSKTTNAKVALRARQVLIASHLPSYELRHNQVESIFLSAIDMYGHQFCIENLQKLILSETSIFDVLPNFFYHSNQVVRMAALEVYVRRAYIAYELNSVQHRQLKDNTCVVEFQFMLPTSHPNRGNIPTLNRMSFSSNLNHYGMTHVASVSDVLLDNSFTPPCQRMGGMVSFRTFEDFVRIFDEVMGCFSDSPPQSPTFPEAGHTSLYDEDKVPRDEPIHILNVAIKTDCDIEDDRLAAMFREFTQQNKATLVDPWDPAPYFPGCTKDFRKQVNYEVDRRFHREFPKFFTFRARDKFEEDRIYRHLEPALAFQLELNRMRNFDLTAHSMCNHKMHLYLGAAKVEVGTEVTDYRFFVRAIIRHSDLVTKEASFEYLQNEGERLLLEAMDELEVAFNNTNVRTDCNHIFLNFVPTVIMDPSKIEESVRYMVMRYGSRLWKLRVLQAEVKINIRQTTTGSAVPIRLFITNESGYYLDISLYKEVTDSRSGNIMFHSFGNKQGPQHGMLINTPYVTKGSCSRPKRFQAQTLGTTYIYDFPEMFRQALFKLWGSPDKYPKDILTYTELVLDSQGQLVEMNRLPGGNEVGMVAFKMRFKTQEYPEGRDVIVIGNDITFRIGSFGPGEDLLYLRASEMARAEGIPKIYVAANSGARIGMAEEIKHMFHVAWVDPEDPHKGFKYLYLTPQDYTRISSLNSVHCKHIEEGGESRYMITDIIGKDDGLGVENLRGSGMIAGESSLAYEEIVTISLVTCRAIGIGAYLVRLGQRVIQVENSHIILTGASALNKVLGREVYTSNNQLGGVQIMHYNGVSHITVPDDFEGVYTILEWLSYMPKDNHSPVPIITPTDPIDREIEFLPSRAPYDPRWMLAGRPHPTLKGTWQSGFFDHGSFKEIMAPWAQTVVTGRARLGGIPVGVIAVETRTVEVAVPADPANLDSEAKIIQQAGQVWFPDSAYKTAQAIKDFNREKLPLMIFANWRGFSGGMKDMYDQVLKFGAYIVDGLRQYKQPILIYIPPYAELRGGSWVVIDATINPLCIEMYADKESRGGVLEPEGTVEIKFRKKDLIKSMRRIDPAYKKLMEQLGEPDLSDKDRKDLEGRLKAREDLLLPIYHQVAVQFADFHDTPGRMLEKGVISDILEWKTARTFLYWRLRRLLLEDQVKQEILQASGELSHVHIQSMLRRWFVETEGAVKAYLWDNNQVVVQWLEQHWQAGDGPRSTIRENITYLKHDSVLKTIRGLVEENPEVAVDCVIYLSQHISPAERAQVVHLLSTMDSPAST

SEQ ID NO: 29 - DNA, 2121 bp, Homo sapien
ggcacgagggcccggcggcaggtcccagcccggggctagagaccgagggccggggtccgggcccggcggcgggacccaggcggttgaggctggtcaggagtcagccagcctgaaagagcaggatggatcttgatgtggttaacatgtttgtgattgcgggcggcacgctggccatcccaatcctggcatttgtggcttcatttcttctgtggccttcagcactgataagaatctattattggtactggcggaggacattgggcatgcaagtccgctatgttcaccatgaagactatcagttctgttattccttccggggcaggcctgggcacaaaccctccatcctcatgctccacggattctctgcccacaaggatatgtggctcagtgtggtcaagttccttccaaagaacctgcacttggtctgcgtggacatgccaggacatgagggcaccacccgctcctccctggatgacctgtccatagatgggcaagttaagaggatacaccagtttgtagaatgcctgaagctgaacaaaaaacctttccacctggtaggcacctccatgggtggccaggtggctggggtgtatgctgcttactacccatcggatgtctccagcctgtgtctcgtgtgtcctgctggcctgcagtactcaactgacaatcaatttgtacaacggctcaaagaactgcagggctctgccgccgtggagaagattcccttgatcccgtctaccccagaagagatgagtgaaatgcttcagctctgctcctatgtccgcttcaaggtgccccagcagatcctgcaaggccttgtcgatgtccgcatccctcataacaacttctaccgaaagttgtttttggaaatcgtcagtgagaagtccagatactctctccatcagaacatggacaagatcaaggttccgacgcagatcatctgggggaaacaagaccaggtgctggatgtgtctggggcagacatgttggccaagtcaattgccaactgccaggtggagcttctggaaaactgtgggcactcagtagtgatggaaagacccaggaagacagccaagctcataatcgactttttagcttctgtgcacaacacagacaacaacaagaagctggactgaggccccgactgcagcctgcattctgcacacagcatctgctcccatcccccaagtctgacgcagccaccactctcagggatcctgccccaaatgcggtcggagcgccagtgaccctgaggaagcccgtcccttatccctggtatccacggttccccagagctttggggaccacgcgaaaacctccaagatatttttcacaaaatagaaactcatatggaacaaaataagaaaccccagccatgaaatctaccatgaagtcttcaagttcatgtcactgagaagcttgtgcaaagcagccaccttggaccataattaaatcaaggacattttctttgagacattccttatagttggagactcaagatatttttgttgcatcaggtgtattcccttgcatgggcagtggcttttataggagcattagtcctcattcgctgaaccctgttgtttaggtctaatttaagttttacatagagacccatgtatgactgcagcccattggctgcaagaccagggaggaaagtggcaagctgtagaaaatgtttacacgcatggaggggcattgctctagccctcagagcgtccggagcagcagggtacatgggtgggaggttcattcagcacccaccagtcaggtatgttctgagtgaacccacagcagtcgcagaatgagcacctggcagggtgggtttcctaggaataatttattatttttaaaaataggcctaataaagcaataatgttctagacatctgtctaagtaatcagactcaggttccacacacaagcaacaactcgtgggcctcttttctatttcaatgtgctactaagaacccttggatgtaacatactagttagttaatgaattctgtgaattctgtgaagagtaatgtgattgaaaataagtctaaacagctgtaaaagtgaccacaatgacatgaaataaatttaataagtctagatcagcaaaaaaaaaaaaaaaaaa

SEQ ID NO: 30 - protein, 337 aa, Homo sapien
MDLDVVNMFVIAGGTLAIPILAFVASFLLWPSALIRIYYWYWRRTLGMQVRYVHHEDYQFCYSFRGRPGHKPSILMLHGFSAHKDMWLSVVKFLPKNLHLVCVDMPGHEGTTRSSLDDLSIDGQVKRIHQFVECLKLNKKPFHLVGTSMGGQVAGVYAAYYPSDVSSLCLVCPAGLQYSTDNQFVQRLKELQGSAAVEKIPLIPSTPEEMSEMLQLCSYVRFKVPQQILQGLVDVRIPHNNFYRKLFLEIVSEKSRYSLHQNMDKIKVPTQIIWGKQDQVLDVSGADMLAKSIANCQVELLENCGHSVVMERPRKTAKLIIDFLASVHNTDNNKKLD

SEQ ID NO: 31 - DNA, 3051 bp, Homo sapien
aaggaagtttgcctctggtaccaccttgggactaagtgtatacccaactaagtcccttcatctccctggaccctgccttcaatcatccctcctcttgcaggtctccaacatgctaccggtgatagtgggcccattagtaatgggctcccacttgtcctccatcaccatgtggttttccttggccctcatcatcaccaccatctcccactgtggctaccaccttcccttcctgccttcgcctgaattccacgactaccaccatctcaagtaaggaccttctccccacaatgggtccctaggcaacaaccatcaccctccctccttaagcttctgatagcaggcactggtatctcagtttacatgtgagtgctagttggggaagaggtctgatggctgggaaaataaccacactgggatgaccttactcttttccttctgaaattgggtcctcctccaactgggggttttaaacctatatttggactctgggccctttgaataagctctggacattctctttagaaaagtacatatatgcataaaactcctgcaggcaatcacaagtaagtcatgtatctctgaaagccccagactttttcaagtgtagtctacaaacctcctataccagaatcacctgagatgcttgtttaaaatataggctcttgaattccactccaaatatgctgaactaaggtatctgggggagcagggcctggaaacctgcattttagttaagtgttccaggggattctgatgctggtgatctcatacctgaagaagcctagttctgctagagattctcagactgtgggcatcaatcacatagcaagcttttcaaaggaggactccagatacggcaaattgcaggtttggagtggcccccgggagatgcattggtagcaactccccagcttattctgatgcagatggtcaggatggtggtgacaggtgtggggtaggagggctgagaaatgtgtgaggctggcacaaatgaaatgggatctgcacggaagcctccagcatgggcactgcagtgccgtcctctctcttctaggttcaaccagtgctatggggtgctgggtgtgctggaccacctccatgggactgacaccatgttcaagcagaccaaggcctacgagagacatgtcctcctgctgggcttcaccccgctctctgagagcatcccagactccccaaagaggatggagtgagagacagcctaagtgtcatcctggctgtccctcagccatgggatgcagacacggcttcctgattgcacctaacaatttgcctccttcggccacacgccctaatgatggcaccaccagggtagagggaaggtcggcttcccggaaaagcagggccaaggatgaggctttcttcaaactactgcccttgatgtccctcaatgggatcaggagttagcttaagaaaaaggaaaacacagctccccagactggaggctggtcagagggaggagacccctggtcctctgctgtggaaggagaggggttcagccccagataactcctttgtggcctgggcaggatgcagagaatgacaaggctgaaaggagggggactggaggctgcctggctccagcgagagctccttctgggaccagagggtgggacggccaggtatcactttgccccttcctgccccaaaaggctttcacatacccgactcaggccagagccaagacaccctggcaaatcattataggtctcaattcatgacataccagatgccagtcgccacttcacccaacacacacacaaacatacacacaccaaacactctgagtgagtggtaaaggccccgtttttactctggcccaccgcaaacaaaaggtttccctctgtgggggagaaaaagaaatccaggagctcctccctggattaaaaccaacgaggtgcagaccaaactttaacacctttagccttatgtggaaaccaaaaaccaactgctgggaaactgtgaaaagcccttttacccacaaggggaggggtcaaagttgctgccctttggggacacccgagacccctaattagcctatctgaatgaggaccaaaggttagagccctctttctccccgaagaaagagcccggaaaaacatggcagagcaaagagcaaaatcctttctcccccgaatgctttaccagtttctcagcaacatttattcaagatgatttttaccaggaaccttatcaaaggcaaaaccacagctgcttgggttgaagtccccatcctggcctcctctcagccgccagacatggccaggaaccctgtggttcccaagaacaatttaaagatcactctttgatttgaaagaccaccattatcattttactaaattcttatatatacttgtgccttttccaactttcagttctcttaagaaaaacatccactgtagctttataaaataccttagtatcagctaggtccaagtctccaggcaggactatcaaaatggactccttcttcctatcagctctagaaccccagaggacttgcccagtaggccagctgagcacttaccaggcagcatctccctggccttccacagtctcgcctgtctgtctctggccttggtggacctggctccctccctaggaggcttttgccctcagcttgaatacagttcctggtgcatcaaagctgtaagttctcagctgctggcctgcactcatcacctcttcctacaaataaacatttggaaaaaagtccatcttcaatatgcttaaagagaagggtaggagataaggagaaagaacagatacggtttttttcccctttaaggcctttagattttgaggtactgtaaggggcctagaaggacaaaaggctttcattccctcttccttttggcaggcaggttatcagtccttggcagaagggcccagccctatccttttctgtatcaaacaaaatccttgaggttggtatacaagttaaggctgaaaaaaggccttaaattcccagtaaagaatgtgaaagcaagcatgtaaaataaactggtcttcatgaaaaaaaaaaaaaaaaaa

SEQ ID NO: 32 - protein, 191 aa, Homo sapien
MKGEAGHMLHNEKSKQEGHIWGSMRRTAFILGSGLLSFVAFWNSVTWHLQRFWGASGYFWQAQWERLLTTFEGKEWILFFIGAIQVPCLFFWSFNGLLLVVDTTGKPNFISRYRIQVGKNEPVDPVKLRQSIRTVLFNQCMISFPMVVFLYPFLKWWRDPCRRELPTFHWFLLELAIFTLIEEVLFYYSHR

SEQ ID NO: 33 - DNA, 5779 bp, Homo sapien
ggagctggggatccccgctctcctggaccccaatgacatggtctccatgagcgtccctgactgcctcagcatcatgacctatgtgtcccagtattacaaccacttctgcagtcctggccaagctggtgtctcgccacccagaaagggccttgcaccctgttccccgccgtctgtagcacccactccagtggaatcagaagatgtggctcagggcgaggagctctcctcaggcagcctgtcagagcagggcaccggccagacccccagcagcacgtgcgcagcctgccagcagcatgtgcacttggtgcagcgctacctggctgacggcaggctgtaccatcgccactgcttccggtgtcggcggtgctccagcaccctgctccctggggcttatgagaatgggcctgaggagggcacctttgtgtgtgcagaacactgtgccaggctgggcccggggacacggtcggggaccaggcctgggcccttctcacagccaaagcagcagcaccagcagcaactcgcagaagatgccaaggatgttccaggaggcggccccagctccagtgctcctgcaggggctgaggccgatggacccaaggccagccctgaggcccggccgcagatccctaccaagccccgggttcctggcaaactacaggagctggccagcccccctgcgggccgccccacccctgcccccaggaaggcctctgagagcaccaccccagcaccccccacgccccggccccgctccagtctgcagcaggagaacctggtggagcaggctggcagcagcagcctggtgaacgggagactgcacgaactgcctgtccccaagccgagggggacaccgaagccgtccgaggggacaccagcccccaggaaggaccccccatggatcacgctggtgcaggcagaaccaaagaagaagccagccccacttcccccaagcagcagcccggggccaccaagccaggacagcaggcaggtggagaatggaggcaccgaggaggtggcccagccgagcccaacggccagcctggagtccaaaccctataacccctttgaggaggaggaggaggacaaggaggaagaggctccagctgcacccagcctggccaccagccctgccctgggccacccggagtccacacccaagtccctgcacccctggtacggcatcacccctaccagcagccccaagacaaagaagcgccctgccccgcgcgcacccagcgcgtccccactggctctccacgcctcccgcctctcgcactcggagccgccctcggccacaccatcgccagcgctcagcgtggagagcctgtcgtctgagagcgccagccagactgcaggtgcagagcttctggagccgccagctgtgcccaagagctcctcagagcctgctgtccatgcccctggtacccctggaaaccctgtcagcctctctaccaactcctccctggcctcctctggggaactagtggagcctagagtggaacaaatgcctcaagccagccctggccttgcccccaggaccaggggcagctcaggtccccagccagccaagccctgcagtggcgccaccccaacgcctctcttgttggttggagacaggagcccggtgccttcccctggaagctcgtccccacagctgcaggtaaagtcctcctgcaaggagaatccttttaaccggaagccatcacctgcagcgtccccagccacaaagaaggccaccaagggatccaagccagtgaggccacctgcccctggacacggctttccactcatcaaacgcaaggtccaggctgaccagtacatccctgaggaggacatccatggagagatggataccattgagcgccggctggatgccctggagcaccgtggggtgctgctggaggagaagctgcgtggcggcctgaatgagggccgtgaggatgacatgctggtggactggttcaagctcatccacgagaagcacctactggtgcggcgagagtccgagctcatctatgtcttcaagcagcagaacctggagcagcgccaggctgatgtcgagtatgagctccggtgcctcctcaataagccagaaaaggactggacggaggaggaccgggcccgggagaaggtgctgatgcaggagcttgtgaccctcattgagcagcgcaacgctatcatcaactgcctggatgaggaccggcagagggaggaagaggaagacaagatgttggaagccatgatcaagaagaaagagttccagagggaggctgaacctgagggcaagaagaaggggaagttcaagaccatgaagatgttgaaactgctaggaaacaaacgtgatgccaagagcaagtcccccagagacaagagctaacagcacgagaagccagttggggactgccccctcctggagcagctcctgggctgtgctctgtttgaagggggcgccctgctcccctcagatcagtcaggaggaagatgactaaggggagggatcctctgggtgatggcctcttcctcctcagggacctctgactgctctgggccaaagaatctcttgtttcttctccgagccccaggcagcggtgattcagccctgcccaacctgattctgatgactgcggatgctgtgacggacccaaggggcaaatagggtcccagggtccagggaggggcgcctgctgagcacttccgcccctcaccctgcccagcccctgccatgagctctgggctgggtctccgcctccagggttctgctcttccaggcaggccagcaagtggcgctgggccacactggcttcttcctgccccatccctggctctgagtctctgtcttcctgtcctgtgcaggcgcccttggatctcagtttccctcactcaggaactctgtttctgaagtcttcagttaagtttgagtttatgactgagtggcctgtactgtcagacgtgaatgggcctgacgggcaaatccatccctctctccctcacagttccaggagcggcttccctcgtctccccttactccacagggagcctcccttgccaggaccagggctgcgacggccatgctggggcaggtgagtgctctgttagctgctcccagtgctgtccccaggctgcagttctggtccctggttgtcaggtaggaagggtgcacttgaagcaggtgctcatctcggttccttaacgtttatagtctgacccctcacttaggctttcctctgccaccccggtccagggaagaggctcgctcccgcccatggtcatcactggtctgtctgctctgttgtctgttctttccctgactccctcccaccgaaggcctgatggctactcacccctctgggatggctatgggagaggaggagtgatggggaccgccaccttttctgcaggaaatgtgcccagcagctcttggtcaaagcactgttgctataagctatctctgggatgcctctaggcccccttccctctacacacctctgggaaaagattacactgtattaactctcgaggagtttcctcaccaataaacagacaacctcaactgccagtgccctgcagcctcgggccacagcggcagccttgtttgccttcccacctgcctctgccacacctggtggctgaacatctctggtcgcccagaggccatgttggggccatcctccaagagggatctctgccctcaccgcctgccactgggcaggatccctttcctctgcagggagaggtggctcctcggccatgcagcccctggcaggctccttctaaacatgcctgttgacctggagctggcgccaccaactccagggcctttccagggccagacaggtaacacgcatgaacccgagtgacagctctgacgggctgtttcggtgtcaggagacaaagctggcaggggcaggggtgaactggaggcaagtcaagtcacctgtggcctgtggggctgaatgtgggcccggtgttgccagatcctttgtcataagaagctagaaatccagattttatgtgtgtgtaatttgtaaatgctgaaagctagcctgaattttttttttttttttgagacagagtctcgctctgtcgcccaggctggagtgcagtggcgcgatctcagctcactgcaggctccgcctcctgggttcacgccatcctcctgcctcggcctcctgagcagctgggactacaggcgcatgctacgacgcctggctaattttttgtatttttagtagagacggggtttcaccgtgttaaccaggatggtctcgatctcctgaccttgtgatccacccaccttggcctcccaaagtgctgggattacaggcgtgagccaccacgcccggccactagcctgaatttcaatcaagggttggctgatactgtgtgtccagggtggactggatttgtcctggggggttctctggtttgctgcctcctgaccacatgatggggccttcgaggtcgaggacaactgttcccattagattgcaccctctgccctcaggttcttgagggtgtgtggacacagaggctttccatgggatgtccctgagccggcccttgattggggcctcaccatttacagggccgttttattctgcaaaccgaaacttgggtcatgtgacctgatgggattatgggactccctccaggtgcccgagacaaggttgatatttccaaaatattttggtgatttagtgggacaagcaaatgacagaataccggagaaggcagggatcgtgggtgtcaggagccagaggggagggggacagatgtgctgtgtacaggacaaggtgtcaggtgactccttcccagcagggcctcgcagatgcacaagcacggagctggtgggttttgcccaagaaaggtcacgcggcacatgcagggattggaactcccaggccagggctctaggtcgctcccaccttttcatgtttctttctgtggccatgggtatagtggaaagacataaagctaaagccaacttttaatcctgaatgcactgcttgccaggtaaatgcccttggttgtggtatcttgttgagacttagttttcacagagggataatgaaccgttgcagaggtttattgagatcattaacagagtggaattcagcacctgccactgcactccagcctgggcgacagagcaagactcagtctcaaaaaaaaaaaaaattagctgggcagggcatggtgatggtgcctgtaatcctagctacttgggaggctgaggcatgagaattgcctgaacccaggaggtggaggttgcagtgagccgagatcgtgccactgtactccagcctgggtgacagcgcgagactccgtctcaaaaaaagctgggtgtggggaacacctgtggtcccagctattctggagactgaggcaggaggattgcttgagctcaggagttctggctgcagtgagctatgatcatgccactgtattacagaatgggtgacagaatgagagcgacactgtctcaaaaaaaaaaaaaaaaaaaggccgggagcggtcgtttgtgcctgtaatcccaacactttgggaggccagggtgggcggatcacttgaggccaggagttcaagaccagcctggccaacatggtgaatccccatctctactaaaaaaattaactggacatggtggtggacacttgtaatcccagctactcaggaggctgacacatgagaattgcttgaacccgggaggcggaggttacagtgagccgagatagcaccactgcactccaacctgggcacagagtaaggctctgtcttt

SEQ ID NO: 34 - protein, 791 aa, Homo sapien
ELGIPALLDPNDMVSMSVPDCLSIMTYVSQYYNHFCSPGQAGVSPPRKGLAPCSPPSVAPTPVESEDVAQGEELSSGSLSEQGTGQTPSSTCAACQQHVHLVQRYLADGRLYHRHCFRCRRCSSTLLPGAYENGPEEGTFVCAEHCARLGPGTRSGTRPGPFSQPKQQHQQQLAEDAKDVPGGGPSSSAPAGAEADGPKASPEARPQIPTKPRVPGKLQELASPPAGRPTPAPRKASESTTPAPPTPRPRSSLQQENLVEQAGSSSLVNGRLHELPVPKPRGTPKPSEGTPAPRKDPPWITLVQAEPKKKPAPLPPSSSPGPPSQDSRQVENGGTEEVAQPSPTASLESKPYNPFEEEEEDKEEEAPAAPSLATSPALGHPESTPKSLHPWYGITPTSSPKTKKRPAPRAPSASPLALHASRLSHSEPPSATPSPALSVESLSSESASQTAGAELLEPPAVPKSSSEPAVHAPGTPGNPVSLSTNSSLASSGELVEPRVEQMPQASPGLAPRTRGSSGPQPAKPCSGATPTPLLLVGDRSPVPSPGSSSPQLQVKSSCKENPFNRKPSPAASPATKKATKGSKPVRPPAPGHGFPLIKRKVQADQYIPEEDIHGEMDTIERRLDALEHRGVLLEEKLRGGLNEGREDDMLVDWFKLIHEKHLLVRRESELIYVFKQQNLEQRQADVEYELRCLLNKPEKDWTEEDRAREKVLMQELVTLIEQRNAIINCLDEDRQREEEEDKMLEAMIKKKEFQREAEPEGKKKGKFKTMKMLKLLGNKRDAKSKSPRDKS

SEQ ID NO: 35 - DNA, 3120 bp, Homo sapien
aaaggaaacacaagttgcttttgataacacatgatgcaaagaaagaattagaaagaatgagcaatgaagccggtataaatgacaaacaagtgtccaaaggcccaagaagttactaccaaaagctttcaaacaatattggtttatctttaaagacacatccatagcatactttaaaaataaggaacttgaacaaggagaaccacaagaaaaactaaatcttagaggctgcgaagttgtgcccgatgtaaatgtagcaggaagaaaatttggaatcaagttactaatccctgttgccgatggtatgaatgaaatgtatttgagatgtgaccatgagaatcaatacgcccaatggatggctgcctgcatgttggcatcgaagggcaaaaccatggcagacagctcctaccagccagaggtcctcaacatcctttcatttctgaggatgaaaaacaggaactctgcatctcaggtggcttccagtctcgaaaacatggatatgaacccagaatgttttgtgtcaccacggtgtgcaaaaagacacaaatccaaacagctggccgcccggatcctggaggcgcaccagaacgtggcccagatgcccctggtcgaagccaagctgcggttcatccaggcgtggcagtcactgcctgagtttggcctcacctactaccttgtcagatttaaaggaagcaaaaaagatgacattctgggagtttcatataacaggttgattaaaattgatgcagccaccgggattccagtgacaacatggagattcacaaatatcaaacagtggaatgtaaactgggaaacccggcaggtggtcatcgagtttgaccaaaacgtctttactgctttcacctgcctgagtgcagattgcaagattgtgcacgagtacattggcggctacattttcttgtccacccgctccaaggaccagaatgaaacactcgatgaggacttgttccacaaattgaccggcggtcaggattgaaacaagcacgcgtgctcggctcacaccaacaaggcaagccaaaggcgcccctccccagagggatccctaacgtgcccagcatgtagattctggactaacagacaacatacattcaccgctggtcacccagatcctcattcaaacccactgctggcacatccctttccttactttgccctgtgctaccagccacggaaggagcctctcttgttttttctataaaatgggtaggcaggagaaaagcaggtgccctaagattgctctaaggcccagcatgtggttacagttctctgacttgcagaacctgccaggtgtatggctacaagttatcctcgtgctgatctgtctcattactaagtcaatggagaagacagaaaggtaaaaatcacgtgtagcaagaacaactcttatttcacaaactcaggtatgaaacgaaacgcctgtccttcatggaactgcttttagctcctgtcttttcaaaatggcagagggagttcctacacacactttttccctggaggccaaggtctaggggtagaaaggggaggggtggggctaccaggtagcagttgacaacccaaggtcagaggagtggccctcagtgtcatctgtccacagtgatacctgccaagatgaccactgacccacatctggtcttagtcattggtctcctcagatttctggggccacctgcaagccccattccattcctacagatctctcagccacctgtaagtcctttgtgaagatgtgggtgacacagggggacaggaaaacccatttctcaacccagatccatgtctccactgcttctactctgggttgggattcaggaagacaggcacagtcctctctgttcatagaaacacctgccagtgtcaaggattccagtcaggtgtctatcccaactggtcagggagagaagggcagacccattctcaaagaccaccatgttcaaggtctgacagctccccactggctgcccccacaggggctttaggctggtctgggtcatggggaagcgtccctcttatcgctggtctgtgttctcctggatttggtatctatgttggtacgactcctggccttttatctaaaggactttggcttttgtaaatcacaagccaataatagacttttttctccccctctgttttttgctgtgtcatctctgccttgagactgccttgagacagtgcttgccctgagagagtgagccaattaacagctgcctgaattgtcattttccattttggtttgttagaggtgggaggggtgggttttgagaaggtcaaaagcaataccagaagtaaagggaaatatcagacaatattttattattttttcatagatgttctgccacacaaagaacttggggtgtaaggataaggcaaaagctccaatcccatttttcagttctcctaggatgcacccctcagggagcctggccagagttccgaggcccgtgagcgtcagctgttgctttattttccatcaaagccctctgagaagtgagacctcagcaattccgggagccacatagagacagacttggcaagggaccccctggttctgagccagtagctgccatctggaaattcctcttttagcctctccttagaggtgaatgtgaatgaagcctcccaggcacccgctgaatttctgaggccttgcttaaagctcagaagtggtttaggcatttggaaaatctggttcacatcataaagaacttgatttgaaatgttttctatagaaacaagtgctaagtgtaccgtattatacttgatgttggtcatttctcagtcctatttctcagttctattattttagaacctagtcagttctttaagattataactggtcctacattaaaataatgcttctcgatgtcagattttacctgtttgctgctgagaacatctctgcctaatttaccaaagccagaccttcagttcaacatgcttccttagcttttcatagttgtctgacatttccatgaaaacaaaggaaccaactttgttttaaccaaactttgtttggttacagttttcaggggagcgtttcttccatgacacacagcaacatcccaaagaaataaacaagtgtgacaaaaaaaaaaaaaaaaa

SEQ ID NO: 36 - protein, 230 aa, Homo sapien
MNEMYLRCDHENQYAQWMAACMLASKGKTMADSSYQPEVLNILSFLRMKNRNSASQVASSLENMDMNPECFVSPRCAKRHKSKQLAARILEAHQNVAQMPLVEAKLRFIQAWQSLPEFGLTYYLVRFKGSKKDDILGVSYNRLIKIDAATGIPVTTWRFTNIKQWNVNWETRQVVIEFDQNVFTAFTCLSADCKIVHEYIGGYIFLSTRSKDQNETLDEDLFHKLTGGQD

SEQ ID NO: 37 - DNA, 1313 bp, Homo sapien
ctgagactcgaaactgtcccccaggccttggccatgctgataaatatctaggccctacaggagttcgtgtccatgaacccagtaaacgcaattcctcagccttaaaatctagccaccgcacccggcccccttccttcgtcttagtcaatcctatcccacctcttcttccaccagtcccctcacctgatggtcccaacatttcatcatccaccacctcctggagggggtaccccgaggtgctccgctggggactctgctcattctgggggtgcggttgacggctggtcgtgatctttcccgtaatctgtcccctcttacggaacctagtctccgttctgtccatggccttcttctggacacttctaggatccagaagagtatgttatcaattctcaagcctaggagaagtcaggagtagagaacagctctgagaagatactgttgtccaactgatctccaggcaccacggagtccggtccctccaatcaggaaggtcggaatctctgatgtcatcgttcatgccaacctggcaaccagtttgaaaaaaaacacatgtaactgccaggctgatctcttgtcctggagatcctgggtgaatggtatctcctgccactgtcccaacctcagaccattgtccaaaagcatcttcagggactccacatccctctattccctgtcccagcagaggctgtgtcctctccactcaaagcctgaagcatgttggggtctcttcgtctctgtacatgcccatttcagagtccagtctggtgggagagggaacagagtgggaaagaaaactagggtaagcagaaacgatgaaaccttataagagtgagagtatcatgtacaagagtgagattatcatgtacaagagtgagattatcacgtacaagagatcccaggaatactgacttgatgaaaaagtcacatcagagcactcagtttggcagagcttttctgccgaatgtttactcacattcactgtccgagattctatactgggggtacacacgtcctctgccctaaggcaattttgagtccaagagacattttgaggcctaaaaatcataggaaactgcccctgagctcacacatatttccaatggtgtccccagtttcagggaatccatggattacctaagccagcccctccagttcggctaagaaactctagtctatatatcaagttttgtatcatatgtattgctctgaactcagaaatttcccttccatttatggattctatgaataaaatatcacatgtacaaaaagactaagtcaaaaaatttcagctgtgcacgcctcgagccgaa

SEQ ID NO: 38 - protein, 91 aa, Homo sapien
ETRNCPPGLGHADKYLGPTGVRVHEPSKRNSSALKSSHRTRPPSFVLVNPIPPLLPPVPSPDGPNISSSTTSWRGYPEVLRWGLCSFWGCG

SEQ ID NO: 39 - DNA, 3079 bp, Homo sapien
ggcacgagcgcaaccacagcgcgcagggcaggcgcgagctggcctctgagccccggcctcggaccgcccactccactcccggcacgcccggtgccgccttccggctccagtccccgggctcggcctcggcgaggtgtaattcgcagcgcgggccggccccggaggctctcggcgagcgcggcgcggtaacaagtgggcgaggatgccgtacgagatcaagaaggtgttcgccagcctcccgcaggtggagaggggcgtctccaagatcatcggcggcgaccctaagggcaacaattttctgtacaccaatggaaagtgcgtcatcctaaggaacatcgacaacccagcccttgctgacatctacacagagcacgcccatcaggtggtggtggccaagtatgcgcccagcggattctacattgcctccggagatgtgtctgggaagctgaggatctgggataccacgcagaaggagcacctgttgaagtatgagtaccagcctttcgctgggaagatcaaagacattgcttggactgaagacagtaagaggatcgccgtggtcggggaaggaagggagaagtttggagcagtcttcctctgggatagtggctcttctgtgggcgagattacaggacacaacaaagtcatcaacagcgtggacatcaagcagagccggccataccggctggccacgggaagcgatgataactgcgcggcattctttgagggacccccattcaagttcaagttcacaattggcgaccacagccgctttgtcaactgtgtgcgattctctcctgatgggaacagatttgccacagccagtgctgacggccagatatacatctatgacgggaagactggggagaaggtgtgcgcgctgggcggaagcaaggcccacgacggtgggatttacgcaattagttggagtcccgacagcacccatttgctttctgcttctggggacaaaacttccaagatttgggacgtcagcgtgaactccgtggtcagcacatttcccatgggctccacggttctggaccagcagctgggctgcctatggcagaaggaccacctgctcagtgtctccctgtccgggtacatcaactatctggacagaaacaaccccagcaagcccctgcacgtcatcaagggtcacagtaaatcgatccagtgtctgacggtgcataaaaacggcggcaagtcctacatttactctgggagccacgacggacacattaattactgggattcagagacgggggagaacgactccttcgctgggaaaggccacacgaaccaggtgtccaggatgaccgtggatgagtcggggcagctcatcagctgcagcatggacgacaccgtgcggtacaccagcctcatgctgcgggactacagcggacaaggagttgtgaaactggacgttcagccaaagtgcgtagccgtcggccccgggggatacgccgtggtcgtgtgcattggacagattgtcctgctgaaggatcagaggaagtgcttcagcatcgacaaccccggctacgagcccgaagttgtggcagtgcaccccggcggggacacggtggcaattgggggtgtggacggcaacgtccgcctgtattccatcctgggcaccacgctgaaggatgagggcaagctcctagaggccaagggccccgtgaccgacgtggcctactcccacgacggcgccttcctcgcggtgtgcgacgccagcaaggtggtcacagtgttcagcgttgctgacggctactcggagaacaatgttttttatggacaccatgcaaaaatcgtctgcctggcctggtccccagacaatgaacactttgcctccggtggcatggacatgatggtgtatgtttggaccctgagtgacccggaaaccagagtcaagatccaagatgcacaccggctgcaccatgtcagcagcctggcctggctggacgagcacacgctggtcacgacctcccatgatgcctctgtcaaggagtggacaatcacctactgaggagccccacccccgcctctggatggaccgaatcaggcactagagtttaactgcagcggaacatgtcatttctctatttctgtgacgcgcccccatgcccccaccccaccacaagaggcaggagggcccagtcatgaccctcgtctctgcagggtgtctgtacacgttcttctgaaagctttagacagtaacagtttgcacatgaaaaataaagcgagcacctaaacaatgtgtggagcataactaaaacccacagcccaaccaaaccttgagaatgcgaaacattccagaggcagtagcctccaaagcacacagagcccctggccccgccgcggctctcactatctgtcaggggaggttgtacaggtgaatgagccggggggctcatgttcctgcctgcagaacatttctgtactagtgagaagagggaatatgcattgcagttcagcaaagccggaattctgtgttgaacagatgtctgtctccctagtgtgtgactcacaccttgtggctgccttcagagcgccacctccagatcagatggggacacacaacccctggatatgtttcattgtcagattttgtgcttgattttaagaatggaattgtgggtatctttcctttttttttaatgtatcttaactgttgcctgtcagtgtttacaaactagtgcgttgacggcaccgtgtccaagtttttagaacccttgttagccagaccgaggtgtcctggtcaccgtttcaccatcatgctttgatgttcccctgtctttccctcttctgctctcaagagcaaaggttaatttaaggacaaagatgaagtcactgtaaactaatctgtcattgtttttaccttccttttctttttcagtgcagaaattaaaagtaagtataaagcaccgtgattgggagtgtttttgcgtgtgtcggaatcactggtaaatgttggctgagaacaatccctccccttgcacttgtgaaaacactttgagcgctttaagagattagcctgagaaataattaaatatcttttctcttcaaaaaaaaaaaaaaaaaa

SEQ ID NO: 40 - protein, 606 aa, Homo sapien
MPYEIKKVFASLPQVERGVSKIIGGDPKGNNFLYTNGKCVILRNIDNPALADIYTEHAHQVVVAKYAPSGFYIASGDVSGKLRIWDTTQKEHLLKYEYQPFAGKIKDIAWTEDSKRIAVVGEGREKFGAVFLWDSGSSVGEITGHNKVINSVDIKQSRPYRLATGSDDNCAAFFEGPPFKFKFTIGDHSRFVNCVRFSPDGNRFATASADGQIYIYDGKTGEKVCALGGSKAHDGGIYAISWSPDSTHLLSASGDKTSKIWDVSVNSVVSTFPMGSTVLDQQLGCLWQKDHLLSVSLSGYINYLDRNNPSKPLHVIKGHSKSIQCLTVHKNGGKSYIYSGSHDGHINYWDSETGENDSFAGKGHTNQVSRMTVDESGQLISCSMDDTVRYTSLMLRDYSGQGVVKLDVQPKCVAVGPGGYAVVVCIGQIVLLKDQRKCFSIDNPGYEPEVVAVHPGGDTVAIGGVDGNVRLYSILGTTLKDEGKLLEAKGPVTDVAYSHDGAFLAVCDASKVVTVFSVADGYSENNVFYGHHAKIVCLAWSPDNEHFASGGMDMMVYVWTLSDPETRVKIQDAHRLHHVSSLAWLDEHTLVTTSHDASVKEWTITY

SEQ ID NO: 41 - DNA, 2204 bp, Homo sapien
gcggcgcgcgctgcgggcagtgagtgtggaggcgcggacgcgcggcggagctggaactgctgcagctgctgccgccgccggaggaaccttgatccccgtgctccggacaccccgggcctcgccatggctgaccagctgactgaggagcagattgcagagttcaaggaggccttctccctctttgacaaggatggagatggcactatcaccaccaaggagttggggacagtgatgagatccctgggacagaaccccactgaagcagagctgcaggatatgatcaatgaggtggatgcagatgaccttccagggaacgggaccattgacttcccggagttcctgaccatgatggccagaaagatgaaggacacagacagtgaggaggagatccgagaggcgttccgtgtctttgacaaggatgggaatggctacatcagcgccgcagagctgcgtcacgtaatgacgaacctgggggagaagctgaccgatgaggaggtggatgagatgatcagggaggctgacatcgatggagatggccaggtcaattatgaagagtttgtacagatgatgactgcaaagtgaaggccccccgggcagctggcgatgcccgttctcttgatctctctcttctcgcgcgcgcactctctcttcaacactcccctgcgtaccccggttctagcaaacaccaattgattgactgagaatctgataaagcaacaaaagatttgtcccaagctgcatgattgctctttctccttcttccctgagtctctctccatgcccctcatctcttccttttgccctcgcctcttccatccacgtcttccaaggcctgatgcattcataagttgaagccctccccagatccccttggagcctctgccctcctccagcccggatggctctcctccattttggtttgtttcctcttgtttgtcatcttattttgggtgctggggtggctgccagcctgtcccgggacctgctgggagggacaagaggccctccccaggcagaagagcatgccctttgccgttgcatgcaaccagccctgtgattccacgtgcagatcccagcagcctgttggggcaggggtgccaagagaggcattccagaaggactgagggggcgttgaggaattgtggcgttgactggatgtggcccaggaggggtcgagggggccaactcacagaaggggactgacagtgggcaacactcacatcccactggctgctgttctgaaaccatctgattggctttctgaggtttagctgggtggggactgctcatttggccactctgcagattggacttgcccgcgttcctgaagcgctctcgagctgttctgtaaatacctggtgctaacatcccatgccgctccctcctcacgatgcacccaccgccctgagggcccgtcctaggaatggatgtggggatggtcgctttgtaatgtgctggttctctttttttttctttcccctctatggcccttaagactttcattttgttcagaaccatgctgggctagctaaagggtggggagagggaagatgggccccaccagctctcaagagaaacgcacctgcaataaaacagtcttgtcggccagctgcccagggacggcagctacagcagcctctgcgtcctggtccgccagcacctcccgcttctccgtggtgacttggcgccgcttcctcacatctgtgctccgtgccctcttccctgcctcttccctcgcccacctgcctgcccccatactccccagcggagagcatgatccgtgcccttgcttctgactttcgcctctgggacaagtaagtcaatgtgggcagttcagtcgtctgggttttttccccttttctgttcatttcatctggctccccccaccacctccccaccccaccccccaccccctgcttcccctcactgcccaggtcgatcaagtggcttttcctgggacctgcccagctttgagaatctcttctcatccaccctctggcacccagcctctgagggaaggagggatggggcatagtgggagacccagccaagagctgagggtaagggcaggtaggcgtgaggctgtggacattttcggaatgttttggttttgttttttttaaaccgggcaatattgtgttcagttcaagctgtgaagaaaaatatatatcaatgttttccaataaaatacagtgactacctga

SEQ ID NO: 42 - protein, 152 aa, Homo sapien
MADQLTEEQIAEFKEAFSLFDKDGDGTITTKELGTVMRSLGQNPTEAELQDMINEVDADDLPGNGTIDFPEFLTMMARKMKDTDSEEEIREAFRVFDKDGNGYISAAELRHVMTNLGEKLTDEEVDEMIREADIDGDGQVNYEEFVQMMTAK

SEQ ID NO: 43 - DNA, 2834 bp, Homo sapien
gcccactcccaccgccagctggaaccctggggactacgacgtccctcaaaccttgcttctaggagataaaaagaacatccagtcatggataaaaatgagctggttcagaaggccaaactggccgagcaggctgagcgatatgatgacatggcagcctgcatgaagtctgtaactgagcaaggagctgaattatccaatgaggagaggaatcttctctcagttgcttataaaaatgttgtaggagcccgtaggtcatcttggagggtcgtctcaagtattgaacaaaagacggaaggtgctgagaaaaaacagcagatggctcgagaatacagagagaaaattgagacggagctaagagatatctgcaatgatgtactgtctcttttggaaaagttcttgatccccaatgcttcacaagcagagagcaaagtcttctatttgaaaatgaaaggagattactaccgttacttggctgaggttgccgctggtgatgacaagaaagggattgtcgatcagtcacaacaagcataccaagaagcttttgaaatcagcaaaaaggaaatgcaaccaacacatcctatcagactgggtctggcccttaacttctctgtgttctattatgagattctgaactccccagagaaagcctgctctcttgcaaagacagcttttgatgaagccattgctgaacttgatacattaagtgaagagtcatacaaagacagcacgctaataatgcaattactgagagacaacttgacattgtggacatcggatacccaaggagacgaagctgaagcaggagaaggaggggaaaattaaccggccttccaacttttgtctgcctcattctaaaatttacacagtagaccatttgtcatccatgctgtcccacaaatagttttttgtttacgatttatgacaggtttatgttacttctatttgaatttctatatttcccatgtggtttttatgtttaatattaggggagtagagccagttaacatttagggagttatctgttttcatcttgaggtggccaatatggggatgtggaatttttatacaagttataagtgtttggcatagtacttttggtacattgtggcttcaaaagggccagtgtaaaactgcttccatgtctaagcaaagaaaactgcctacatactggtttgtcctggcggggaataaaagggatcattggttccagtcacaggtgtagtaattgtgggtactttaaggtttggagcacttacaaggctgtggtagaatcataccccatggataccacatattaaaccatgtatatctgtggaatactcaatgtgtacacctttgactacagctgcagaagtgttcctttagacaaagttgtgacccattttactctggataagggcagaaacggttcacattccattatttgtaaagttacctgctgttagctttcattatttttgctacactcattttatttgtatttaaatgttttaggcaacctaagaacaaatgtaaaagtaaagatgcaggaaaaatgaattgcttggtattcattacttcatgtatatcaagcacagcagtaaaacaaaaacccatgtatttaacttttttttaggatttttgcttttgtgattttttttttttttttttgatacttgcctaacatgcatgtgctgtaaaaatagttaacagggaaataacttgagatgatggctagctttgtttaatgtcttatgaaattttcatgaacaatccaagcataattgttaagaacacgtgtattaaattcatgtaagtggaataaaagttttatgaatggacttttcaactactttctctacagcttttcatgtaaattagtcttggttctgaaacttctctaaaggaaattgtacattttttgaaatttattccttattccctcttggcagctaatgggctcttaccaagtttaaacacaaaatttatcataacaaaaatactactaatataactactgtttccatgtcccatgatcccctctcttcctccccaccctgaaaaaaatgagttcctattttttctgggagagggggggattgattagaaaaaaatgtagtgtgttccatttaaaattttggcatatggcattttctaacttaggaagccacaatgttcttggcccatcatgacattgggtagcattaactgtaagttttgtgcttccaaatcactttttggtttttaagaatttcttgatactcttatagcctgccttcaattttgatcctttattctttctatttgtcaggtgcacaagattaccttcctgttttagccttctgtcttgtcaccaaccattcttacttggtggccatgtacttggaaaaaggccgcatgatctttctggctccactcagtgtctaaggcaccctgcttcctttgcttgcatcccacagactatttccctcatcctatttactgcagcaaatctctccttagttgatgagactgtgtttatctccctttaaaaccctacctatcctgaatggtctgtcattgtctgcctttaaaatccttcctctttcttcctcctctattctctaaataatgatggggctaagttatacccaaagctcactttacaaaatatttcctcagtactttgcagaaaacaccaaacaaaaatgccattttaaaaaaggtgtattttttcttttagaatgtaagctcctcaagagcagggacaatgttttctgtatgttctattgtgcctagtacactgtaaatgctcaataaatattgatgatgggaggcagtgagtcttgatgataagggtgagaaactgaaatccc

SEQ ID NO: 44 - protein, 245 aa, Homo sapien
MDKNELVQKAKLAEQAERYDDMAACMKSVTEQGAELSNEERNLLSVAYKNVVGARRSSWRVVSSIEQKTEGAEKKQQMAREYREKIETELRDICNDVLSLLEKFLIPNASQAESKVFYLKMKGDYYRYLAEVAAGDDKKGIVDQSQQAYQEAFEISKKEMQPTHPIRLGLALNFSVFYYEILNSPEKACSLAKTAFDEAIAELDTLSEESYKDSTLIMQLLRDNLTLWTSDTQGDEAEAGEGGEN

SEQ ID NO: 45 - DNA, 3137 bp, Homo sapien
gcggagcgtgtgagcagtactgcggcctcctctcctctcctaacctcgctctcgcggcctacctttacccgcccgcctgctcggcgaccagcggggatcctcccccagccgcaagtccacgaagaaagcaacgaatgaaaattatgaagacaacgagaagtcagactcctccgggtcgcgctccagctgcttcggcttcgtcgcctactctgtgaactccggggagagatctcgagtcaagattaagaccttaacccaccaacctgcctgttcggacaccccccgggccggccgctgtctgtccccttctccatcgccctctcccagaaagctccggtgcttggaccagctagagtctgagaaagaggagaggcgcgaacgccactccaaaaagagaagggttaaagagggcaaccctaacgatacgcttgactttctgtggctgggaacaccttccaccatgaccacctcagcaagttcccacttaaataaaggcatcaagcaggtgtacatgtccctgcctcagggtgagaaagtccaggccatgtatatctggatcgatggtactggagaaggactgcgctgcaagacccggaccctggacagtgagcccaagtgtgtggaagagttgcctgagtggaatttcgatggctccagtactttacagtctgagggttccaacagtgacatgtatctcgtgcctgctgccatgtttcgggaccccttccgtaaggaccctaacaagctggtgttatgtgaagttttcaagtacaatcgaaggcctgcagagaccaatttgaggcacacctgtaaacggataatggacatggtgagcaaccagcacccctggtttggcatggagcaggagtataccctcatggggacagatgggcacccctttggttggccttccaacggcttcccagggccccagggtccatattactgtggtgtgggagcagacagagcctatggcagggacatcgtggaggcccattaccgggcctgcttgtatgctggagtcaagattgcggggactaatgccgaggtcatgcctgcccagtgggaatttcagattggaccttgtgaaggaatcagcatgggagatcatctctgggtggcccgtttcatcttgcatcgtgtgtgtgaagactttggagtgatagcaacctttgatcctaagcccattcctgggaactggaatggtgcaggctgccataccaacttcagcaccaaggccatgcgggaggagaatggtctgaagtacatcgaggaggccattgagaaactaagcaagcggcaccagtaccacatccgtgcctatgatcccaagggaggcctggacaatgcccgacgtctaactggattccatgaaacctccaacatcaacgacttttctgctggtgtagccaatcgtagcgccagcatacgcattccccggactgttggccaggagaagaagggttactttgaagatcgtcgcccctctgccaactgcgaccccttttcggtgacagaagccctcatccgcacgtgtcttctcaatgaaaccggcgatgagcccttccagtacaaaaattaagtggactagacctccagctgttgagcccctcctagttcttcatcccactccaactcttccccctctcccagttgtcccgattgtaactcaaagggtggaatatcaaggtcgtttttttcattccatgtgcccagttaatcttgctttctttgtttggctgggatagaggggtcaagttattaatttcttcacacctaccctcctttttttccctatcactgaagctttttagtgcattagtggggaggagggtggggagacataaccactgcttccatttaatggggtgcacctgtccaataggcgtagctatccggacagagcacgtttgcagaagggggactcttcttccaggtagctgaaaggggaagacctgacgtactctggttaggttaggacttgccctcgtggtggaaacttttcttaaaaagttataaccaacttttctattaaaagtgggaattaggagagaaggtaggggttgggaatcagagagaatggctttggtctcttgcttgtgggactagcctggcttgggactaaatgccctgctctgaacacgaagcttagtataaactgatggatatccctaccttgaaagaagaaaaggttcttactgcttggtccttgatttatcacacaaagcagaatagtatttttatatttaaatgtaaagacaaaaaactatatgtatggttttgtggattatgtgtgttttgctaaaggaaaaaaccatccaggtcacggggcaccaaatttgagacaaatagtcggattagaaataaagcatctcattttgagtagagagcaagggaagtggttcttagatggtgatctgggattaggccctcaagacccttttgggtttctgccctgcccaccctctggagaaggtgggcactggattagttaacagacgacacgttactagcagtcacttgatctccgtggctttggtttaaaagacacacttgtccacataggtttagagataagagttggctgttcaacttgagcatgttactgacagagggggtattggggttattttctggtaggaatagcatgtcactaaagcaggccttttgatattaaattttttaaaaagcaaaattatagaagtttagattttaatcaaatttgtagggtttctaggtaatttttacagaattgcttgtttgcttcaactgtctcctacctctgctcttggaggagatggggacagggctggagtcaaaacacttgtaattttgtatcttgatgtctttgttaagactgctgaagaattattttttttcttttataataaggaataaaccccacctttattccttcatttcatctaccattttctggttcttgtgttggctgtggcaggccagctgtggttttcttttgccatgacaacttctaattgccatgtacagtatgttcaaagtcaaataactcctcattgtaaacaaactgtgtaactgcccaaagcagcacttataaatcagcctaacataaaaaaaaaaaaaaaaaaaaaaaaaaaaaaaaaaaaaaaaaaaaaaaa

SEQ ID NO: 46 - protein, 373 aa, Homo sapien
MTTSASSHLNKGIKQVYMSLPQGEKVQAMYIWIDGTGEGLRCKTRTLDSEPKCVEELPEWNFDGSSTLQSEGSNSDMYLVPAAMFRDPFRKDPNKLVLCEVFKYNRRPAETNLRHTCKRIMDMVSNQHPWFGMEQEYTLMGTDGHPFGWPSNGFPGPQGPYYCGVGADRAYGRDIVEAHYRACLYAGVKIAGTNAEVMPAQWEFQIGPCEGISMGDHLWVARFILHRVCEDFGVIATFDPKPIPGNWNGAGCHTNFSTKAMREENGLKYIEEAIEKLSKRHQYHIRAYDPKGGLDNARRLTGFHETSNINDFSAGVANRSASIRIPRTVGQEKKGYFEDRRPSANCDPFSVTEALIRTCLLNETGDEPFQYKN

SEQ ID NO: 47 - DNA, 2438 bp, Homo sapien
cccggcggcgccaaccgaagcgccccgcctgatccgtgtccgacatgctgcgccgcgctctgctgtgcctggccgtggccgccctggtgcgcgccgacgcccccgaggaggaggaccacgtcctggtgctgcggaaaagcaacttcgcggaggcgctggcggcccacaagtacctgctggtggagttctatgccccttggtgtggccactgcaaggctctggcccctgagtatgccaaagccgctgggaagctgaaggcagaaggttccgagatcaggttggccaaggtggacgccacggaggagtctgacctggcccagcagtacggcgtgcgcggctatcccaccatcaagttcttcaggaatggagacacggcttcccccaaggaatatacagctggcagagaggctgatgacatcgtgaactggctgaagaagcgcacgggcccggctgccaccaccctgcctgacggcgcagctgcagagtccttggtggagtccagcgaggtggctgtcatcggcttcttcaaggacgtggagtcggactctgccaagcagtttttgcaggcagcagaggccatcgatgacataccatttgggatcacttccaacagtgacgtgttctccaaataccagctcgacaaagatggggttgtcctctttaagaagtttgatgaaggccggaacaactttgaaggggaggtcaccaaggagaacctgctggactttatcaaacacaaccagctgccccttgtcatcgagttcaccgagcagacagccccgaagatttttggaggtgaaatcaagactcacatcctgctgttcttgcccaagagtgtgtctgactatgacggcaaactgagcaacttcaaaacagcagccgagagcttcaagggcaagatcctgttcatcttcatcgacagcgaccacaccgacaaccagcgcatcctcgagttctttggcctgaagaaggaagagtgcccggccgtgcgcctcatcaccctggaggaggagatgaccaagtacaagcccgaatcggaggagctgacggcagagaggatcacagagttctgccaccgcttcctggagggcaaaatcaagccccacctgatgagccaggagctgccggaggactgggacaagcagcctgtcaaggtgcttgttgggaagaactttgaagacgtggcttttgatgagaaaaaaaacgtctttgtggagttctatgccccatggtgtggtcactgcaaacagttggctcccatttgggataaactgggagagacgtacaaggaccatgagaacatcgtcatcgccaagatggactcgactgccaacgaggtggaggccgtcaaagtgcacagcttccccacactcaagttctttcctgccagtgccgacaggacggtcattgattacaacggggaacgcacgctggatggttttaagaaattcctggagagcggtggccaggatggggcaggggatgatgacgatctcgaggacctggaagaagcagaggagccagacatggaggaagacgatgatcagaaagctgtgaaagatgaactgtaatacgcaaagccagacccgggcgctgccgagacccctcgggggctgcacacccagcagcagcgcacgcctccgaagcctgcggcctcgcttgaaggagggcgtcgccggaaacccagggaacctctctgaagtgacacctcacccctacacaccgtccgttcacccccgtctcttccttctgcttttcggtttttggaaagggatccatctccaggcagcccaccctggtggggcttgtttcctgaaaccatgatgtactttttcatacatgagtctgtccagagtgcttgctaccgtgttcggagtctcgctgcctccctcccgcgggaggtttctcctctttttgaaaattccgtctgtgggatttttagacatttttcgacatcagggtatttgttccaccttggccaggcctcctcggagaagcttgtcccccgtgtgggagggacggagccggactggacatggtcactcagtaccgcctgcagtgtcgccatgactgatcatggctcttgcatttttgggtaaatggagacttccggatcctgtcagggtgtcccccatgcctggaagaggagctggtggctgccagccctggggcccggcacaggcctgggccttccccttccctcaagccagggctcctcctcctgtcgtgggctcattgtgaccactggcctctctacagcacggcctgtggcctgttcaaggcagaaccacgacccttgactcccgggtggggaggtggccaaggatgctggagctgaatcagacgctgacagttcttcaggcatttctatttcacaatcgaattgaacacattggccaaataaagttgaaattttaccaccaaaaaaaaaaaaaaaa

SEQ ID NO: 48 - protein, 508 aa, Homo sapien
  unsure 12: unknown amino acid
MLRRALLCLPWXALVRADAPEEEDHVLVLRKSNFAEALAAHKYPPVEFHAPWCGHCKALAPEYAKAAGKLKAEGSEIRLAKVDATEESDLAQQYGVRGYPTIKFFRNGDTASPKEYTAGREADDIVNWLKKRTGPAATTLPDGAAAESLVESSEVAVIGFFKDVESDSAKQFLQAAEAIDDIPFGITSNSDVFSKYQLDKDGVVLFKKFDEGRNNFEGEVTKENLLDFIKHNQLPLVIEFTEQTAPKIFGGEIKTHILLFLPKSVSDYDGKLSNFKTAAESFKGKILFIFIDSDHTDNQRILEFFGLKKEECPAVRLITLEEEMTKYKPESEELTAERITEFCHRFLEGKIKPHLMSQELPEDWDKQPVKVLVGKNFEDVAFDEKKNVFVEFYAPWCGHCKQLAPIWDKLGETYKDHENIVIAKMDSTANEVEAVKVHGFPTLGFFPASADRTVIDYNGERTLDGFKKFLESGGQDGAGDVDDLEDLEEAEEPDMEEDDDQKAVKDEL

SEQ ID NO: 49 - DNA, 595 bp, Homo sapien
gggcaaggctgggccgggaagggcgtgggttgaggagaggctccagacccgcacgccgcgcgcacagagctctcagcgccgctcccagccacagcctcccgcgcctcgctcagctccaacatggcaaaaatctccagccctacagagactgagcggtgcatcgagtccctgattgctgtcttccagaagtatgctggaaaggatggttataactacactctctccaagacagagttcctaagcttcatgaatacagaactagctgccttcacaaagaaccagaaggaccctggtgtccttgaccgcatgatgaagaaactggacaccaacagtgatggtcagctagatttctcagaatttcttaatctgattggtggcctagctatggcttgccatgactccttcctcaaggctgtcccttcccagaagcggacctgaggaccccttggccctggccttcaaacccaccccctttccttccagcctttctgtcatcatctccacagcccacccatcccctgagcacactaaccacctcatgcaggccccacctgccaatagtaataaagcaatgtcacttttttaaaacatgaaa

SEQ ID NO: 50 - protein, 105 aa, Homo sapien
MAKISSPTETERCIESLIAVFQKYAGKDGYNYTLSKTEFLSFMNTELAAFTKNQKDPGVLDRMMKKLDTNSDGQLDFSEFLNLIGGLAMACHDSFLKAVPSQKRT

SEQ ID NO: 51 - DNA, 2233 bp, Homo sapien
gggacggcgacagcgggtcggcgggccgcaggagggggtcatgggtaaagactactaccagacgttgggcctggcccgcggcgcgtcggacgaggagatcaagcgggcctaccgccgccaggcgctgcgctaccacccggacaagaacaaggagcccggcgccgaggagaagttcaaggagatcgctgaggcctacgacgtgctcagcgacccgcgcaagcgcgagatcttcgaccgctacggggaggaaggcctaaaggggagtggccccagtggcggtagcggcggtggtgccaatggtacctctttcagctacacattccatggagaccctcatgccatgtttgctgagttcttcggtggcagaaatccctttgacaccttttttgggcagcggaacggggaggaaggcatggacattgatgacccattctctggcttccctatgggcatgggtggcttcaccaacgtgaactttggccgctcccgctctgcccaagagcccgcccgaaagaagcaagatcccccagtcacccacgaccttcgagtctcccttgaagagatctacagcggctgtaccaagaagatgaaaatctcccacaagcggctaaaccccgacggaaagagcattcgaaacgaagacaaaatattgaccatcgaagtgaagaaggggtggaaagaaggaaccaaaatcactttccccaaggaaggagaccagacctccaacaacattccagctgatatcgtctttgttttaaaggacaagccccacaatatctttaagagagatggctctgatgtcatttatcctgccaggatcagcctccgggaggctctgtgtggctgcacagtgaacgtccccactctggacggcaggacgatacccgtcgtattcaaagatgttatcaggcctggcatgcggcgaaaagttcctggagaaggcctccccctccccaaaacacccgagaaacgtggggacctcattattgagtttgaagtgatcttccccgaaaggattccccagacatcaagaaccgtacttgagcaggttcttccaatatagctatctgagctccccaaggactgaccagggacctttccagagctcaaggatttctggacctttctaccagttgtggaccatgagagggtgggagggcccagggagggctttcgtactgctgaatgttttccagagcatatattacaatctttcaaagtcgcacactagacttcagtggtttttcgagctatagggcatcaggtggtgggaacagcaggaaaaggcattccagtctgccccactgggtctggcagccctcccgggatgggcccacatccacctccagtccctggccaggggtgagaggcagaccagcagatggacttgatccctctgtgtctttgggcttctggctggtagataatgtcaacctgcagtcttgattcccagaccctgtacactcctccttttctgttgtgtgatcagtttgtgctttattctgtatttgtctcccatgtcttgctcttctcctggagaattctgtcttctctttggccatctcaaattgagaacctaaactattcctgcagaactgcctggttggcgtccacaagcaatacctctcgttccagcaggaccaagggagccagcctccagtgagtgactccagcaagtgcagccacctctcccttgatggtctgggagcctggcctcagcaaggggccttcctgacctctggctccagtgaagctgaatgtcctcactttgtgggtcacactctttacatttctgtaaggcaatcttggcacacgtggggcttaccagtggcccaggtaattttttgtttcatggactatggactctttcaaagggatctgatccttttgaattttgcacagccctagatacaatcccttttgataaaagggtctttgcttctgattacaggagcactgtggaacgtctgtaaatatgtttttataattccatgtatagttggtgtacactcaaaacctgtccccggcagccagtgctctctgtatagggccataatggaattctgaagaaatcttggggagggaaggggagttggaacaaatgtctgttccctggaggccagtccagtgctcagacctttagactcattgtaagttgccactgccaacatgagaccaaagtgtgtgactagtcaatgaagtgcgacagcattaaagactgatgctaaacctc

SEQ ID NO: 52 - protein, 340 aa, Homo sapien
MGKDYYQTLGLARGASDEEIKRAYRRQALRYHPDKNKEPGAEEKFKEIAEAYDVLSDPRKREIFDRYGEEGLKGSGPSGGSGGGANGTSFSYTFHGDPHAMFAEFFGGRNPFDTFFGQRNGEEGMDIDDPFSGFPMGMGGFTNVNFGRSRSAQEPARKKQDPPVTHDLRVSLEEIYSGCTKKMKISHKRLNPDGKSIRNEDKILTIEVKKGWKEGTKITFPKEGDQTSNNIPADIVFVLKDKPHNIFKRDGSDVIYPARISLREALCGCTVNVPTLDGRTIPVVFKDVIRPGMRRKVPGEGLPLPKTPEKRGDLIIEFEVIFPERIPQTSRTVLEQVLPI

SEQ ID NO: 53 - DNA, 2602 bp, Homo sapien
gccgtgtcgccaccatggctccgcaccgccccgcgcccgcgctgctttgcgcgctgtccctggcgctgtgcgcgctgtcgctgcccgtccgcgcggccactgcgtcgcggggggcgtcccaggcgggggcgccccaggggcgggtgcccgaggcgcggcccaacagcatggtggtggaacaccccgagttcctcaaggcagggaaggagcctggcctgcagatctggcgtgtggagaagttcgatctggtgcccgtgcccaccaacctttatggagacttcttcacgggcgacgcctacgtcatcctgaagacagtgcagctgaggaacggaaatctgcagtatgacctccactactggctgggcaatgagtgcagccaggatgagagcggggcggccgccatctttaccgtgcagctggatgactacctgaacggccgggccgtgcagcaccgtgaggtccagggcttcgagtcggccaccttcctaggctacttcaagtctggcctgaagtacaagaaaggaggtgtggcatcaggattcaagcacgtggtacccaacgaggtggtggtgcagagactcttccaggtcaaagggcggcgtgtggtccgtgccaccgaggtacctgtgtcctgggagagcttcaacaatggcgactgcttcatcctggacctgggcaacaacatccaccagtggtgtggttccaacagcaatcggtatgaaagactgaaggccacacaggtgtccaagggcatccgggacaacgagcggagtggccgggcccgagtgcacgtgtctgaggagggcactgagcccgaggcgatgctccaggtgctgggccccaagccggctctgcctgcaggtaccgaggacaccgccaaggaggatgcggccaaccgcaagctggccaagctctacaaggtctccaatggtgcagggaccatgtccgtctccctcgtggctgatgagaaccccttcgcccagggggccctgaagtcagaggactgcttcatcctggaccacggcaaagatgggaaaatctttgtctggaaaggcaagcaggcaaacacggaggagaggaaggctgccctcaaaacagcctctgacttcatcaccaagatggactaccccaagcagactcaggtctcggtccttcctgagggcggtgagaccccactgttcaagcagttcttcaagaactggcgggacccagaccagacagatggcctgggcttgtcctacctttccagccatatcgccaacgtggagcgggtgcccttcgacgccgccaccctgcacacctccactgccatggccgcccagcacggcatggatgacgatggcacaggccagaaacagatctggagaatcgaaggttccaacaaggtgcccgtggaccctgccacatatggacagttctatggaggcgacagctacatcattctgtacaactaccgccatggtggccgccaggggcagataatctataactggcagggtgcccagtctacccaggatgaggtcgctgcatctgccatcctgactgctcagctggatgaggagctgggaggtacccctgtccagagccgtgtggtccaaggcaaggagcccgcccacctcatgagcctgtttggtgggaagcccatgatcatctacaagggcggcacctcccgcgagggcgggcagacagcccctgccagcacccgcctcttccaggtccgcgccaacagcgctggagccacccgggctgttgaggtattgcctaaggctggtgcactgaactccaacgatgcctttgttctgaaaaccccctcagccgcctacctgtgggtgggtacaggagccagcgaggcagagaagacgggggcccaggagctgctcagggtgctgcgggcccaacctgtgcaggtggcagaaggcagcgagccagatggcttctgggaggccctgggcgggaaggctgcctaccgcacatccccacggctgaaggacaagaagatggatgcccatcctcctcgcctctttgcctgctccaacaagattggacgttttgtgatcgaagaggttcctggtgagctcatgcaggaagacctggcaacggatgacgtcatgcttctggacacctgggaccaggtctttgtctgggttggaaaggattctcaagaagaagaaaagacagaagccttgacttctgctaagcggtacatcgagacggacccagccaatcgggatcggcggacgcccatcaccgtggtgaagcaaggctttgagcctccctcctttgtgggctggttccttggctgggatgatgattactggtctgtggaccccttggacagggccatggctgagctggctgcctgaggaggggcagggcccacccatgtcaccggtcagtgccttttggaactgtccttccctcaaagaggccttagagcgagcagagcagctctgctatgagtgtgtgtgtgtgtgtgtgttgtttcttttttttttttttacagtatccaaaaatagccctgcaaaaattcagagtccttgcaaaattgtctaaaatgtcagtgtttgggaaattaaatccaataaaaacattttgaagtgtg

SEQ ID NO: 54 - protein, 782 aa, Homo sapien
MAPHRPAPALLCALSLALCALSLPVRAATASRGASQAGAPQGRVPEARPNSMVVEHPEFLKAGKEPGLQIWRVEKFDLVPVPTNLYGDFFTGDAYVILKTVQLRNGNLQYDLHYWLGNECSQDESGAAAIFTVQLDDYLNGRAVQHREVQGFESATFLGYFKSGLKYKKGGVASGFKHVVPNEVVVQRLFQVKGRRVVRATEVPVSWESFNNGDCFILDLGNNIHQWCGSNSNRYERLKATQVSKGIRDNERSGRARVHVSEEGTEPEAMLQVLGPKPALPAGTEDTAKEDAANRKLAKLYKVSNGAGTMSVSLVADENPFAQGALKSEDCFILDHGKDGKIFVWKGKQANTEERKAALKTASDFITKMDYPKQTQVSVLPEGGETPLFKQFFKNWRDPDQTDGLGLSYLSSHIANVERVPFDAATLHTSTAMAAQHGMDDDGTGQKQIWRIEGSNKVPVDPATYGQFYGGDSYIILYNYRHGGRQGQIIYNWQGAQSTQDEVAASAILTAQLDEELGGTPVQSRVVQGKEPAHLMSLFGGKPMIIYKGGTSREGGQTAPASTRLFQVRANSAGATRAVEVLPKAGALNSNDAFVLKTPSAAYLWVGTGASEAEKTGAQELLRVLRAQPVQVAEGSEPDGFWEALGGKAAYRTSPRLKDKKMDAHPPRLFACSNKIGRFVIEEVPGELMQEDLATDDVMLLDTWDQVFVWVGKDSQEEEKTEALTSAKRYIETDPANRDRRTPITVVKQGFEPPSFVGWFLGWDDDYWSVDPLDRAMAELAA

SEQ ID NO: 55 - DNA, 4394 bp, Mus musculus
ccggctcggtacgcgctctgctccgagccgctcactgcgtggtagagtctggtgcccccgccgtcgcctgcatcgccgccaccgccgctccgccacgaccaccgccgcctcctgccctgcagccaccgccaccgcctgtgtcgccgccgcctcgggaccggctgtatgattaggccacaatcttcaatgagtaaacatattcctcaattctgtggtgttcttggtcacacatttatggagtttctgaagggcagtggagattactgccaggcacagcacgacctctatgcagacaagtgaactgtagaaactgattactgctccaccaagaagcccccataagagtggttatcctggacacagaagtgttgaattgaaatccacagagcattttacaagagttctgacctggatggggtaaacctcagtgcacttcttttctgttggcctcagtattactggattgaagaattgctgcttcttgttaggaggttcatttcacttatcattacttacaacttcatactcaaagcactgagaatttcaagtggagtatattgaagtagacttcagtttctttgcatcatttctgtattcaatttttttaattatttcataaccctattgagtgttttttaactaaattaacatggctcgaatgaaccgcccagctcctgtggaagtcacatacaagaacatgagatttcttattacacacaatccaaccaatgcgaccttaaacaaatttatagaggaacttaagaagtatggagttaccacaatagtaagagtatgtgaagcaacttatgacactactcttgtggagaaagaaggtatccatgttcttgattggccttttgatgatggtgcaccaccatccaaccagattgttgatgactggttaagtcttgtgaaaattaagtttcgtgaagaacctggttgttgtattgctgttcattgcgttgcaggccttgggagagctccagtacttgttgccctagcattaattgaaggtggaatgaaatacgaagatgcagtacaattcataagacaaaagcggcgtggagcttttaacagcaagcaacttctgtatttggagaagtatcgtcctaaaatgcggctgcgtttcaaagattccaacggtcatagaaacaactgttgcattcaataaaattggggtgcctaatgctactggaagtggaacttgagatagggcctaatttgttatacatattagccaacatgttggcttagtaagtctaatgaagcttccataggagtattgaaaggcagttttaccaggcctcaagctagacagatttggcaacctctgtatttgggttacagtcaacctatttggatacttggcaaaagattcttgctgtcagcatataaaatgtgcttgtcatttgtatcaattgacctttccccaaatcatgcagtattgagttatgacttgttaaatctattcccatgccagaatcttatcaatacataagaaatttaggaagattaggtgccaaaatacccagcacaatacttgtatatttttagtaccatacagaagtaaaatcccaggaactatgaacactagaccttatgtggtttattccttcaatcatttcaaacattgaaagtagggcctacatggttatttgcctgctcactttatgtttacatctcccacattcataccaatatacgtcaggtttgcttaaccattgatttttttttttttttaccaagtcttacagtgattattttacgtgtttccatgtatctcactttgtgctgtattaaaaaaacctccattttgaaaatctacgttgtacagaagcacatgtctttaatgtcttcagacaaaaaagccttacattaatttaatgtttgcactctgaggtgcaacttaacagggagggcctgagaaaagaatgggagggggctattaattattttttagcaaaatgttgcctttgtcttgtgcaaacatgtagaatatgctctttaatttagtaaaatatttttttaaaaggtagagatgctttgttattgtaatcataaacttcctgaaattcttgtaatttttttcccatacttatcagaagtgtgtttaccaacttatttttgtttgaaagtgtgattttttttttccttcccaacctctcttgcaaaaaaagaaatgggtttctgctaatgaattgagcacatctaatattttatatgccttttggagctgtgtaagttaatatttgatacttgacaatttgttttattatgtaattgataaaatggtgatgtgtattaatgttagttcaaccatatatttatactgtctggggatgtgtggttatagttctgtgggagaaataattttgtcagtgttcaccagcttgtaaaaacttagtgcgagagctgaaacatctaaataaataatgacatgcatttatcatcattgagattggtttgctttaaattaacttattttgtagaagacaaaatgaattgcacttcacttaatgtgtgtcctcatctttttacaaataaatgaaggattataaatgatgtcagcattttagtaaacttttagacaaaatttgttagggtcattcatgaaaactttaatactaaaagcactttccattatatactttttaaaggtctagataattttgaaccaatttattattgtgtactgaggagaaataatgtatagtagaggacagccttggtttgtaaagctcagttccactagttcatggttttgtgcaacttctgagcctcagttttctcctttgcaaattaataattacatacctttatagattttgaaattaatttaaatattagtatttggtacatgaaggcttaatgttaagtttcctttaatgatccacaataatccctttgatcacgttaatctaaatctagatgtctttgtctaattttttttgaatagcagttataaatgtaaaggactcaaagtttaagtaaaaagtgatactccaccttgtgtttcaaagaatttagttccacctcttcataccagtttaacacttaatatatttcattggattttagacagggcaaaaggaagaacaggggcctctggaggcccttggttatttaaatcttggattatttgtgatagtaatcacaaatttttggctaatttttaacctgaggttttgttttttttttaaaggaaatgcagcctagtcttgagaacataattttatataatcaattactaaatgttaaactattaccacacagcccataaaacagcatttgcgtttattgagagagaggatgtgccatcatgattaatgaaaactatcttttgagtttgaaaagaaattaatttgcagtgtttggattgtatatatggtgctaaaaataaattaatttactttataaaccttatctgtacattatacgatgtgatgaaatttgctttttatccaaatattttgtatcttgtaaatatggctaattataggaatgcctataatacatcttagattccttatatctaataagagttcaaagagttatgagttgaagtcttgaatgcaggaaactatctgatagtgttctaaaatttggttacttgggtttggatacccttagtgggatgatgtaaatagaggctagctacctaggcttgtctatagcaaccataatgttgatgtaagtaatgcggttactgaatcataagaaaatgccatctctttttagttgaaggaaaactctggaagtaggtgccattggtcattctgcagtgcactgcaaccattgtttcccctagtgccctcttttccctagggcattgctctcctattcccacgccttaacacagctctatacctagaagcagccagcccaggcatgcagtcacatttaatcacatcccccttctagagtgcttcaaaatgatgtagtccctcaacttggctaaagaatctcaatctcttgaaatttatttttttaatgtcatattcatctggtaaatatctactgtttgccaggcatttaagaatatggcaaagaacataaaagatggtgtcaccagattttggtcaccaatgagtacccgacccgttgccatgattaagagagaatgctttctattggagtttcaggaaatataatttgagaatactttaaagggaagtggaagtataagtgaatgatatttttcttttacatgtaaacaatgaagttatttcaaagttaagttttaaacaaaatacatgaagtagtgtctgccatacatgttaatattctacattcttgcttccttaaattaatatgtttgtgtgtatatatgtgcctcacacctgaattgaaaattaaagactggtttaaaagtggttaaaaaaaaaaaaaaaaaa

SEQ ID NO: 56 - protein, 173 aa, Mus musculus
MARMNRPAPVEVTYKNMRFLITHNPTNATLNKFIEELKKYGVTTIVRVCEATYDTTLVEKEGIHVLDWPFDDGAPPSNQIVDDWLSLVKIKFREEPGCCIAVHCVAGLGRAPVLVALALIEGGMKYEDAVQFIRQKRRGAFNSKQLLYLEKYRPKMRLRFKDSNGHRNNCCIQ

SEQ ID NO: 57 - DNA, 1656 bp, Mus musculus
cgcccctgctctcgcgccggcgtcggctgcgtctccggcgtttgaattgcgcttccgccatctttccagcctcagtcggacgggcgcggaggcgcttctggaaggaacgccgcgatggctgcgcagggagagccccaggtccagttcaaacttgtattggttggtgatggtggtactggaaaaacgaccttcgtgaaacgtcatttgactggtgaatttgagaagaagtatgtagccaccttgggtgttgaggttcatcccctagtgttccacaccaacagaggacctattaagttcaatgtatgggacacagccggccaggagaaattcggtggactgagagatggctattatatccaagcccagtgtgccatcataatgtttgatgtaacatcgagagttacttacaagaatgtgcctaactggcatagagatctggtacgagtgtgtgaaaacatccccattgtgttgtgtggcaacaaagtggatattaaggacaggaaagtgaaggcgaaatccattgtcttccaccgaaagaagaatcttcagtactacgacatttctgccaaaagtaactacaactttgaaaagcccttcctctggcttgctaggaagctcattggagaccctaacttggaatttgttgccatgcctgctctcgccccaccagaagttgtcatggacccagctttggcagcacagtatgagcacgacttagaggttgctcagacaactgctctcccggatgaggatgatgacctgtgagaatgaagctggagcccagcgtcagaagtctagttttataggcagctgtcctgtgatgtcagcggtgcagcgtgtgtgccacctcattattatctagctaagcggaacatgtgctttatctgtgggatgctgaaggagatgagtgggcttcggagtgaatgtggcagtttaaaaaataacttcattgtttggacctgcatatttagctgtttggacgcagttgattccttgagtttcatatataagactgctgcagtcacatcacaatattcagtggtgaaatcttgtttgttactgtcattcccattccttttctttagaatcagaataaagttgtatttcaaatatctaagcaagtgaactcatcccttgtttataaatagcatttggaaaccactaaagtagggaagttttatgccatgttaatatttgaattgccttgcttttatcacttaatttgaaatctattgggttaatttctccctatgtttatttttgtacatttgagccatgtcacacaaactgatgatgacaggtcagcagtattctatttggttagaagggttacatggtgtaaatattagtgcagttaagctaaagcagtgtttgctccaccttcatattggctaggtagggtcacctagggaagcacttgctcaaaatctgtgacctgtcagaataaaaatgtggtttgtacatatcaaatagatattttaagggtaatattttcttttatggcaaaagtaatcatgttttaatgtagaacctcaaacaggatggaacatcagtggatggcaggaggttgggaattcttgctgttaaaaataattacaaattttgcactttttgtttgaatgttagatgcttagtgtgaagttgatacgcaagccg

SEQ ID NO: 58 - protein, 216 aa, Mus musculus
MAAQGEPQVQFKLVLVGDGGTGKTTFVKRHLTGEFEKKYVATLGVEVHPLVFHTNRGPIKFNVWDTAGQEKFGGLRDGYYIQAQCAIIMFDVTSRVTYKNVPNWHRDLVRVCENIPIVLCGNKVDIKDRKVKAKSIVFHRKKNLQYYDISAKSNYNFEKPFLWLARKLIGDPNLEFVAMPALAPPEVVMDPALAAQYEHDLEVAQTTALPDEDDDL

SEQ ID NO: 59 - DNA, 1774 bp, Homo sapien
ttttgtgaagagacgaagactgagcggttgtggccgcgttgccgacctccagcagcagtcggcattctctaacgcagaaacccgggagtaggagactcagaatcgaatctcttctccctccccttcttgtgagatttttttgatcttcagctacattttcggctttgtgagaaaccttaccatcaaacacgatggccagcaacgttaccaacaagacagatcctcgctccatgaactcccgtgtattcattgggaatctcaacactcttgtggtcaagaaatctgatgtggaggcaatcttttcgaagtatggcaaaattgtgggctgctctgttcataagggctttgccttcgttcagtatgttaatgagagaaatgcccgggctgctgtagcaggagaggatggcagaatgattgctggccaggttttagatattaacctggctgcagagccaaaagtgaaccgaggaaaagcaggtgtgaaacgatctgcagcggagatgtacgggtcagtaacagaacacccttctccgtcccctctactcagctcctcttttgacttggactatgactttcaacgggactattatgataggatgtacagttacccagcacgtgtacctcctcctcctcctattgctcgggctgtagtgccctcgaaacgtcagcgtgtatcaggaaacacttcacgaaggggcaaaagtggcttcaattctaagagtggacagcggggatcttccaagtctggaaagttgaaaggagatgaccttcaggccattaagaaggagctgacccagataaaacaaaaagtggattctctcctggaaaacctggaaaaaatggaaaaggaacagagcaaacaagcagtagagatgaagaatgataagtcagaagaggagcagagcagcagctccgtgaagaaagatgagactaatgtgaagatggagtctgaggggggtgcagatgactctgctgaggagggggacctactggatgatgatgataatgaagatcggggggatgaccagctggagttgatcaaggatgatgaaaaagaggctgaggaaggagaggatgacagagacagcgccaatggaggatgactcttaagcacatagtggggtttagaaatcttatcccattatttctttacctaggcgcttgtctaagatcaaatttttcaccagatcctctcccctagtatcttcagcacatgctcactgttctccccatccttgtccttcccatgttcattaattcatattgccccgcgcctagtcccattttcacttcctttgacgctcctagtagttttgttaagtcttaccctgtaatttttgcttttaattttgatacctctttatgacttaacaataaaaaggatgtatggtttttatcaactgtctccaaaataatctcttgttatgcagggagtacagttcttttcattcatacataagttcagtagttgcttccctaactgcaaaggcaatctcatttagttgagtagctcttgaaagcagctttgagttagaagtatgtgtgttacaccctcacattagtgtgctgtgtggggcagttcaacacaaatgtaacaattatttttgtgaatgagagttggcatgtcaaatgcatcctctagaaaaataattagtgttatagtcttaagatttgttttctaaagttgatactgtgggatttttgtgaacagcctgatgtttgggaccttttttcctcaaaataaacaagtccttattaaaccaggaatttggag

SEQ ID NO: 60 - protein, 303 aa, Homo sapien
MASNVTNKTDPRSMNSRVFIGNLNTLVVKKSDVEAIFSKYGKIVGCSVHKGFAFVQYVNERNARAAVAGEDGRMIAGQVLDINLAAEPKVNRGKAGVKRSAAEMYGSVTEHPSPSPLLSSSFDLDYDFQRDYYDRMYSYPARVPPPPPIARAVVPSKRQRVSGNTSRRGKSGFNSKSGQRGSSKSGKLKGDDLQAIKKELTQIKQKVDSLLENLEKMEKEQSKQAVEMKNDKSEEEQSSSSVKKDETNVKMESEGGADDSAEEGDLLDDDDNEDRGDDQLELIKDDEKEAEEGEDDRDSANGG

SEQ ID NO: 61 - DNA, 2998 bp, Homo sapien
gagaggagacaccgccgcagttgccggtacatcggggatttctggctctttcctcttcgccttaaattcgggtgtcttttatgaataatcaaaagcagcaaaagccaacgctatcaggccagcgttttaaaactagaaaaagagatgaaaaagagaggtttgaccctactcagtttcaagactgtattattcaaggcttaactgaaaccggtactgatttggaagcagtagctaagtttcttgatgcttctggagcaaaacttgattaccgtcgatatgcagaaacactctttgacattctggtggctggtggaatgctggccccaggtggtacactggcagatgacatgatgcgtacagatgtctgcgtgtttgcagcccaagaagatctagagaccatgcaagcatttgctcaggtttttaacaagttaatcaggcgctacaaatacctggagaaaggttttgaagatgaagtaaaaaagctgctgctgttcttgaagggtttttcagagtcggagaggaacaagctagctatgttgactggtgttcttctggctaatggaacacttaatgcatccattcttaatagcctttataatgaaaatttggttaaagaaggagtttcagcagcttttgctgtgaagctctttaaatcatggataaatgaaaaagatatcaatgcagtagctgcaagtcttcggaaagtcagcatggataacagactgatggaactctttcctgccaataagcaaagtgttgaacacttcacaaaatattttactgaggcaggcttgaaagagctttcagaatatgttcggaatcagcaaaccatcggagctcgtaaggagctccagaaagaacttcaagaacagatgtcccgtggtgatccatttaaggatataattttatatgtcaaggaggagatgaaaaaaaacaacatcccagagccagttgtcatcggaatagtctggtcaagtgtaatgagcactgtggaatggaacaaaaaagaggagcttgtagcagagcaagccatcaagcacttgaagcaatacagccctctacttgctgcctttactactcaaggtcagtctgagctgactctgttactgaagattcaggagtattgctatgacaacattcatttcatgaaagccttccagaaaatagtggtgcttttttataaagctgaagtcctgagcgaggagcccattttgaagtggtataaagatgcacatgttgcaaaggggaagagtgttttccttgagcaaatgaaaaagtttgtagaatggctcaaaaatgctgaagaagaatctgaatctgaagctgaagaaggtgactgaattttgaaactacaccctcagtaaagcaaacaggagttgtagataaaatgtcatgtctcatgtgtcctggttcttacatcttcctacctccctgtatcaagcatgatataagggctttcatggcaaattttattttaactgtttctatggttgctggaaatgttgggtttagtttctaaaaccatgttttaagtagctacaggagctatagatttgaatctaatgttgcattagtcttttcagttatcttctacctcctgtattttctactgtaataatgtaatttaaggccttccacaatgaacagttcactttattccctgggttttctataaacagttttaaggatatgatttggttaaaaaataatttgttataaaaattctgtttgcaaattaaactggaaaagtatccagagtctcaaaaggcaatgatttgtgagataatatggcatgcccggagccctgctcatcaatgaaaaacccatatgtaataatcgaattcatttaacatgaatcttgagtacgtggaccattgcttgcatgttaactttttgttttgttttgttttgttttgttttgcatttttaactccagatatcctaaagctcaattgtttggtctctggttttcatccttagagaagccatggagaacagacttgaaaagtttaggaaatcataatgtggcagaggtggtgggaagaagaaagttgagctttttccccttgagaaacttctgcatttagtttctatctttccaggcaaaacaaatgggtattcttttcatacaaccattttcaaatgaaccttagaaaagtcttaacatttaaggtattttatgcacagaatacacttagattgataggaaagaactcgtaatggagtttgagtaaagaaaatgactgatgtactaaacccagtaaaaattgttgaaaatgttaaaggtcagcatgttctaattgggaatctagatatagcttagatttcctattggcttagagtatttgctataacaaatgaagtgcaatgacaattatatattcctactcggtcatactggactggcttcgttctcttaatatactcagtaatgactcaagcctctggctattaacataccctagttgccgttttttaattgccatgagccaaatacttcttggtatacaattgatccatttattttaatggctgccttttcattttcatcttttcttgctgctacccatctatgtatgtagtcattggggggaaaatgtagccacattttttatgggaagactttgtgttaaaagtgaacattttgaaggtttttaactggtgaaactagcctggaataatgccaccagagactgagtggaaatcgccccttttgaaggtgccattcttatgagccaaaagtttgtcatttaaaagttcattttgagggaataacatgtaatataatttgaaataaaggtatagtaaccttaaaaagaacattataactgattgttgtgaatggggtgaatttgttaaaatgagtaactttgataaagtttttcatgcacaggcaaaatgtattcactagatttctacgtagtgatctgcttttactttgtaatttgtagttctcaaaagacttttttttaaaaaaataaagtccatacttacactt

SEQ ID NO: 62 - protein, 419 aa, Homo sapien
MNNQKQQKPTLSGQRFKTRKRDEKERFDPTQFQDCIIQGLTETGTDLEAVAKFLDASGAKLDYRRYAETLFDILVAGGMLAPGGTLADDMMRTDVCVFAAQEDLETMQAFAQVFNKLIRRYKYLEKGFEDEVKKLLLFLKGFSESERNKLAMLTGVLLANGTLNASILNSLYNENLVKEGVSAAFAVKLFKSWINEKDINAVAASLRKVSMDNRLMELFPANKQSVEHFTKYFTEAGLKELSEYVRNQQTIGARKELQKELQEQMSRGDPFKDIILYVKEEMKKNNIPEPVVIGIVWSSVMSTVEWNKKEELVAEQAIKHLKQYSPLLAAFTTQGQSELTLLLKIQEYCYDNIHFMKAFQKIVVLFYKAEVLSEEPILKWYKDAHVAKGKSVFLEQMKKFVEWLKNAEEESESEAEEGD

SEQ ID NO: 63 - DNA, 3953 bp, Homo sapien
ggcacgaggaaggagtcggggtcttccccagttttctcagccaggcggcggcggcgactggcaatgtttggcctcaaaagaaacgcggtaatcggactcaacctctactgtgggggggccggcttgggggccggcagcggcggcgccacccgcccgggagggcgacttttggctacggagaaggaggcctcggcccggcgagagatagggggaggggaggccggcgcggtgattggcggaagcgccggcgcaagccccccgtccaccctcacgccagactcccggagggtcgcgcggccgccgcccattggcgccgaggtccccgacgtcaccgcgacccccgcgaggctgcttttcttcgcgcccacccgccgcgcggcgccgcttgaggagatggaagccccggccgctgacgccatcatgtcgcccgaagaggagctggacgggtacgagccggagcctctcgggaagcggccggctgtcctgccgctgctggagttggtcggggaatctggtaataacaccagtacggacgggtcactaccctcgacgccgccgccagcagaggaggaggaggacgagttgtaccggcagtcgctggagattatctctcggtaccttcgggagcaggccaccggcgccaaggacacaaagccaatgggcaggtctggggccaccagcaggaaggcgctggagaccttacgacgggttggggatggcgtgcagcgcaaccacgagacggccttccaaggcatgcttcggaaactggacatcaaaaacgaagacgatgtgaaatcgttgtctcgagtgatgatccatgttttcagcgacggcgtaacaaactggggcaggattgtgactctcatttcttttggtgcctttgtggctaaacacttgaagaccataaaccaagaaagctgcatcgaaccattagcagaaagtatcacagacgttctcgtaaggacaaaacgggactggctagttaaacaaagaggctgggatgggtttgtggagttcttccatgtagaggacctagaaggtggcatcaggaatgtgctgctggcttttgcaggtgttgctggagtaggagctggtttggcatatctaataagatagccttactgtaagtgcaatagttgacttttaaccaaccaccaccaccaccaaaaccagtttatgcagttggactccaagctgtaacttcctagagttgcaccctagcaacctagccagaaaagcaagtggcaagaggattatggctaacaagaataaatacatgggaagagtgctccccattgattgaagagtcactgtctgaaagaagcaaagttcagtttcagcaacaaacaaactttgtttgggaagctatggaggaggacttttagatttagtgaagatggtagggtggaaagacttaatttccttgttgagaacaggaaagtggccagtagccaggcaagtcatagaattgattacccgccgaattcattaatttactgtagtgttaagagaagcactaagaatgccagtgacctgtgtaaaagttacaagtaatagaactatgactgtaagcctcagtactgtacaagggaagcttttcctctctctaattagctttcccagtatacttcttagaaagtccaagtgttcaggacttttatacctgttatactttggcttggtttccatgattcttactttattagcctagtttatcaccaataatacttgacggaaggctcagtaattagttatgaatatggatatcctcaattcttaagacagcttgtaaatgtatttgtaaaaattgtatatatttttacagaaagtctatttctttgaaacgaaggaagtatcgaatttacattagtttttttcatacccttttgaactttgcaacttccgtaattaggaacctgtttcttacagcttttctatgctaaactttgttctgttcagttctagagtgtatacagaacgaattgatgtgtaactgtatgcagactggttgtagtggaacaaatctgataactatgcaggtttaaattttcttatctgattttggtaagtattccttagataggtttttctttgaaaacctgggattgagaggttgatgaatggaaattctttcacttcattatatgcaagttttcaataattaggtctaagtggagttttaaggttactgatgacttacaaataatgggctctgattgggcaatactcatttgagttccttccatttgacctaatttaactggtgaaatttaaagtgaattcatgggctcatctttaaagcttttactaaaagattttcagctgaatggaactcattagctgtgtgcatataaaaagatcacatcaggtggatggagagacatttgatcccttgtttgcttaataaattataaaatgatggcttggaaaagcaggctagtctaaccatggtgctattattaggcttgcttgttacacacacaggtctaagcctagtatgtcaataaagcaaatacttactgttttgtttctattaatgattcccaaaccttgttgcaagtttttgcattggcatctttggatttcagtcttgatgtttgttctatcagacttaaccttttatttcctgtccttccttgaaattgctgattgttctgctccctctacagatatttatatcaattcctacagctttcccctgccatccctgaactctttctagcccttttagattttggcactgtgaaacccctgctggaaacctgagtgaccctccctccccaccaagagtccacagacctttcatctttcacgaacttgatcctgttagcaggtggtaataccatgggtgctgtgacactaacagtcattgagaggtgggaggaagtcccttttccttggactggtatcttttcaactattgttttatcctgtctttgggggcaatgtgtcaaaagtcccctcaggaattttcagaggaaagaacattttatgaggctttctctaaagtttcctttgtataggagtatgctcacttaaatttacagaaagaggtgagctgtgttaaacctcagagtttaaaagctactgataaactgaagaaagtgtctatattggaactagggtcatttgaaagcttcagtctcggaacatgacctttagtctgtggactccatttaaaaataggtatgaataagatgactaagaatgtaatggggaagaactgccctgcctgcccatctcagagccataaggtcatctttgctagagctatttttacctatgtatttatcgttcttgatcataagccgcttatttatatcatgtatctctaaggacctaaaagcactttatgtagtttttaattaatcttaagatctggttacggtaactaaaaaagcctgtctgccaaatccagtggaaacaagtgcatagatgtgaattggtttttaggggccccacttcccaattcattaggtatgactgtggaaatacagacaaggatcttagttgatattttgggcttggggcagtgagggcttaggacaccccaagtggtttgggaaaggaggaggggagtggtgggtttatagggggaggaggaggcaggtggtctaagtgctgactggctacgtagtttgggcaaatcctccaaaagggaaagggaggatttgcttagaaggatggcgctcccagtgactactttttgacttctgtttgtcttacgcttctctcagggaaaaacatgcagtcctctagtgtttcatgtacattctgtggggggtgaacaccttggttctggttaaacagctgtacttttgatagctgtgccaggaagggttaggaccaactacaaattaatgttggttgtcaaatgtagtgtgtttccctaactttctgtttttcctgagaaaaaaaaataaatcttttattcaaaaaaaaaaaaaaaaaaa

SEQ ID NO: 64 - protein, 350 aa, Homo sapien
MFGLKRNAVIGLNLYCGGAGLGAGSGGATRPGGRLLATEKEASARREIGGGEAGAVIGGSAGASPPSTLTPDSRRVARPPPIGAEVPDVTATPARLLFFAPTRRAAPLEEMEAPAADAIMSPEEELDGYEPEPLGKRPAVLPLLELVGESGNNTSTDGSLPSTPPPAEEEEDELYRQSLEIISRYLREQATGAKDTKPMGRSGATSRKALETLRRVGDGVQRNHETAFQGMLRKLDIKNEDDVKSLSRVMIHVFSDGVTNWGRIVTLISFGAFVAKHLKTINQESCIEPLAESITDVLVRTKRDWLVKQRGWDGFVEFFHVEDLEGGIRNVLLAFAGVAGVGAGLAYLIR

SEQ ID NO: 65 - DNA, 1996 bp, Homo sapien
tccggcaacgccaaccgctccgctgcgcgcaggctgggctgcaggctctcggctgcagcgctgggctggtgtgcagtggtgcgaccacggctcacggcagcctcagccacccagatgtaagcgatctggttcccacctcagcctcccgagtagtggatctaggatccggcttccaacatgtggcagctctgggcctccctctgctgcctgctggtgttggccaatgcccggagcaggccctctttccatcccctgtcggatgagctggtcaactatgtcaacaaacggaataccacgtggcaggccgggcacaacttctacaacgtggacatgagctacttgaagaggctatgtggtaccttcctgggtgggcccaagccaccccagagagttatgtttaccgaggacctgaagctgcctgcaagcttcgatgcacgggaacaatggccacagtgtcccaccatcaaagagatcagagaccagggctcctgtggctcctgctgggccttcggggctgtggaagccatctctgaccggatctgcatccacaccaatgcgcacgtcagcgtggaggtgtcggcggaggacctgctcacatgctgtggcagcatgtgtggggacggctgtaatggtggctatcctgctgaagcttggaacttctggacaagaaaaggcctggtttctggtggcctctatgaatcccatgtagggtgcagaccgtactccatccctccctgtgagcaccacgtcaacggctcccggcccccatgcacgggggagggagatacccccaagtgtagcaagatctgtgagcctggctacagcccgacctacaaacaggacaagcactacggatacaattcctacagcgtctccaatagcgagaaggacatcatggccgagatctacaaaaacggccccgtggagggagctttctctgtgtattcggacttcctgctctacaagtcaggagtgtaccaacacgtcaccggagagatgatgggtggccatgccatccgcatcctgggctggggagtggagaatggcacaccctactggctggttgccaactcctggaacactgactggggtgacaatggcttctttaaaatactcagaggacaggatcactgtggaatcgaatcagaagtggtggctggaattccacgcaccgatcagtactgggaaaagatctaatctgccgtgggcctgtcgtgccagtcctgggggcgagatcggggtagaaatgcattttattctttaagttcacgtaagatacaagtttcaggcagggtctgaaggactggattggccaaacatcagacctgtcttccaaggagaccaagtcctggctacatcccagcctgtggttacagtgcagacaggccatgtgagccaccgctgccagcacagagcgtccttccccctgtagactagtgccgtgggagtacctgctgcccagctgctgtggccccctccgtgatccatccatctccagggagcaagacagagacgcaggatggaaagcggagttcctaacaggatgaaagttcccccatcagttcccccagtacctccaagcaagtagctttccacatttgtcacagaaatcagaggagagatggtgttgggagccctttggagaacgccagtctccaggtccccctgcatctatcgagtttgcaatgtcacaacctctctgatcttgtgctcagcatgattctttaatagaagttttatttttcgtgcactctgctaatcatgtgggtgagccagtggaacagcgggagcctgtgctggtttgcagattgcctcctaatgacgcggctcaaaaggaaaccaagtggtcaggagttgtttctgacccactgatctctactaccacaaggaaaatagtttaggagaaaccagcttttactgtttttgaaaaattacagcttcaccctgtcaagttaacaaggaatgcctgtgccaataaaaggtttctccaacttga

SEQ ID NO: 66 - protein, 339 aa, Homo sapien
MWQLWASLCCLLVLANARSRPSFHPLSDELVNYVNKRNTTWQAGHNFYNVDMSYLKRLCGTFLGGPKPPQRVMFTEDLKLPASFDAREQWPQCPTIKEIRDQGSCGSCWAFGAVEAISDRICIHTNAHVSVEVSAEDLLTCCGSMCGDGCNGGYPAEAWNFWTRKGLVSGGLYESHVGCRPYSIPPCEHHVNGSRPPCTGEGDTPKCSKICEPGYSPTYKQDKHYGYNSYSVSNSEKDIMAEIYKNGPVEGAFSVYSDFLLYKSGVYQHVTGEMMGGHAIRILGWGVENGTPYWLVANSWNTDWGDNGFFKILRGQDHCGIESEVVAGIPRTDQYWEKI

SEQ ID NO: 67 - DNA, 4586 bp, Homo sapien
tatacttcgctacttggctagagttgcaactacagctgggttatatggctctaatctgatggaacatactgagattgatcactggttggagttcagtgctacaaaattatcttcatgtgattcctttacttctacaattaatgaactcaatcattgcctgtctctgagaacatacttagttggaaactccttgagtttagcagatttatgtgtttgggccaccctaaaaggaaatgctgcctggcaagaacagttgaaacagaagaaagctccagttcatgtaaaacgttggtttggctttcttgaagcccagcaggccttccagtcagtaggtaccaagtgggatgtttcaacaaccaaagctcgagtggcacctgagaaaaagcaagatgttgggaaatttgttgagcttccaggtgcggagatgggaaaggttaccgtcagatttcctccagaggccagtggttacttacacattgggcatgcaaaagctgctcttctgaaccagcactaccaggttaactttaaagggaaactgatcatgagatttgatgacacaaatcctgaaaaagaaaaggaagattttgagaaggttatcttggaagatgttgcaatgttgcatatcaaaccagatcaatttacttatacttcggatcattttgaaactataatgaagtatgcagagaagctaattcaagaagggaaggcttatgtggatgatactcctgctgaacagatgaaagcagaacgtgagcagaggatagaatctaaacatagaaaaaaccctattgagaagaatctacaaatgtgggaagaaatgaaaaaagggagccagtttggtcactcctgttgtttgcgagcaaaaattgacatgagtagtaacaatggatgcatgagagatccaaccctttatcgctgcaaaattcaaccacatccaagaactggaaataaatacaatgtttatccaacatatgattttgcctgccccatagttgacagcatcgaaggtgttacacatgccctgagaacaacagaataccatgacagagatgagcagttttactggattattgaagctttaggcataagaaaaccatatatttgggaatatagtcggctaaatctcaacaacacagtgctatccaaaagaaaactcacatggtttgtcaatgaaggactagtagatggatgggatgacccaagatttcctacggttcgtggtgtactgagaagagggatgacagttgaaggactgaaacagtttattgctgctcagggctcctcacgttcagtcgtgaacatggagtgggacaaaatctgggcgtttaacaaaaaggttattgacccagtggctccacgatatgttgcattactgaagaaagaagtgatcccagtgaatgtacctgaagctcaggaggagatgaaagaagtagccaaacacccaaagaatcctgaggttggcttgaagcctgtgtggtatagtcccaaagttttcattgaaggtgctgatgcagagactttttcggagggtgagatggttacatttataaattggggcaacctcaacattacaaaaatacacaaaaatgcagatggaaaaatcatatctcttgatgcaaagtttaatttggaaaacaaagactacaagaaaaccactaaggtcacttggcttgcagagactacacatgctcttcctattccagtaatctgtgtcacttatgagcacttgatcacaaagccagtgctaggaaaagacgaggactttaagcagtatgtcaacaagaacagtaagcatgaagagctaatgctaggggatccctgccttaaggatttgaaaaaaggagatattatacaactccagagaagaggattcttcatatgtgatcaaccttatgaacctgttagcccatatagttgcaaggaagccccgtgtgttttgatatacattcctgatgggcacacaaaggaaatgccaacatcagggtcaaaggaaaagaccaaagtagaagccacaaaaaatgagacctctgctccttttaaggaaagaccaacaccttctctgaataataattgtactacatctgaggattccttggtcctttacaatagagtggctgttcaaggagatgtggttcgtgaattaaaagccaagaaagcaccaaaggaagatgtagatgcagctgtaaaacagcttttgtctttgaaagctgaatataaggagaaaactggccaggaatataaacctggaaaccctcctgctgaaataggacagaatatttcttctaattcctcagcaagtattctggaaagtaaatctctgtatgatgaagttgctgcacaaggggaggtggttcgtaagctaaaagctgaaaaatcccctaaggctaaaataaatgaagctgtagaatgcttactgtccctgaaggctcagtataaagaaaaaactgggaaggagtacatacctggtcagcccccattatctcaaagttcggattcaagcccaaccagaaattctgaacctgctggtttagaaacaccagaagcgaaagtactttttgacaaagtagcttctcaaggggaagtagttcggaaacttaaaactgaaaaagcccctaaggatcaagtagatatagctgttcaagaactccttcagctaaaggcacagtacaagtctttgataggagtagagtataagcctgtgtcggccactggagctgaggacaaagataagaagaagaaagaaaaagaaaataaatctgaaaagcagaataagcctcagaaacaaaatgatggccaaaggaaagacccttctaaaaaccaaggaggtgggctctcatcaagtggagcaggagaagggcaggggcctaagaaacagaccaggttgggtcttgaggcaaaaaaagaagaaaatcttgctgattggtattctcaggtcatcacaaagtcagaaatgattgaataccatgacataagtggctgttatattcttcgtccctgggcctatgccatttgggaagccatcaaggacttttttgatgctgagatcaagaaacttggtgttgaaaactgctacttccccatgtttgtgtctcaaagtgcattagagaaagagaagactcatgttgctgactttgccccagaggttgcttgggttacaagatctggcaaaaccgagctggcagaaccaattgccattcgtcctactagtgaaacagtaatgtatcctgcatatgcaaaatgggtacaatcacacagagacctgcccatcaagctcaatcagtggtgcaatgtggtgcgttgggaattcaagcatcctcagcctttcctacgtactcgtgaatttctttggcaggaagggcacagtgcttttgctaccatggaagaggcagcggaagaggtcttgcagatacttgacttatatgctcaggtatatgaagaactcctggcaattcctgttgttaaaggaagaaagacggaaaaggaaaaatttgcaggaggagactatacaactacaatagaagcatttatatctgctagtggaagagctatccagggaggaacatcacatcatttagggcagaatttttccaaaatgtttgaaatcgtttttgaagatccaaagataccaggagagaagcaatttgcctatcaaaactcctggggcctgacaactcgaactattggtgttatgaccatggttcatggggacaacatgggtttagtattaccaccccgtgtagcatgtgttcaggtggtgattattccttgtggcattaccaatgcactttctgaagaagacaaagaagcgctgattgcaaaatgcaatgattatcgaaggcgattactcagtgttaacatccgcgttagagctgatttacgagataattattctccaggttggaaattcaatcactgggagctcaagggagttcccattagacttgaagttgggccacgtgatatgaagagctgtcagtttgtagccgtcagacgagatactggagaaaagctgacagttgctgaaaatgaggcagagactaaacttcaagctattttggaagacatccaggtcacccttttcacaagggcttctgaagaccttaagactcatatggttgtggctaatacaatggaagactttcagaagatactagattctggaaagattgttcagattccattctgtggggaaattgactgtgaggactggatcaaaaagaccactgccagggatcaagatcttgaacctggtgctccatccatgggagctaaaagcctttgcatccccttcaaaccactctgtgaactgcagcctggagccaaatgtgtctgtggcaagaaccctgccaagtactacaccttatttggtcgcagctactgagggatgaacgaaagccccctcttcaactcctctcactttttaaagcattgatattagtatcttctcagatacagaccgttttatgattttttaaaaagtaaaagttctaaaatgaagtcacacaggacaattattcttatgcctaagttaacagtggataaaagacttttctgtaaacaactccagtaataaatatcatgaacta

SEQ ID NO: 68 - protein, 1440 aa, Homo sapien
MEHTEIDHWLEFSATKLSSCDSFTSTINELNHCLSLRTYLVGNSLSLADLCVWATLKGNAAWQEQLKQKKAPVHVKRWFGFLEAQQAFQSVGTKWDVSTTKARVAPEKKQDVGKFVELPGAEMGKVTVRFPPEASGYLHIGHAKAALLNQHYQVNFKGKLIMRFDDTNPEKEKEDFEKVILEDVAMLHIKPDQFTYTSDHFETIMKYAEKLIQEGKAYVDDTPAEQMKAEREQRIESKHRKNPIEKNLQMWEEMKKGSQFGHSCCLRAKIDMSSNNGCMRDPTLYRCKIQPHPRTGNKYNVYPTYDFACPIVDSIEGVTHALRTTEYHDRDEQFYWIIEALGIRKPYIWEYSRLNLNNTVLSKRKLTWFVNEGLVDGWDDPRFPTVRGVLRRGMTVEGLKQFIAAQGSSRSVVNMEWDKIWAFNKKVIDPVAPRYVALLKKEVIPVNVPEAQEEMKEVAKHPKNPEVGLKPVWYSPKVFIEGADAETFSEGEMVTFINWGNLNITKIHKNADGKIISLDAKFNLENKDYKKTTKVTWLAETTHALPIPVICVTYEHLITKPVLGKDEDFKQYVNKNSKHEELMLGDPCLKDLKKGDIIQLQRRGFFICDQPYEPVSPYSCKEAPCVLIYIPDGHTKEMPTSGSKEKTKVEATKNETSAPFKERPTPSLNNNCTTSEDSLVLYNRVAVQGDVVRELKAKKAPKEDVDAAVKQLLSLKAEYKEKTGQEYKPGNPPAEIGQNISSNSSASILESKSLYDEVAAQGEVVRKLKAEKSPKAKINEAVECLLSLKAQYKEKTGKEYIPGQPPLSQSSDSSPTRNSEPAGLETPEAKVLFDKVASQGEVVRKLKTEKAPKDQVDIAVQELLQLKAQYKSLIGVEYKPVSATGAEDKDKKKKEKENKSEKQNKPQKQNDGQRKDPSKNQGGGLSSSGAGEGQGPKKQTRLGLEAKKEENLADWYSQVITKSEMIEYHDISGCYILRPWAYAIWEAIKDFFDAEIKKLGVENCYFPMFVSQSALEKEKTHVADFAPEVAWVTRSGKTELAEPIAIRPTSETVMYPAYAKWVQSHRDLPIKLNQWCNVVRWEFKHPQPFLRTREFLWQEGHSAFATMEEAAEEVLQILDLYAQVYEELLAIPVVKGRKTEKEKFAGGDYTTTIEAFISASGRAIQGGTSHHLGQNFSKMFEIVFEDPKIPGEKQFAYQNSWGLTTRTIGVMTMVHGDNMGLVLPPRVACVQVVIIPCGITNALSEEDKEALIAKCNDYRRRLLSVNIRVRADLRDNYSPGWKFNHWELKGVPIRLEVGPRDMKSCQFVAVRRDTGEKLTVAENEAETKLQAILEDIQVTLFTRASEDLKTHMVVANTMEDFQKILDSGKIVQIPFCGEIDCEDWIKKTTARDQDLEPGAPSMGAKSLCIPFKPLCELQPGAKCVCGKNPAKYYTLFGRSY

SEQ ID NO: 69 - DNA, 2474 bp, Rattus norvegicus
ggcacgagggttgaagctcggcgctcgggttacccctgcagcgacgccccctggtcccacagataccactgctgctcccgccctttcgctcctcggccgcgcaatgggcacccgcgacgacgagtacgactacctctttaaagttgtccttattggagattctggtgttggaaagagtaatctcctgtctcgatttactcgaaatgagtttaatctggaaagcaagagcaccattggagtagagtttgcaacaagaagcatccaggttgatggaaaaacaataaaggcacagatatgggacacagcagggcaagagcgatatcgagctataacatcagcatattatcgtggagctgtaggtgccttattggtttatgacattgctaaacatctcacatatgaaaatgtagagcgatggctgaaagaactgagagatcatgctgatagtaacattgttatcatgcttgtgggcaataagagtgatctacgtcatctcagggcagttcctacagatgaagcaagagcttttgcagaaaagaatggtttgtcattcattgaaacttcggccctagactctacaaatgtagaagctgcttttcagacaattttaacagagatttaccgcattgtttctcagaagcaaatgtcagacagacgcgaaaatgacatgtctccaagcaacaatgtggttcctattcatgttccaccaaccactgaaaacaagccaaaggtgcagtgctgtcagaacatctaaggcatttctcttctcccctagaaggctgtgtatagtccatttcccaggtctgagatttaaatatatttgtaattcttgtgtcacttttgtgttttattacttcatacttatgaatttttccatgtcctaagtcttttgattttagctttataaaatcatccacttgtcccgaatgactgcagctttttttcatgctatggcttcactagccttagtttaataaactgaatgtttggattcctcagttattgtttacttttcatcatggaagcctgtcactgtatgtaggacataatagaacttgatcacttgaagctcagacctattggtcttgatcaaatcaaactaagaagaccttagaaataagctaccattttgccacagagcagcttataggtaatacactcttctctcagtgcagtgtacatttccacaaatctaagaattgccctataaacatagcaggattttgagagcttgaaaattttccattattctggacatgaatttctaaaatgccttaataggtttatgtagttgagtaaattttgttttttaatttttgtaagcatcaaagttgattagagaggggggcactttttctggagaattctcttagtaaacacaaaagattgttacggtttcattagtagtatggttgtggggccataagttaaacagtgctgcctggtaggctgggaactgaagagacttgtggtattccatctcgggtgcctctgttggcaatgatcaggcagcccaaaagatttaaatgatctataataatttccaagcggtagattatgtggcattttattgctcaggcaataattggtttaatgctggtagtgtcaaattttgtcttagaaccttccagtaagtgaaatacaacctagttttatcaccatatccaccagcaggcatggataattattttaacaatgctaatatttgagttttgcagtatattatagaatatagtccagttaaatctttggtttcagtatgtctgaagagtacagtgagaggttaatttctgctcaagtggtaccacttaaaggcatgtattcttttagtatgtaaaatgaaatagtaccttgagtttaaatagaatgcatttaggcattgtagagatctgaaatagttttcttccactacattgttgaaatcaatgaagcaattagtttctcattcagaaatgtgcacactaatatttagttttgctttctcgtggataatattaagcacttactctgcagtttcctggaagttgtgtcaactgcagtgatactattcaggatggtgggaaatccccaaaaatatgtatgtgtgggcttgcttagattactatatttcatagttaatcttttgtctcttgcggtgctcatgatgtgtggggcacacggaaggcattgctgtagtcagtcattttggttttcttctatagccattttattattttagtgtattagttatgaagataatattatctatttgtaaattgctactttgtattttatgcatgctctgtaatttgatttttttttagttattgatttggattatattcacattctaataaacagttatagggggaaaaaaaaaaaaaaaaaaaaaaaaaaaaaaaaaaaaaaaaaaaaaaaaaaaaaaaaaaaaaaaaaaaaaaaaaaaaaaaaaaaaaaaaaaaaaaaaaaaaaaaaaaaaaaaaaaaaaaaaaaaa

SEQ ID NO: 70 - protein, 216 aa, Rattus norvegicus
MGTRDDEYDYLFKVVLIGDSGVGKSNLLSRFTRNEFNLESKSTIGVEFATRSIQVDGKTIKAQIWDTAGQERYRAITSAYYRGAVGALLVYDIAKHLTYENVERWLKELRDHADSNIVIMLVGNKSDLRHLRAVPTDEARAFAEKNGLSFIETSALDSTNVEAAFQTILTEIYRIVSQKQMSDRRENDMSPSNNVVPIHVPPTTENKPKVQCCQNI

SEQ ID NO: 71 - DNA, 4157 bp, Homo sapien
agcggggcggggcgccagcgctgccttttctcctgccgggtagtttcgctttcctgcgcagagtctgcggaggggctcggctgcaccggggggatcgcgcctggcagaccccagaccgagcagaggcgacccagcgcgctcgggagaggctgcaccgccgcgcccccgcctagcccttccggatcctgcgcgcagaaaagtttcatttgctgtatgccatcctcgagagctgtctaggttaacgttcgcactctgtgtatataacctcgacagtcttggcacctaacgtgctgtgcgtagctgctcctttggttgaatccccaggcccttgttggggcacaaggtggcaggatgtctcagtggtacgaacttcagcagcttgactcaaaattcctggagcaggttcaccagctttatgatgacagttttcccatggaaatcagacagtacctggcacagtggttagaaaagcaagactgggagcacgctgccaatgatgtttcatttgccaccatccgttttcatgacctcctgtcacagctggatgatcaatatagtcgcttttctttggagaataacttcttgctacagcataacataaggaaaagcaagcgtaatcttcaggataattttcaggaagacccaatccagatgtctatgatcatttacagctgtctgaaggaagaaaggaaaattctggaaaacgcccagagatttaatcaggctcagtcggggaatattcagagcacagtgatgttagacaaacagaaagagcttgacagtaaagtcagaaatgtgaaggacaaggttatgtgtatagagcatgaaatcaagagcctggaagatttacaagatgaatatgacttcaaatgcaaaaccttgcagaacagagaacacgagaccaatggtgtggcaaagagtgatcagaaacaagaacagctgttactcaagaagatgtatttaatgcttgacaataagagaaaggaagtagttcacaaaataatagagttgctgaatgtcactgaacttacccagaatgccctgattaatgatgaactagtggagtggaagcggagacagcagagcgcctgtattggggggccgcccaatgcttgcttggatcagctgcagaactggttcactatagttgcggagagtctgcagcaagttcggcagcagcttaaaaagttggaggaattggaacagaaatacacctacgaacatgaccctatcacaaaaaacaaacaagtgttatgggaccgcaccttcagtcttttccagcagctcattcagagctcgtttgtggtggaaagacagccctgcatgccaacgcaccctcagaggccgctggtcttgaagacaggggtccagttcactgtgaagttgagactgttggtgaaattgcaagagctgaattataatttgaaagtcaaagtcttatttgataaagatgtgaatgagagaaatacagtaaaaggatttaggaagttcaacattttgggcacgcacacaaaagtgatgaacatggaggagtccaccaatggcagtctggcggctgaatttcggcacctgcaattgaaagaacagaaaaatgctggcaccagaacgaatgagggtcctctcatcgttactgaagagcttcactcccttagttttgaaacccaattgtgccagcctggtttggtaattgacctcgagacgacctctctgcccgttgtggtgatctccaacgtcagccagctcccgagcggttgggcctccatcctttggtacaacatgctggtggcggaacccaggaatctgtccttcttcctgactccaccatgtgcacgatgggctcagctttcagaagtgctgagttggcagttttcttctgtcaccaaaagaggtctcaatgtggaccagctgaacatgttgggagagaagcttcttggtcctaacgccagccccgatggtctcattccgtggacgaggttttgtaaggaaaatataaatgataaaaattttcccttctggctttggattgaaagcatcctagaactcattaaaaaacacctgctccctctctggaatgatgggtgcatcatgggcttcatcagcaaggagcgagagcgtgccctgttgaaggaccagcagccggggaccttcctgctgcggttcagtgagagctcccgggaaggggccatcacattcacatgggtggagcggtcccagaacggaggcgaacctgacttccatgcggttgaaccctacacgaagaaagaactttctgctgttactttccctgacatcattcgcaattacaaagtcatggctgctgagaatattcctgagaatcccctgaagtatctgtatccaaatattgacaaagaccatgcctttggaaagtattactccaggccaaaggaagcaccagagccaatggaacttgatggccctaaaggaactggatatatcaagactgagttgatttctgtgtctgaagttcacccttctagacttcagaccacagacaacctgctccccatgtctcctgaggagtttgacgaggtgtctcggatagtgggctctgtagaattcgacagtatgatgaacacagtatagagcatgaatttttttcatcttctctggcgacagttttccttctcatctgtgattccctcctgctactctgttccttcacatcctgtgtttctagggaaatgaaagaaaggccagcaaattcgctgcaacctgttgatagcaagtgaatttttctctaactcagaaacatcagttactctgaagggcatcatgcatcttactgaaggtaaaattgaaaggcattctctgaagagtgggtttcacaagtgaaaaacatccagatacacccaaagtatcaggacgagaatgagggtcctttgggaaaggagaagttaagcaacatctagcaaatgttatgcataaagtcagtgcccaactgttataggttgttggataaatcagtggttatttagggaactgcttgacgtaggaacggtaaatttctgtgggagaattcttacatgttttctttgctttaagtgtaactggcagttttccattggtttacctgtgaaatagttcaaagccaagtttatatacaattatatcagtcctctttcaaaggtagccatcatggatctggtagggggaaaatgtgtattttattacatctttcacattggctatttaaagacaaagacaaattctgtttcttgagaagagaatattagctttactgtttgttatggcttaatgacactagctaatatcaatagaaggatgtacatttccaaattcacaagttgtgtttgatatccaaagctgaatacattctgctttcatcttggtcacatacaattatttttacagttctcccaagggagttaggctattcacaaccactcattcaaaagttgaaattaaccatagatgtagataaactcagaaatttaattcatgtttcttaaatgggctactttgtcctttttgttattagggtggtatttagtctattagccacaaaattgggaaaggagtagaaaaagcagtaactgacaacttgaataatacaccagagataatatgagaatcagatcatttcaaaactcatttcctatgtaactgcattgagaactgcatatgtttcgctgatatatgtgtttttcacatttgcgaatggttccattctctctcctgtactttttccagacacttttttgagtggatgatgtttcgtgaagtatactgtatttttacctttttccttccttatcactgacacaaaaagtagattaagagatgggtttgacaaggttcttcccttttacatactgctgtctatgtggctgtatcttgtttttccactactgctaccacaactatattatcatgcaaatgctgtattcttctttggtggagataaagatttcttgagttttgttttaaaattaaagctaaagtatctgtattgcattaaatataatatgcacacagtgctttccgtggcactgcatacaatctgaggcctcctctctcagtttttatatagatggcgagaacctaagtttcagttgattttacaattgaaatgactaaaaaacaaagaagacaacattaaaacaatattgtttcta

SEQ ID NO: 72 - protein, 750 aa, Homo sapien
MSQWYELQQLDSKFLEQVHQLYDDSFPMEIRQYLAQWLEKQDWEHAANDVSFATIRFHDLLSQLDDQYSRFSLENNFLLQHNIRKSKRNLQDNFQEDPIQMSMIIYSCLKEERKILENAQRFNQAQSGNIQSTVMLDKQKELDSKVRNVKDKVMCIEHEIKSLEDLQDEYDFKCKTLQNREHETNGVAKSDQKQEQLLLKKMYLMLDNKRKEVVHKIIELLNVTELTQNALINDELVEWKRRQQSACIGGPPNACLDQLQNWFTIVAESLQQVRQQLKKLEELEQKYTYEHDPITKNKQVLWDRTFSLFQQLIQSSFVVERQPCMPTHPQRPLVLKTGVQFTVKLRLLVKLQELNYNLKVKVLFDKDVNERNTVKGFRKFNILGTHTKVMNMEESTNGSLAAEFRHLQLKEQKNAGTRTNEGPLIVTEELHSLSFETQLCQPGLVIDLETTSLPVVVISNVSQLPSGWASILWYNMLVAEPRNLSFFLTPPCARWAQLSEVLSWQFSSVTKRGLNVDQLNMLGEKLLGPNASPDGLIPWTRFCKENINDKNFPFWLWIESILELIKKHLLPLWNDGCIMGFISKERERALLKDQQPGTFLLRFSESSREGAITFTWVERSQNGGEPDFHAVEPYTKKELSAVTFPDIIRNYKVMAAENIPENPLKYLYPNIDKDHAFGKYYSRPKEAPEPMELDGPKGTGYIKTELISVSEVHPSRLQTTDNLLPMSPEEFDEVSRIVGSVEFDSMMNTV

SEQ ID NO: 73 - DNA, 3285 bp, Homo sapien
ctagaattcagcggccgctgaattctagacccggatgaagagtaacgccattaccgcccgagccgccgagagccttagccgacggaaactggacactggaccggcagcgccatgagactcctcccccgcttgctgctgcttctcttactcgtgttccctgccactgtcttgttccgaggcggccccagaggctcgttagcagtggcacaagatcttacagaggatgaagaaacagtagaagattccataattgaggatgaagatgatgaagccgaggtagaagaagatgaacccacagatttggtagaagataaagaggaagaagatgtgtctggtgaacctgaagcttcaccgagtgcagatacaactatactgtttgtaaaaggagaagattttccagcaaataacattgtgaagttcctggtaggctttaccaacaagggtacagaagattttattgttgaatccttagatgcctcattccgttatcctcaggaccaccagttttatatccagaatttcacagctcttcctctgaacactgtagtgccaccccagagacaggcaacttttgagtactctttcattcctgcagagcccatgggcggacgaccatttggtttggtcatcaatctgaactacaaagatttgaacggcaatgtattccaagatgcagtcttcaatcaaacagttacagttattgaaagagaggatgggttagatggagaaacaatctttatgtatatgttccttgctggtcttgggcttctggttattgttggccttcatcaactcctagaatctagaaagcgtaagagacccatacagaaagtagaaatgggtacatcaagtcagaatgatgttgacatgagttggattcctcaggaaacattgaatcaaatcaataaagcttcaccaagaaggttgcccaggaaacgggcacagaagagatcagtgggatctgatgagtaaatgttcctttgtgcaacaattcggtctttacttaacctgccctaatatttttcggcctgatgggaattagtgcagagaagccagtcaccatagaaggcaactcctacttgtgtgtggactgagcaatcagagtctgtggcgataatattgctgaaaatgcactgcattcatttttctaaagtaacaaatttggtttttttttaaaccattaaaatctatgtgtgtgcgtgtgtatgtatgtgagcagttggtcttaccagaatcattgttgaactacctgaaacaagtctttagaatactaaatataatgctgttgtctcttcctttttgacattttctgattttttcccccaaaactcagttaatatttacccactatgattattgatgtcctgccttgaacagttttaaagaaaacaatttttggaatagctcaaatttcaattgatggcacaaatcagcattttgttgttgttactgtattacaattagtattctaaaggcagaagcagaagtagctgctttttagcaatagaattgtttcagtattttgctgctgtttaatgcgcatcttcagaaaacttcccagtggcttcaaggaatttggggatctctctggcaacaaattgtgaaacatgaaatttctgctgactttaatatatgaaacctaatcctacccccttttttaacaaaaagaaactagtacatttgtgaaaattgtgttgtgttgtccattgttgctctagttctgacccagaggtagctctggagtgattttagacctactcactcagttgtgtgtaggtttttttgttttgttttgagagagaatttttctctccttaatagaagcatcctttttaaagagaagttgccttggtccacacactaagcagaaaaccaagttatcaggacagagatatttcccagttactcctaatcaatgaagaaagtgagttggatatttttaaagcagttaactaattttttcttacctaatcttttgggagttttgcttgttgatataacctttttagttaacctgaaagattccaaaaattgttcttaagtgcttgagactggaaccaaaattaaattgtacttcataaaatcctcttatagagttactcttgccctagattgtaaattaagtttggcattattgtcagactggatggagggtgaagtaaaatagtatgaacaattaagaggctctccccctcttgtctttaagccatattctcctacatgtattttataagaaaatgttaagtcaaattttagtggctctttaattcctgacctcttcattctccttttcagtataacctcccctatgctcatgcccacacagacaaaaaaacaaaacgaaatacacacagaaaaaagtctttccaaactgtttaagtatttaaacatctgagccaaagcagatagaagttattgtataattgttaatcactttgcaaataggggctatcaaattacctatattggcattgctggattataaactctatatctgtaatataaagtgtttgagtttttaattgggctgttatgatcagtaattgattttgagaaagctctatgagctctaagtaactgcatggttttttgtttaatgtaatataggagacccttcacattcccaaggaatatattccaaaacatttttgtgaatatctaagtttgtgaaactactagggcatgatacagtaaggtgtaattacagaatttacgaaatgtaaatggcctctacagagttttatggaatacctggtactaacgtaggcagctgcaaaaccacactgagttacagctgtcagccctcctcattcctaaataacttgccttacatatcagccctcccacttctgaagttcaaattagtgcctcggaaatgtagaatttattatttgtcattttttttttttagcatagattgagaacagttgaactcttaaatcctcagatgccaggggtctgctctagcatcagtaagtatttagcagaaactaactccgtaatgaatggaattcaattccacacatggtttgttcaagcacacttaataagtagcctattttttaaatgtctttttaaaatgtaaatatttggatgaagtttttctttgttttgatatattcatttgctacaccaactatgttttcagaattcatcttttgaacaacttggtttcagaatatgtaaaatgactttaaggatcttgtgtatcaaacctatccccggatgtgtgagaataatgtgttcataaagcatggatctcgtaaaaaaaaaaaaaaaaaaaaa

SEQ ID NO: 74 - protein, 286 aa, Homo sapien
MRLLPRLLLLLLLVFPATVLFRGGPRGSLAVAQDLTEDEETVEDSIIEDEDDEAEVEEDEPTDLVEDKEEEDVSGEPEASPSADTTILFVKGEDFPANNIVKFLVGFTNKGTEDFIVESLDASFRYPQDHQFYIQNFTALPLNTVVPPQRQATFEYSFIPAEPMGGRPFGLVINLNYKDLNGNVFQDAVFNQTVTVIEREDGLDGETIFMYMFLAGLGLLVIVGLHQLLESRKRKRPIQKVEMGTSSQNDVDMSWIPQETLNQINKASPRRLPRKRAQKRSVGSDE

SEQ ID NO: 75 - DNA, 1360 bp, Homo sapien
gcccttgccttgagtcagtgcgctgctctccagcccgcttgaacgctccccgcagccaccgccacccattggaatggccaacaggggacctgcatatggcctgagccgggaggtgcagcagaagattgagaaacaatatgatgcagatctggagcagatcctgatccagtggatcaccacccagtgccgaaaggatgtgggccggccccagcctggacgcgagaacttccagaactggctcaaggatggcacggtgctatgtgagctcattaatgcactgtaccccgaggggcaggccccagtaaagaagatccaggcctccaccatggccttcaagcagatggagcagatctctcagttcctgcaagcagctgagcgctatggcattaacaccactgacatcttccaaactgtggacctctgggaaggaaagaacatggcctgtgtgcagcggacgctgatgaatctgggtgggctggcagtagcccgagatgatgggctcttctctggggatcccaactggttccctaagaaatccaaggagaatcctcggaacttctcagataaccagctgcaagagggcaagaacgtgatcgggttacagatgggcaccaaccgcggggcgtctcaggcaggcatgactggctacgggatgccacgccagatcctctgatcccaccccaggccttgcccctgccctcccacgaatggttaatatatatgtagatatatattttagcagtgacattcccagagagccccagagctctcaagctcctttctgtcagggtggggggttcagcctgtcctgtcacctctgaggtgcctgctggcatcctctcccccatgcttactaatacattcccttccccatagccatcaaaactggaccaactggcctcttcctttcccctgggaccaaaatttaggggcctcagtccctcaccgccatgccctggcctattctgtctctccttcttccccctggcctgttctgtctctgagctctgtgtcctccgttcattccatggctgggagtcactgatgctgcctctgccttctgatgctggactggccttgcttctacaagtatgcttctcccacagctgtggctgcaggaacttaatttatagggaggagcctgtggcagctgctgccccagccacagctgcactgactgtgctcaccacacatctggggcagccttccctggcaggggccctcgtggcttctcattttccattcccttcactgtggctaaggggtggggtgaggggatggagagggagggctgcctaccatggtctggggcttgaggaagatgagtttgttgatttaaataaagaatttgtcatttttg

SEQ ID NO: 76 - protein, 199 aa, Homo sapien
MANRGPAYGLSREVQQKIEKQYDADLEQILIQWITTQCRKDVGRPQPGRENFQNWLKDGTVLCELINALYPEGQAPVKKIQASTMAFKQMEQISQFLQAAERYGINTTDIFQTVDLWEGKNMACVQRTLMNLGGLAVARDDGLFSGDPNWFPKKSKENPRNFSDNQLQEGKNVIGLQMGTNRGASQAGMTGYGMPRQIL

SEQ ID NO: 77 - DNA, 2254 bp, Homo sapien
aatcgaaagtagactcttttctgaagcatttcctgggatcagcctgaccacgctccatactgggagaggcttctgggtcaaaggaccagtctgcagagggatcctgtggctggaagcgaggaggctccacacggccgttgcagctaccgcagccaggatctgggcatccaggcacggccatgacccctccgaggctcttctgggtgtggctgctggttgcaggaacccaaggcgtgaacgatggtgacatgcggctggccgatgggggcgccaccaaccagggccgcgtggagatcttctacagaggccagtggggcactgtgtgtgacaacctgtgggacctgactgatgccagcgtcgtctgccgggccctgggcttcgagaacgccacccaggctctgggcagagctgccttcgggcaaggatcaggccccatcatgctggacgaggtccagtgcacgggaaccgaggcctcactggccgactgcaagtccctgggctggctgaagagcaactgcaggcacgagagagacgctggtgtggtctgcaccaatgaaaccaggagcacccacaccctggacctctccagggagctctcggaggcccttggccagatctttgacagccagcggggctgcgacctgtccatcagcgtgaatgtgcagggcgaggacgccctgggcttctgtggccacacggtcatcctgactgccaacctggaggcccaggccctgtggaaggagccgggcagcaatgtcaccatgagtgtggatgctgagtgtgtgcccatggtcagggaccttctcaggtacttctactcccgaaggattgacatcaccctgtcgtcagtcaagtgcttccacaagctggcctctgcctatggggccaggcagctgcagggctactgcgcaagcctctttgccatcctcctcccccaggacccctcgttccagatgcccctggacctgtatgcctatgcagtggccacaggggacgccctgctggagaagctctgcctacagttcctggcctggaacttcgaggccttgacgcaggccgaggcctggcccagtgtccccacagacctgctccaactgctgctgcccaggagcgacctggcggtgcccagcgagctggccctactgaaggccgtggacacctggagctggggggagcgtgcctcccatgaggaggtggagggcttggtggagaagatccgcttccccatgatgctccctgaggagctctttgagctgcagttcaacctgtccctgtactggagccacgaggccctgttccagaagaagactctgcaggccctggaattccacactgtgcccttccagttgctggcccggtacaaaggcctgaacctcaccgaggatacctacaagccccggatttacacctcgcccacctggagtgcctttgtgacagacagttcctggagtgcacggaagtcacaactggtctatcagtccagacgggggcctttggtcaaatattcttctgattacttccaagccccctctgactacagatactacccctaccagtccttccagactccacaacaccccagcttcctcttccaggacaagagggtgtcctggtccctggtctacctccccaccatccagagctgctggaactacggcttctcctgctcctcggacgagctccctgtcctgggcctcaccaagtctggcggctcagatcgcaccattgcctacgaaaacaaagccctgatgctctgcgaagggctcttcgtggcagacgtcaccgatttcgagggctggaaggctgcgattcccagtgccctggacaccaacagctcgaagagcacctcctccttcccctgcccggcagggcacttcaacggcttccgcacggtcatccgccccttctacctgaccaactcctcaggtgtggactagacgcgtggccaagggtggtgagaaccggagaaccccaggacgccctcactgcaggctcccctcctcggcttccttcctctctgcaatgaccttcaacaaccggccaccagatgtcgccctactcacctgaggctcagcttcaagaaattactggaaggcttccactagggtccaccaggagttctcccaccacctcaccagtttccaggtggtaagcaccaggaggccctcgaggttgctctggatccccccacagcccctggtcagtctgcccttgtcactggtctgaggtcattaaaattacattgaggttccta

SEQ ID NO: 78 - protein, 585 aa, Homo sapien
MTPPRLFWVWLLVAGTQGVNDGDMRLADGGATNQGRVEIFYRGQWGTVCDNLWDLTDASVVCRALGFENATQALGRAAFGQGSGPIMLDEVQCTGTEASLADCKSLGWLKSNCRHERDAGVVCTNETRSTHTLDLSRELSEALGQIFDSQRGCDLSISVNVQGEDALGFCGHTVILTANLEAQALWKEPGSNVTMSVDAECVPMVRDLLRYFYSRRIDITLSSVKCFHKLASAYGARQLQGYCASLFAILLPQDPSFQMPLDLYAYAVATGDALLEKLCLQFLAWNFEALTQAEAWPSVPTDLLQLLLPRSDLAVPSELALLKAVDTWSWGERASHEEVEGLVEKIRFPMMLPEELFELQFNLSLYWSHEALFQKKTLQALEFHTVPFQLLARYKGLNLTEDTYKPRIYTSPTWSAFVTDSSWSARKSQLVYQSRRGPLVKYSSDYFQAPSDYRYYPYQSFQTPQHPSFLFQDKRVSWSLVYLPTIQSCWNYGFSCSSDELPVLGLTKSGGSDRTIAYENKALMLCEGLFVADVTDFEGWKAAIPSALDTNSSKSTSSFPCPAGHFNGFRTVIRPFYLTNSSGVD

SEQ ID NO: 79 - DNA, 1396 bp, Homo sapien
ggcacgaggccccggttccggcgcggttgaggccttcggtggtgaacgagtctccagcaccatgtctggtttgtctggcccaccagcccggcgcggcccttttccgttagcgttgctgcttttgttcctgctcggccccagattggtccttgccatctccttccatctgcccattaactctcgcaagtgcctccgtgaggagattcacaaggacctgctagtgactggcgcgtacgagatctccgaccagtctgggggcgctggcggcctgcgcagccacctcaagatcacagattctgctggccatattctctactccaaagaggatgcaaccaaggggaaatttgcctttaccactgaagattatgacatgtttgaagtgtgttttgagagcaagggaacagggcggatacctgaccaactcgtgatcctagacatgaagcatggagtggaggcgaaaaattacgaagagattgcaaaagttgagaagctcaaaccattagaggtagagctgcgacgcctagaagacctttcagaatctattgttaatgattttgcctacatgaagaagagagaagaggagatgcgtgataccaacgagtcaacaaacactcgggtcctatacttcagcatcttttcaatgttctgtctcattggactagctacctggcaggtcttctacctgcgacgcttcttcaaggccaagaaattgattgagtaatgaatgaggcatattctcctcccaccttgtacctcagccagcagaacatcgctgggacgtgcctggcctaaggcatcctaccaacagcaccatcaaggcacgttggagctttcttgccagaactgatctcttttggtgtgggaggacatggggtaccacctacacccaacaagtcaatgagggacttctttttaatttggtaggattttgactggttttgcaacaataggtctattattagagtcacctatgacaaaaaataggggttacctagataatgccaaagtcagcatttgtcctgggttcccttgtgtgatctgtttggactatgttttcttttcttctcccacttgctcagcagcttgggcttccattctagttcttttaccaagatttttgtgtgaccatgttgacttcatttggattgccctctttcaatttccttgtgaaaacacccttaactttctctttacccttagctgaaatgtttacatagcttctggtgatatcttttcatgattttatatctcttaaaatggtgatggatgtgacacctcataaaagtgagctttgaactgtagataactcttaaagaaaatgtcattttagacaattaaaatatttgtgctcaactgcttgaaaaaaaaaaaaaaaaaaaaaaaaaaaaaaaaaaaa

SEQ ID NO: 80 - protein, 219 aa, Homo sapien
MSGLSGPPARRGPFPLALLLLFLLGPRLVLAISFHLPINSRKCLREEIHKDLLVTGAYEISDQSGGAGGLRSHLKITDSAGHILYSKEDATKGKFAFTTEDYDMFEVCFESKGTGRIPDQLVILDMKHGVEAKNYEEIAKVEKLKPLEVELRRLEDLSESIVNDFAYMKKREEEMRDTNESTNTRVLYFSIFSMFCLIGLATWQVFYLRRFFKAKKLIE

SEQ ID NO: 81 - DNA, 1899 bp, Homo sapien
gtccgtactgcagagccgctgccggagggtcgttttaaagggccgcgttgccgccccctcggcccgccatgctgctatccgtgccgctgctgctcggcctcctcggcctggccgtcgccgagcccgccgtctacttcaaggagcagtttctggacggagacgggtggacttcccgctggatcgaatccaaacacaagtcagattttggcaaattcgttctcagttccggcaagttctacggtgacgaggagaaagataaaggtttgcagacaagccaggatgcacgcttttatgctctgtcggccagtttcgagcctttcagcaacaaaggccagacgctggtggtgcagttcacggtgaaacatgagcagaacatcgactgtgggggcggctatgtgaagctgtttcctaatagtttggaccagacagacatgcacggagactcagaatacaacatcatgtttggtcccgacatctgtggccctggcaccaagaaggttcatgtcatcttcaactacaagggcaagaacgtgctgatcaacaaggacatccgttgcaaggatgatgagtttacacacctgtacacactgattgtgcggccagacaacacctatgaggtgaagattgacaacagccaggtggagtccggctccttggaagacgattgggacttcctgccacccaagaagataaaggatcctgatgcttcaaaaccggaagactgggatgagcgggccaagatcgatgatcccacagactccaagcctgaggactgggacaagcccgagcatatccctgaccctgatgctaagaagcccgaggactgggatgaagagatggacggagagtgggaacccccagtgattcagaaccctgagtacaagggtgagtggaagccccggcagatcgacaacccagattacaagggcacttggatccacccagaaattgacaaccccgagtattctcccgatcccagtatctatgcctatgataactttggcgtgctgggcctggacctctggcaggtcaagtctggcaccatctttgacaacttcctcatcaccaacgatgaggcatacgctgaggagtttggcaacgagacgtggggcgtaacaaaggcagcagagaaacaaatgaaggacaaacaggacgaggagcagaggcttaaggaggaggaagaagacaagaaacgcaaagaggaggaggaggcagaggacaaggaggatgatgaggacaaagatgaggatgaggaggatgaggaggacaaggaggaagatgaggaggaagatgtccccggccaggccaaggacgagctgtagagaggcctgcctccagggctggactgaggcctgagcgctcctgccgcagagcttgccgcgccaaataatgtctctgtgagactcgagaactttcatttttttccaggctggttcggatttggggtggattttggttttgttcccctcctccactctcccccaccccctccccgccctttttttttttttttttaaactggtattttatcctttgattctccttcagccctcacccctggttctcatctttcttgatcaacatcttttcttgcctctgtgccccttctctcatctcttagctcccctccaacctggggggcagtggtgtggagaagccacaggcctgagatttcatctgctctccttcctggagcccagaggagggcagcagaagggggtggtgtctccaaccccccagcactgaggaagaacggggctcttctcatttcacccctccctttctcccctgcccccaggactgggccacttctgggtggggcagtgggtcccagattggctcacactgagaatgtaagaactacaaacaaaatttctattaaattaaattttgtgtctc

SEQ ID NO: 82 - protein, 417 aa, Homo sapien
MLLSVPLLLGLLGLAVAEPAVYFKEQFLDGDGWTSRWIESKHKSDFGKFVLSSGKFYGDEEKDKGLQTSQDARFYALSASFEPFSNKGQTLVVQFTVKHEQNIDCGGGYVKLFPNSLDQTDMHGDSEYNIMFGPDICGPGTKKVHVIFNYKGKNVLINKDIRCKDDEFTHLYTLIVRPDNTYEVKIDNSQVESGSLEDDWDFLPPKKIKDPDASKPEDWDERAKIDDPTDSKPEDWDKPEHIPDPDAKKPEDWDEEMDGEWEPPVIQNPEYKGEWKPRQIDNPDYKGTWIHPEIDNPEYSPDPSIYAYDNFGVLGLDLWQVKSGTIFDNFLITNDEAYAEEFGNETWGVTKAAEKQMKDKQDEEQRLKEEEEDKKRKEEEEAEDKEDDEDKDEDEEDEEDKEEDEEEDVPGQAKDEL

SEQ ID NO: 83 - DNA, 2894 bp, Homo sapien
  Unsure 2236, 2238, 2738: Unknown base
gggcggacaggcacagagggagggagcgagcgagcagtgagtaagccagcaagggcggtcgggtcccgaggtcagccgagatttctcaggtccctccggccccctccctggagtccacagcgcctccggtgtccagaggatcggacacggcccggcccggccatggcctcgttgctgaaggtggatcaggaagtgaagctcaaggttgattctttcagggagcggatcacaagtaaggcagaagacttggtggcaaattttttcccaaagaagttattagaacttgatagttttctgaaggaaccaatcttaaacatccatgacctaactcagatccactctgacatgaatctcccagtccctgaccccattcttctcaccaatagccatgatggactggatggtcccacttataagaagcgaaggttggatgagtgtgaagaagccttccaaggaaccaaggtgtttgtgatgcccaatgggatgctgaaaagcaaccagcagctggtggacattattgagaaagtgaaacctgagatccggctgttgattgagaaatgtaacacgccttcaggcaaaggtcctcatatatgttttgacctccaggtcaaaatgtgggtacagctcctgattcccaggatagaagatggaaacaactttggggtgtccattcaggaggaaacagttgcagagctaagaactgttgagagtgaagctgcatcttatctggaccagatttctagatattatattacaagagccaaattggtttctaaaatagctaaatatccccatgtggaggactatcgccgcaccgtgacagagattgatgagaaagaatatatcagccttcggctcatcatatcagagctgaggaatcaatatgtcactctacatgacatgatcctgaaaaatatcgagaagatcaaacggccccggagcagcaatgcagagactctgtactgaggccagggccagggccaggggactctgtgagtctggctcaagaccgacattgccttggtttgttacatgactatcgtgatggggaaactggctggaaatagtaatcacacctctctgtttttagttagagtctaatgaaactctcatctagttctgtgatgtgtttacctcttttttcaggcctcaggaactcttctatttccttccctaataccccacacccaacctgtcgtaatttctggagaactccaggtttgtgtgtgcaggatgttggcacaaaaatacctgtgttttcattctccccctctctccctcctgtgtctggcgctttatgttttcttccgtttgataattagttggttaaaagctgagggaaccggaaggaaagtgctaggtgttttttaggaactagggtggaggggggacgaacttctcttcctcacatgaggttactgtttctttcctctgtggggcattggatcctcccacagttgccctggtgatgacttaggacttcccatctgtgacatcccactttgaatcttgatcgtgacaagaaataccttaggccttcagtcaattccgaagctccttcagttgtttttataatgggcgtttcacatgcacatatgtgtatgcatgtatacgcccatacagacatgcacacacagactcctactccattagctaacataccctccctctccacaacccgtgtcacatacctttcaggaggtgacagttgtcttagttgtcatctacccagacaaacgtcctgggcccgtcctccctcctgatactgtagcctcttggtacccagggtgagttggtggagaacagagagatgagaagcagagggcttggggaaagcctgttcctctctgactcagccctttttggcattattgcaagagcttgactcctggttgccttttcccagccagttttcagttggggtgaaggtttctgcaagtgtgaggtccagatgctgctgctcatgttgggctttccttttgggaactatttctctttatttatagtgtcgggcttccggggaaagcaatcattggtgtgtatgtgtatgtgccatgcacacacgtgcatatatacacatttgtgtatgtggaaatgtgctgggcaagtcaaaactatagaagagttgcctcctgtctctcgaatcttccagagatatcacttaattgttaacagcttttgtgttaatccccttcatcccctagcacttttattctaccacggctggagagttgananctacagtcagcctgccagtgactcttagtgtctgtttctgacttatttttcctgtctctgtcttccaacccccaataatatttcccaccggggatgcatcatttttactcccaatattctgtagagagggagtcaggatgctgtcttcccacgaatagtactcagtaacaaaccaattgcattttagttgggcagtgctcccacccaccctgcagatccctccagctaaaacccttcccccttccctccatgtgtttctcagtttcccgttcgtttgttggactgttccactgcccctcctcctcaccctatcacccatggatcgtaatgtaaaattcttttaccatgtcaagaaattattaaaaatacaggtactttgacctctttctaaagccgcagaccctggtgcaatgctctggtggctagggatgtactcatgctcatatgtgtgcacgcttggacacccacctccatggacacctagccaccctgttgtgtgnccttatgccagttgagctgaatcttttccccagtatagtggaaagactgaggcttctgcctactgagcaaggttgggtgcttcatttgtgttcagtctgaattatgggaaagttagctcttcccagacctaagctgccttctctccctactttcag

SEQ ID NO: 84 - protein, 267 aa, Homo sapien [sequence omitted]

SEQ ID NO: 85 - DNA, 2704 bp, Homo sapien
gcttagtgtaaccagcggcgtatattttttaggcgccttttcgaaaacctagtagttaatattcatttgtttaaatcttattttatttttaagctcaaactgcttaagaataccttaattccttaaagtgaaataattttttgcaaaggggtttcctcgatttggagctttttttttcttccaccgtcatttctaactcttaaaaccaactcagttccatcatggtgatgttcaagaagatcaagtcttttgaggtggtctttaacgaccctgaaaaggtgtacggcagtggcgagagggtggctggccgggtgatagtggaggtgtgtgaagttactcgtgtcaaagccgttaggatcctggcttgcggagtggctaaagtgctttggatgcagggatcccagcagtgcaaacagacttcggagtacctgcgctatgaagacacgcttcttctggaagaccagccaacaggtgagaatgagatggtgatcatgagacctggaaacaaatatgagtacaagttcggctttgagcttcctcaggggcctctgggaacatccttcaaaggaaaatatgggtgtgtagactactgggtgaaggcttttcttgaccgcccgagccagccaactcaagagacaaagaaaaactttgaagtagtggatctggtggatgtcaatacccctgatttaatggcacctgtgtctgctaaaaaagaaaagaaagtttcctgcatgttcattcctgatgggcgggtgtctgtctctgctcgaattgacagaaaaggattctgtgaaggtgatgagatttccatccatgctgactttgagaatacatgttcccgaattgtggtccccaaagctgccattgtggcccgccacacttaccttgccaatggccagaccaaggtgctgactcagaagttgtcatcagtcagaggcaatcatattatctcagggacatgcgcatcatggcgtggcaagagccttcgggttcagaagatcaggccttctatcctgggctgcaacatccttcgagttgaatattccttactgatctatgttagcgttcctggatccaagaaggtcatccttgacctgcccctggtaattggcagcagatcaggtctaagcagcagaacatccagcatggccagccgaaccagctctgagatgagttgggtagatctgaacatccctgataccccagaagctcctccctgctatatggatgtcattcctgaagatcaccgattggagagcccaacaactcctctgctagatgacatggatggctctcaagacagccctatctttatgtatgcccctgagttcaagttcatgccaccaccgacttatactgaggtggatccctgcatcctcaacaacaatgtgcagtgagcatgtggaagaaaagaagcagctttacctacttgtttctttttgtctctcttcctggacactcactttttcagagactcaacagtctcgtcaatggagtgtgggtccaccttagcctctgacttcctaatgtaggaggtggtcagcaggcaatctcctgggccttaaaggatgcggactcatcctcagccagcgcccatgttgtgatacaggggtgtttgttggatgggtttaaaaataactagaaaaactcaggcccatccattttctcagatctccttgaaaattgaggccttttcgatagtttcgggtcaggtaaaaatggcctcctggcgtaagcttttcaaggttttttggaggctttttgtaaattgtgataggaactttggaccttgaacttacgtatcatgtggagaagagccaatttaacaaactaggaagatgaaaagggaaattgtggccaaaactttgggaaaaggaggttcttaaaatcagtgtttcccctttgtgcacttgtagaaaaaaaagaaaaaccttctagagctgatttgatggacaatggagagagctttccctgtgattataaaaaaggaagctagctgctctacggtcatctttgcttagagtatactttaacctggcttttaaagcagtagtaactgccccaccaaaggtcttaaaagccatttttggagcctattgcactgtgttctcctactgcaaatattttcatatgggaggatggttttctcttcatgtaagtccttggaattgattctaaggtgatgttcttagcactttaattcctgtcaaattttttgttctccccttctgccatcttaaatgtaagctgaaactggtctactgtgtctctagggttaagccaaaagacaaaaaaaattttactacttttgagattgccccaatgtacagaattatataattctaacgcttaaatcatgtgaaagggttgctgctgtcagccttgcccactgtgacttcaaacccaaggaggaactcttgatcaagatgcccaaccctgtgatcagaacctccaaatactgccatgagaaactagagggcaggtgttcataaaagccctttgaacccccttcctgccctgtgttaggagatagggatattggcccctcactgcagctgccagcacttggtcagtcactctcagccatagcactttgttcactgtcctgtgtcagagcactgagctccacccttttctgagagttattacagccagaaagtgtgggctgaagatggttggtttcatgtgggggtattatgtaccc

SEQ ID NO: 86 - protein, 391 aa, Homo sapien
MVMFKKIKSFEVVFNDPEKVYGSGERVAGRVIVEVCEVTRVKAVRILACGVAKVLWMQGSQQCKQTSEYLRYEDTLLLEDQPTGENEMVIMRPGNKYEYKFGFELPQGPLGTSFKGKYGCVDYWVKAFLDRPSQPTQETKKNFEVVDLVDVNTPDLMAPVSAKKEKKVSCMFIPDGRVSVSARIDRKGFCEGDEISIHADFENTCSRIVVPKAAIVARHTYLANGQTKVLTQKLSSVRGNHIISGTCASWRGKSLRVQKIRPSILGCNILRVEYSLLIYVSVPGSKKVILDLPLVIGSRSGLSSRTSSMASRTSSEMSWVDLNIPDTPEAPPCYMDVIPEDHRLESPTTPLLDDMDGSQDSPIFMYAPEFKFMPPPTYTEVDPCILNNNVQ

SEQ ID NO: 87 - DNA, 3079 bp, Homo sapien
ggcacgaggggcggcggcagctgtggaagctcaggcgctgcgcgtgagaggtcccagatacgtctgcggttccggctccgccaccctcagcttctcttccccaggtctgggagccgagtgcggaaggagggaacggccctagctttgggaagccagaggacacccctggctcctgccgacaccgccctccttcccttcccagccgcgggcctcgctcggtgctaggctactctgccgggaggcggcggcggctgccagtctgtggagagtcctgctgccctccagccgggctcctccaccgggccttgcaggggccgagagagctcggtgcccgcccttccgctcgcctttttcgtcagctggctggagcagcatcggtccgggaggtctctaggctgaggcggcggccgctcctctagttccacaatgtccacgggcggagacttcgggaatccgctgaggaaattcaagctggtgttcctgggggagcaaagcgttggaaagacatctttgatcaccagattcatgtatgacagttttgacaacacctatcaggcaacaattggcattgactttttatcaaaaactatgtacttggaggatcgaacaatcaggcttcagctgtgggatactgcgggtcaggaacgtttccgtagcctcattcccagttacatccgtgattctgctgcagctgtagtagtttacgatatcacaaatgttaactcattccagcaaactacaaagtggattgatgatgtcagaacagaaagaggaagtgatgttatcatcatgctagtaggaaataaaacagatcttgctgacaagaggcaagtgtcaattgaggagggagagaggaaagccaaagagctgaatgttatgtttattgaaactagtgcaaaagctggatacaatgtaaagcagctctttcgacgtgtagcagcagctttgccgggaatggaaagcacacaggacagaagcagagaagatatgattgacataaaactggaaaagcctcaggagcaaccagtcagtgaaggaggctgttcctgctaatctcccatgtcatcttcaaccttcttcagaagctcactgctttggcccccttactctttcattgactgcagtgtgaatattggcttgaaccttttcccttcagtaataacgtattgcaattcatcattgctgcctgtctcgtggagatgatctattagcttcacaagcacaacaaaagtcagtgtcttcattatttatattttacaaaaagccaaaatatttcagcatattccagtgataactttaaaaattagatacattttcttaacatttttttcttttttaatgttatgataatgtacttcaaaatgatggaaatctcaacagtatgagtatggcttggttaacgagcgctatgttcacagcctactttatctctccttgcttttctcacctctcacttacccccattccctattaccctattcttacctagcctcccccgacttcctcaaaacaaacaagagatggcaaagcagcagttctaccaagcccattggaattatcctttaattttacagataccacttgctgtaggctacggaccaagatgtccaaaattattcttgagcactgatataaattacggtcttctttgaggtcaaaattcagccatcatggtaggcagtgcttgaatgagaaaaggctcctggtgcatcttcaaaatgagtcctaaagaacatactgagtacttagaagtagaagaacataagatgtatttctgactaaaacaaatggctctttcacatgtgctttattagactctgggagagaaaattaaccaagtgcttcagaacaggtttttagtatttaattcttcacggtaagaaaatgaagttctaatgaactgtttctcccaaggttttaaaattgtcaagagttattctgtttgtttaaaaaataagaaacctctttaagcaatagattttgcttgggttttcttttttaaaaacataatactgtgcaggcaaggcactgtaaaagttttaattccttccagaagaaccagtggaagaatttaaatttggcgctacgatcaaaactactgaattagtagaaataatgatgtctaaagcttaccaacaaaagaaccctcagcagaataacaaaaactttgctcaggacatttgaggtcaaattgaagacggaaaccggaaaccgttttcttgtaagcccctagaggcagatcaggtaaagcatacatagtagagggaaaggagagaatggaaataaaactcaatattatgcagatttatgccttattttttagcattttttaaggttgggtctttcaggctggttttggtttgtattagatctgtatagtttaattaactggtgatttagttttatatttaagctacaattaatcttttttctttggtgatatttatttctttgccttttttttttttaacaactttcaatcttcagatgtttcgttgaatctatttagagcttcaccatggcaatatgtatttcccttaaaacactgcaaacaaatatactaggagtgtgcccttttaatctttactagttattgtgagattgctgtgtaagctaataaacacatttgtaaatacattgtttgcaggacgaaaacttctgagttacagctcaggaaaagcctgctgaatttatgttgtaagcattacttaacacagtataaagatgaaaagacaacaaaaatatcttcatacttcctcatcccctcattggaacaaaaaccttaaactgggagaaccttagtcccctctctttcctcttcctcctccacttcccacttattgtcaccttgtaatattcagagagcacttggattatggatctgaatagagaaatgcttacagataatcattagcccacataccagtaacttatacttaaagatgggatggagttgtaaagtgcttttataatacaatataattgttaaaggcaagggttgactctttgttttattttgacatggcatgtcctgaaataaatattgattcaatatggcaaaaaaaaaaaaaaaaaaaaa

SEQ ID NO: 88 - protein, 208 aa, Homo sapien
MSTGGDFGNPLRKFKLVFLGEQSVGKTSLITRFMYDSFDNTYQATIGIDFLSKTMYLEDRTIRLQLWDTAGQERFRSLIPSYIRDSAAAVVVYDITNVNSFQQTTKWIDDVRTERGSDVIIMLVGNKTDLADKRQVSIEEGERKAKELNVMFIETSAKAGYNVKQLFRRVAAALPGMESTQDRSREDMIDIKLEKPQEQPVSEGGCSC

SEQ ID NO: 89 - DNA, 1120 bp, Homo sapien
acttcttcgcaccagggaagccccacccaccagaacgccaagatgtccagcaagcgggccaaagccaaggccaccaagaagcggccacagcgggccacatccaatgtcttcgcaatgtttgaccagtcccagatccaggagtttaaggaggctttcaacatgattgaccagaaccgtgatggcttcattgacaaggaggacctgcacgacatgctggcctcgctggggaagaaccccacagacgaatacctggagggcatgatgagcgaggccccggggccatacaacttcaccatgttcctcaccatgtttggggagaagctgaacggcacggaccccgaggatgtgattcgcaacgcctttgcctgcttcgacgaggaatcctcaggtttcatccatgaggaccacctccggaagctgctcaccaccatgggtgaccgcttcacagatgaggaagtggacgagatgtaccgggaggcacccgttgataagaaaggcaacttcaactacgtggagttcacccgcatcctcaaacatggcgccaaggataaacacgactaggccatccccagccccctgacacccagcccccgccagtcacccctccccgcacacacccgtccataccagctccctgcccatgaccctcgctcagggatccccctttgagggttagggtcccagttcccagtggaagaaacaggccaggagagtgcgtgccgagctgaggcagatgttcccacagtgaccccagagccctgggctatagtctctgacccctccaaggaaagaccaccttctggggacatgggctggagggcaggacctagaggcaccaagggaaccgcattccggggctgttccccgaggaggaagggaagcctctgtgtgccccccaggaggaagaggccctgagtcctgggatcagacaccccttcacgtgtatcccacacaaatgcaagctcaccaaggtcccctctcagtccccttccctacaccctgacgccagatgccgcacacccaacgccaccagccatgggagtgtgctcaggagtcgcggggcagacgtgacatctgtccagagggggcagaatctccaatagaggactgagacaacatg

SEQ ID NO: 90 - protein, 172 aa, Homo sapien
MSSKRAKAKATKKRPQRATSNVFAMFDQSQIQEFKEAFNMIDQNRDGFIDKEDLHDMLASLGKNPTDEYLEGMMSEAPGPYNFTMFLTMFGEKLNGTDPEDVIRNAFACFDEESSGFIHEDHLRKLLTTMGDRFTDEEVDEMYREAPVDKKGNFNYVEFTRILKHGAKDKHD

SEQ ID NO: 91 - DNA, 1299 bp, Homo sapien
ggcacgagggcggcggcggcggtagaggcggcggcggcggcggcagcgggctcggaggcagcggttgggctcgcggcgagcggacggggtcgagtcagtgcgttcgcgcgagttggaatcgaagcctcttaaaatggcagatgacttggacttcgagacaggagatgcaggggcctcagccaccttcccaatgcagtgctcagcattacgtaagaatggctttgtggtgctcaaaggccggccatgtaagatcgtcgagatgtctacttcgaagactggcaagcacggccacgccaaggtccatctggttggtattgacatctttactgggaagaaatatgaagatatctgcccgtcaactcataatatggatgtccccaacatcaaaaggaatgacttccagctgattggcatccaggatgggtacctatcactgctccaggacagcggggaggtacgagaggaccttcgtctccctgagggagaccttggcaaggagattgagcagaagtacgactgtggagaagagatcctgatcacggtgctgtctgccatgacagaggaggcagctgttgcaatcaaggccatggcaaaataactggctcccaggatggcggtggtggcagcagtgatcctctgaacctgcagaggccccctccccgagcctggcctggctctggcccggtcctaagctggactcctcctacacaatttatttgacgttttattttggttttccccaccccctcaatctgtcggggagcccctgcccttcacctagctcccttggccaggagcgagcgaagctgtggccttggtgaagctgccctcctcttctcccctcacactacagccctggtgggggagaagggggtgggtgctgcttgtggtttagtcttttttttttttttttttttttttttaaattcaatctggaatcagaaagcggtggattctggcaaatggtccttgtgccctccccactcatccctggtctggtcccctgttgcccatagccctttaccctgagcaccaccccaacagactggggaccagccccctcgcctgcctgtgtctctccccaaacccctttagatggggagggaagaggaggagaggggaggggacctgccccctcctcaggcatctgggagggccctgcccccatgggctttacccttccctgcgggctctctccccgacacatttgttaaaatcaaacctgaataaaactacaagtttaatatgaaaaaaaaaaaaaaaaaaaaaaaaaaaaaaaaaaaaaaaaaaaaaaaaaaa

SEQ ID NO: 92 - protein, 154 aa, Homo sapien
MADDLDFETGDAGASATFPMQCSALRKNGFVVLKGRPCKIVEMSTSKTGKHGHAKVHLVGIDIFTGKKYEDICPSTHNMDVPNIKRNDFQLIGIQDGYLSLLQDSGEVREDLRLPEGDLGKEIEQKYDCGEEILITVLSAMTEEAAVAIKAMAK

SEQ ID NO: 93 - DNA, 4828 bp, Homo sapien
agtggcgtcggaactgcaaagcacctgtgagcttgcggaagtcagttcagactccagcccgctccagcccggcccgacccgaccgcacccggcgcctgccctcgctcggcgtccccggccagccatgggcccttggagccgcagcctctcggcgctgctgctgctgctgcaggtctcctcttggctctgccaggagccggagccctgccaccctggctttgacgccgagagctacacgttcacggtgccccggcgccacctggagagaggccgcgtcctgggcagagtgaattttgaagattgcaccggtcgacaaaggacagcctatttttccctcgacacccgattcaaagtgggcacagatggtgtgattacagtcaaaaggcctctacggtttcataacccacagatccatttcttggtctacgcctgggactccacctacagaaagttttccaccaaagtcacgctgaatacagtggggcaccaccaccgccccccgccccatcaggcctccgtttctggaatccaagcagaattgctcacatttcccaactcctctcctggcctcagaagacagaagagagactgggttattcctcccatcagctgcccagaaaatgaaaaaggcccatttcctaaaaacctggttcagatcaaatccaacaaagacaaagaaggcaaggttttctacagcatcactggccaaggagctgacacaccccctgttggtgtctttattattgaaagagaaacaggatggctgaaggtgacagagcctctggatagagaacgcattgccacatacactctcttctctcacgctgtgtcatccaacgggaatgcagttgaggatccaatggagattttgatcacggtaaccgatcagaatgacaacaagcccgaattcacccaggaggtctttaaggggtctgtcatggaaggtgctcttccaggaacctctgtgatggaggtcacagccacagacgcggacgatgatgtgaacacctacaatgccgccatcgcttacaccatcctcagccaagatcctgagctccctgacaaaaatatgttcaccattaacaggaacacaggagtcatcagtgtggtcaccactgggctggaccgagagagtttccctacgtataccctggtggttcaagctgctgaccttcaaggtgaggggttaagcacaacagcaacagctgtgatcacagtcactgacaccaacgataatcctccgatcttcaatcccaccacgtacaagggtcaggtgcctgagaacgaggctaacgtcgtaatcaccacactgaaagtgactgatgctgatgcccccaataccccagcgtgggaggctgtatacaccatattgaatgatgatggtggacaatttgtcgtcaccacaaatccagtgaacaacgatggcattttgaaaacagcaaagggcttggattttgaggccaagcagcagtacattctacacgtagcagtgacgaatgtggtaccttttgaggtctctctcaccacctccacagccaccgtcaccgtggatgtgctggatgtgaatgaagcccccatctttgtgcctcctgaaaagagagtggaagtgtccgaggactttggcgtgggccaggaaatcacatcctacactgcccaggagccagacacatttatggaacagaaaataacatatcggatttggagagacactgccaactggctggagattaatccggacactggtgccatttccactcgggctgagctggacagggaggattttgagcacgtgaagaacagcacgtacacagccctaatcatagctacagacaatggttctccagttgctactggaacagggacacttctgctgatcctgtctgatgtgaatgacaacgcccccataccagaacctcgaactatattcttctgtgagaggaatccaaagcctcaggtcataaacatcattgatgcagaccttcctcccaatacatctcccttcacagcagaactaacacacggggcgagtgccaactggaccattcagtacaacgacccaacccaagaatctatcattttgaagccaaagatggccttagaggtgggtgactacaaaatcaatctcaagctcatggataaccagaataaagaccaagtgaccaccttagaggtcagcgtgtgtgactgtgaaggggccgccggcgtctgtaggaaggcacagcctgtcgaagcaggattgcaaattcctgccattctggggattcttggaggaattcttgctttgctaattctgattctgctgctcttgctgtttcttcggaggagagcggtggtcaaagagcccttactgcccccagaggatgacacccgggacaacgtttattactatgatgaagaaggaggcggagaagaggaccaggactttgacttgagccagctgcacaggggcctggacgctcggcctgaagtgactcgtaacgacgttgcaccaaccctcatgagtgtcccccggtatcttccccgccctgccaatcccgatgaaattggaaattttattgatgaaaatctgaaagcggctgatactgaccccacagccccgccttatgattctctgctcgtgtttgactatgaaggaagcggttccgaagctgctagtctgagctccctgaactcctcagagtcagacaaagaccaggactatgactacttgaacgaatggggcaatcgcttcaagaagctggctgacatgtacggaggcggcgaggacgactaggggactcgagagaggcgggccccagacccatgtgctgggaaatgcagaaatcacgttgctggtggtttttcagctcccttcccttgagatgagtttctggggaaaaaaaagagactggttagtgatgcagttagtatagctttatactctctccactttatagctctaataagtttgtgttagaaaagtttcgacttatttcttaaagcttttttttttttcccatcactctttacatggtggtgatgtccaaaagatacccaaattttaatattccagaagaacaactttagcatcagaaggttcacccagcaccttgcagattttcttaaggaattttgtctcacttttaaaaagaaggggagaagtcagctactctagttctgttgttttgtgtatataattttttaaaaaaaatttgtgtgcttctgctcattactacactggtgtgtccctctgcctttttttttttttttaagacagggtctcattctatcggccaggctggagtgcagtggtgcaatcacagctcactgcagccttgtcctcccaggctcaagctatccttgcacctcagcctcccaagtagctgggaccacaggcatgcaccactacgcatgactaattttttaaatatttgagacggggtctccctgtgttacccaggctggtctcaaactcctgggctcaagtgatcctcccatcttggcctcccagagtattgggattacagacatgagccactgcacctgcccagctccccaactccctgccattttttaagagacagtttcgctccatcgcccaggcctgggatgcagtgatgtgatcatagctcactgtaacctcaaactctggggctcaagcagttctcccaccagcctcctttttatttttttgtacagatggggtcttgctatgttgcccaagctggtcttaaactcctggcctcaagcaatccttctgccttggccccccaaagtgctgggattgtgggcatgagctgctgtgcccagcctccatgttttaatatcaactctcactcctgaattcagttgctttgcccaagataggagttctctgatgcagaaattattgggctcttttagggtaagaagtttgtgtctttgtctggccacatcttgactaggtattgtctactctgaagacctttaatggcttccctctttcatctcctgagtatgtaacttgcaatgggcagctatccagtgacttgttctgagtaagtgtgttcattaatgtttatttagctctgaagcaagagtgatatactccaggacttagaatagtgcctaaagtgctgcagccaaagacagagcggaactatgaaaagtgggcttggagatggcaggagagcttgtcattgagcctggcaatttagcaaactgatgctgaggatgattgaggtgggtctacctcatctctgaaaattctggaaggaatggaggagtctcaacatgtgtttctgacacaagatccgtggtttgtactcaaagcccagaatccccaagtgcctgcttttgatgatgtctacagaaaatgctggctgagctgaacacatttgcccaattccaggtgtgcacagaaaaccgagaatattcaaaattccaaattttttcttaggagcaagaagaaaatgtggccctaaagggggttagttgaggggtagggggtagtgaggatcttgatttggatctctttttatttaaatgtgaatttcaacttttgacaatcaaagaaaagacttttgttgaaatagctttactgtttctcaagtgttttggagaaaaaaatcaaccctgcaatcactttttggaattgtcttgatttttcggcagttcaagctatatcgaatatagttctgtgtagagaatgtcactgtagttttgagtgtatacatgtgtgggtgctgataattgtgtattttctttgggggtggaaaaggaaaacaattcaagctgagaaaagtattctcaaagatgcatttttataaattttattaaacaattttgttaaaccataaaaaaaaaaaaa

SEQ ID NO: 94 - protein, 882 aa, Homo sapien
MGPWSRSLSALLLLLQVSSWLCQEPEPCHPGFDAESYTFTVPRRHLERGRVLGRVNFEDCTGRQRTAYFSLDTRFKVGTDGVITVKRPLRFHNPQIHFLVYAWDSTYRKFSTKVTLNTVGHHHRPPPHQASVSGIQAELLTFPNSSPGLRRQKRDWVIPPISCPENEKGPFPKNLVQIKSNKDKEGKVFYSITGQGADTPPVGVFIIERETGWLKVTEPLDRERIATYTLFSHAVSSNGNAVEDPMEILITVTDQNDNKPEFTQEVFKGSVMEGALPGTSVMEVTATDADDDVNTYNAAIAYTILSQDPELPDKNMFTINRNTGVISVVTTGLDRESFPTYTLVVQAADLQGEGLSTTATAVITVTDTNDNPPIFNPTTYKGQVPENEANVVITTLKVTDADAPNTPAWEAVYTILNDDGGQFVVTTNPVNNDGILKTAKGLDFEAKQQYILHVAVTNVVPFEVSLTTSTATVTVDVLDVNEAPIFVPPEKRVEVSEDFGVGQEITSYTAQEPDTFMEQKITYRIWRDTANWLEINPDTGAISTRAELDREDFEHVKNSTYTALIIATDNGSPVATGTGTLLLILSDVNDNAPIPEPRTIFFCERNPKPQVINIIDADLPPNTSPFTAELTHGASANWTIQYNDPTQESIILKPKMALEVGDYKINLKLMDNQNKDQVTTLEVSVCDCEGAAGVCRKAQPVEAGLQIPAILGILGGILALLILILLLLLFLRRRAVVKEPLLPPEDDTRDNVYYYDEEGGGEEDQDFDLSQLHRGLDARPEVTRNDVAPTLMSVPRYLPRPANPDEIGNFIDENLKAADTDPTAPPYDSLLVFDYEGSGSEAASLSSLNSSESDKDQDYDYLNEWGNRFKKLADMYGGGEDD

SEQ ID NO: 95 - DNA, 5487 bp, Homo sapien
tctgtcgacttgccccagagctgatccttgtctttgtccacttctcagcgaggatggcacttcagggagcccttcccttactatcgcagagagagcaggccctccccagtcatgtccaacccagaactctgttttgttttcttcatagccctagcatcacagaaaatcaccctgtgcattcatggatgtccacgggggcaagggctttgtgttgcttaacccagcatcctgaaccgtgtttgttgaatgaatacagaaccccgtttgctctgggagagcacagaaaacagtcttctatcatatatcatagccagctgcaaacagcagatggcttcccatatcccagagagtaagaaccagagagagagagaaagagagagagtttgggtctttctcctctgtgcctgctctctccagagaaactggaggggtagcagttagcattcccccgctggttccaccaagcacagtcaaggtctctaggacatggccacccctcacctgtggaagcggtcctgctggggtgggtgggtgttagttggttctggtttgggtcagagacacccagtggcccaggtgggcgtggggccagggcgcagacgagaaggggcacgagggctccgctccgaggacccagcggcaagcaccggtcccgggcgcgccccagcccacccactcgcgtgcccacggcggcattattccctataaggatctgaacgatccgggggcggccccgccccgttaccccttgcccccggccccgccccctttttggagggccgatgaggtaatgcggctctgccattggtctgagggggcgggccccaacagcccgaggcggggtccccgggggcccagcgctatatcactcggccgcccaggcagcggcgcagagcgggcagcaggcaggcggcgggcgctcagacggcttctcctcctcctcttgctcctccagctcctgctccttcgccgggaggccgcccgccgagtcctgcgccagcgccgaggcagcctcgctgcgccccatcccgtcccgccgggcactcggagggcagcgcgccggaggccaaggttgccccgcacggcccggcgggcgagcgagctcgggctgcagcagccccgccggcggcgcgcacggcaactttggagaggcgagcagcagccccggcagcggcggcagcagcggcaatgaccccttggctcgggctcatcgtgctcctgggcagctggagcctgggggactggggcgccgaggcgtgcacatgctcgcccagccacccccaggacgccttctgcaactccgacatcgtgatccgggccaaggtggtggggaagaagctggtaaaggaggggcccttcggcacgctggtctacaccatcaagcagatgaagatgtaccgaggcttcaccaagatgccccatgtgcagtacatccacacggaagcttccgagagtctctgtggccttaagctggaggtcaacaagtaccagtacctgctgacaggtcgcgtctatgatggcaagatgtacacggggctgtgcaacttcgtggagaggtgggaccagctcaccctctcccagcgcaaggggctgaactatcggtatcacctgggttgtaactgcaagatcaagtcctgctactacctgccttgctttgtgacttccaagaacgagtgtctctggaccgacatgctctccaatttcggttaccctggctaccagtccaaacactacgcctgcatccggcagaagggcggctactgcagctggtaccgaggatgggcccccccggataaaagcatcatcaatgccacagacccctgagcgccagaccctgccccacctcacttccctcccttcccgctgagcttcccttggacactaactcttcccagatgatgacaatgaaattagtgcctgttttcttgcaaatttagcacttggaacatttaaagaaaggtctatgctgtcatatggggtttattgggaactatcctcctggccccaccctgccccttctttttggttttgacatcattcatttccacctgggaatttctggtgccatgccagaaagaatgaggaacctgtattcctcttcttcgtgataatataatctctatttttttaggaaaacaaaaatgaaaaactactccatttgaggattgtaattcccacccctcttgcttcttccccacctcaccatctcccagaccctcttccctttgcccttctcctccaatacataaaggacacagacaaggaacttgctgaaaggccaaccatttcaggatcagtcaaaggcagcaagcagatagactcaaggtgtgtgaaagatgttatacaccaggagctgccactgcatgtcccaaccagactgtgtctgtctgtgtctgcatgtaagagtgagggagggaaggaaggaactacaagagagtcggagatgatgcagcacacacacaattccccagcccagtgatgcttgtgttgaccagatgttcctgagtctggagcaagcacccaggccagaataacagagctttcttagttggtgaagacttaaacatctgcctgaggtcaggaggcaatttgcctgccttgtacaaaagctcaggtgaaagactgagatgaatgtctttcctctccctgcctcccaccagacttcctcctggaaaacgctttggtagatttggccaggagctttcttttatgtaaattggataaatacacacaccatacactatccacagatatagccaagtagatttgggtagaggatactatttccagaatagtgtttagctcacctagggggatatgtttgtatacacatttgcatatacccacatggggacataagctaatttttttacaggacacagaattctgttcaatgctgttaaatatgccaatagtttaatctcttctattttgttgtcgttgcttgtttgaagaaaatcatgacattccaagttgacatttttttttcattttaattaaaatttgaaattctgaacaccgtcagcaccctctcttccctatcatgggtcatctgacccctgtccgtctccttgtccctgcttcatgtttgggggcctttctttaactgccttcctggcttagctcagatggcagatgagagtgtagtcaagggcctgggcacaggagggagagctgcagagtgtcctgcctgccttggctggagggacacctctcctgggtgtggagacagcttggttccctttccctagctccctggtgggtgaatgccacctcctgagatcctcacctcttggaattaaaattgttggtcactggggaaagcctgagtttgcaaccagttgtagggtttctgttgtgtttttttttttttttttgaaataaaactataatataaattctcctattaaataaaattattttaagttttagtgtcaaaagtgagatgctgagagtaggtgataatgtatattttacagagtgggggttggcaggatggtgacattgaacatgattgctctctgtctcttttttcagcttatgggtatttatcttctattagtatttgtatcttcagttcattccactttaggaaacagagctgccaattgaaacagaagaagaaaaaaaaaaaaagcagcagacaacacactgtagagtcttgcacacacacaagtgcccaggcaaggtgcttggcagaaccgcagagtgggaagagagtaccggcatcgggtttccttgggatcaatttcattaccgtgtacctttcccattgtggtcatgccatttggcagggggagaatgggaggcttggccttctttgtgaggcagtgtgagcagaagctgatgccagcatgtcactggttttgaagggatgagcccagacttgatgttttgggattgtccttattttaacctcaaggtctcgcatggtggggcccctgaccaacctacacaagttccctcccacaagtggacatcagtgtcttctctgtgaggcatctggccattcgcactccctggtgtggtcagcctctctcacacaaggaggaacttgggtgaaggctgagtgtgaggcacctgaagtttccctgcggagtcgataaattagcagaaccacatccccatctgttaggccttggtgaggaggccctgggcaaagaagggtctttcgcaaagcgatgtcagagggcggttttgagctttctataagctatagctttgtttatttcacccgttcacttactgtataatttaaaatcatttatgtagctgagacacttctgtatttcaatcatatcatgaacattttattttgctaaatcttgtgtcatgtgtaggctgtaatatgtgtacattgtgtttaagagaaaaatgaaacccacatgccgccattttcctgaatcaaattctgcagtggaatggagaggaaaatacttctaggcaagcagctagactggtgaattgggggaaatagaaggaactagtaactgagactcctccagcctcctccctattggaatcccaatggctcctggagtaggaaaaaagtttaaactacattcatgttcttgttctgtgtcactcggccctgggtagtctaccatttacttcaccccaagtcctgctgcccatccagttgggaagccatgattttcctaagaatccagggccatgggagatacaattccaagttctcgcttcctcctttgggcatctcttctgcctcccaatcaaggaagctccatgctcaggctctcagctctcgggccagtgctctgctctgtccagggtaggtaatactgggagactcctgtcttttaccctcccctcgttccagacctgcctcatggtggcaacatggttcttgaacaattaaagaaacaaatgactttttggaatagccctgtctagggcaaactgtggcccccaggagacactacccttccatgccccagacctctgtcttgcatgtgacaattgacaatctggactaccccaagatggcacccaagtgtttggcttctggctacctaaggttaacatgtcactagagtatttttatgagagacaaacattataaaaatctgatggcaaaagcaaaacaaaatggaaagtaggggaggtggatgtgacaacaacttccaaattggctctttggaggcgagaggaaggggagaacttggagaatagtttttgctttgggggtagaggcttcttagattctcccagcatccgcctttccctttagccagtctgctgtcctgaaacccagaagtgatggagagaaaccaacaagagatctcgaaccctgtctagaaggaatgtatttgttgctaaatttcgtagcactgtttacagttttcctccatgttatttatgaattttatattccgtgaatgtatattgtcttgtaatgttgcataatgttcactttttatagtgtgtcctttattctaaacagtaaagtggttttatttctatcac

SEQ ID NO: 96 - protein, 211 aa, Homo sapien
MTPWLGLIVLLGSWSLGDWGAEACTCSPSHPQDAFCNSDIVIRAKVVGKKLVKEGPFGTLVYTIKQMKMYRGFTKMPHVQYIHTEASESLCGLKLEVNKYQYLLTGRVYDGKMYTGLCNFVERWDQLTLSQRKGLNYRYHLGCNCKIKSCYYLPCFVTSKNECLWTDMLSNFGYPGYQSKHYACIRQKGGYCSWYRGWAPPDKSIINATDP

SEQ ID NO: 97 - DNA, 2922 bp, Homo sapien
ggacaccgggccatgcacgcccccaactgaagctgcatctcaaagccgaagattccagcagcccaggggatttcaaagagctcagactcagaggaacatctgcggagagacccccgaagccctctccagggcagtcctcatccagacgctccgctagtgcagacaggagcgcgcagtggccccggctcgccgcgccatggagcggatccccagcgcgcaaccaccccccgcctgcctgcccaaagcaccgggactggagcacggagacctaccagggatgtaccctgcccacatgtaccaagtgtacaagtcaagacggggaataaagcggagcgaggacagcaaggagacctacaaattgccgcaccggctcatcgagaaaaagagacgtgaccggattaacgagtgcatcgcccagctgaaggatctcctacccgaacatctcaaacttacaactttgggtcacttggaaaaagcagtggttcttgaacttaccttgaagcatgtgaaagcactaacaaacctaattgatcagcagcagcagaaaatcattgccctgcagagtggtttacaagctggtgagctgtcagggagaaatgtcgaaacaggtcaagagatgttctgctcaggtttccagacatgtgcccgggaggtgcttcagtatctggccaagcacgagaacactcgggacctgaagtcttcgcagcttgtcacccacctccaccgggtggtctcggagctgctgcagggtggtacctccaggaagccatcagacccagctcccaaagtgatggacttcaaggaaaaacccagctctccggccaaaggttcggaaggtcctgggaaaaactgcgtgccagtcatccagcggactttcgctcactcgagtggggagcagagcggcagcgacacggacacagacagtggctatggaggagaatcggagaagggcgacttgcgcagtgagcagccgtgcttcaaaagtgaccacggacgcaggttcacgatgggagaaaggatcggcgcaattaagcaagagtccgaagaaccccccacaaaaaagaaccggatgcagctttcggatgatgaaggccatttcactagcagtgacctgatcagctccccgttcctgggcccacacccacaccagcctcctttctgcctgcccttctacctgatcccaccttcagcgactgcctacctgcccatgctggagaagtgctggtatcccacctcagtgccagtgctatacccaggcctcaacgcctctgccgcagccctctctagcttcatgaacccagacaagatctcggctcccttgctcatgccccagagactcccttctcccttgccagctcatccgtccgtcgactcttctgtcttgctccaagctctgaagccaatcccccctttaaacttagaaaccaaagactaaactctctaggggatcctgctgctttgctttccttcctcgctacttcctaaaaagcaacaaaaaagtttttgtgaatgctgcaagattgttgcattgtgtatactgagataatctgaggcatggagagcagattcagggtgtgtgtgtgtgtgtgtgtgtgtgtgtgtatgtgcgtgtgcgtgcacatgtgtgcctgcgtgttggtataggactttaaagctccttttggcatagggaagtcacgaaggattgcttgacatcaggagacttgggggggattgtagcagacgtctgggcttttccccacccagagaatagcccccttcgatacacatcagctggattttcaaaagcttcaaagtcttggtctgtgagtcactcttcagtttgggagctgggtctgtggctttgatcagaaggtactttcaaaagagggctttccagggctcagctcccaaccagctgttaggaccccacccttttgcctttattgtcgacgtgactcaccagacgtcggggagagagagcagtcagaccgagctttctgctaacatggggaggtagcaggcactggcatagcacggtagtggtttggggaggtttccgcaggtctgctccccacccctgcctcggaagaataaagagaatgtagttccctactcaggctttcgtagtgattagcttactaaggaactgaaaatgggccccttgtacaagctgagctgccccggagggagggaggagttccctgggcttctggcacctgtttctaggcctaaccattagtacttactgtgcagggaaccaaaccaaggtctgagaaatgcggacaccccgagcgagcaccccaaagtgcacaaagctgagtaaaaagctgcccccttcaaacagaactagactcagttttcaattccatcctaaaactccttttaaccaagcttagcttctcaaaggcctaaccaagccttggcaccgccagatcctttctgtaggctaattcctcttgcccaacggcatatggagtgtccttattgctaaaaaggattccgtctccttcaaagaagttttatttttggtccagagtacttgttttcccgatgtgtccagccagctccgcagcagcttttcaagatgcactatgcctgattgctgatcgtgttttaactttttcttttcctgtttttattttggtattaagtcgttgcctttatttgtaaagctgttataaatatatattatataaatatattaaaaaggaaaatgtttcagatgtttatttgtataattacttgattcacacagtgagaaaaaatgaatgtattcctgtttttgaagagaagaataatttttttttctctagggagaggtacagtgtttatattttggagccttcctgaaggtgtaaaattgtaaatatttttatctatgagtaaatgttaagtagttgttttaaaatacttaataaaataattcttttcctgtggaag

SEQ ID NO: 98 - protein, 412 aa, Homo sapien
MERIPSAQPPPACLPKAPGLEHGDLPGMYPAHMYQVYKSRRGIKRSEDSKETYKLPHRLIEKKRRDRINECIAQLKDLLPEHLKLTTLGHLEKAVVLELTLKHVKALTNLIDQQQQKIIALQSGLQAGELSGRNVETGQEMFCSGFQTCAREVLQYLAKHENTRDLKSSQLVTHLHRVVSELLQGGTSRKPSDPAPKVMDFKEKPSSPAKGSEGPGKNCVPVIQRTFAHSSGEQSGSDTDTDSGYGGESEKGDLRSEQPCFKSDHGRRFTMGERIGAIKQESEEPPTKKNRMQLSDDEGHFTSSDLISSPFLGPHPHQPPFCLPFYLIPPSATAYLPMLEKCWYPTSVPVLYPGLNASAAALSSFMNPDKISAPLLMPQRLPSPLPAHPSVDSSVLLQALKPIPPLNLETKD

SEQ ID NO: 99 - DNA, 1368 bp, Homo sapien
ccgcagctccgggcggcgtcggcagcggcgcgagaggcgacgaggcccgggcggcaggagccggcgcggcgaccgcggcgagggcggcggggacggagcagagcacgacgaagacgcacaggcagccgggccgggccgggccacggggagagcggccggcgggcagcgggcgggaggccgggcgggccgcgggcagccaccgagccgcgaagcgacatggtgctgctcaaggagtatcgagtaatcctgcctgtgtctgtagatgagtatcaagtggggcagctgtattctgtggctgaggccagtaaaaatgaaacgggtggtggcgaaggcgtggaggtcctggtgaatgagccctacgagaaggacggtgagaaaggccagtacacacacaagatctaccacctgcagagcaaagtacccacgtttgttcgaatgctggccccagagggagccctgaatatacacgagaaagcctggaatgcttacccctactgcagaaccgttattacaaatgagtacatgaaagaagactttctgattaaaattgaaacctggcacaaaccagatcttggcacgcaggagaatgtgcataagctggagcctgaggcgtggaaacacgtggaagccgtatatatagacattgcagatcgaagccaagtgctcagcaaggattacaaggcagaggaagacccagcaaaatttaaatctatcaaaacaggccgaggacccttgggccccaattggaagcaagagcttgtaaaccagaaggactgcccatatatgtgtgcatacaaactggtgaccgtcaagttcaagtggtggggcctgcagaacaaagtggagaacttcatccataagcaagagaggcgtctgtttacaaacttccacaggcagctgttctgttggctcgataagtgggttgacctgaccatggacgacattcgaaggatggaagaagagacgaagagacagctggatgaaatgagacaaaaggacccagtgaaaggaatgacagcagatgactaaagccgcctttcccctctgcactttttgcaagacagtggtcaacaggaagacccagcagctccaccctcccaagtgacaggccattttcggacgcagccgttctgtgcccattcttcaggcaactttcgattccttactgtagctaattctagatgcccttcagtattgtgaacaaatagaccgtctggtgtcacagagcccgcgtgtgcaggagcctgctcctccgagatacgtggcgtgtaggttgctgtagttacagcgcctccgtctctctccattgtgttccgatccatttctgtgtgttcccccaacctttatttccaagtgacattttcagtc

SEQ ID NO: 100 - protein, 270 aa, Homo sapien
MVLLKEYRVILPVSVDEYQVGQLYSVAEASKNETGGGEGVEVLVNEPYEKDGEKGQYTHKIYHLQSKVPTFVRMLAPEGALNIHEKAWNAYPYCRTVITNEYMKEDFLIKIETWHKPDLGTQENVHKLEPEAWKHVEAVYIDIADRSQVLSKDYKAEEDPAKFKSIKTGRGPLGPNWKQELVNQKDCPYMCAYKLVTVKFKWWGLQNKVENFIHKQERRLFTNFHRQLFCWLDKWVDLTMDDIRRMEEETKRQLDEMRQKDPVKGMTADD

SEQ ID NO: 101 - DNA, 3414 bp, Homo sapien
gcttacacagtatggccggcgacattagctagcgctcgctctactctctctaacgggaaagcagcggaatacaagagactgaactgtatctgcctctatttccaaaagactcacgttcaactttcgctcacacaaagccgggaaaattttattagtcctttttttaaaaaaagttaatataaaattatagcaaaaaaaaaaaggaacctgaactttagtaacacagctggaacaatcgcagcggcggcggcagcggcgggagaagaggtttaatttagttgattttctgtggttgttggttgttcgctagtctcacggtgatggaagctgcacattttttcgaagggaccgagaagctgctggaggtttggttctcccggcagcagcccgacgcaaaccaaggatctggggatcttcgcactatcccaagatctgagtgggacatacttttgaaggatgtgcaatgttcaatcataagtgtgacaaaaactgacaagcaggaagcttatgtactcagtgagagtagcatgtttgtctccaagagacgtttcattttgaagacatgtggtaccaccctcttgctgaaagcactggttcccctgttgaagcttgctagggattacagtgggtttgactcaattcaaagcttcttttattctcgtaagaatttcatgaagccttctcaccaagggtacccacaccggaatttccaggaagaaatagagtttcttaatgcaattttcccaaatggagcaggatattgtatgggacgtatgaattctgactgttggtacttatatactctggatttcccagagagtcgggtaatcagtcagccagatcaaaccttggaaattctgatgagtgagcttgacccagcagttatggaccagttctacatgaaagatggtgttactgcaaaggatgtcactcgtgagagtggaattcgtgacctgataccaggttctgtcattgatgccacaatgttcaatccttgtgggtattcgatgaatggaatgaaatcggatggaacttattggactattcacatcactccagaaccagaattttcttatgttagctttgaaacaaacttaagtcagacctcctatgatgacctgatcaggaaagttgtagaagtcttcaagccaggaaaatttgtgaccaccttgtttgttaatcagagttctaaatgtcgcacagtgcttgcttcgccccagaagattgaaggttttaagcgtcttgattgccagagtgctatgttcaatgattacaattttgtttttaccagttttgctaagaagcagcaacaacagcagagttgattaagaaaaatgaagaaaaaacgcaaaaagagaacacatgtagaaggtggtggatgctttctagatgtcgatgctgggggcagtgctttccataaccaccactgtgtagttgcagaaagccctagatgtaatgatagtgtaatcattttgaattgtatgcattattatatcaaggagttagatatcttgcatgaatgctctcttctgtgtttaggtattctctgccactcttgctgtgaaattgaagtggatgtagaaaaaaccttttactatatgaaactttacaacacttgtgaaagcaactcaatttggtttatgcacagtgtaatatttctccaagtatcatccaaaattccccacagacaaggctttcgtcctcattaggtgttggcctcagcctaaccctctaggactgttctattaaattgctgccagaattttacatccagttacctccactttctagaacatattctttactaatgttattgaaaccaatttctacttcatactgatgtttttggaaacagcaattaaagtttttcttccatagttgagtccttagaaaatgattccagttactcattttgcatattgctatttaacattattggaccctgcatttatagtcctttgatttcttccctctccctggtgtctcccccaagaccccaaataaagcaataccctgttaacactgtgggtttatatactaattctataccccagatggggaattaggggggagatggtccctgggcttaatattctttaaagggcatgggaatttagcctctcttttattgtaatgtgctcttttggaaaatagttggttagcagggagaccagagttgtagattgagattgggtgtactggctgttctgtggaaaacatacattctgtgttcctcgaataagtgaaattgagcttctaatgagatgcacccctttactaacttgatgatgatataaaattcatttttatttagttaattaccagagagatttagcataattttgcttctggattcagtaaatcaagtcagcttggatcattcaccttaacttttcctttagcagccctttccactagtttcccattaagtagtgttctataaactttgatccaaagcagaatcaatgtcttttccatctcgtgacttaaagttctgtgactgtgatgcatgtgagtgttccgacttcatctgttcctcttaactacggtgtttcccttaccgatcggcattcataggatgaaatgaatgactgtcccagaatgagaatttgtccagattattcagataaacatcataaagagaataacattataaataagtagaatatgaataaatagaataataaaattccaaaatactcaatgggaaatgactagtaatataggctttcaagagttggtacctttacgtatatttgcagattctctgggattttaaggaactgagaaaacagaaaagttgactaaattttatatttcttgtcctctaaatattttgataatttctggattgatgcagtgatgtttttcgttccttgtatttataaatgaaaacctttttttggtgtttctaaacctaaaatctacttggtttgaaatcaagtggttggaacactgtttgacttttatttgaagcatgttgttgattgaaaatttcattgaggaagttttcaatcagtgtgatcagtttgattctgtaatgagcacagcacctaatattttgaggagctctgttttgaggaccaatgcttaaggtggaccttgttgctaaacaatatcccaatagatttgttgacttgaggtctggtttggttttgtttttgttttgttttggttttgttttgtttcccaatagaattaagaattctaatgttgaaaaactgtataaatttttatgggacaaagcctagaaaagagaaatgtagtttgaatcataatctaaatcatcgtatgataggaaggaaaagttttggtgccataatttctcctttcactggtgttggacttaaatcagttgaaatgtatttctgtaccacaatttacgcttcaataaaagtttaattgtctagtgag

SEQ ID NO: 102 - protein, 334 aa, Homo sapien
MEAAHFFEGTEKLLEVWFSRQQPDANQGSGDLRTIPRSEWDILLKDVQCSIISVTKTDKQEAYVLSESSMFVSKRRFILKTCGTTLLLKALVPLLKLARDYSGFDSIQSFFYSRKNFMKPSHQGYPHRNFQEEIEFLNAIFPNGAGYCMGRMNSDCWYLYTLDFPESRVISQPDQTLEILMSELDPAVMDQFYMKDGVTAKDVTRESGIRDLIPGSVIDATMFNPCGYSMNGMKSDGTYWTIHITPEPEFSYVSFETNLSQTSYDDLIRKVVEVFKPGKFVTTLFVNQSSKCRTVLASPQKIEGFKRLDCQSAMFNDYNFVFTSFAKKQQQQQS

SEQ ID NO: 103 - DNA, 674 bp, Homo sapien
ccccttggttccgcccgcgcgtcacgtgaccccagcgcctacttgggctgaggagccgccgcgtcccctcgccgagtcccctcgccagattccctccgtcgccgccaagatgatgtgcggggcgccctccgccacgcagccggccaccgccgagacccagcacatcgccgaccaggtgaggtcccagcttgaagagaaagaaaacaagaagttccctgtgtttaaggccgtgtcattcaagagccaggtggtcgcggggacaaactacttcatcaaggtgcacgtcggcgacgaggacttcgtacacctgcgagtgttccaatctctccctcatgaaaacaagcccttgaccttatctaactaccagaccaacaaagccaagcatgatgagctgacctatttctgatcctgactttggacaaggcccttcagccagaagactgacaaagtcatcctccgtctaccagagcgtgcacttgtgatcctaaaataagcttcatctccgggctgtgccccttggggtggaaggggcaggattctgcagctgcttttgcatttctcttcctaaatttcattgtgttgatttctttccttcccaataggtgatcttaattactttcagaatattttcaaaatagatatatttttaaaatccttaaaaaaaaaaaaaaaaa

SEQ ID NO: 104 - protein, 98 aa, Homo sapien
MMCGAPSATQPATAETQHIADQVRSQLEEKENKKFPVFKAVSFKSQVVAGTNYFIKVHVGDEDFVHLRVFQSLPHENKPLTLSNYQTNKAKHDELTYF

SEQ ID NO: 105 - DNA, 2091 bp, Homo sapien
gagcggagccgcgggcgggagggcggacggaccgactgacggtagggacgggaggcgagcaagatggcgcagacgcagggcacccggaggaaagtctgttactactacgacggggatgttggaaattactattatggacaaggccacccaatgaagcctcaccgaatccgcatgactcataatttgctgctcaactatggtctctaccgaaaaatggaaatctatcgccctcacaaagccaatgctgaggagatgaccaagtaccacagcgatgactacattaaattcttgcgctccatccgtccagataacatgtcggagtacagcaagcagatgcagagattcaacgttggtgaggactgtccagtattcgatggcctgtttgagttctgtcagttgtctactggtggttctgtggcaagtgctgtgaaacttaataagcagcagacggacatcgctgtgaattgggctgggggcctgcaccatgcaaagaagtccgaggcatctggcttctgttacgtcaatgatatcgtcttggccatcctggaactgctaaagtatcaccagagggtgctgtacattgacattgatattcaccatggtgacggcgtggaagaggccttctacaccacggaccgggtcatgactgtgtcctttcataagtatggagagtacttcccaggaactggggacctacgggatatcggggctggcaaaggcaagtattatgctgttaactacccgctccgagacgggattgatgacgagtcctatgaggccattttcaagccggtcatgtccaaagtaatggagatgttccagcctagtgcggtggtcttacagtgtggctcagactccctatctggggatcggttaggttgcttcaatctaactatcaaaggacacgccaagtgtgtggaatttgtcaagagctttaacctgcctatgctgatgctgggaggcggtggttacaccattcgtaacgttgcccggtgctggacatatgagacagctgtggccctggatacggagatccctaatgagcttccatacaatgactactttgaatactttggaccagatttcaagctccacatcagtccttccaatatgactaaccagaacacgaatgagtacctggagaagatcaaacagcgactgtttgagaaccttagaatgctgccgcacgcacctggggtccaaatgcaggcgattcctgaggacgccatccctgaggagagtggcgatgaggacgaagacgaccctgacaagcgcatctcgatctgctcctctgacaaacgaattgcctgtgaggaagagttctccgattctgaagaggagggagaggggggccgcaagaactcttccaacttcaaaaaagccaagagagtcaaaacagaggatgaaaaagagaaagacccagaggagaagaaagaagtcaccgaagaggagaaaaccaaggaggagaagccagaagccaaaggggtcaaggaggaggtcaagttggcctgaatggacctctccagctctggcttcctgctgagtccctcacgtttcttccccaacccctcagattttatattttctatttctctgtgtatttatataaaaatttattaaatataaatatccccagggacagaaaccaaggccccgagctcagggcagctgtgctgggtgagctcttccaggagccaccttgccacccattcttcccgttcttaactttgaaccataaagggtgccaggtctgggtgaaagggatacttttatgcaaccataagacaaactcctgaaatgccaagtgcctgcttagtagctttggaaaggtgcccttattgaacattctagaaggggtggctgggtcttcaaggatctcctgtttttttcaggctcctaaagtaacatcagccatttttagattggttctgttttcgtaccttcccactggcctcaagtgagccaagaaacactgcctgccctctgtctgtcttctcctaattctgcaggtggaggttgctagtctagtttcctttttgagatactattttcatttttgtgagcctctttgtaataaaatggtacatttct

SEQ ID NO: 106 - protein, 482 aa, Homo sapien
MAQTQGTRRKVCYYYDGDVGNYYYGQGHPMKPHRIRMTHNLLLNYGLYRKMEIYRPHKANAEEMTKYHSDDYIKFLRSIRPDNMSEYSKQMQRFNVGEDCPVFDGLFEFCQLSTGGSVASAVKLNKQQTDIAVNWAGGLHHAKKSEASGFCYVNDIVLAILELLKYHQRVLYIDIDIHHGDGVEEAFYTTDRVMTVSFHKYGEYFPGTGDLRDIGAGKGKYYAVNYPLRDGIDDESYEAIFKPVMSKVMEMFQPSAVVLQCGSDSLSGDRLGCFNLTIKGHAKCVEFVKSFNLPMLMLGGGGYTIRNVARCWTYETAVALDTEIPNELPYNDYFEYFGPDFKLHISPSNMTNQNTNEYLEKIKQRLFENLRMLPHAPGVQMQAIPEDAIPEESGDEDEDDPDKRISICSSDKRIACEEEFSDSEEEGEGGRKNSSNFKKAKRVKTEDEKEKDPEEKKEVTEEEKTKEEKPEAKGVKEEVKLA

SEQ ID NO: 107 - DNA, 3408 bp, Homo sapien
ctttccccttactccgctcccctcttttccctccctctcctccccttccctctgttctctcctcctcttcccctcccctcccccgtccggggcactctatattcaagccaccgtttcctgcttcacaaaatggccaccgcacgcgacacctacggtcacgtggcctgccgccctctcagtttcgggaatctgcctagctcccactaaggggaggctacccgcggaagagcgagggcagattagaccggagaaatcccaccacatctccaagcccgggaactgagagaggaagaagagtgaaggccagtgttaggaaaaaaaaaaacaaaaacaaaaaaaacgaaaaacgaaagctgagtgcatagagttggaaaggggagcgaatgcgtaaggttggaaaggggggcgaagaggcctaggttaacattttcaggcgtcttagccggtggaaagcgggagacgcaagttctcgcgagatctcgagaactccgaggctgagactagggttttagcggagagcacgggaagtgtagctcgagagaactgggacagcatttcgcaccctaagctccaaggcaggactgctaggggcgacaggactaagtaggaaatcccttgagcttagacctgagggagcgcgcagtagccgggcagaagtcgccgcgacagggaattgcggtgtgagagggagggcacacgttgtacgtgctgacgtagccggctttccagcgggtatattagatccgtggccgcgcggtgcgctccagagccgcagttctcccgtgagagggccttcgcggtggaacaaacactcgcttagcagcggaagactccgagttctcggtactcttcagggatgagtcatgtggcagtggaaaatgcgctcgggctggaccagcagtttgctggcctagacctgaactcttcagataatcagagtggaggaagtacagccagcaaagggcgctatattcctcctcatttaaggaaccgagaagctactagaggtttctacgataaagacagttcagggtggagttctagcaaagataaggatgcgtatagcagttttggatctcgtagtgattcaagagggaagtctagcttcttcagtgatcgtggaagtggatcaaggggaaggtttgatgatcgtggacggagtgattacgatggcattggcagccgtggtgacagaagtggctttggcaaatttgaacgtggtggaaacagtcgctggtgtgacaaatcagatgaagatgattggtcaaaaccactcccaccaagtgaacgcttggaacaggaactcttttctggaggcaacactgggattaattttgagaaatacgatgacattccagttgaggcaacaggcaacaactgtcctccacatattgaaagtttcagtgatgttgagatgggagaaattatcatgggaaacattgagcttactcgttatactcgcccaactccagtgcaaaagcatgctattcctattatcaaagagaaaagagacttgatggcttgtgcccaaacagggtctggaaaaactgcagcatttctgttgcccatcttgagtcagatttattcagatggtccaggcgaggctttgagggccatgaaggaaaatggaaggtatgggcgccgcaaacaatacccaatctccttggtattagcaccaacgagagagttggcagtacagatctacgaagaagccagaaaattttcataccgatctagagttcgtccttgcgtggtttatggtggtgccgatattggtcagcagattcgagacttggaacgtggatgccatttgttagtagccactccaggacgtctagtggatatgatggaaagaggaaagattggattagacttttgcaaatacttggtgttagatgaagctgatcggatgttggatatggggtttgagcctcagattcgtagaatagtcgaacaagatactatgcctccaaagggtgtccgccacactatgatgtttagtgctacttttcctaaggaaatacagatgctggctcgtgatttcttagatgaatatatcttcttggctgtaggaagagttggctctacctctgaaaacatcacacagaaagtagtttgggtggaagaatcagacaaacggtcatttctgcttgacctcctaaatgcaacaggcaaggattcactgaccttagtgtttgtggagaccaaaaagggtgcagattctctggaggatttcttataccatgaaggatacgcatgtaccagcatccatggagaccgttctcagagggatagagaagaggcccttcaccagttccgctcaggaaaaagcccaattttagtggctacagcagtagcagcaagaggactggacatttcaaatgtgaaacatgttatcaattttgacttgccaagtgatattgaagaatatgtacatcgtattggtcgtacgggacgtgtaggaaaccttggcctggcaacctcattctttaacgagaggaacataaatattactaaggatttgttggatcttcttgttgaagctaaacaagaagtgccgtcttggttagaaaacatggcttatgaacaccactacaagggtagcagtcgtggacgttctaagagtagcagatttagtggagggtttggtgccagagactaccgacaaagtagcggtgccagcagttccagcttcagcagcagccgcgcaagcagcagccgcagtggcggaggtggccacggtagcagcagaggatttggtggaggtggctatggaggcttttacaacagtgatggatatggaggaaattataactcccagggggttgactggtggggtaactgagcctgctttgcagtaggtcaccctgccaaacaagctaatatggaaaccacatgtaacttagccagactataccttgtgtagtttcaagaactcgcagtacattaccagctgtgattctccactgaaattttttttttaagggagctcaaggtcacaagaagaaatgaaaggaacaatcagcagccctgttcagaaggatcatgctcatctgtggagcaagtgcccccatgaaatgccatattttgtgaagaaagtgcatgcaggaatattcagggagtccagcatgtagtcatggcagccttaggtatttgagaccgaccaaccctcctgatgaagacaaccataactcatgcagaacttggagcgtgatgcccagaagtgtgtgaactggtctgtgaccacaaagatgagaaccgcatgctgagattggtggaatggagatttcagtgagcctacatgcagatgacatggtgacacccgtgcccagcctgagctgttttcttctggccctcttattacatgagaaaaataaacacctatgcaccttggcctcaaaaaaaaaa

SEQ ID NO: 108 - protein, 662 aa, Homo sapien
MSHVAVENALGLDQQFAGLDLNSSDNQSGGSTASKGRYIPPHLRNREATRGFYDKDSSGWSSSKDKDAYSSFGSRSDSRGKSSFFSDRGSGSRGRFDDRGRSDYDGIGSRGDRSGFGKFERGGNSRWCDKSDEDDWSKPLPPSERLEQELFSGGNTGINFEKYDDIPVEATGNNCPPHIESFSDVEMGEIIMGNIELTRYTRPTPVQKHAIPIIKEKRDLMACAQTGSGKTAAFLLPILSQIYSDGPGEALRAMKENGRYGRRKQYPISLVLAPTRELAVQIYEEARKFSYRSRVRPCVVYGGADIGQQIRDLERGCHLLVATPGRLVDMMERGKIGLDFCKYLVLDEADRMLDMGFEPQIRRIVEQDTMPPKGVRHTMMFSATFPKEIQMLARDFLDEYIFLAVGRVGSTSENITQKVVWVEESDKRSFLLDLLNATGKDSLTLVFVETKKGADSLEDFLYHEGYACTSIHGDRSQRDREEALHQFRSGKSPILVATAVAARGLDISNVKHVINFDLPSDIEEYVHRIGRTGRVGNLGLATSFFNERNINITKDLLDLLVEAKQEVPSWLENMAYEHHYKGSSRGRSKSSRFSGGFGARDYRQSSGASSSSFSSSRASSSRSGGGGHGSSRGFGGGGYGGFYNSDGYGGNYNSQGVDWWGN

SEQ ID NO: 109 - DNA, 2943 bp, Homo sapien
gagtcacgatgatggcggccaccatcctgtggtgagctagcggattccctgcttgtctcgccgaccccctcgcgccttctgcagactccgtggctggcgctcggcgcgtgaggaagcacggcggcccgagttcgcggggaaggccgcagtcgcggaggcagcggcgcggtccggggcacgggctgggggagaggccgctccgctgggcgaatgtgacaagcccccacccccaccgccttcctccccagagcgcgaggagcgcgggcgaccccggggccccgccaggccacagaccccgcccagcggccagcacccggcgcaggcccggcagccgagctgcgcggcggcaccatgcaggtcaccctgaagaccctccagcagcagaccttcaagatagacattgaccccgaggagacggtgaaagcactgaaagagaagattgaatctgaaaaggggaaagatgcctttccagtagcaggtcaaaaattaatttatgcaggcaaaatcctcaatgatgatactgctctcaaagaatataaaattgatgagaaaaactttgtggtggttatggtgaccaaacccaaagcagtgtccacaccagcaccagctacaactcagcagtcagctcctgccagcactacagcagttacttcctccaccaccacaactgtggctcaggctccaacccctgtccctgccttggcccccacttccacacctgcatccatcactccagcatcagcgacagcatcttctgaacctgcacctgctagtgcagctaaacaagagaagcctgcagaaaagccagcagagacaccagtggctactagcccaacagcaactgacagtacatcgggtgattcttctcggtcaaacctttttgaagatgcaacgagtgcacttgtgacgggtcagtcttacgagaatatggtaactgagatcatgtcaatgggctatgaacgagagcaagtaattgcagccctgagagccagtttcaacaaccctgacagagcagtggagtatcttttaatgggaatccctggagatagagaaagtcaggctgtggttgacccccctcaagcagctagtactggggctcctcagtcttcagcagtggctgcagctgcagcaactacgacagcaacaactacaacaacaagttctggaggacatccccttgaatttttacggaatcagcctcagtttcaacagatgagacaaattattcagcagaatccttccttgcttccagcgttactacagcagataggtcgagagaatcctcaattacttcagcaaattagccaacaccaggagcattttattcagatgttaaatgaaccagttcaagaagctggtggtcaaggaggaggaggtggaggtggcagtggaggaattgcagaagctggaagtggtcatatgaactacattcaagtaacacctcaggaaaaagaagctatagaaaggttaaaggcattaggatttcctgaaggacttgtgatacaagcgtattttgcttgtgagaagaatgagaatttggctgccaattttcttctacagcagaactttgatgaagattgaaagggacttttttatatctcacacttcacaccagtgcattacactaacttgttcactggattgtctgggatgacttgggctcatatccacaatacttggtataaggtagtagattgttgggggtggggagggagggatctaggatacagggcagggataaatacagtgcatgtctgcttcaattagcagatgccgcaactccacacagtgtgtaaaatatatacaaccaaaaatcagcttttgcaggtctttatttcttctgtaaaacagtaggtaacttttcctaggtttcactctttttagtgtactagatccagaaacttagtgtaatgccctgctttatatttctttgacttaacattggtttcagaaagaatcttagctacctagaatttacagtctctgtttcatggcaacactggataatggctttgtgaaatttaaaaaatttttgtagcgactgtaaacagaaatgccaaattgatggttaattgttgctgcttcaaaaataagtataaaattaatatgtaaggaagcccattctttcatgttaaatacttggggtgggaggggagaaagggaaccttttcttaaaatgaaaataattactgctattttaaaatttcttgatcattgaatgtgagacccttctaacatgatttgagaagctgtacaagtataggcagagttattttcctgtttacattttttttttgttttggggaaaaaattggtaggtgtctaattactgtttacttcattgttatattgcagtaaaagttttaaaacaaccattgcatgtttgcttttgatgtatccctttgtgaaattagcacttttggggccaatggagaaatgcagcattcactctccctgtcttttccccttccctcagcagaaacgtgtttatcagcaagtcgtgagtcaaactgctgccttttaaaaaacccacaaaatgctgattcagttcaaaattaatgcaaatgtttcaaaactgggtttctgatatttgtaaatgtgtttctttattagataagagtgtattaccattaaagtcattagtataatattgctttcaaaaagaaatggtagacaaaactataatccagcatcttttattgcattggaaagactggcaaagtcttttggatgggttgggagatgtggctggaaagtactttggaaaatatacaatcaagatatctcatggcatattaaaagaaaaatcttaatagcagtgttggcttttatttggattttttcatctcagttttttctgtggaatctccttcattggcattgttatttaatcataaacggggcagatgtctacttgttcagtttttcaaatctgttttcctg

SEQ ID NO: 110 - protein, 409 aa, Homo sapien
MQVTLKTLQQQTFKIDIDPEETVKALKEKIESEKGKDAFPVAGQKLIYAGKILNDDTALKEYKIDEKNFVVVMVTKPKAVSTPAPATTQQSAPASTTAVTSSTTTTVAQAPTPVPALAPTSTPASITPASATASSEPAPASAAKQEKPAEKPAETPVATSPTATDSTSGDSSRSNLFEDATSALVTGQSYENMVTEIMSMGYEREQVIAALRASFNNPDRAVEYLLMGIPGDRESQAVVDPPQAASTGAPQSSAVAAAAATTTATTTTTSSGGHPLEFLRNQPQFQQMRQIIQQNPSLLPALLQQIGRENPQLLQQISQHQEHFIQMLNEPVQEAGGQGGGGGGGSGGIAEAGSGHMNYIQVTPQEKEAIERLKALGFPEGLVIQAYFACEKNENLAANFLLQQNFDED

SEQ ID NO: 111 - DNA, 5698 bp, Homo sapien
aggttcaagtggagctctcctaaccgacgcgcgtctgtggagaagcggcttggtcgggggtggtctcgtggggtcctgcctgtttagtcgctttcagggttcttgagccccttcacgaccgtcaccatggaagtgtcaccattgcagcctgtaaatgaaaatatgcaagtcaacaaaataaagaaaaatgaagatgctaagaaaagactgtctgttgaaagaatctatcaaaagaaaacacaattggaacatattttgctccgcccagacacctacattggttctgtggaattagtgacccagcaaatgtgggtttacgatgaagatgttggcattaactatagggaagtcacttttgttcctggtttgtacaaaatctttgatgagattctagttaatgctgcggacaacaaacaaagggacccaaaaatgtcttgtattagagtcacaattgatccggaaaacaatttaattagtatatggaataatggaaaaggtattcctgttgttgaacacaaagttgaaaagatgtatgtcccagctctcatatttggacagctcctaacttctagtaactatgatgatgatgaaaagaaagtgacaggtggtcgaaatggctatggagccaaattgtgtaacatattcagtaccaaatttactgtggaaacagccagtagagaatacaagaaaatgttcaaacagacatggatggataatatgggaagagctggtgagatggaactcaagcccttcaatggagaagattatacatgtatcacctttcagcctgatttgtctaagtttaaaatgcaaagcctggacaaagatattgttgcactaatggtcagaagagcatatgatattgctggatccaccaaagatgtcaaagtctttcttaatggaaataaactgccagtaaaaggatttcgtagttatgtggacatgtatttgaaggacaagttggatgaaactggtaactccttgaaagtaatacatgaacaagtaaaccacaggtgggaagtgtgtttaactatgagtgaaaaaggctttcagcaaattagctttgtcaacagcattgctacatccaagggtggcagacatgttgattatgtagctgatcagattgtgactaaacttgttgatgttgtgaagaagaagaacaagggtggtgttgcagtaaaagcacatcaggtgaaaaatcacatgtggatttttgtaaatgccttaattgaaaacccaacctttgactctcagacaaaagaaaacatgactttacaacccaagagctttggatcaacatgccaattgagtgaaaaatttatcaaagctgccattggctgtggtattgtagaaagcatactaaactgggtgaagtttaaggcccaagtccagttaaacaagaagtgttcagctgtaaaacataatagaatcaagggaattcccaaactcgatgatgccaatgatgcagggggccgaaactccactgagtgtacgcttatcctgactgagggagattcagccaaaactttggctgtttcaggccttggtgtggttgggagagacaaatatggggttttccctcttagaggaaaaatactcaatgttcgagaagcttctcataagcagatcatggaaaatgctgagattaacaatatcatcaagattgtgggtcttcagtacaagaaaaactatgaagatgaagattcattgaagacgcttcgttatgggaagataatgattatgacagatcaggaccaagatggttcccacatcaaaggcttgctgattaattttatccatcacaactggccctctcttctgcgacatcgttttctggaggaatttatcactcccattgtaaaggtatctaaaaacaagcaagaaatggcattttacagccttcctgaatttgaagagtggaagagttctactccaaatcataaaaaatggaaagtcaaatattacaaaggtttgggcaccagcacatcaaaggaagctaaagaatactttgcagatatgaaaagacatcgtatccagttcaaatattctggtcctgaagatgatgctgctatcagcctggcctttagcaaaaaacagatagatgatcgaaaggaatggttaactaatttcatggaggatagaagacaacgaaagttacttgggcttcctgaggattacttgtatggacaaactaccacatatctgacatataatgacttcatcaacaaggaacttatcttgttctcaaattctgataacgagagatctatcccttctatggtggatggtttgaaaccaggtcagagaaaggttttgtttacttgcttcaaacggaatgacaagcgagaagtaaaggttgcccaattagctggatcagtggctgaaatgtcttcttatcatcatggtgagatgtcactaatgatgaccattatcaatttggctcagaattttgtgggtagcaataatctaaacctcttgcagcccattggtcagtttggtaccaggctacatggtggcaaggattctgctagtccacgatacatctttacaatgctcagctctttggctcgattgttatttccaccaaaagatgatcacacgttgaagtttttatatgatgacaaccagcgtgttgagcctgaatggtacattcctattattcccatggtgctgataaatggtgctgaaggaatcggtactgggtggtcctgcaaaatccccaactttgatgtgcgtgaaattgtaaataacatcaggcgtttgatggatggagaagaacctttgccaatgcttccaagttacaagaacttcaagggtactattgaagaactggctccaaatcaatatgtgattagtggtgaagtagctattcttaattctacaaccattgaaatctcagagcttcccgtcagaacatggacccagacatacaaagaacaagttctagaacccatgttgaatggcaccgagaagacacctcctctcataacagactatagggaataccatacagataccactgtgaaatttgttgtgaagatgactgaagaaaaactggcagaggcagagagagttggactacacaaagtcttcaaactccaaactagtctcacatgcaactctatggtgctttttgaccacgtaggctgtttaaagaaatatgacacggtgttggatattctaagagacttttttgaactcagacttaaatattatggattaagaaaagaatggctcctaggaatgcttggtgctgaatctgctaaactgaataatcaggctcgctttatcttagagaaaatagatggcaaaataatcattgaaaataagcctaagaaagaattaattaaagttctgattcagaggggatatgattcggatcctgtgaaggcctggaaagaagcccagcaaaaggttccagatgaagaagaaaatgaagagagtgacaacgaaaaggaaactgaaaagagtgactccgtaacagattctggaccaaccttcaactatcttcttgatatgcccctttggtatttaaccaaggaaaagaaagatgaactctgcaggctaagaaatgaaaaagaacaagagctggacacattaaaaagaaagagtccatcagatttgtggaaagaagacttggctacatttattgaagaattggaggctgttgaagccaaggaaaaacaagatgaacaagtcggacttcctgggaaaggggggaaggccaaggggaaaaaaacacaaatggctgaagttttgccttctccgcgtggtcaaagagtcattccacgaataaccatagaaatgaaagcagaggcagaaaagaaaaataaaaagaaaattaagaatgaaaatactgaaggaagccctcaagaagatggtgtggaactagaaggcctaaaacaaagattagaaaagaaacagaaaagagaaccaggtacaaagacaaagaaacaaactacattggcatttaagccaatcaaaaaaggaaagaagagaaatccctggtctgattcagaatcagataggagcagtgacgaaagtaattttgatgtccctccacgagaaacagagccacggagagcagcaacaaaaacaaaattcacaatggatttggattcagatgaagatttctcagattttgatgaaaaaactgatgatgaagattttgtcccatcagatgctagtccacctaagaccaaaacttccccaaaacttagtaacaaagaactgaaaccacagaaaagtgtcgtgtcagaccttgaagctgatgatgttaagggcagtgtaccactgtcttcaagccctcctgctacacatttcccagatgaaactgaaattacaaacccagttcctaaaaagaatgtgacagtgaagaagacagcagcaaaaagtcagtcttccacctccactaccggtgccaaaaaaagggctgccccaaaaggaactaaaagggatccagctttgaattctggtgtctctcaaaagcctgatcctgccaaaaccaagaatcgccgcaaaaggaagccatccacttctgatgattctgactctaattttgagaaaattgtttcgaaagcagtcacaagcaagaaatccaagggggagagtgatgacttccatatggactttgactcagctgtggctcctcgggcaaaatctgtacgggcaaagaaacctataaagtacctggaagagtcagatgaagatgatctgttttaaaatgtgaggcgattattttaagtaattatcttaccaagcccaagactggttttaaagttacctgaagctcttaacttcctcccctctgaatttagtttggggaaggtgtttttagtacaagacatcaaagtgaagtaaagcccaagtgttctttagctttttataatactgtctaaatagtgaccatctcatgggcattgttttcttctctgctttgtctgtgttttgagtctgctttcttttgtctttaaaacctgatttttaagttcttctgaactgtagaaatagctatctgatcacttcagcgtaaagcagtgtgtttattaaccatccactaagctaaaactagagcagtttgatttaaaagtgtcactcttcctccttttctactttcagtagatatgagatagagcataattatctgttttatcttagttttatacataatttaccatcagatagaactttatggttctagtacagatactctactacactcagcctcttatgtgccaagtttttctttaagcaatgagaaattgctcatgttcttcatcttctcaaatcatcagaggccaaagaaaaacactttggctgtgtctataacttgacacagtcaatagaatgaagaaaattagagtagttatgtgattatttcagctcttgacctgtcccctctggctgcctctgagtctgaatctcccaaagagagaaaccaatttctaagaggactggattgcagaagactcggggacaacatttgatccaagatcttaaatgttatattgataaccatgctcagcaatgagctattagattcattttgggaaatctccataatttcaatttgtaaactttgttaagacctgtctacattgttatatgtgtgtgacttgagtaatgttatcaacgtttttgtaaatatttactatgtttttctattagctaaattccaacaattttgtactttaataaa

SEQ ID NO: 112 - protein, 1531 aa, Homo sapien
MEVSPLQPVNENMQVNKIKKNEDAKKRLSVERIYQKKTQLEHILLRPDTYIGSVELVTQQMWVYDEDVGINYREVTFVPGLYKIFDEILVNAADNKQRDPKMSCIRVTIDPENNLISIWNNGKGIPVVEHKVEKMYVPALIFGQLLTSSNYDDDEKKVTGGRNGYGAKLCNIFSTKFTVETASREYKKMFKQTWMDNMGRAGEMELKPFNGEDYTCITFQPDLSKFKMQSLDKDIVALMVRRAYDIAGSTKDVKVFLNGNKLPVKGFRSYVDMYLKDKLDETGNSLKVIHEQVNHRWEVCLTMSEKGFQQISFVNSIATSKGGRHVDYVADQIVTKLVDVVKKKNKGGVAVKAHQVKNHMWIFVNALIENPTFDSQTKENMTLQPKSFGSTCQLSEKFIKAAIGCGIVESILNWVKFKAQVQLNKKCSAVKHNRIKGIPKLDDANDAGGRNSTECTLILTEGDSAKTLAVSGLGVVGRDKYGVFPLRGKILNVREASHKQIMENAEINNIIKIVGLQYKKNYEDEDSLKTLRYGKIMIMTDQDQDGSHIKGLLINFIHHNWPSLLRHRFLEEFITPIVKVSKNKQEMAFYSLPEFEEWKSSTPNHKKWKVKYYKGLGTSTSKEAKEYFADMKRHRIQFKYSGPEDDAAISLAFSKKQIDDRKEWLTNFMEDRRQRKLLGLPEDYLYGQTTTYLTYNDFINKELILFSNSDNERSIPSMVDGLKPGQRKVLFTCFKRNDKREVKVAQLAGSVAEMSSYHHGEMSLMMTIINLAQNFVGSNNLNLLQPIGQFGTRLHGGKDSASPRYIFTMLSSLARLLFPPKDDHTLKFLYDDNQRVEPEWYIPIIPMVLINGAEGIGTGWSCKIPNFDVREIVNNIRRLMDGEEPLPMLPSYKNFKGTIEELAPNQYVISGEVAILNSTTIEISELPVRTWTQTYKEQVLEPMLNGTEKTPPLITDYREYHTDTTVKFVVKMTEEKLAEAERVGLHKVFKLQTSLTCNSMVLFDHVGCLKKYDTVLDILRDFFELRLKYYGLRKEWLLGMLGAESAKLNNQARFILEKIDGKIIIENKPKKELIKVLIQRGYDSDPVKAWKEAQQKVPDEEENEESDNEKETEKSDSVTDSGPTFNYLLDMPLWYLTKEKKDELCRLRNEKEQELDTLKRKSPSDLWKEDLATFIEELEAVEAKEKQDEQVGLPGKGGKAKGKKTQMAEVLPSPRGQRVIPRITIEMKAEAEKKNKKKIKNENTEGSPQEDGVELEGLKQRLEKKQKREPGTKTKKQTTLAFKPIKKGKKRNPWSDSESDRSSDESNFDVPPRETEPRRAATKTKFTMDLDSDEDFSDFDEKTDDEDFVPSDASPPKTKTSPKLSNKELKPQKSVVSDLEADDVKGSVPLSSSPPATHFPDETEITNPVPKKNVTVKKTAAKSQSSTSTTGAKKRAAPKGTKRDPALNSGVSQKPDPAKTKNRRKRKPSTSDDSDSNFEKIVSKAVTSKKSKGESDDFHMDFDSAVAPRAKSVRAKKPIKYLEESDEDDLF

SEQ ID NO: 113 - DNA, 2096 bp, Homo sapien
  Unsure 23, 27, 80, 120: Unknown base
agatgtttaaaaatactttgatnctcngtttccacctctcttaaattgtctttccctatgttaaatatacagtcatcacnttgctgaaaaaagttcgcaatgagaacaatcatctaaaantggctgtaactaggtcaggcgcggttgctcatgcctgtaatcccaccactttgggaggccgaggcaattggatcacctgaggtcaggattttgagaccagcttgaccaacatggtggaatcccatctctactaaaaatacaaaaaattagccgggtgtggtggcacacccctgtaatcccacctactcaggaggctgaggcaggaaaatcccttgaacccaggaggcaaaggttgcattgagccgaaataacaccactgcactccagcctggacgatagagtgagaccccatctcaaaaaaagagcagctgtgacaaatgcctgtattgaattgcaggtcagtcttccacctccactaccggtgccaaaaaaagggctgccccaaaaggaactaaaagggatccagctttgaattctggtgtctctcaaaagcctgatcctgccaaaaccaagaatcgccgcaaaaggaagccatccacttctgatgattctgactctaattttgagaaaattgtttcgaaagcagtcacaagcaaggtgagtgttgatcctagtcagtccttttgctgtagatgttctgaaacacgtaactaagccattgttcttaaaaatttggcatatctttaagaaaattaactctcatattctgttagcttttactgtacatatttagttttaacaaagttaaatatgccacttatttggccaatggaagagttggccttagatctgcttcttattacttggtagaaaatagaaaactccttgaatatagtgtcttgatacatttttttacattacaattatgttgtcagatttacaatgtgcaagttacctgggcttttctcttttagaaatccaagggggagagtgatgacttccatatggactttgactcagctgtggctcctcgggcaaaatctgtacgggcaaagaaacctataaagtacctggaagagtcagatgaagatgatctgttttaaaatgtgaggcgattattttaagtaattatcttaccaagcccaagactggttttaaagttacctgaagctcttaacttcctcccctctgaatttagtttggggaaggtgtttttagtacaagacatcaaagtgaagtaaagcccaagtgttctttagctttttataatactgtataaatagtgaccatctcatgggcattgttttcttctctgctttgtctgtgttttgagtctgcttcttttgtctttaaaacctgatttttaagttcttctgaactgtagaaatagctatctgatcacttcagcgtaaagcagtgtgtttattaaccatccactaagctaaaactagagcagtttgatttaaaagtgtcactcttcctccttttctactttcagtagatatgagatagagcataattatctgttttatcttagttttatacataatttaccatcagatagaactttatggttctagtacagatactctactacactcagcctcttatgtgccaagtttttctttaagcaatgagaaattgctcatgttcttcatcttctcaaatcatcagaggccgaagaaaaacactttggctgtgtctataacttgacacagtcaatagaatgaagaaaattagagtagttatgtgattatttcagctcttgacctgtcccctctggctgcctctgagtctgaatctcccaaagagagaaaccaatttctaagaggactggattgcagaagactcggggacaacatttgatccaagatcttaaatgttatattgataaccatgctcagcaatgagctattagattcattttgggaaatctccataatttcaatttgtaaactttgttaagacctgtctacattgttatatgtgtgtgacttgagtaatgttatcaacgtttttgtaaatatttactatgtttttctattagctaaattccaacaattttgtactttaataaaatgttctaaacattgaaa

SEQ ID NO: 114 - DNA, 2543 bp, Homo sapien
gaggcgggcaaggcgggcgccgaggtttgcaaaggctcgcagcggccagaaacccggctccgagcggcggcggcccggcttccgctgcccgtgagctaaggacggtccgctccctctagccagctccgaatcctgatccaggcgggggccaggggcccctcgcctcccctctgaggaccgaagatgagcttcctcttcagcagccgctcttctaaaacattcaaaccaaagaagaatatccctgaaggatctcatcagtatgaactcttaaaacatgcagaagcaactctaggaagtgggaatctgagacaagctgttatgttgcctgagggagaggatctcaatgaatggattgctgtgaacactgtggatttctttaaccagatcaacatgttatatggaactattacagaattctgcactgaagcaagctgtccagtcatgtctgcaggtccgagatatgaatatcactgggcagatggtactaatattaaaaagccaatcaaatgttctgcaccaaaatacattgactatttgatgacttgggttcaagatcagcttgatgatgaaactctttttccttctaagattggtgtcccatttcccaaaaactttatgtctgtggcaaagactattctaaagcgtctgttcagggtttatgcccatatttatcaccagcactttgattctgtgatgcagctgcaagagggggcccacctcaacacctcctttaagcactttattttctttgttcaggagtttaatctgattgataggcgtgagctggcacctcttcaagaattaatagagaaacttggatcaaaagacagataaatgtttcttctagaacacagttacccccttgcttcatctattgctagaactatctcattgctatctgttatagactagtgatacaaactttaagaaaacaggataaaaagatacccattgcctgtgtctactgataaaattatcccaaaggtaggttggtgtgatagtttccgagtaagaccttaaggacacagccaaatcttaagtactgtgtgaccactcttgttgttatcacatagtcatacttggttgtaatatgtgatggttaacctgtagcttataaatttacttattattcttttactcatttactcagtcatttctttacaagaaaatgattgaatctgttttaggtgacagcacaatggacattaagaatttccatcaataatttatgaataagtttccagaacaaatttcctaataacacaatcagattggttttattcttttattttacgaataaaaaatgtatttttcagtatccttgagatttagaacatctgtgtcacttcagataacattttagtttcaagtttgtatggtagtgtttttatagataagatacgtctattttttcaaaattcatgattgcagtttaaatcatcatatgacgtgtgggtgggagcaaccaaagttatttttacagggactttattttttgatctttatttgagattgttttcatatctatctaaattattaggagtgtgtgtatcagaagtaattttttaatgtcttctaaggatggtcttccaggcttttaaactgaaaagcttaattcagatagtagcttttggctgagaaaaggaatccaaaatattaataaatttagatctcaaaaccactatttttattatttcattatttttcagaggccttaaaattctggataagagaatggaggaaaatactcagagtacttgattattttatttccttttattaaaaaattacttctatgtttttattgtctcttgagccttagttaagagtagtgtagaaatgcatgaacttcatcctaataaggataaaacttaaggaaaaccacaataaaccatgaaggtgtacacatcctataacacagataaagttttggtgtgctacctattcttgagagagtgagtgagtgtatgtgtttaaaggaaacaaaatgggagaaataagttttaaaaaaatcctcattttgttaatattcaaaagatggactgagcttccacttgggttttatcttgttttaattgtttttgtatcaaaacttgaaattcctctatttctattgggatataaaagccttccccttcagtgaagaaaacatttattttttatttgattcctaggatttagtaaactctagctgtctatttaaaatgtactgaggcacaacaagtattatactggaagacttgccaaactggcaaagctttaagttcatcagcattctatgtggttcagagctgtgatttttgcaaagtattttaccaacctcctcgatggctttgataaaggttagatttgatgttttttttttagatttatttttcttactccactaaactataaagaaaataattacttagaaactccattttaaataatcatttcctagaaattcttaaatatatacagaattttaaagaaaacatttcatctgatttagttagcatccacatatcattgaggaattaaagtgtgggacagtcattatt

SEQ ID NO: 115 - protein, 216 aa, Homo sapien
MSFLFSSRSSKTFKPKKNIPEGSHQYELLKHAEATLGSGNLRQAVMLPEGEDLNEWIAVNTVDFFNQINMLYGTITEFCTEASCPVMSAGPRYEYHWADGTNIKKPIKCSAPKYIDYLMTWVQDQLDDETLFPSKIGVPFPKNFMSVAKTILKRLFRVYAHIYHQHFDSVMQLQEGAHLNTSFKHFIFFVQEFNLIDRRELAPLQELIEKLGSKDR

SEQ ID NO: 116 - DNA, 638 bp, Homo sapien
ctctaaagcgccgcagctgccaaaatgtctacaggtccaactgctgccactggcagtaatcgaagacttcagcagacacaaaatcaagtagatgaggtggtggacataatgcgagttaacgtggacaaggttctggaaagagaccagaagctctctgagttagacgaccgtgcagacgcactgcaggcaggcgcttctcaatttgaaacgagcgcagccaagttgaagaggaaatattggtggaagaattgcaagatgtgggcaatcgggattactgttctggttatcttcatcatcatcatcatcgtgtgggttgtctcttcatgaagaaccagcggaactcaaaactgctgttcaagaaacctcttcaagacttttgacttagaacctgctatattatcaagcttacctactgttatctctaaaattttttttgtgttaatgtaaagttgaatttctaggaaacgtgcctttgttttttaatatgcactccaaattagaaggccggccccgtccacattttgcacagtgcctttacagatttacgtatgggctgatgaagaggccttcttaagttccagagtgctataatctagatgtaatgttgtcactaattaattgccattactcccctttag

SEQ ID NO: 117 - protein, 100 aa, Homo sapien
MSTGPTAATGSNRRLQQTQNQVDEVVDIMRVNVDKVLERDQKLSELDDRADALQAGASQFETSAAKLKRKYWWKNCKMWAIGITVLVIFIIIIIVWVVSS

SEQ ID NO: 118 - DNA, 1856 bp, Homo sapien
agccaaaagaggaagggaccggcctcccacgtccacagggacctgacttccacctctctgcccagatttgcttatgtcactgtcgccccgggacggggaggtggggagctgagggcaagtcgcgcccgcccctgaaatcccagccgcctagcgattggctgcaagggtctcggcttggccgcggattaatcacacccgagggcttgaaaggtggctgggagcgccggacacctcagacggacggtggccagggatcaggcagcggctcaggcgaccctgagtgtgcccccaccccgccatggcccggctgctgcaggcgtcctgcctgctttccctgctcctggccggcttcgtctcgcagagccggggacaagagaagtcgaagatggactgccatggtggcataagtggcaccatttacgagtacggagccctcaccattgatggggaggagtacatccccttcaagcagtatgctggcaaatacgtcctctttgtcaacgtggccagctactgaggcctgacgggccagtacattgaactgaatgcactacaggaagagcttgcaccattcggtctggtcattctgggctttccctgcaaccaatttggaaaacaggaaccaggagagaactcagagatccttcctaccctcaagtatgtccgaccaggtggaggctttgtccctaatttccagctctttgagaaaggggatgtcaatggagagaaagagcagaaattctacactttcctaaagaactcctgtcctcccacctcggagctcctgggtacatctgaccgcctcttctgggaacccatgaaggttcacgacatccgctggaactttgagaagttcctggtggggccagatggtatacccatcatgcgctggcaccaccggaccacggtcagcaacgtcaagatggacatcctgtcctacatgaggcggcaggcagccctgggggtcaagaggaagtaactgaaggccgtctcatcccatgtccaccatgtaggggagggactttgttcaggaagaaatccgtgtctccaaccacactatctacccatcacagacccctttcctatcactcaaggccccagcctggcacaaatggatgcatacagttctgtgtactgccaggcatgtgggtgtgggtgcaatgtgggtgtttacacacatgcctacaggtatgcgtgattgtgtgtgtgtgcatgggtgtacagccacgtgtctacctatgtgtctttctgggaatgtgtaccatctgtgtgcctgcagctgtgtagtgctggacagtgacaaccctttctctccagttctccactccaatgataatagttcacttatacctaaacccaaaggaaaaaccagctctaggtccaattgttctgctctaactgatacctcaaccttggggccagcatctcccactgcctccaaatattagtaactatgactgacgtccccagaagtttctgggtctaccacactccccaaccccccactcctacttcctgaagggccctcccaaggctacatccccaccccacagttctccctgagagagatcaacctccctgagatcaaccaaggcagatgtgacagcaagggccacggaccccatggcaggggtggcgtcttcatgagggaggggcccaaagcccttgtgggcggacctcccctgagcctgtctgaggggccagcccttagtgcattcaggctaaggcccctgggcagggatgccacccctgctccttcggaggacgtgccctcacccctcactggtccactggcttgagactcaccccgtctgcccagtaaaagcctttctgcagcaaaaaaaaaaaaaaaaaaa

SEQ ID NO: 119 - protein, 226 aa, Homo sapien
  unsure 73: unknown amino acid
MARLLQASCLLSLLLAGFVSQSRGQEKSKMDCHGGISGTIYEYGALTIDGEEYIPFKQYAGKYVLFVNVASYXGLTGQYIELNALQEELAPFGLVILGFPCNQFGKQEPGENSEILPTLKYVRPGGGFVPNFQLFEKGDVNGEKEQKFYTFLKNSCPPTSELLGTSDRLFWEPMKVHDIRWNFEKFLVGPDGIPIMRWHHRTTVSNVKMDILSYMRRQAALGVKRK

SEQ ID NO: 120 - DNA, 5047 bp, Homo sapien
ccgttgctgtcgccgttgctgtcgggggcgctgtgcgctgaggaaggcgcgggcgagccggagcagaagaaggagggagggagccagccgctgcagccaccaccgccaccatgtcctaccaaggcaagaagaacatcccgcggatcacgagtgaccgtctccttatcaagggaggcagaatcgtcaatgatgatcagtccttttatgctgatatttacatggaagatggcttaataaaacaaattggagacaatctgattgttcctggaggagtgaagaccattgaagccaatgggaagatggtgatccctggaggcatcgatgtccatactcacttccagatgccatataagggaatgaccacagtagatgacttcttccaagggacaaaggcggccttagcaggtggcaccaccatgatcattgaccatgtggtgcctgagcctgagtccagcctgactgaggcctatgagaaatggagagagtgggctgatgggaagagttgctgtgactatgccctgcatgtggacatcacccactggaatgacagcgtcaagcaggaagtgcagaacctcatcaaggacaaaggggttaactccttcatggtttatatggcttataaggatttgtatcaagtatctaacacagagctctatgagatcttcacctgcctgggagagctgggggccattgctcaagttcatgctgagaatggggatatcattgcccaggagcaaacccgcatgttggaaatggggataactggcccagaaggccatgtactgagcaggccagaagagctggaagctgaggctgtgttccgtgccatcaccattgccagccaaaccaattgccctctctacgtcacaaaggtcatgagcaagagtgcagctgacctcatctcacaagccaggaaaaaaggaaatgtagtctttggtgagcccatcactgccagcctcggcatagatggaacccattattggagcaagaactgggccaaggcggctgcatttgtgacatccccacccctgagccctgacccaactactccggactacatcaactccttgctggccagcggggatctgcagctatctgggagtgcccactgcaccttcagcactgcccagaaagcaattgggaaggacaacttcacagccattcctgagggcaccaatggtgtggaggagcggatgtctgtcatctgggacaaggctgtggccacagggaaaatggacgaaaaccagttcgtggctgtgacaagcacaaacgctgccaagatcttcaacctgtatccccgcaagggaagaatatctgtgggttctgacagcgacctcgtcatctgggatccagatgctgtgaagatcgtctctgccaagaaccaccagtctgcggcagagtacaacatctttgaagggatggagctgcgcggggctcctctggttgtcatctgccagggcaagatcatgctggaagatggcaacctgcacgtgacccagggggctggccgcttcataccctgcagcccgttctccgactatgtctacaagcgcattaaagcacggaggaagatggcagacctgcatgccgtcccaaggggcatgtacgatgggcctgtgtttgacctgaccaccacccccaaaggtggcacccccgcaggctctgctcggggctctcctactcggccgaacccacctgtgaggaatcttcatcagtcgggatttagcctgtcaggcacccaagtggatgagggggttcgctcagccagcaagcgcatcgtggcccccccaggcggccgttctaatatcacatctctgagttaagcaagccttcctcaaagagaggggcagaagcaagaagagattgttttgaagccaaaatggtacaccgatatttaagaaggaaagcgaatccaaacggttgtgatctaaagaatcaataagcctcaagccttatgtttctccaatgttacgctcgcttgcctagctttacgaatattgctttgttttctgtttatgcatagccttgatttgtttgactcccctccccccatttacatgcatgcaatcagacaggccactaaggtaaaagagtctgctctatcatagtgttgagagcgtgtgtagtgctgcatcttatgacaaggggacagacaagctgggacgtcagggaaatgaacaaaagggacgcaggttatttggggtgagtgggtggtgggagcctggagcaaggtggagggtgcagaggggctggggtagggcatgtaggagggaggtgggtgggtcaggtgagtggaaggggtgttgtatattgtgttgatgacgtacgttatttccatggaagatagccgctgtggcagctgtcacatcaccacagctccctagggtctgccgagaaggcaggcagtctttgggttctgttctttgtcacgtcccctacaagtaaattttgtttctttgaacgtttattaaaatgccaagacccaaccatttcttccacctgcttgattgtgccagtgtttgctcaggcctctttcttagtgttgctttcaaatccttctctttcctgggttgggaaggccaggcagggacagagcaaatgacacttctcttcctcttgccctccctgcctctttggtgctcttaaaagccagcagctgagaacatagcacaggcccacgtggtgagggcacccacagcttaaagacgcttccttctaaacacggcgaggtcacctctcactcttctgtctttgcaaaccgagaagagtggcatgcttctggcatcccaagtcaggattttagctcagatgaggcagaatgaagggcctctcttacaggcagtttgtgtttgattctctcgatcctggcacatccatgataaataggagtttttgaaagttggttttattaggtgttccctaatttttaccgtaataggtcatctcagcttatatgaaagtcaagtggggaactgggaaagccaaagtcagtcttgagcagagggagcacattttgtggacctggttccacctttccattccaaaccacctgtttccccttccattagcagaaactctgggggaactttgtgtctcagtcctagaatctccccaagtgagtggaagtgacatgatgcagtcttcctcatggggcacctgaaagaaattagtgtgggtgcttcgatctaccttgtctgtcagagttgaatatctctttccctatcatgctgcttctgaaaattcagttttggagcaagtcctgtgagcaagataagaatctatagaaccaagatgctcattttcagaagaaatatgttcaacctgggatcagacttccatgctctggggaatccaagtggtagcacctgtaaccctgtgtactaagtgctttgaagagaagagcaggcctcagacaccttttaattgcttaggagaaaccattgtctctgactgcaggtttgaataagttgaagaccagagaaaagtacacactgggctacaaaggaatttggagatagccaaggaacaggatttcccctagcaagctaccttctgttcaaatcatgaaaaaagactatttccccttagaatagggaagcttgctattttaaagctcttgtagtgcttttcttttaagggagatgtagtaaaagggaaaatgtagctcttagtttacacttcaaagatgtgggggtctttcagagaactaagaataacagttttatgtgcagagagagtttgccagatctgaagcatatacctcattgactaggctgttactttgggataggttgcagtaccagccacagccagcagatagaggaaaagacacacataaactcgcttctgagcgtccacttctgcactctctgctctgctgttactcagcccctgagtctgactcatctctgcacaacctctctgtgccatgaagataagtcttccatggccaaatcggtcatccgcactgcccttgggacttccgaagtgaaccattccaccagaacctttgattctgcacaagatttccttgctctgggaacaacccccaaatgcccttgggaggaacaacatgagctcaggaagcctctctttcttcacttaccattactaactctccaagcatagaaatccctgggaattgcgagaataactcccactattttaaaatttatattcagatttgtttcgtttcataagacacatcaaacaggcctatacaaaaggtttaggaaaagaaaacaatggtgagtcccggccctcttcgaattcactggcacctcatgcaagtgtaggaaggcacgctggatcgtctatctgattccaaagctgtcctttgccatctcatcccttggcctgccccccaaccctgaggatgcccctgccatccccccaacctcctcatattgcctctgaacccagatggcaatccatcccggttctctctgagggccacgggcttgggtagtggaaagggtgtttgggaaattgttaaatcagttacccgtagtagagctatttcttgtacttctaagttttctagaagtggaaggattgtagtcatcctgaaaatgggtttacttcaaaatccctcagccttgttcttcacgactgtctatactgagagtgtcatgtttccacaaagggctgacacctgagcctggattttcactcatccctgagaagccctttccagtagggtgggcaattcccaacttccttgccacaagcttcccaggctttctcccctggaaaactccagcttgagtcccagatacactcatgggctgccctgggcagccagcattcattgtaagttccctctttgaaaactggtgtgtgggtgttcagttctgtgtctggtgggtatggacagacagtaatctcctgtgatctgtgctagctgtgaggcagctctggaacgtgaagagctgtttggtttgaaccgtgaacaaaactgtgttttgagtttagctgacattaaagaaaaaagttcatcacgtgactgttaatgtaaacctggttattaaaataactatgaaattac

SEQ ID NO: 121 - protein, 570 aa, Homo sapien
MSYQGKKNIPRITSDRLLIKGGRIVNDDQSFYADIYMEDGLIKQIGDNLIVPGGVKTIEANGKMVIPGGIDVHTHFQMPYKGMTTVDDFFQGTKAALAGGTTMIIDHVVPEPESSLTEAYEKWREWADGKSCCDYALHVDITHWNDSVKQEVQNLIKDKGVNSFMVYMAYKDLYQVSNTELYEIFTCLGELGAIAQVHAENGDIIAQEQTRMLEMGITGPEGHVLSRPEELEAEAVFRAITIASQTNCPLYVTKVMSKSAADLISQARKKGNVVFGEPITASLGIDGTHYWSKNWAKAAAFVTSPPLSPDPTTPDYINSLLASGDLQLSGSAHCTFSTAQKAIGKDNFTAIPEGTNGVEERMSVIWDKAVATGKMDENQFVAVTSTNAAKIFNLYPRKGRISVGSDSDLVIWDPDAVKIVSAKNHQSAAEYNIFEGMELRGAPLVVICQGKIMLEDGNLHVTQGAGRFIPCSPFSDYVYKRIKARRKMADLHAVPRGMYDGPVFDLTTTPKGGTPAGSARGSPTRPNPPVRNLHQSGFSLSGTQVDEGVRSASKRIVAPPGGRSNITSLS

SEQ ID NO: 122 - DNA, 1842 bp, Homo sapien
cgatcagatcgatctaagatggcgactgtcgaaccggaaaccacccctactcctaatcccccgactacagaagaggagaaaacggaatctaatcaggaggttgctaacccagaacactatattaaacatcccctacagaacagatgggcactctggttttttaaaaatgataaaagcaaaacttggcaagcaaacctgcggctgatctccaagtttgatactgttgaagacttttgggctctgtacaaccatatccagttgtctagtaatttaatgcctggctgtgactactcactttttaaggatggtattgagcctatgtgggaagatgagaaaaacaaacggggaggacgatggctaattacattgaacaaacagcagagacgaagtgacctcgatcgcttttggctagagacacttctgtgccttattggagaatcttttgatgactacagtgatgatgtatgtggcgctgttgttaatgttagagctaaaggtgataagatagcaatatggactactgaatgtgaaaacagagaagctgttacacatatagggagggtatacaaggaaaggttaggacttcctccaaagatagtgattggttatcagtcccacgcagacacagctactaagagcggctccaccactaaaaataggtttgttgtttaagaagacaccttctgagtattctcataggagactgcgtcaagcaatcgagatttgggagctgaaccaaagcctcttcaaaaagcagagtggactgcatttaaatttgatttccatcttaatgttactcagatataagagaagtctcattcgcctttgtcttgtacttctgtgttcattttttttttttttttttggctagagtttccactatcccaatcaaagaattacagtacacatccccagaatccataaatgtgttcctggcccactctgtaatagttcagtagaattaccattaattacatacagattttacctatccacaatagtcagaaaacaacttggcatttctatactttacaggaaaaaaaattctgttgttccattttatgcagaagcatattttgctggtttgaaagattatgatgcatacagttttctagcaattttctttgtttctttttacagcattgtctttgctgtactcttgctgatggctgctagattttaatttatttgtttccctacttgataatattagtgattctgatttcagtttttcatttgttttgcttaaattttttttttttttttcctcatgtaacattggtgaaggatccaggaatatgacacaaaggtggaataaacattaattttgtgcattctttggtaattttttttgttttttgtaactacaaagctttgctacaaatttatgcatttcattcaaatcagtgatctatgtttgtgtgatttcctaaacataattgtggattataaaaaatgtaacatcataattacattcctaactagaattagtatgtctgtttttgtatctttatgctgtattttaacactttgtattacttaggttattttgctttggttaaaaatggctcaagtagaaaagcagtcccattcatattaagacagtgtacaaaactgtaaataaaatgtgtacagtgaattgtcttttagacaactagatttgtccttttatttctccatctttatagaaggaatttgtacttcttattgcaggcaagtctctatattatgtcctcttttgtggtgtcttccatgtgaacagcataagtttggagcactagtttgattattatgtttattacaatttttaataaattgaataggtagtatcatatatatgga

SEQ ID NO: 123 - protein, 217 aa, Homo sapien [sequence omitted]

SEQ ID NO: 124 - DNA, 3664 bp, Homo sapien
atggggcctgaaactgtctgggtctgagctggggagcggaagccacttgtccctctccctccccaggacttctgtgactcctgggccacagaggtccaaccagggtaagggcctggggataccccctgcctggcccccttgcccaaactggcaggggggccaggctgggcagcagcccctctttcacctcaactatggatctcctgccccccaagcccaagtacaatccactccggaatgagtctctgtcatcgctggaggaaggggcttctgggtccacccccccggaggagctgccttccccatcagcttcatccctggggcccatcctgcctcctctgcctggggacgatagtcccactaccctgtgctccttcttcccccggatgagcaacctgaggctggccaacccggctggggggcgcccagggtctaagggggagccaggaagggcagctgatgatggggaggggatcgatggggcagccatgccagagtcaggccccctacccctcctccaggacatgaacaagctgagtggaggcggcgggcgcaggactcgggtggaagggggccagcttgggggcgaggagtggacccgccacgggagctttgtcaataagcccacgcggggctggctgcatcccaacgacaaagtcatgggacccggggtttcctacttggttcggtacatgggttgtgtggaggtcctccagtcaatgcgtgccctggacttcaacacccggactcaggtcaccagggaggccatcagtctggtgtgtgaggctgtgccgggtgctaagggggcgacaaggaggagaaagccctgtagccgcccgctcagctctatcctggggaggagtaacctgaaatttgctggaatgccaatcactctcaccgtctccaccagcagcctcaacctcatggccgcagactgcaaacagatcatcgccaaccaccacatgcaatctatctcatttgcatccggcggggatccggacacagccgagtatgtcgcctatgttgccaaagaccctgtgaatcagagagcctgccacattctggagtgtcccgaagggcttgcccaggatgtcatcagcaccattggccaggccttcgagttgcgcttcaaacaatacctcaggaacccacccaaactggtcacccctcatgacaggatggctggctttgatggctcagcatgggatgaggaggaggaagagccacctgaccatcagtactataatgacttcccggggaaggaaccccccttggggggggtggtagacatgaggcttcgggaaggagccgctccaggggctgctcgacccactgcacccaatgcccagacccccagccacttgggagctacattgcctgtaggacagcctgttgggggagatccagaagtccgcaaacagatgccacctccaccaccctgtccaggcagagagctttttgatgatccctcctatgtcaacgtccagaacctagacaaggcccggcaagcagtgggtggtgctgggccccccaatcctgctatcaatggcagtgcaccccgggacctgtttgacatgaagcccttcgaagatgctcttcgggtgcctccacctccccagtcggtgtccatggctgagcagctccgaggggagccctggttccatgggaagctgagccggcgggaggctgaggcactgctgcagctcaatggggacttcttggtacgggagagcacgaccacacctggccagtatgtgctcactggcttgcagagtgggcagcctaagcatttgctactggtggaccctgagggtgtggttcggactaaggatcaccgctttgaaagtgtcagtcaccttatcagctaccacatggacaatcacttgcccatcatctctgcgggcagcgaactgtgtctacagcaacctgtggagcggaaactgtgatctgccctagcgctctcttccagaagatgccctccaatcctttccaccctattccctaactctcgggacctcgtttgggagtgttctgtgggcttggccttgtgtcagagctgggagtagcatggactctgggtttcatatccagctgagtgagagggtttgagtcaaaagcctgggtgagaatcctgcctctccccaaacattaatcaccaaagtattaatgtacagagtggcccctcacctgggcctttcctgtgccaacctgatgccccttccccaagaaggtgagtgcttgtcatggaaaatgtcctgtggtgacaggcccagtggaacagtcacccttctgggcaagggggaacaaatcacacctctgggcttcagggtatcccagacccctctcaacacccgccccccccatgtttaaactttgtgcctttgaccatctcttaggtctaatgatattttatgcaaacagttcttggacccctgaattcttcaatgacagggatgccaacaccttcttggcttctgggacctgtgttcttgctgagcaccctctccggtttgggttgggataacagaggcaggagtggcagctgtcccctctccctggggatatgcaacccttagagattgccccagagccccactcccggccaggcgggagatggacccctcccttgctcagtgcctcctggccggggcccctcaccccaaggggtctgtatatacatttcataaggcctgccctcccatgttgcatgcctatgtactctgcgccaaagtgcagcccttcctcctgaagcctctgccctgcctccctttctgggagggcggggtgggggtgactgaatttgggcctcttgtacagttaactctcccaggtggattttgtggaggtgagaaaaggggcattgagactataaagcagtagacaatccccacataccatctgtagagttggaactgcattcttttaaagttttatatgcatatattttagggctgctagacttactttcctattttcttttccattgcttattcttgagcacaaaatgataatcaattattacatttatacatcacctttttgacttttccaagcccttttacagctcttggcattttcctcgcctaggcctgtgaggtaactgggatcgcaccttttataccagagacctgaggcagatgaaatttatttccatctaggactagaaaaacttgggtctcttaccgcgagactgagaggcagaagtcagcccgaatgcctgtcagtttcatggaggggaaacgcaaaacctgcagttcctgagtaccttctacaggcccggcccagcctaggcccggggtggccacaccacagcaagccggccccccctcttttggccttgtggataagggagagttgaccgttttcatcctggcctccttttgctgtttggatgtttccacgggtctcacttataccaaagggaaaactcttcattaaagtccgtatttcttctaaaaaaaaaaaaaaaaaaatacatttatacatcacctttttgacttttccaagcccttttacagctcttggcattttcctcgcctaggcctgtgaggtaactgggatcgcaccttttataccagagacctgaggcagatgaaatttatttccatctaggactagaaaaacttgggtctcttaccgcgagactgagaggcagaagtcagcc

SEQ ID NO: 125 - protein, 583 aa, Homo sapien
MDLLPPKPKYNPLRNESLSSLEEGASGSTPPEELPSPSASSLGPILPPLPGDDSPTTLCSFFPRMSNLRLANPAGGRPGSKGEPGRAADDGEGIDGAAMPESGPLPLLQDMNKLSGGGGRRTRVEGGQLGGEEWTRHGSFVNKPTRGWLHPNDKVMGPGVSYLVRYMGCVEVLQSMRALDFNTRTQVTREAISLVCEAVPGAKGATRRRKPCSRPLSSILGRSNLKFAGMPITLTVSTSSLNLMAADCKQIIANHHMQSISFASGGDPDTAEYVAYVAKDPVNQRACHILECPEGLAQDVISTIGQAFELRFKQYLRNPPKLVTPHDRMAGFDGSAWDEEEEEPPDHQYYNDFPGKEPPLGGVVDMRLREGAAPGAARPTAPNAQTPSHLGATLPVGQPVGGDPEVRKQMPPPPPCPGRELFDDPSYVNVQNLDKARQAVGGAGPPNPAINGSAPRDLFDMKPFEDALRVPPPPQSVSMAEQLRGEPWFHGKLSRREAEALLQLNGDFLVRESTTTPGQYVLTGLQSGQPKHLLLVDPEGVVRTKDHRFESVSHLISYHMDNHLPIISAGSELCLQQPVERKL

SEQ ID NO: 126 - DNA, 1797 bp, Homo sapien
ccagcagggagctgggagctgggggaaacgacgccaggaaagctatcgcgccagagagggcgacgggggctcgggaagcctgacagggcttttgcgcacagctgccggctggctgctacccgcccgcgccagcccccgagaacgcgcgaccaggcacccagtccggtcaccgcagcggagagctcgccgctcgctgcagcgaggcccggagcggccccgcagggaccctccccagaccgcctgggccgcccggatgtgcactaaaatggaacagcccttctaccacgacgactcatacacagctacgggatacggccgggcccctggtggcctctctctacacgactacaaactcctgaaaccgagcctggcggtcaacctggccgacccctaccggagtctcaaagcgcctggggctcgcggacccggcccagagggcggcggtggcggcagctacttttctggtcagggctcggacaccggcgcgtctctcaagctcgcctcttcggagctggaacgcctgattgtccccaacagcaacggcgtgatcacgacgacgcctacacccccgggacagtacttttacccccgcgggggtggcagcggtggaggtgcagggggcgcagggggcggcgtcaccgaggagcaggagggcttcgccgacggctttgtcaaagccctggacgatctgcacaagatgaaccacgtgacaccccccaacgtgtccctgggcgctaccggggggcccccggctgggcccgggggcgtctacgccggcccggagccacctcccgtttacaccaacctcagcagctactccccagcctctgcgtcctcgggaggcgccggggctgccgtcgggaccgggagctcgtacccgacgaccaccatcagctacctcccacacgcgccgcccttcgccggtggccacccggcgcagctgggcttgggccgcggcgcctccaccttcaaggaggaaccgcagaccgtgccggaggcgcgcagccgggacgccacgccgccggtgtcccccatcaacatggaagaccaagagcgcatcaaagtggagcgcaagcggctgcggaaccggctggcggccaccaagtgccggaagcggaagctggagcgcatcgcgcgcctggaggacaaggtgaagacgctcaaggccgagaacgcggggctgtcgagtaccgccggcctcctccgggagcaggtggcccagctcaaacagaaggtcatgacccacgtcagcaacggctgtcagctgctgcttggggtcaagggacacgccttctgaacgtcccctgcccctttacggacaccccctcgcttggacggctgggcacacgcctcccactggggtccagggagcaggcggtgggcacccaccctgggacctaggggcgccgcaaaccacactggactccggcccccctaccctgcgcccagtccttccacctcgacgtttacaagcccccccttccacttttttttgtatgttttttttctgctggaaacagactcgattcatattgaatataatatatttgtgtatttaacagggaggggaagagggggcgatcgcggcggagctggccccgccgcctggtactcaagcccgcggggacattgggaaggggacccccgccccctgccctcccctctctgcaccgtactgtggaaaagaaacacgcacttagtctctaaagagtttattttaagacgtgtttgtgtttgtgtgtgtttgttctttttattgaatctatttaagtaaaaaaaaaattggttctttattaa

SEQ ID NO: 127 - protein, 347 aa, Homo sapien
MCTKMEQPFYHDDSYTATGYGRAPGGLSLHDYKLLKPSLAVNLADPYRSLKAPGARGPGPEGGGGGSYFSGQGSDTGASLKLASSELERLIVPNSNGVITTTPTPPGQYFYPRGGGSGGGAGGAGGGVTEEQEGFADGFVKALDDLHKMNHVTPPNVSLGATGGPPAGPGGVYAGPEPPPVYTNLSSYSPASASSGGAGAAVGTGSSYPTTTISYLPHAPPFAGGHPAQLGLGRGASTFKEEPQTVPEARSRDATPPVSPINMEDQERIKVERKRLRNRLAATKCRKRKLERIARLEDKVKTLKAENAGLSSTAGLLREQVAQLKQKVMTHVSNGCQLLLGVKGHAF

SEQ ID NO: 128 - DNA, 3117 bp, Homo sapien
attcgaaccccgtcgcgcccctttgtgcgtcacgggtggcgggcgcgggaaggggatttggattgttgcgcctctgctctgaagaaagtgctgtctggctccaactccagttctttcccctgagcagcgcctggaacctaacccttcccactctgtcaccttctcgatcccgccggcgctttagagccgcagtccagtcttggatccttcagagcctcagccactagctgcgatgcatgtgatcaagcgagatggccgccaagaacgagtcatgtttgacaaaattacatctcgaatccagaagctttgttatggactcaatatggattttgttgatcctgctcagatcaccatgaaagtaatccaaggcttgtacagtggggtcaccacagtggaactagatactttggctgctgaaacagctgcaaccttgactactaagcaccctgactatgctatcctggcagccaggatcgctgtctctaacttgcacaaagaaacaaagaaagtgttcagtgatgtgatggaagacctctataactacataaatccacataatggcaaacactctcccatggtggccaagtcaacattggatattgttctggccaataaagatcgcctgaattctgctattatctatgaccgagatttctcttacaattacttcggctttaagacgctagagcggtcttatttgttgaagatcaatggaaaagtggctgaaagaccacaacatatgttgatgagagtatctgttgggatccacaaagaagacattgatgcagcaattgaaacatataatcttctttctgagaggtggtttactcatgcttcgcccactctcttcaatgctggtaccaaccgcccacaactttctagctgttttcttctgagtatgaaagatgacagcattgaaggcatttatgacactctaaagcaatgtgcattgatttctaagtctgctggaggaattggtgttgctgtgagttgtattcgggctactggcagctacattgctgggactaatggcaattccaatggccttgtaccgatgctgagagtatataacaacacagctagatatgtggatcaaggtgggaacaagcgtcctggggcatttgctatttacctggagccttggcatttagacatctttgaattccttgatttaaagaagaacacaggaaaggaagagcagcgtgccagagatcttttctttgctctttggattccggatctcttcatgaaacgagtggagactaatcaggactggtctttgatgtgtccaaatgagtgtcctggtctggatgaggtttggggagaggaatttgagaaactatatgcaagttatgagaaacaaggtcgtgtccgcaaagttgtaaaagctcagcagctttggtatgccatcattgagtctcagacggaaacaggcaccccgtatatgctctacaaagattcctgtaatcgaaagagcaaccagcagaacctgggaaccatcaaatgcagcaacctgtgcacagaaatagtggagtacaccagcaaagatgaggttgctgtttgtaatttggcttccctggccctgaatatgtatgtcacatcagaacacacatacgactttaagaagttggctgaagtcactaaagtcgttgtccgaaacttgaataaaattattgatataaactactatcctgtaccagaggcatgcctatcaaataaacgccatcgccccattggaattggggtacaaggtctggcagatgcttttatcctgatgagatacccttttgagagtgcagaagcccagttactgaataagcagatctttgaaactatttattatggtgctctggaagccagctgtgaccttgccaaggagcagggcccatacgaaacctatgagggctctccagttagcaaaggaattcttcagtatgatatgtggaatgttactcctacagacctatgggactggaaggttctcaaggagaagattgcaaagtatggtataagaaacagtttacttattgccccgatgcctacagcttccactgctcagatcctggggaataatgagtccattgaaccttacaccagcaacatctatactcgcagagtcttgtcaggagaatttcagattgtaaatcctcacttattgaaagatcttaccgagcggggcctatggcatgaagagatgaaaaaccagattattgcatgcaatggctctattcagagcataccagaaattcctgatgacctgaagcaactttataaaactgtgtgggaaatctctcagaaaactgttctcaagatggcagctgagagaggtgctttcattgatcaaagccaatctttgaacatccacattgctgagcctaactatggcaaactcactagtatgcacttctacggctggaagcagggtttgaagactgggatgtattatttaaggacaagaccagcagctaatccaatccagttcactctaaataaggagaagctaaaagataaagaaaaggtatcaaaagaggaagaagagaaggagaggaacacagcagccatggtgtgctctttggagaatagagatgaatgtctgatgtgtggatcctgaggaaagacttggaagagaccagcatgtcttcagtagccaaactacttcttgagcatagataggtatagtgggtttgcttgaggtggtaaggctttgctggaccctgttgcaggcaaaaggagtaattgatttaaagtactgttaatgatgttaatgatttttttttaaactcatatattgggattttcaccaaaataatgcttttgaaaaaaagaaaaaaaaaacggatatattgagaatcaaagtagaagttttaggaatgcaaaataagtcatcttgcatacagggagtggttaagtaaggtttcatcacccatttagcatgcttttctgaagacttcagttttgttaaggagatttagttttactgctttgactggtgggtctctagaagcaaaactgagtgataactcatgagaagtactgataggacctttatctggatatggtcctataggttattctgaaataaagataaacatttctaagtgaaaaaaaaaaaaaaaa

SEQ ID NO: 129 - protein, 792 aa, Homo sapien
MHVIKRDGRQERVMFDKITSRIQKLCYGLNMDFVDPAQITMKVIQGLYSGVTTVELDTLAAETAATLTTKHPDYAILAARIAVSNLHKETKKVFSDVMEDLYNYINPHNGKHSPMVAKSTLDIVLANKDRLNSAIIYDRDFSYNYFGFKTLERSYLLKINGKVAERPQHMLMRVSVGIHKEDIDAAIETYNLLSERWFTHASPTLFNAGTNRPQLSSCFLLSMKDDSIEGIYDTLKQCALISKSAGGIGVAVSCIRATGSYIAGTNGNSNGLVPMLRVYNNTARYVDQGGNKRPGAFAIYLEPWHLDIFEFLDLKKNTGKEEQRARDLFFALWIPDLFMKRVETNQDWSLMCPNECPGLDEVWGEEFEKLYASYEKQGRVRKVVKAQQLWYAIIESQTETGTPYMLYKDSCNRKSNQQNLGTIKCSNLCTEIVEYTSKDEVAVCNLASLALNMYVTSEHTYDFKKLAEVTKVVVRNLNKIIDINYYPVPEACLSNKRHRPIGIGVQGLADAFILMRYPFESAEAQLLNKQIFETIYYGALEASCDLAKEQGPYETYEGSPVSKGILQYDMWNVTPTDLWDWKVLKEKIAKYGIRNSLLIAPMPTASTAQILGNNESIEPYTSNIYTRRVLSGEFQIVNPHLLKDLTERGLWHEEMKNQIIACNGSIQSIPEIPDDLKQLYKTVWEISQKTVLKMAAERGAFIDQSQSLNIHIAEPNYGKLTSMHFYGWKQGLKTGMYYLRTRPAANPIQFTLNKEKLKDKEKVSKEEEEKERNTAAMVCSLENRDECLMCGS

SEQ ID NO: 130 - DNA, 1499 bp, Mus musculus
tatttacttcctgcgggtgcacaggctgtggtcgtctatctccctgttgttcttcccatcggcgaagatggccctggagacggtgccgaaggacctgcggcatctgcgggcctgtttgctgtgttcgctggtcaagactatagaccagtttgaatatgatggttgtgacaattgtgatgcatatctacaaatgaagggtaaccgagagatggtatatgactgcactagctcttcctttgatggaatcattgcgatgatgagtccagaggacagctgggtctccaagtggcagcgagtcagtaactttaagccaggtgtatatgcggtgtcagtcactggtcgcctgccccaaggaatcgtgcgggagctgaaaagtcgaggagtggcctacaaatccagagacacagctataaagacctagcaagatgcaaggctgccagcatctttgctctccacctcctgcctctgcttatttcttgttctggaactaaatgaacagaacttcaaatacttcctaccctccaattcagactcagctgactgttgagagagcagcacatcattttatcattttatcttctttggactacaggtggggtgggagggatttgggttggtggattaacagatggaattgaggagagagtaggatgctgattttcctacccgtggcccaggtctgtgccttccccatgccaaggactctaggtcaaatgtcaataaatatgaacctcgagaaagttctgaaggccatgacacctgccttgcctccctcttccattctcttaggcacagtaatagcttatttgccctataagaaccttcccagagcagcagaggcccttctactccctcttgactgtctcagcctctgggattgcagcctttgtagtgtgcttccttgcttcctatcagagggtgctgatccagaggctcagtaaccccatcaacttggtggccctggtgtctcacacttgtatccttctgccctcgagacctggcacagcagtatcccttgaagaaatcctgaggctttgtagagtgctccttgaccatgtttaataattcttccctcccctgcttgtctattttcttctcttcacggctcttcctataccttaggccagtctcaagcactcactggagacccttgggccttgggcgaccattgagtcctagtctcccttgtttgtgcccctgtaggaggtaggtccttttctcctccggcctagtaggggaccttgggtaacatcccatttttcggccaaggtgagttgttttaggataaaaaaatttaccacaaattctcatttaaatttccacagaaatcctgttcgtatccccattttgatttccctaagttccttgttctccctctaaaaagagaatgattgcaccctgcctgtttacctcaggattgttgtgattgtagaaacgaagctatgtgaaaattatataagtattataaaggtgaaatacttttgctctcaaaaaaaaaa

SEQ ID NO: 131 - protein, 117 aa, Mus musculus
MALETVPKDLRHLRACLLCSLVKTIDQFEYDGCDNCDAYLQMKGNREMVYDCTSSSFDGIIAMMSPEDSWVSKWQRVSNFKPGVYAVSVTGRLPQGIVRELKSRGVAYKSRDTAIKT

SEQ ID NO: 132 - DNA, 1838 bp, Homo sapien
aattcttcacctcttttctcagctccctgcagcatgggtgctgggccctccttgctgctcgccgccctcctgctgcttctctccggcgacggcgccgtgcgctgcgacacacctgccaactgcacctatcttgacctgctgggcacctgggtcttccaggtgggctccagcggttcccagcgcgatgtcaactgctcggttatgggaccacaagaaaaaaaagtagtggtgtaccttcagaagctggatacagcatatgatgaccttggcaattctggccatttcaccatcatttacaaccaaggctttgagattgtgttgaatgactacaagtggtttgccttttttaagtataaagaagagggcagcaaggtgaccacttactgcaacgagacaatgactgggtgggtgcatgatgtgttgggccggaactgggcttgtttcaccggaaagaaggtgggaactgcctctgagaatgtgtatgtcaacacagcacaccttaagaattctcaggaaaagtattctaataggctctacaagtatgatcacaactttgtgaaagctatcaatgccattcagaagtcttggactgcaactacatacatggaatatgagactcttaccctgggagatatgattaggagaagtggtggccacagtcgaaaaatcccaaggcccaaacctgcaccactgactgctgaaatacagcaaaagattttgcatttgccaacatcttgggactggagaaatgttcatggtatcaattttgtcagtcctgttcgaaaccaagcatcctgtggcagctgctactcatttgcttctatgggtatgctagaagcgagaatccgtatactaaccaacaattctcagaccccaatcctaagccctcaggaggttgtgtcttgtagccagtatgctcaaggctgtgaaggcggcttcccataccttattgcaggaaagtacgcccaagattttgggctggtggaagaagcttgcttcccctacacaggcactgattctccatgcaaaatgaaggaagactgctttcgttattactcctctgagtaccactatgtaggaggtttctatggaggctgcaatgaagccctgatgaagcttgagttggtccatcatgggcccatggcagttgcttttgaagtatatgatgacttcctccactacaaaaaggggatctaccaccacactggtctaagagaccctttcaacccctttgagctgactaatcatgctgttctgcttgtgggctatggcactgactcagcctctgggatggattactggattgttaaaaacagctggggcaccggctggggtgagaatggctacttccggatccgcagaggaactgatgagtgtgcaattgagagcatagcagtggcagccacaccaattcctaaattgtagggtatgccttccagtatttcataatgatctgcatcagttgtaaaggggaattggtatattcacagactgtagactttcagcagcaatctcagaagcttacaaatagatttccatgaagatatttgtcttcagaattaaaactgcccttaattttaatatacctttcaatcggccactggccatttttttctaagtattcaattaagtgggaattttctggaagatggtcagctatgaagtaatagagtttgcttaatcatttgtaattcaaacatgctatattttttaaaatcaatgtgaaaacatagacttatttttaaattgtaccaatcacaagaaaataatggcaataattatcaaaacttttaaaatagatgctcatatttttaaaataaagttttaaaaataactgc

SEQ ID NO: 133 - protein, 463 aa, Homo sapien
MGAGPSLLLAALLLLLSGDGAVRCDTPANCTYLDLLGTWVFQVGSSGSQRDVNCSVMGPQEKKVVVYLQKLDTAYDDLGNSGHFTIIYNQGFEIVLNDYKWFAFFKYKEEGSKVTTYCNETMTGWVHDVLGRNWACFTGKKVGTASENVYVNTAHLKNSQEKYSNRLYKYDHNFVKAINAIQKSWTATTYMEYETLTLGDMIRRSGGHSRKIPRPKPAPLTAEIQQKILHLPTSWDWRNVHGINFVSPVRNQASCGSCYSFASMGMLEARIRILTNNSQTPILSPQEVVSCSQYAQGCEGGFPYLIAGKYAQDFGLVEEACFPYTGTDSPCKMKEDCFRYYSSEYHYVGGFYGGCNEALMKLELVHHGPMAVAFEVYDDFLHYKKGIYHHTGLRDPFNPFELTNHAVLLVGYGTDSASGMDYWIVKNSWGTGWGENGYFRIRRGTDECAIESIAVAATPIPKL

SEQ ID NO: 134 - DNA, 1591 bp, Homo sapien
tctgggcgcgcgcgacgtcagtttgagttctgtgttctccccgcccgtgtcccgcccgacccgcgcccgcgatgctggcgctgcgctgcggctcccgctggctcggcctgctctccgtcccgcgctccgtgccgctgcgcctccccgcggcccgcgcctgcagcaagggctccggcgacccgtcctcttcctcctcctccgggaacccgctcgtgtacctggacgtggacgccaacgggaagccgctcggccgcgtggtgctggagctgaaggcagatgtcgtcccaaagacagctgagaacttcagagccctgtgcactggtgagaagggcttcggctacaaaggctccaccttccacagggtgatcccttccttcatgtgccaggcgggcgacttcaccaaccacaatggcacaggcgggaagtccatctacggaagccgctttcctgacgagaactttacactgaagcacgtggggccaggtgtcctgtccatggctaatgctggtcctaacaccaacggctcccagttcttcatctgcaccataaagacagactggttggatggcaagcatgttgtgttcggtcacgtcaaagagggcatggacgtcgtgaagaaaatagaatctttcggctctaagagtgggaggacatccaagaagattgtcatcacagactgtggccagttgagctaatctgtggccagggtgctggcatggtggcagctgcaaatgtccatgcacccaggtggccgcgttgggctgtcagccaaggtgcctgaaacgatacgtgtgcccactccactgtcacagtgtgcctgaggaaggctgctagggatgttagacctcggccaggacccaccacattgcttcctaatacccacccttcctcacgacctcatttctgggcatctttgtggacatgatgtcacccaccccttgtcaagcattgcctgtgattgcccagcccagattcatctgtgccttggacatggtgatggtgatgggttgccatccaagtgaaagtcttttccttgaccaagggggacagtcagttttgcaaaaggactctaatacctgtttaatattgtcttcctaattgggataatttaattaacaagattgactagaagtgaaactgcaacactaacttccccgtgctgtggtgtgacctgagttggtgacacaggccacagaccccagagcttggcttttgaaacacaactcagggcttttgtgaaggttcccccgctgagatctttcctcctggttactgtgaagcctgttggtttgctgctgtcgtttttgaggagggcccatgggggtaggagcagttgaacctgggaacaaacctcacttgagctgtgcctagacaatgtgaattcctgtgttgctaacagaagtggcctgtaagctcctgtgctccggagggaagcatttcctggtaggctttgatttttctgtgtgttaaagaaattcaatctactcatgatgtgttatgcataaaacatttctggaacatggatttgtgttcaccttaaatgtgaaaataaatcctattttctatggaaaaaaaaaaaaaaaaaaaaaaa

SEQ ID NO: 135 - protein, 207 aa, Homo sapien
MLALRCGSRWLGLLSVPRSVPLRLPAARACSKGSGDPSSSSSSGNPLVYLDVDANGKPLGRVVLELKADVVPKTAENFRALCTGEKGFGYKGSTFHRVIPSFMCQAGDFTNHNGTGGKSIYGSRFPDENFTLKHVGPGVLSMANAGPNTNGSQFFICTIKTDWLDGKHVVFGHVKEGMDVVKKIESFGSKSGRTSKKIVITDCGQLS

SEQ ID NO: 136 - DNA, 1591 bp, Homo sapien; identical to SEQ ID NO: 134

SEQ ID NO: 137 - protein, 207 aa, Homo sapien; identical to SEQ ID NO: 135

SEQ ID NO: 138 - DNA, 6861 bp, Homo sapien
gcctgggaggtgcgtcagatccgagctcgccatccagtttcctctccactagtccccccagttggagatctgggaccaacaaggcaccatggcgcagaagggccaactcagtgacgatgagaagttcctctttgtggacaaaaacttcatcaacagcccagtggcccaggctgactgggccgccaagagactcgtctgggtcccctcggagaagcagggcttcgaggcagccagcattaaggaggagaagggggatgaggtggttgtggagctggtggagaatggcaagaaggtcacggttgggaaagatgacatccagaagatgaacccacccaagttctccaaggtggaggacatggcggagctgacgtgcctcaacgaagcctccgtgctacacaacctgagggagcggtacttctcagggctaatatatacgtactctggcctcttctgcgtggtggtcaacccctataaacacctgcccatctactcggagaagatcgtcgacatgtacaagggcaagaagaggcacgagatgccgcctcacatctacgccatcgcagacacggcctaccggagcatgcttcaagatcgggaggaccagtccattctatgcacaggcgagtctggagccgggaaaaccgaaaacaccaagaaggtcattcagtacctggccgtggtggcctcctcccacaagggcaagaaagacacaagtatcacgggagagctggaaaagcagcttctacaagcaaacccgattctggaggctttcggcaacgccaaaacagtgaagaacgacaactcctcacgattcggcaaattcatccgcatcaacttcgacgtcacgggttacatcgtgggagccaacattgagacctatctgctagaaaaatcacgggcaattcgccaagccagagacgagaggacattccacatcttttactacatgattgctggagccaaggagaagatgagaagtgacttgcttttggagggcttcaacaactacaccttcctctccaatggctttgtgcccatcccagcagcccaggatgatgagatgttccaggaaaccgtggaggccatggcaatcatgggtttcagcgaggaggagcagctatccatattgaaggtggtatcatcggtcctgcagcttggaaatatcgtcttcaagaaggaaagaaacacagaccaggcgtccatgccagataacacagctgctcagaaagtttgccacctcatgggaattaatgtgacagatttcaccagatccatcctcactcctcgtatcaaggttgggcgagatgtggtacagaaagctcagacaaaagaacaggctgactttgctgtagaggctttggccaaggcaacatatgagcgccttttccgctggatactcacccgcgtgaacaaagccctggacaagacccatcggcaaggggcttccttcctggggatcctggatatagctggatttgagatctttgaggtgaactccttcgagcagctgtgcatcaactacaccaacgagaagctgcagcagctcttcaaccacaccatgttcatcctggagcaggaggagtaccagcgcgagggcatcgagtggaacttcatcgactttgggctggacctacagccctgcatcgagctcatcgagcgaccgaacaaccctccaggtgtgctggccctgctggacgaggaatgctggttccccaaagccacggacaagtctttcgtggagaagctgtgcacggagcagggcagccaccccaagttccagaagcccaagcagctcaaggacaagactgagttctccatcatccattatgctgggaaggtggactataatgcgagtgcctggctgaccaagaatatggacccgctgaatgacaacgtgacttccctgctcaatgcctcctccgacaagtttgtggccgacctgtggaaggacgtggaccgcatcgtgggcctggaccagatggccaagatgacggagagctcgctgcccagcgcctccaagaccaagaagggcatgttccgcacagtggggcagctgtacaaggagcagctgggcaagctgatgaccacgctacgcaacaccacgcccaacttcgtgcgctgcatcatccccaaccacgagaagaggtccggcaagctggatgcgttcctggtgctggagcagctgcggtgcaatggggtgctggaaggcattcgcatctgccggcagggcttccccaaccggatcgtcttccaggagttccgccaacgctacgagatcctggcggcgaatgccatccccaaaggcttcatggacgggaagcaggcctgcattctcatgatcaaagccctggaacttgaccccaacttatacaggatagggcagagcaaaatcttcttccgaactggcgtcctggcccacctagaggaggagcgagatttgaagatcaccgatgtcatcatggccttccaggcgatgtgtcgtggctacttggccagaaaggcttttgccaagaggcagcagcagctgaccgccatgaaggtgattcagaggaactgcgccgcctacctcaagctgcggaactggcagtggtggaggcttttcaccaaagtgaagccactgctgcaggtgacacggcaggaggaggagatgcaggccaaggaggatgaactgcagaagaccaaggagcggcagcagaaggcagagaatgagcttaaggagctggaacagaagcactcgcagctgaccgaggagaagaacctgctacaggaacagctgcaggcagagacagagctgtatgcagaggctgaggagatgcgggtgcggctggcggccaagaagcaggagctggaggagatactgcatgagatggaggcccgcctggaggaggaggaagacaggggccagcagctacaggctgaaaggaagaagatggcccagcagatgctggaccttgaagaacagctggaggaggaggaagctgccaggcagaagctgcaacttgagaaggtcacggctgaggccaagatcaagaaactggaggatgagatcctggtcatggatgatcagaacaataaactatcaaaagaacgaaaactccttgaggagaggattagtgacttaacgacaaatcttgcagaagaggaagaaaaggccaagaatcttaccaagctgaaaaacaagcatgaatctatgatttcagaactggaagtgcggctaaagaaggaagagaagagccgacaggagctggagaagctgaaacggaagctggagggtgatgccagcgacttccacgagcagatcgctgacctccaggcgcagatcgcagagctcaagatgcagctggccaagaaggaggaggagctgcaggcggccctggccaggcttgacgatgaaatcgctcagaagaacaatgccctgaagaagatccgggagctggagggccacatctcagacctccaggaggacctggactcagagcgggccgccaggaacaaggctgaaaagcagaagcgagacctcggcgaggagctggaggccctaaagacagagctggaagacacactggacagcacagccactcagcaggagctcagggccaagagggagcaggaggtgacggtgctgaagaaggccctggatgaagagacgcggtcccatgaggctcaggtccaggagatgaggcagaaacacgcacaggcggtggaggagctcacagagcagcttgagcagttcaagagggccaaggcgaacctagacaagaataagcagacgctggagaaagagaacgcagacctggccggggagctgcgggtcctgggccaggccaagcaggaggtggaacataagaagaagaagctggaggcgcaggtgcaggagctgcagtccaagtgcagcgatggggagcgggcccgggcggagctcaatgacaaagtccacaagctgcagaatgaagttgagagcgtcacagggatgcttaacgaggccgaggggaaggccattaagctggccaaggacgtggcgtccctcagttcccagctccaggacacccaggagctgcttcaagaagaaacccggcagaagctcaacgtgtctacgaagctgcgccagctggaggaggagcggaacagcctgcaagaccagctggacgaggagatggaggccaagcagaacctggagcgccacatctccactctcaacatccagctctccgactcgaagaagaagctgcaggactttgccagcaccgtggaagctctggaagaggggaagaagaggttccagaaggagatcgagaacctcacccagcagtacgaggagaaggcggccgcttatgataaactggaaaagaccaagaacaggcttcagcaggagctggacgacctggttgttgatttggacaaccagcggcaactcgtgtccaacctggaaaagaagcagaggaaatttgatcagttgttagccgaggagaaaaacatctcttccaaatacgcggatgagagggacagagctgaggcagaagccagggagaaggaaaccaaggccctgtccctggctcgggcccttgaagaggccttggaagccaaagaggaactcgagcggaccaacaaaatgctcaaagccgaaatggaagacctggtcagctccaaggatgacgtgggcaagaacgtccatgagctggagaagtccaagcgggccctggagacccagatggaggagatgaagacgcagctggaagagctggaggacgagctgcaagccacggaggacgccaaactgcggctggaagtcaacatgcaggcgctcaagggccagttcgaaagggatctccaagcccgggacgagcagaatgaggagaagaggaggcaactgcagagacagcttcacgagtatgagacggaactggaagacgagcgaaagcaacgtgccctggcagctgcagcaaagaagaagctggaaggggacctgaaagacctggagcttcaggccgactctgccatcaaggggagggaggaagccatcaagcagctacgcaaactgcaggctcagatgaaggactttcaaagagagctggaagatgcccgtgcctccagagatgagatctttgccacagccaaagagaatgagaagaaagccaagagcttggaagcagacctcatgcagctacaagaggacctcgccgccgctgagagggctcgcaaacaagcggacctcgagaaggaggaactggcagaggagctggccagtagcctgtcgggaaggaacgcactccaggacgagaagcgccgcctggaggcccggatcgcccagctggaggaggagctggaggaggagcagggcaacatggaggccatgagcgaccgggtccgcaaagccacacagcaggccgagcagctcagcaacgagctggccacagagcgcagcacggcccagaagaatgagagtgcccggcagcagctcgagcggcagaacaaggagctccggagcaagctccacgagatggagggggccgtcaagtccaagttcaagtccaccatcgcggcgctggaggccaagattgcacagctggaggagcaggtcgagcaggaggccagagagaaacaggcggccaccaagtcgctgaagcagaaagacaagaagctgaaggaaatcttgctgcaggtggaggacgagcgcaagatggccgagcagtacaaggagcaggcagagaaaggcaatgccagggtcaagcagctcaagaggcagctggaggaggcagaggaggagtcccagcgcatcaacgccaaccgcaggaagctgcagcgggagctggatgaggccacggagagcaacgaggccatgggccgcgaggtgaacgcactcaagagcaagctcaggcgaggaaacgagacctctttcgttccttctagaaggtctggaggacgtagagttattgaaaatgcagatggttctgaggaggaaacggacactcgagacgcagacttcaatggaaccaaggccagtgaataagcaactttctacagttttgcaccacggcaagaaaaccaaaaaccaaaacaaacaaacaaaaaaaacccaacaacaacccagaacaaagcaaaacccagcagactgtacttagcattgtctaaatccattctcaaattccaaatatcacagacacccctcacacaaggaatataaaaaccaccaccctccagcctgggcaacgtagtaaaacctcatctatacaagaatttaaaaataagctgggcgtggtggtacacacctgtggtcccagctactagggaggctgagccaggaagaacgctccagcccaggacttcgaggctgcaatgagctataattgcatcattgcactccagcctgggcaacagagaccctgtctcaaccaccaccaccaccaccacccctactacccctgtattcaaggtaaaaattgaagtttgtatgatgtaagagatgagaaaaacccaacaggaaacacagacacatcctccagttctatcaatggattgtgcagacactgagtttttagaaaaacatatccacggtaaccggtccctggcaattctgtttacatgaaatggggagaaagtcaccgaaatgggtgccgccggcccccactcccaattcattccctaacctgcaaacctttccaacttctcacgtcaggcctttgagaattctttccccctctcctggtttccacacctcagacacgcacagttcaccaagtgccttctgtagtcacatgaattgaaaaggagacgctgctcccacggaggggagcaggaatgctgcactgtttacaccctgactgtgcttaaaaacactttcactaataaatggttataaatcac

SEQ ID NO: 139 - protein, 1972 aa, Homo sapien
MAQKGQLSDDEKFLFVDKNFINSPVAQADWAAKRLVWVPSEKQGFEAASIKEEKGDEVVVELVENGKKVTVGKDDIQKMNPPKFSKVEDMAELTCLNEASVLHNLRERYFSGLIYTYSGLFCVVVNPYKHLPIYSEKIVDMYKGKKRHEMPPHIYAIADTAYRSMLQDREDQSILCTGESGAGKTENTKKVIQYLAVVASSHKGKKDTSITGELEKQLLQANPILEAFGNAKTVKNDNSSRFGKFIRINFDVTGYIVGANIETYLLEKSRAIRQARDERTFHIFYYMIAGAKEKMRSDLLLEGFNNYTFLSNGFVPIPAAQDDEMFQETVEAMAIMGFSEEEQLSILKVVSSVLQLGNIVFKKERNTDQASMPDNTAAQKVCHLMGINVTDFTRSILTPRIKVGRDVVQKAQTKEQADFAVEALAKATYERLFRWILTRVNKALDKTHRQGASFLGILDIAGFEIFEVNSFEQLCINYTNEKLQQLFNHTMFILEQEEYQREGIEWNFIDFGLDLQPCIELIERPNNPPGVLALLDEECWFPKATDKSFVEKLCTEQGSHPKFQKPKQLKDKTEFSIIHYAGKVDYNASAWLTKNMDPLNDNVTSLLNASSDKFVADLWKDVDRIVGLDQMAKMTESSLPSASKTKKGMFRTVGQLYKEQLGKLMTTLRNTTPNFVRCIIPNHEKRSGKLDAFLVLEQLRCNGVLEGIRICRQGFPNRIVFQEFRQRYEILAANAIPKGFMDGKQACILMIKALELDPNLYRIGQSKIFFRTGVLAHLEEERDLKITDVIMAFQAMCRGYLARKAFAKRQQQLTAMKVIQRNCAAYLKLRNWQWWRLFTKVKPLLQVTRQEEEMQAKEDELQKTKERQQKAENELKELEQKHSQLTEEKNLLQEQLQAETELYAEAEEMRVRLAAKKQELEEILHEMEARLEEEEDRGQQLQAERKKMAQQMLDLEEQLEEEEAARQKLQLEKVTAEAKIKKLEDEILVMDDQNNKLSKERKLLEERISDLTTNLAEEEEKAKNLTKLKNKHESMISELEVRLKKEEKSRQELEKLKRKLEGDASDFHEQIADLQAQIAELKMQLAKKEEELQAALARLDDEIAQKNNALKKIRELEGHISDLQEDLDSERAARNKAEKQKRDLGEELEALKTELEDTLDSTATQQELRAKREQEVTVLKKALDEETRSHEAQVQEMRQKHAQAVEELTEQLEQFKRAKANLDKNKQTLEKENADLAGELRVLGQAKQEVEHKKKKLEAQVQELQSKCSDGERARAELNDKVHKLQNEVESVTGMLNEAEGKAIKLAKDVASLSSQLQDTQELLQEETRQKLNVSTKLRQLEEERNSLQDQLDEEMEAKQNLERHISTLNIQLSDSKKKLQDFASTVEALEEGKKRFQKEIENLTQQYEEKAAAYDKLEKTKNRLQQELDDLVVDLDNQRQLVSNLEKKQRKFDQLLAEEKNISSKYADERDRAEAEAREKETKALSLARALEEALEAKEELERTNKMLKAEMEDLVSSKDDVGKNVHELEKSKRALETQMEEMKTQLEELEDELQATEDAKLRLEVNMQALKGQFERDLQARDEQNEEKRRQLQRQLHEYETELEDERKQRALAAAAKKKLEGDLKDLELQADSAIKGREEAIKQLRKLQAQMKDFQRELEDARASRDEIFATAKENEKKAKSLEADLMQLQEDLAAAERARKQADLEKEELAEELASSLSGRNALQDEKRRLEARIAQLEEELEEEQGNMEAMSDRVRKATQQAEQLSNELATERSTAQKNESARQQLERQNKELRSKLHEMEGAVKSKFKSTIAALEAKIAQLEEQVEQEAREKQAATKSLKQKDKKLKEILLQVEDERKMAEQYKEQAEKGNARVKQLKRQLEEAEEESQRINANRRKLQRELDEATESNEAMGREVNALKSKLRRGNETSFVPSRRSGGRRVIENADGSEEETDTRDADFNGTKASE

SEQ ID NO: 140 - DNA, 3408 bp, Homo sapien
cctttggacgcgcgcctcggttccgaacgcagcggacggcgcctcaggcagcgcggcggacagcccgtcctccggcgcgccgcgagcctcggaggaccctagcgacggtcgtggcgtaagaccggggggacgcggcggtagcggcggccgttgcgattgattgcgctggttgcctgcggcgtccacttccttggccgcccttgctacactggctgattgttgtgcagccggcgccatgtctgtgagcgagatcttcgtggagctgcagggctttttggctgccgagcaggacatccgagaggaaatcagaaaagttgtacagagtttagaacaaacagctcgagagattttaactctactgcaaggggtccatcagggtgctgggtttcaggacattccaaagaggtgtttgaaagctcgagaacattttggtacagtaaaaacacatctaacatctttgaagaccaaatttcctgctgaacagtattacagatttcatgagcactggaggtttgtgttgcagcgcttggtcttcttggcagcatttgttgtgtatttggaaacagaaacactagtgactcgagaagcagttacagaaattcttggcattgagccagatcgggagaaaggatttcatctggatgtagaagattatctctcaggagttctaattcttgccagtgaactgtcgaggctgtctgtcaacagcgtgactgctggagactactcccgacccctccacatctccaccttcatcaatgagctggattccggttttcgccttctcaacctgaaaaatgactccctgaggaagcgctacgacggattgaaatatgacgtgaagaaagtagaggaagtggtctatgatctctccatccggggctttaataaggagacggcagcagcttgtgttgaaaaataggaggctctccttgctcctggccttgctgacctcagcggttgccaggaaggggtgagcacagagtgcctcttacggtagttaggatgctcagttgctaaacactgcgctttattttcttaaccagttgtggtgtgagtatcagaattgaaacacttttttgggggtaaaaaatatagcctttacatggacagaattttttttgttgtttcagtgaatatgcctgtaattcagtgtatttcagttccgtcagaaagtgtaaatgttagtttcttggtaaagtccttttcttgcttaccttgactgttgatgtactgattgagaagttcattgtctcgtttgtgattcttccagatgtgatgcttgatattttctatatgcgagttagccatccacacccaggcatagcctggatacagtataaaaatagataattaaaaagatggttgccaagcaaggaaaacttattttatattttcccttccttattttaagcattgtgagtaaatcagatgttgaattcttttgccaagggaattatagctgcaggttctctctcactgccatcaaactgtaaaagattaaactgcgaagtcaagctcaacagattattttggaaagtttttgtattaagggatttagtaacatcattttgttttccaccaggcagggagtagggcttagtgttttaaaacacctctgctttctgatgttgccttaatattctgctattgcagcaattaaaaattgtcttcatgtacatttggaactaacacgtgatgtgatatattcctaaactatgaaacctttttcctagtagtcagctagatcatttgttctgggagtataaagccacccacgtaagttaataagcaaaatcctgactattatgttgttagagaaaaatgctttgctttgtctggaagaaagataaaatagtgaattataaataagtcaggccgggcgtggtggctcacacctgtaatcccagcacactgggaggccgaggcagggggactgcttgagctcaggagttcgagaccagcctgggcaacaaagtgagactccatctctatataaaaacaaaaaccacgaaagcacacacaaaataaatcagtgggatttggtaatgtgttttagagtaagaaatttcaggttgttggtgactatcccaacagtcatgttttaaatgtacagtttggggcaagtcatgtaaatactgttggtggtcttccccacacgccccaattttcaggtagtactaagagtatgtgccaggaaactcttgctattgaattgagatgattaaaatggtgacttaatccgtagttattttgcacccactgaaaggaaagtgctttccagaataatatgaagtatctaaaagtgtcaccttttcttgcctgatcaacaatttgggcttcctgtttgtacaaggggccatttggcatacctttcacagcttttatcaggccaagttaaaggctgactacattttttcatcatgaggaaagcagttgaaatgaggcatgagttactgtgcattgggattttagaacaattttcttgtgacagctctttttgtgaagttaggttcttaaaagtgcccatgatggtcacttaaaatgtgcagtaatagcactgccaggatcaagcatgaaaggcttttaaattagatcatcccacagacaatacgtttgataatagttttttcttttaacctctttaagtattgattctgcttgagaatattgaagtacttgccagaagttgtggatttcagttttaacaaatgctattaaagtggagaagcacactctggtcttggaattccatttgaggatttagaagtgtcatgtttataactattcagttgtgtttgttgctggcttgttgtaaagcaataaaatttttttggtctttttgtaagtgagtgtgctgctgtaagaaatctcccatgtgcataacaaattctgaatattttttgaggctaaagaagaccggggtgacaagcagatactgctgtgtaatggttacactaaccaaaagacaccagccactcagagttctatactgtaaagcgcagataacatttgtgtgttataccttgattggggaattaaaagtcatttaactgaagatgttgagaaacctgggctctggttttagtataccggaattacttttttccaattttagaaaatcaagcaggttagagaaaatagagatgaattaggggacactgtcttatggattcatttataagaagagaaccagccatatacacttggggagatttgccacatcttaaacttgaataatagtatgagtaatgcttaagggagtttaatagagaaggaaagctttggcagtgttttgagaacttaagtggctaaagagatgagacaaacatgcaggtcgctactggcatagtttcataattgtgtactcggaaattaaagtttgcttgtttcttggtctggattaaa

SEQ ID NO: 141 - protein, 228 aa, Homo sapien
MSVSEIFVELQGFLAAEQDIREEIRKVVQSLEQTAREILTLLQGVHQGAGFQDIPKRCLKAREHFGTVKTHLTSLKTKFPAEQYYRFHEHWRFVLQRLVFLAAFVVYLETETLVTREAVTEILGIEPDREKGFHLDVEDYLSGVLILASELSRLSVNSVTAGDYSRPLHISTFINELDSGFRLLNLKNDSLRKRYDGLKYDVKKVEEVVYDLSIRGFNKETAAACVEK

SEQ ID NO: 142 - DNA, 1203 bp, Homo sapien
actcgtgcgtgaggcgagaggagccggagacgagaccagaggccgaactcgggttctgacaagatggccgggctgccccgcaggatcatcaaggaaacccagcgtttgctggcagaaccagttcctggcatcaaagccgaaccagatgagagcaacgcccgttattttcatgtggtcattgctggccctcaggattccccctttgagggagggacttttaaacttgaactattccttccagaagaatacccaatggcagcccctaaagtacgtttcatgaccaaaatttatcatcctaatgtagacaagttgggaagaatatgtttagatattttgaaagataagtggtccccagcactgcagatccgcacagttctgctatcgatccaggccttgttaagtgctcccaatccagatgatccattagcaaatgatgtagcggagcagtggaagaccaacgaagcccaagccatagaaacagctagagcatggactaggctatatgccatgaataatatttaaattgatacgatcatcaagtgtgcatcacttctcctgttctgccaagacttcctcctctttgtttgcatttaatggacacagtcttagaaacattacagaataaaaaagcccagacatcttcagtcctttggtgattaaatgcacattagcaaatctatgtcttgtcctgattcactgtcataaagcatgagcagaggctagaagtatcatctggattgttgtgaaacgtttaaaagcagtggcccctccctgcttttattcatttcccccatcctggtttaagtataaagcactgtgaatgaaggtagttgtcaggttagctgcaggggtgtgggtgtttttattttattttattttattttatttttgaggggggaggtagtttaattttatgggctcctttcccccttttttggtgatctaattgcattggttaaaagcagctaaccaggtctttagaatatgctctagccaagtctaactttatttagacgctgtagatggacaagcttgattgttggaaccaaaatgggaacattaaacaaacatcacagccctcactaataacattgctgtcaagtgtagattccccccttcaaaaaaagcttgtgaccattttgtatggcttgtctggaaacttctgtaaatcttatgttttagtaaaatattttttgttattct

SEQ ID NO: 143 - protein, 152 aa, Homo sapien
MAGLPRRIIKETQRLLAEPVPGIKAEPDESNARYFHVVIAGPQDSPFEGGTFKLELFLPEEYPMAAPKVRFMTKIYHPNVDKLGRICLDILKDKWSPALQIRTVLLSIQALLSAPNPDDPLANDVAEQWKTNEAQAIETARAWTRLYAMNNI

SEQ ID NO: 144 - DNA, 809 bp, Homo sapien
atgcctgtcttcatcttgaaagaaaagctccaggtcccttctccagccacccagccccaagatggtgatgctgctgctgctgctttccgcactggctggcctcttcggtgcggcagagggacaagcatttcatcttgggaagtgccccaatcctccggtgcaggagaattttgacgtgaataagtatctcggaagatggtacgaaattgagaagatcccaacaacctttgagaatggacgctgcatccaggccaactactcactaatggaaaacggaaagatcaaagtgttaaaccaggagttgagagctgatggaactgtgaatcaaatcgaaggtgaagccaccccagttaacctcacagagcctgccaagctggaagttaagttttcctggtttatgccatcggcaccgtactggatcctggccaccgactatgagaactatgccctcgtgtattcctgtacctgcatcatccaactttttcacgtggattttgcttggatcttggcaagaaaccctaatctccctccagaaacagtggactctctaaaaaatatcctgacttctaataacattgatgtcaagaaaatgacggtcacagaccaggtgaactgccccaagctctcgtaaccaggttctacagggaggctgcacccactccatgttacttctgcttcgctttcccctaccccacccccccccataaagacaaaccaatcaaccacgacaaaggaagttgacctaaacatgtaaccatgccctaccctgttaccttgctagctgcaaaataaacttgttgctgacctgc

SEQ ID NO: 145 - protein, 189 aa, Homo sapien
MVMLLLLLSALAGLFGAAEGQAFHLGKCPNPPVQENFDVNKYLGRWYEIEKIPTTFENGRCIQANYSLMENGKIKVLNQELRADGTVNQIEGEATPVNLTEPAKLEVKFSWFMPSAPYWILATDYENYALVYSCTCIIQLFHVDFAWILARNPNLPPETVDSLKNILTSNNIDVKKMTVTDQVNCPKLS

SEQ ID NO: 146 - DNA, 2407 bp, Homo sapien
ggcacgaggcggagggggctcagtccgcagccgccgccgccaccgccgcgcctcggcctcggtgcaggcagcggccgccgccgccgagacagctgcgcgggcgagcatccccacgcagcaccttggaagttgttttcaaccatatccagcctttgccgaatacatcctatctgccacacatccagcgtgaggtccctccagctacaaggtgggcaccatggcggagaagtttgactgccactactgcagggatcccttgcaggggaagaagtatgtgcaaaaggatggccaccactgctgcctgaaatgctttgacaagttctgtgccaacacctgtgtggaatgccgcaagcccatcggtgcggactccaaggaggtgcactataagaaccgcttctggcatgacacctgcttccgctgtgccaagtgccttcaccccttggccaatgagacctttgtggccaaggacaacaagatcctgtgcaacaagtgcaccactcgggaggactcccccaagtgcaaggggtgcttcaaggccattgtggcaggagatcaaaacgtggagtacaaggggaccgtctggcacaaagactgcttcacctgtagtaactgcaagcaagtcatcgggactggaagcttcttccctaaaggggaggacttctactgcgtgacttgccatgagaccaagtttgccaagcattgcgtgaagtgcaacaaggccatcacatctggaggaatcacttaccaggatcagccctggcatgccgattgctttgtgtgtgttacctgctctaagaagctggctgggcagcgtttcaccgctgtggaggaccagtattactgcgtggattgctacaagaactttgtggccaagaagtgtgctggatgcaagaaccccatcactgggtttggtaaaggctccagtgtggtggcctatgaaggacaatcctggcacgactactgcttccactgcaaaaaatgctccgtgaatctggccaacaagcgctttgttttccaccaggagcaagtgtattgtcccgactgtgccaaaaagctgtaaactgacaggggctcctgtcctgtaaaatggcatttgaatctcgttctttgtgtccttactttctgccctataccatcaataggggaagagtggtccttcccttctttaaagttctccttccgtcttttctcccattttacagtattactcaaataagggcacacagtgatcatattagcatttagcaaaaagcaaccctgcagcaaagtgaatttctgtccggctgcaatttaaaaatgaaaacttaggtagattgactcttctgcatgtttctcatagagcagaaaagtgctaatcatttagccacttagtgatgtaagcaagaagcataggagataaaacccccactgagatgcctctcatgcctcagctgggacccaccgtgtagacacacgacatgcaagagttgcagcggctgctccaactcactgctcaccctcttctgtgagcaggaaaagaaccctactgacatgcatggtttaacttcctcatcagaactctgcccttccttctgttcttttgtgctttcaaataactaacacgaacttccagaaaattaacatttgaacttagctgtaattctaaactgacctttccccgtactaacgtttggtttccccgtgtggcatgttttctgagcgttcctactttaaagcatggaacatgcaggtgatttgggaagtgtagaaagacctgagaaaacgagcctgtttcagaggaacatcgtcacaacgaatacttctggaagcttaacaaaactaaccctgctgtcctttttattgtttttaattaatatttttgttttaattgatagcaaaatagtttatgggtttggaaacttgcatgaaaatattttagccccctcagatgttcctgcagtgctgaaattcatcctacggaagtaaccgcaaaactctagagggggagttgagcaggcgccagggctgtcatcaacatggatatgacatttcacaacagtgactagttgaatcccttgtaacgtagtagttgtctgctctttgtccatgtgttaatgaggactgcaaagtcccttctgttgtgattcctaggacttttcctcaagaggaaatctggatttccacctaccgcttacctgaaatgcaggatcacctacttactgtattctacattattatatgacatagtataatgagacaatatcaaaagtaaacatgtaatgacaatacatactaacattcttgtaggagtggttagagaagctgatgcctcatttctacattctgtcattagctattatcatctaacgtttcagtgtatccttacagaaataaagcagcatatgaaaaaaaaaaaaaaaaaaaaaaa

SEQ ID NO: 147 - protein, 280 aa, Homo sapien
MAEKFDCHYCRDPLQGKKYVQKDGHHCCLKCFDKFCANTCVECRKPIGADSKEVHYKNRFWHDTCFRCAKCLHPLANETFVAKDNKILCNKCTTREDSPKCKGCFKAIVAGDQNVEYKGTVWHKDCFTCSNCKQVIGTGSFFPKGEDFYCVTCHETKFAKHCVKCNKAITSGGITYQDQPWHADCFVCVTCSKKLAGQRFTAVEDQYYCVDCYKNFVAKKCAGCKNPITGFGKGSSVVAYEGQSWHDYCFHCKKCSVNLANKRFVFHQEQVYCPDCAKKL

SEQ ID NO: 148 - DNA, 2455 bp, Homo sapien
gaattcgggcgggcttcttcgctgccgacgtacgacgagtggccgggctcttgcgtctggtaacgcgctgtctctaacgccagcgccgtctcgcgcgcactgcgcacagaccacccgcagacgcccggcagtccgcaggcccaaacgcgcacgcgaccccgctctccgcaccgtacccggccgcctcggcatggcgccccgcagcgcccggcgacccctgctgctgctactgcctgttgctgctgctcggcctcatgcattgtcgtcagcagccatgtttatggtgaaaaatggcaacgggaccgcgtgcataatggccaacttctctgctgccttctcagtgaactacgacaccaagagtggccccaagaacatgacctttgacctgccatcagatgccacagtggtgctcaaccgcagctcctgtggaaaagagaacacttctgaccccagtctcgtgattgcttttggaagaggacatacactcactctcaatttcacgagaaatgcaacacgttacagcgttcagctcatgagttttgtttataacttgtcagacacacaccttttccccaatgcgagctccaaagaaatcaagactgtggaatctataactgacatcagggcagatatagataaaaaatacagatgtgttagtggcacccaggtccacatgaacaacgtgaccgtaacgctccatgatgccaccatccaggcgtacctttccaacagcagcttcagcaggggagagacacgctgtgaacaagacaggccttccccaaccacagcgccccctgcgccacccagcccctcgccctcacccgtgcccaagagcccctctgtggacaagtacaacgtgagcggcaccaacgggacctgcctgctggccagcatggggctgcagctgaacctcacctatgagaggaaggacaacacgacggtgacaaggcttctcaacatcaaccccaacaagacctcggccagcgggagctgcggcgcccacctggtgactctggagctgcacagcgagggcaccaccgtcctgctcttccagttcgggatgaatgcaagttctagccggtttttcctacaaggaatccagttgaatacaattcttcctgacgccagagaccctgcctttaaagctgccaacggctccctgcgagcgctgcaggccacagtcggcaattcctacaagtgcaacgcggaggagcacgtccgtgtcacgaaggcgttttcagtcaatatattcaaagtgtgggtccaggctttcaaggtggaaggtggccagtttggctctgtggaggagtgtctgctggacgagaacagcacgctgatccccatcgctgtgggtggtgccctggcggggctggtcctcatcgtcctcatcgcctacctcgtcggcaggaagaggagtcacgcaggctaccagactatctagcctggtgcacgcaggcacagcagctgcaggggcctctgttcctttctctgggcttagggtcctgtcgaaggggaggcacactttctgcaaacgtttctcaaatctgcttcatccaatgtgaagttcatcttgcagcatttactatgcacaacagagtaactatcgaaatgacggtgttaattttgctaactgggttaaatattttgctaactggttaaacattaatatttaccaaagtaggattttgagggtgggggtgctctctctgagggggtgggggtgccgctgtctctgaggggtgggggtgccgctgtctgaggggtgggggtgccgctctctctgagggggtgggggtgccgctttctctgagggggtgggggtgccgctctctctgagggggtgggggtgctgctctctccgaggggtggaatgccgctgtctctgaggggtgggggtgccgctctaaattggctccatatcattgagtttagggttctggtgtttggtttcttcattctttactgcactcagatttaagccttacaaagggaaacctctggccgtcacacgtaggacgcatgaaggtcactcgtgtgaggctgacatgctcacacattacaacagtagagagggaaaatcctaagacagaggaactccagagatgagtgtctggagcggcttcagttcagctttaaaggccaggacgcgcgacacgtggctggcggcctcgttccagtggcggcacgtccttggcgtctctaatgtctgcagctcaagggctggcacttttttaaatataaaaatggtgttatttttatttttttttgtaaagtgatttttggtcttctgttgacattcgggtgatcctgttctgcgctgtgtacaatgtgagatcggtgcgttctcctgatgttttgccgtggcttggggattgtacacgggaccagctcacgtaatgcattgcctgtaacaatgtaataaaaagcctctttctttcaaaaaaaccccgaattc

SEQ ID NO: 149 - protein, 416 aa, Homo sapien
MAPRSARRPLLLLLPVAAARPHALSSAAMFMVKNGNGTACIMANFSAAFSVNYDTKSGPKNMTFDLPSDATVVLNRSSCGKENTSDPSLVIAFGRGHTLTLNFTRNATRYSVQLMSFVYNLSDTHLFPNASSKEIKTVESITDIRADIDKKYRCVSGTQVHMNNVTVTLHDATIQAYLSNSSFSRGETRCEQDRPSPTTAPPAPPSPSPSPVPKSPSVDKYNVSGTNGTCLLASMGLQLNLTYERKDNTTVTRLLNINPNKTSASGSCGAHLVTLELHSEGTTVLLFQFGMNASSSRFFLQGIQLNTILPDARDPAFKAANGSLRALQATVGNSYKCNAEEHVRVTKAFSVNIFKVWVQAFKVEGGQFGSVEECLLDENSTLIPIAVGGALAGLVLIVLIAYLVGRKRSHAGYQTI

SEQ ID NO: 150 - DNA, 2767 bp, Homo sapien
gcggagggtgcgtgcgggccgcggcagccgaacaaaggagcaggggcgccgccgcagggacccgccacccacctcccggggccgcgcagcggcctctcgtctactgccaccatgaccgccaacggcacagccgaggcggtgcagatccagttcggcctcatcaactgcggcaacaagtacctgacggccgaggcgttcgggttcaaggtgaacgcgtccgccagcagcctgaagaagaagcagatctggacgctggagcagccccctgacgaggcgggcagcgcggccgtgtgcctgcgcagccacctgggccgctacctggcggcggacaaggacggcaacgtgacctgcgagcgcgaggtgcccggtcccgactgccgtttcctcatcgtggcgcacgacgacggtcgctggtcgctgcagtccgaggcgcaccggcgctacttcggcggcaccgaggaccgcctgtcctgcttcgcgcagacggtgtcccccgccgagaagtggagcgtgcacatcgccatgcaccctcaggtcaacatctacagtgtcacccgtaagcgctacgcgcacctgagcgcgcggccggccgacgagatcgccgtggaccgcgacgtgccctggggcgtcgactcgctcatcaccctcgccttccaggaccagcgctacagcgtgcagaccgccgaccaccgcttcctgcgccacgacgggcgcctggtggcgcgccccgagccggccactggctacacgctggagttccgctccggcaaggtggccttccgcgactgcgagggccgttacctggcgccgtcggggcccagcggcacgctcaaggcgggcaaggccaccaaggtgggcaaggacgagctctttgctctggagcagagctgcgcccaggtcgtgctgcaggcggccaacgagaggaacgtgtccacgcgccagggtatggacctgtctgccaatcaggacgaggagaccgaccaggagaccttccagctggagatcgaccgcgacaccaaaaagtgtgccttccgtacccacacgggcaagtactggacgctgacggccaccgggggcgtgcagtccaccgcctccagcaagaatgccagctgctactttgacatcgagtggcgtgaccggcgcatcacactgagggcgtccaatggcaagtttgtgacctccaagaagaatgggcagctggccgcctcggtggagacagcaggggactcagagctcttcctcatgaagctcatcaaccgccccatcatcgtgttccgcggggagcatggcttcatcggctgccgcaaggtcacgggcaccctggacgccaaccgctccagctatgacgtcttccagctggagttcaacgatggcgcctacaacatcaaagactccacaggcaaatactggacggtgggcagtgactccgcggtcaccagcagcggcgacactcctgtggacttcttcttcgagttctgcgactataacaaggtggccatcaaggtgggcgggcgctacctgaagggcgaccacgcaggcgtcctgaaggcctcggcggaaaccgtggaccccgcctcgctctgggagtactagggccggcccgtccttccccgcccctgcccacatggcggctcctgccaaccctccctgctaaccccttctccgccaggtgggctccagggcgggaggcaagcccccttgcctttcaaactggaaaccccagagaaaacggtgcccccacctgtcgcccctatggactccccactctcccctccgcccgggttccctactcccctcgggtcagcggctgcggcctggccctgggagggatttcagatgcccctgccctcttgtctgccacggggcgagtctggcacctctttcttctgacctcagacggctctgagccttatttctctggaagcggctaagggacggttgggggctgggagccctgggcgtgtagtgtaactggaatcttttgcctctcccagccacctcctcccagccccccaggagagctgggcacatgtcccaagcctgtcagtggccctccctggtgcactgtccccgaaacccctgcttgggaagggaagctgtcgggagggctaggactgacccttgtggtgtttttttgggtggtggctggaaacagcccctctcccacgtgggagaggctcagcctggctcccttccctggagcggcagggcgtgacggccacagggtctgcccgctgcacgttctgccaaggtggtggtggcgggcgggtaggggtgtgggggccgtcttcctcctgtctctttcctttcaccctagcctgactggaagcagaaaatgaccaaatcagtattttttttaatgaaatattattgctggaggcgtcccaggcaagcctggctgtagtagcgagtgatctggcggggggcgtctcagcaccctccccagggggtgcatctcagccccctctttccgtccttcccgtccagccccagccctgggcctgggctgccgacacctgggccagagcccctgctgtgattggtgctccctgggcctcccgggtggatgaagccaggcgtcgccccctccgggagccctggggtgagccgccggggcccccctgctgccagcctcccccgtccccaacatgcatctcactctgggtgtcttggtcttttattttttgtaagtgtcatttgtataactctaaacgcccatgatagtagcttcaaactggaaatagcgaaataaaataactcagtctgc

SEQ ID NO: 151 - protein, 493 aa, Homo sapien
MTANGTAEAVQIQFGLINCGNKYLTAEAFGFKVNASASSLKKKQIWTLEQPPDEAGSAAVCLRSHLGRYLAADKDGNVTCEREVPGPDCRFLIVAHDDGRWSLQSEAHRRYFGGTEDRLSCFAQTVSPAEKWSVHIAMHPQVNIYSVTRKRYAHLSARPADEIAVDRDVPWGVDSLITLAFQDQRYSVQTADHRFLRHDGRLVARPEPATGYTLEFRSGKVAFRDCEGRYLAPSGPSGTLKAGKATKVGKDELFALEQSCAQVVLQAANERNVSTRQGMDLSANQDEETDQETFQLEIDRDTKKCAFRTHTGKYWTLTATGGVQSTASSKNASCYFDIEWRDRRITLRASNGKFVTSKKNGQLAASVETAGDSELFLMKLINRPIIVFRGEHGFIGCRKVTGTLDANRSSYDVFQLEFNDGAYNIKDSTGKYWTVGSDSAVTSSGDTPVDFFFEFCDYNKVAIKVGGRYLKGDHAGVLKASAETVDPASLWEY

SEQ ID NO: 152 - DNA, 3878 bp, Homo sapien
cggcacgagcgcgcgtccaccggctccccggctcgcgccgctccatgtagccccggctccccgggcggccgcggaggagggggcgaccacaagatggcggacctctcgctgcttcaggaggacctgcaggaggacgcagacggatccctggactttgtctcacaagatgaaatgttgacgcccctggggagattggacaagtatgctgcaagtgagaacatatttaacagacaaatggtggcccggagtttgctcgataccttgagggaagtctgcgatgatgaaagagattgtattgctgttttggaaagaattagcagattggccgatgattcagaaccaactgtgagagcggagctgatggaacaggtgcctcacatcgcactgttttgtcaagaaaaccggccttcaataccatatgctttttcaaaattcttactacctattgtggttagataccttgcagatcagaataatcaggtgaggaaaacaagtcaggcagctttgctggctctgttggagcaggagctcattgaacgatttgatgtggagaccaaagtgtgccctgtcctcatagagctgacagccccagatagcaatgatgatgtgaaaacagaagctgtggctataatgtgcaaaatggctcccatggttgggaaggatattacagagcgtcttatcctccctaggttttgtgagatgtgctgcgattgcagaatgtttcacgttcgaaaggtctgtgctgccaattttggagatatttgcagtgtagttggccagcaagctactgaagaaatgttgctgcccagatttttccagctttgttctgataatgtatggggagtccgaaaggcttgtgctgaatgcttcatggcggtttcatgtgcaacatgtcaagaaatccgacggaccaaattatcagcactttttattaatttgatcagtgatccttcacgttgggttcgccaagcagcttttcagtctctgggacctttcatatctacttttgctaatccatctagctcaggccagtattttaaagaagaaagcaaaagttcagaagagatgtcagtagaaaacaaaaataggaccagagatcaagaagccccagaggatgtacaagtcaggccagaggatactccttcagatctcagtgttagtaattccagtgtcatactggaaaacacgatggaagaccatgctgctgaggcatccgggaagcctctaggtgaaattagtgttccactggacagctctttactttgtactttgtcctcagaatctcaccaggaagcagctagtaatgagaatgataaaaaacctggtaactacaaatctatgttacgaccagaggttggcaccacttcacaagattcagctctcttagatcaggaattgtataactccttccatttctggaggactcctcttcctgaaatagatctagacatagagcttgaacagaactctgggggaaaacccagcccagagggaccagaggaagaatctgagggccctgtgcccagttctccaaacatcaccatggccaccagaaaggaactggaagaaatgatagaaaatctagagccccacattgatgatccagatgttaaagcacaagtggaagtgctgtccgctgcactacgtgcttccagcctggatgcacatgaagagaccatcagtatagaaaagagaagtgatttgcaagatgaactggatataaatgagctaccaaattgtaaaataaatcaagaagattctgtgcctttaatcagcgatgctgttgagaatatggactccactcttcactatattcacagcgattcagacttgagcaacaatagcagttttagccctgatgaggaaaggagaactaaagtacaagatgttgtacctcaggcgttgttagatcagtatttatctatgactgacccttctcgtgcacagacggttgacactgaaattgctaagcactgtgcatatagcctccctggtgtggccttgacactcggaagacagaattggcactgcctgagagagacgtatgagactctggcctcagacatgcagtggaaagttcgacgaactctagcattctccatccacgagcttgcagttattcttggagatcaattgacagctgcagatctggttccaatttttaatggatttttaaaagacctcgatgaagtcaggataggtgttcttaaacacttgcatgattttctgaagcttcttcatattgacaaaagaagagaatatctttatcaacttcaggagtttttggtgacagataatagtagaaattggcggtttcgagctgaactggctgaacagctgattttacttctagagttatatagtcccagagatgtttatgactatttacgtcccattgctctgaatctgtgtgcagacaaagtttcttctgttcgttggatttcctacaagttggtcagcgagatggtgaagaagctgcacgcggcaacaccaccaacgttcggagtggacctcatcaatgagcttgtggagaactttggcagatgtcccaagtggtctggtcggcaagcctttgtctttgtctgccagactgtcattgaggatgactgccttcccatggaccagtttgctgtgcatctcatgccgcatctgctaaccttagcaaatgacagggttcctaacgtgcgagtgctgcttgcaaagacattaagacaaactctactagaaaaagactatttcttggcctctgccagctgccaccaggaggctgtggagcagaccatcatggctcttcagatggaccgtgacagcgatgtcaagtattttgcaagcatccaccctgccagtaccaaaatctccgaagatgccatgagcacagcgtcctcaacctactagaaggcttgaatctcggtgtctttcctgcttccatgagagccgaggttcagtgggcattcgccacgcatgtgacctgggatagctttcgggggaggagagaccttcctctcctgcggacttcattgcaggtgcaagttgcctacacccaataccagggatttcaagagtcaagagaaagtacagtaaacactattatcttatcttgactttaaggggaaataatttctcagaggattataattgtcaccgaagccttaaatccttctgtcttcctgactgaatgaaacttgaattggcagagcattttccttatggaagggatgagattcccagagacctgcattgctttctcctggttttatttaacaatcgacaaatgaaattcttacagcctgaaggcagacgtgtgcccagatgtgaaagagaccttcagtatcagccctaactcttctctcccaggaaggacttgctgggctctgtggccagctgtccagcccagccctgtgtgtgaatcgtttgtgacgtgtgcaaatgggaaaggaggggtttttacatctcctaaaggacctgatgccaacacaagtaggattgacttaaactcttaagcgcagcatattgctgtacacatttacagaatggttgctgagtgtctgtgtctgattttttcatgctggtcatgacctgaaggaaatttattagacgtataatgtatgtctggtgtttttaacttgatcatgatcagctctgaggtgcaacttcttcacatactgtacatacctgtgaccactcttgggagtgctgcagtctttaatcatgctgtttaaactgttgtggcacaagttctcttgtccaaataaaatttattaataagatctatagagagagatatatacacttttgattgttttctagatgtctaccaataaatgcaatttgtgacctgtaaaaaaaaaaaaaaagaaaactcgaggagggcccgggcc

SEQ ID NO: 153 - protein, 933 aa, Homo sapien
MADLSLLQEDLQEDADGSLDFVSQDEMLTPLGRLDKYAASENIFNRQMVARSLLDTLREVCDDERDCIAVLERISRLADDSEPTVRAELMEQVPHIALFCQENRPSIPYAFSKFLLPIVVRYLADQNNQVRKTSQAALLALLEQELIERFDVETKVCPVLIELTAPDSNDDVKTEAVAIMCKMAPMVGKDITERLILPRFCEMCCDCRMFHVRKVCAANFGDICSVVGQQATEEMLLPRFFQLCSDNVWGVRKACAECFMAVSCATCQEIRRTKLSALFINLISDPSRWVRQAAFQSLGPFISTFANPSSSGQYFKEESKSSEEMSVENKNRTRDQEAPEDVQVRPEDTPSDLSVSNSSVILENTMEDHAAEASGKPLGEISVPLDSSLLCTLSSESHQEAASNENDKKPGNYKSMLRPEVGTTSQDSALLDQELYNSFHFWRTPLPEIDLDIELEQNSGGKPSPEGPEEESEGPVPSSPNITMATRKELEEMIENLEPHIDDPDVKAQVEVLSAALRASSLDAHEETISIEKRSDLQDELDINELPNCKINQEDSVPLISDAVENMDSTLHYIHSDSDLSNNSSFSPDEERRTKVQDVVPQALLDQYLSMTDPSRAQTVDTEIAKHCAYSLPGVALTLGRQNWHCLRETYETLASDMQWKVRRTLAFSIHELAVILGDQLTAADLVPIFNGFLKDLDEVRIGVLKHLHDFLKLLHIDKRREYLYQLQEFLVTDNSRNWRFRAELAEQLILLLELYSPRDVYDYLRPIALNLCADKVSSVRWISYKLVSEMVKKLHAATPPTFGVDLINELVENFGRCPKWSGRQAFVFVCQTVIEDDCLPMDQFAVHLMPHLLTLANDRVPNVRVLLAKTLRQTLLEKDYFLASASCHQEAVEQTIMALQMDRDSDVKYFASIHPASTKISEDAMSTASSTY

SEQ ID NO: 154 - DNA, 2587 bp, Homo sapien
aggcgctgcggccgtcccgggccgtgactcctcctttcccccgccccgcctccgttcggagagccggcgggcgggcgcctctcggccaggtacgcggccggctgggataggggtcgcgggcgggctttggtcgcgcagcagccggtcctccccggaggtaggcgggcgcgggccctgttgggtctttgggacgcgggtcccgctggggccggggatgctcctctctgtgagcgcggtcccgtccccccctgtccccgggcgggcgcacgggggtctaaccttggggggcggcgctcccgcctgtcccgggtgccggggttcgcgtcccgcggggccttcctcgctctttgtctcttctgagtgaacttgatgacccccttcttccaggaagcgcctcttggacgcgtgtgaccgatgcccagattgcacgaccacttctggagctgctcctgtgcgcacagcgcgaggcgccgaggccccccgcgagccagcaccgcggggctgccgcccaaggttggggagatgatcaacgtttccgtgtccgggccctccctgctggcggcccacggtgccccggacgctgaccccgcgcccaggggccgcagtgctgcgatgagcggccccgagcccggcagcccctaccccaacacctggcatcatcgcctgttgcagaggagcctcgtgctcttctcggttggggtggtcctaaccctggtgctcaacctgctgcagatccagaggaatgtcactctcttccccgaggaggtgatcgccaccatcttttcctccgcctggtgggtccctccctgctgcgggacagcagctgctgttgttggcctactgtacccctgtatcgacagtcacctcggagaaccccacaaatttaagagagaatgggccagtgtcatgcgctgcatagcaggttttggtggcattaaccacgccagtgctaaattggattttgccaataatgtccagctgtccttgactttagcagccctatctttgggcctttggtggacatttgatcgttccagaagtggccttgggctggggatcaccatagcttttctagctacgctgatcacgcagtttctcgtgtataatggtgtctatcagtatacgtccccagatttcctctatattcgttcttggctcccttgtatatttttctcaggaggcgtcacggtggggaacataggacgacagttagctatgggtgttcctgaaaagccccatagtgattgagtcttcaaaaccaccgattctgagagcaaggaagattttggaagaaaatctgactgtggattatgacaaagattatcttttttcttaagtaatctatttagatcgggctgactgtacaaatgactcctggaaaaaactcgtcacctatctagaaaagtcaagaatagggaggtggagaatgatgacttaccctgaagtcttcccttgctacccacactggcgcctgtctgtgccctggagcattctgcccagcctacgtgggttcagtcaggtgccaccttcccaagtattcgatttcattcatgtgattaaaacaagttgccatatttcaaagccttgagctaagactcaattaccaacccgcagttttgtgtcagtgcccaaaggagggaggttgatggtgcttaacaaacatgaagtatggtgtaataggaataatatttatccaaaagatttttaaaaatagggctgtgtttaaagaaggaatcaaaacaagaaaagcagcagtgattatagagaggtcacactctaagtggggtcgcggcgtggccacgcttcacggtcacgctcgtccgtcctgcagtggcgtgtttacatggtcacacgtgtgtgtatcaccagtgggtcaactgcttgtcattcctcccgcggcagtgttgtgtagacaatcttactgagcaaaaggcaatgaaaagtcttgggctcccacactgcgatatattggaattcccacctcagtttatgaagtttatttcgaaatccatagtcatctaagaatgaatacctgtctgccatgtatttcaatcttagtgagccaaaattgtttgtttgttactacagaatagagatgactgttttttggcacagccctatggaatttgcaatctgtgattgccttgtaaaaaggagagtgcatatggcactgcattaaacgtgtggtgtttctagtcaatgatattggtgagcacaatgtattcatttaatggcatagaccataccagacctaatttgcaagtattgggtcttcaaacttcaagtgcaatgtattatgaaaaccaatctgagccttgtatctcttaaatatttattccttctaacgtgtgagatgtcccgagagaagggttctccattcatttcagtgctgcctggaggaaactcggcaatgatttcttcagttgtgaagttcctttcgggttacaacctccactggaaccctcaaccttcgaaatactccagttttgggggttggggccatttacttataaatttaccgccgggtttttggaatctacatgtcttgggggcgggctcaaattcttcgaaagtggttggattaaaa

SEQ ID NO: 155 - protein, 277 aa, Homo sapien
MPRLHDHFWSCSCAHSARRRGPPRASTAGLPPKVGEMINVSVSGPSLLAAHGAPDADPAPRGRSAAMSGPEPGSPYPNTWHHRLLQRSLVLFSVGVVLTLVLNLLQIQRNVTLFPEEVIATIFSSAWWVPPCCGTAAAVVGLLYPCIDSHLGEPHKFKREWASVMRCIAGFGGINHASAKLDFANNVQLSLTLAALSLGLWWTFDRSRSGLGLGITIAFLATLITQFLVYNGVYQYTSPDFLYIRSWLPCIFFSGGVTVGNIGRQLAMGVPEKPHSD

SEQ ID NO: 156 - DNA, 1223 bp, Homo sapien
agctcggtcctgctggaggccacgggtgccacacactcggtcccgacatgatggcgagcatgcgagtggtgaaggagctggaggatcttcagaagaagcctcccccatacctgcggaacctgtccagcgatgatgccaatgtcctggtgtggcacgctctcctcctacccgaccaacctccctaccacctgaaagccttcaacctgcgcatcagcttcccgccggagtatccgttcaagcctcccatgatcaaattcacaaccaagatctaccaccccaacgtggacgagaacggacagatttgcctgcccatcatcagcagtgagaactggaagccttgcaccaagacttgccaagtcctggaggccctcaatgtgctggtgaatagaccgaatatcagggagcccctgcggatggacctcgctgacctgctgacacagaatccggagctgttcagaaagaatgccgaagagttcaccctccgattcggagtggaccggccctcctaactcatgttctgaccctctgtgcactggatcctcggcatagcggacggacacacctcatggactgaggccagagccccctgtggcccattccccattcatttttcccttcttaggttgttagtcattagtttgtgtgtgtgtgtggtggagggaagggagctatgagtgtgtgtgttgtgtatggactcactcccaggttcacctggccacaggtgcacccttcccacaccctttacattccccagagccaagggagtttaagtttgcagttacaggccagttctccagctctccatcttagagagacaggtcaccttgcaggcctgcttgcaggaaatgaatccagcagccaactcgaatccccctagggctcaggcactgagggcctggggacagtggagcatatgggtgggagacagatggagggtaccctatttacaactgagtcagccaagccactgatgggaatatacagatttaggtgctaaaccgtttattttccacggatgagtcacaatctgaagaatcaaacttccatcctgaaaatctatatgtttcaaaaccacttgccatcctgttagattgccagttcctgggaccaggcctcagactgtgaagtatatatcctccagcattcagtccagggggagccacggaaaccatgttcttgcttaagccattaaagtcagagatgaaaaaaaaaaaaaaaaaaaa

SEQ ID NO: 157 - protein, 153 aa, Homo sapien
MMASMRVVKELEDLQKKPPPYLRNLSSDDANVLVWHALLLPDQPPYHLKAFNLRISFPPEYPFKPPMIKFTTKIYHPNVDENGQICLPIISSENWKPCTKTCQVLEALNVLVNRPNIREPLRMDLADLLTQNPELFRKNAEEFTLRFGVDRPS

SEQ ID NO: 158 - DNA, 3799 bp, Homo sapien
ctgtgttccacccgcctgggctagcacgtgggggagctgcggaagcgcggcgctgcgggccgggccgcggggcacagccgggggccggcggcggcgcgcggactccgcatcccgcaccccgatggtagccgaggagctggtgtaattacttcaagcctccaggatggcaatccagttccgttcgctcttccccttggcattgcctgggatgctggcgctcctcggctggtggtggtttttctctcgtaaaaaaggccatgtcagcagccatgatgagcagcaggtggaggctggtgctgtgcagctgagggctgaccctgccatcaaggaacctctccccgtggaagacgtctgtcccaaagtagtgtccacaccccccagtgtcacagagcctccagaaaaggaactgtccaccgtgagcaagctgcctgcagagcccccagcattgctccagacacacccaccttgccgaagatcagagtcctcgggcattcttcctaacaccacagacatgagattgcgaccaggaacacgcagagatgacagtacaaagctggagctagccctgacaggtggtgaagccaaatcgattcctctagagtgccccctttcatccccaaagggtgtactattctccagcaaatcagctgaggtgtgtaagcaagattcccccttcagcagggtgccaaggaaggtccagccaggctaccccgtagtccccgcagagaagcgtagctctggggagagggcaagagagacaggtggggccgaagggactggtgatgccgtgttgggggaaaaggtgcttgaagaagctctgttgtctcgggagcatgtcttggaattggagaacagcaagggccccagcctggcctctttagagggggaagaagataaggggaagagcagctcatcccaggtggtggggccagtgcaggaggaagagtatgtagcagagaagttgccaagtaggttcatcgagtcggctcacacagagctggcaaaggacgatgcggcgccagcacccccagtcgcagacgccaaagcccaggatagaggtgtcgagggagaactgggcaatgaggagagcttggatagaaatgaggagggcttggatagaaatgaggagggcttggatagaaatgaggagagcttggatagaaatgaggagggcttggatagaaatgaggagattaagcgggctgccttccagataatctcccaagtgatctcagaagcaaccgaacaggtgctggccaccacggttggcaaggttgcaggtcgtgtgtgtcaggccagtcagctccaagggcagaaggaagagagctgtgtcccagttcaccagaaaactgtcttgggcccagacactgcggagcctgccacagcagaggcagctgttgccccgccggatgctggcctccccttgccaggcctaccagcagagggctcaccaccaccaaagacctacgtgagctgcctgaagagccttctgtccagccccaccaaggacagtaagccaaatatctctgcacaccacatctccctggcctcctgcctggcactgaccacccccagtgaagagttgccggaccgggcaggcatcctggtggaagatgccacctgtgtcacctgcatgtcagacagcagccaaagtgtccctttggtggcttctccaggacactgctcagattctttcagcacttcagggcttgaagactcttgcacagagaccagctcgagccccagggacaaggccatcaccccgccactgccagaaagtactgtgcccttcagcaatggggtgctgaagggggagttgtcagacttgggggctgaggatggatggaccatggatgcggaagcagatcattcaggaggttctgacaggaacagcatggattccgtggatagctgttgcagtctcaagaagactgagagcttccaaaatgcccaggcaggctccaaccctaagaaggtcgacctcatcatctgggagatcgaggtgccaaagcacttagtcggtcggctaattggcaagcaggggcgctatgtgagttttctgaagcaaacatctggtgccaagatctacatttcaaccctgccttacacccagagcgtccagatctgccacatagaaggctctcaacatcatgtagacaaagcgctgaacttgattgggaagaagttcaaagagctgaacctcaccaatatctacgctcccccattgccttcactggcactgccttctctgccgatgacatcctggctcatgctgcctgatggcatcaccgtggaggtcattgtggtcaaccaggtcaatgccgggcacctgttcgtgcagcagcacacacaccctaccttccacgcgctgcgcagcctcgaccagcagatgtacctctgttactctcagcctggaatccccaccttgcccaccccagtggaaataacggtcatctgtgccgcccctggtgcggacggggcctggtggcgagcccaagtggttgcctcctacgaggagaccaacgaagtggagattcgatacgtggactacggcggatataagagggtgaaagtagacgtgctccggcaaatcaggtctgactttgtcaccctgccgtttcagggagcagaagtccttctggacagtgtgatgcccctgtcagacgatgaccagttttcaccggaagcagatgccgccatgagcgagatgacggggaatacagcactgcttgctcaggtgacaagttacagtccaactggtcttcctctgattcagctgtggagtgtggttggagatgaagtggtgttgataaaccggtccctggtggagcgaggccttgcccagtgggtagacagctactacacaagcctttgacccccatgctgcttcctgagagtctttttttgcactgttgaaattgggcttggcactcaagtcaaagatgaacatcggaataacaaacattgtcctctccagaaagtcctttctttatccatactgtagtcctattgagaagacatttcgtctctgagaaaaaaggatggaactatgggttctcttcgcaaagccaaaggatagtgtttaacaagccagctggcttatcctggttctcagctgtttaaaaaaaaaaaaaaaaaggaatagaaacagtttcaaccagattgtcctattccccctgttccattcccctcttcttccttctatctccttccccggcaaaaaccaaacaaactggcagacaggccagggatgtatgttgcttgcttgagagggtttcttttacttcaaaatctttcttcagggagcaagacatgaactgactaattggtatccactacttgtacagcttacataaatgagttgatgatatttaaccagtttttataaacttcatttaggtctctaaacacagactttttaaattgcaactgtaaatatgaaatggtcatcacatctgaccttggtcagtggggaggggaactggtatcctgccaagcctggttgtaatttgtaaccattttctatttgtgcaaactctgtaaatatgtgtttaaacaaatgtaatattttgtacaagatacactggagaacaaagggaactcaagattcttccagccacatgtcacctgtaggtagaagtaaactctgcagtgcagcttctgctcttggcccctctggccagggcccctgtggcttcctgcacactggacaggtgactgtatggtagagactgtgatctgggaactttttgctgtacaaatctgtttaaaaaaaaaaaaaagtaactcattgaattaa

SEQ ID NO: 159 - protein, 903 aa, Homo sapien
MAIQFRSLFPLALPGMLALLGWWWFFSRKKGHVSSHDEQQVEAGAVQLRADPAIKEPLPVEDVCPKVVSTPPSVTEPPEKELSTVSKLPAEPPALLQTHPPCRRSESSGILPNTTDMRLRPGTRRDDSTKLELALTGGEAKSIPLECPLSSPKGVLFSSKSAEVCKQDSPFSRVPRKVQPGYPVVPAEKRSSGERARETGGAEGTGDAVLGEKVLEEALLSREHVLELENSKGPSLASLEGEEDKGKSSSSQVVGPVQEEEYVAEKLPSRFIESAHTELAKDDAAPAPPVADAKAQDRGVEGELGNEESLDRNEEGLDRNEEGLDRNEESLDRNEEGLDRNEEIKRAAFQIISQVISEATEQVLATTVGKVAGRVCQASQLQGQKEESCVPVHQKTVLGPDTAEPATAEAAVAPPDAGLPLPGLPAEGSPPPKTYVSCLKSLLSSPTKDSKPNISAHHISLASCLALTTPSEELPDRAGILVEDATCVTCMSDSSQSVPLVASPGHCSDSFSTSGLEDSCTETSSSPRDKAITPPLPESTVPFSNGVLKGELSDLGAEDGWTMDAEADHSGGSDRNSMDSVDSCCSLKKTESFQNAQAGSNPKKVDLIIWEIEVPKHLVGRLIGKQGRYVSFLKQTSGAKIYISTLPYTQSVQICHIEGSQHHVDKALNLIGKKFKELNLTNIYAPPLPSLALPSLPMTSWLMLPDGITVEVIVVNQVNAGHLFVQQHTHPTFHALRSLDQQMYLCYSQPGIPTLPTPVEITVICAAPGADGAWWRAQVVASYEETNEVEIRYVDYGGYKRVKVDVLRQIRSDFVTLPFQGAEVLLDSVMPLSDDDQFSPEADAAMSEMTGNTALLAQVTSYSPTGLPLIQLWSVVGDEVVLINRSLVERGLAQWVDSYYTSL

SEQ ID NO: 160 - DNA, 1418 bp, Homo sapien
aactgtgcgaaccagacccggcagccttgctcagttcagcatagcggagcggatccgatcggatcggagcacaccggagcaggctcatcgagaaggcgtctgcgagaccatggagaacggatacacctatgaagattataagaacactgcagaatggcttctgtctcatactaagcaccgacctcaagttgcaataatctgtggttctggattaggaggtctgactgataaattaactcaggcccagatctttgactacagtgaaatccccaactttcctcgaagtacagtgccaggtcatgctggccgactggtgtttgggttcctgaatggcagggcctgtgtgatgatgcagggcaggttccacatgtatgaagggtacccactctggaaggtgacattcccagtgagggttttccaccttctgggtgtggacaccctggtagtcaccaatgcagcaggagggctgaaccccaagtttgaggttggagatatcatgctgatccgtgaccatatcaacctacctggtttcagtggtcagaaccctctcagagggcccaatgatgaaaggtttggagatcgtttccctgccatgtctgatgcctacgaccggactatgaggcagagggctctcagtacctggaaacaaatgggggagcaacgtgagctacaggaaggcacctatgtgatggtggcaggccccagctttgagactgtggcagaatgtcgtgtgctgcagaagctgggagcagacgctgttggcatgagtacagtaccagaagttatcgttgcacggcactgtggacttcgagtctttggcttctcactcatcactaacaaggtcatcatggattatgaaagcctggagaaggccaaccatgaagaagtcttagcagctggcaaacaagctgcacagaaattggaacagtttgtctccattcttatggccagcattccactccctgacaaagccagttgacctgccttggagtcgtctggcatctcccacacaagacccaagtagctgctaccttctttggccccttgctggagtcatgtgcctctgtccttaggttgtagcagaaaggaaaagattcctgtccttcacctttcccactttcttctaccagacccttctggtgccagatcctcttctcaaagctgggattacaggtgtgagcatagtgagaccttggcgctacaaaataaagctgttctcattcctgttctttcttacacaagagctggagcccgtgccctaccacacatctgtggagatgcccaggatttgactcgggccttagaactttgcatagcagctgctactagctctttgagataatacattccgaggggctcagttctgccttatctaaatcaccagagaccaaacaaggactaatccaatacctcttgga

SEQ ID NO: 161 - protein, 289 aa, Homo sapien
MENGYTYEDYKNTAEWLLSHTKHRPQVAIICGSGLGGLTDKLTQAQIFDYSEIPNFPRSTVPGHAGRLVFGFLNGRACVMMQGRFHMYEGYPLWKVTFPVRVFHLLGVDTLVVTNAAGGLNPKFEVGDIMLIRDHINLPGFSGQNPLRGPNDERFGDRFPAMSDAYDRTMRQRALSTWKQMGEQRELQEGTYVMVAGPSFETVAECRVLQKLGADAVGMSTVPEVIVARHCGLRVFGFSLITNKVIMDYESLEKANHEEVLAAGKQAAQKLEQFVSILMASIPLPDKAS

SEQ ID NO: 162 - DNA, 1230 bp, Homo sapien
ccgccgccaccgctaccgaggccgagcggagccgttagcgccgcgccgccgccgcctcccgcccgccccggagcagccccgggcccgcccgcccgcatccagatttttgaaaaatacaatgtctaatggttatgaagaccacatggccgaagactgcaggggtgacatcgggagaacgaatttgatcgtcaactacctccctcagaacatgacccaggatgagttacgaagcctgttcagcagcattggtgaagttgaatctgcaaaacttattcgggataaagtagcaggacacagcttgggctacggctttgtgaactacgtgaccgcgaaggatgcagagagagcgatcaacacgctgaacggcttgaggctccagtcaaaaaccattaaggtgtcgtatgctcgcccgagctcagaggtgatcaaagacgccaacttgtacatcagcgggctcccgcggaccatgacccagaaggacgtagaagacatgttctctcggtttgggcggatcatcaactcgcgggtcctcgtggatcagactacaggtttgtccagaggggttgcgtttatccggtttgacaaacggtcggaggcagaagaggcaattaccagtttcaatggtcataaacccccaggttcctctgagcccatcgcagtgaagtttgcagccaaccccaaccagaacaaaaacgtggcactcctctcgcagctgtaccactcgccagcgcgacggttcggaggccccgttcaccaccaggcgcagagattcaggttctcccccatgggcgtcgatcacatgagcgggctctctggcgtcaacgtgccaggaaacgcctcctccggctggtgcattttcatctacaacctggggcaggatgccgacgaggggatcctctggcagatgtttgggccgtttggtgccgtcaccaatgtgaaagtgatccgcgacttcaacaccaacaagtgcaaagggtttggctttgtgaccatgacaaactatgaagaagccgcgatggccatagccagcctgaacggctaccgcctgggggacaaaatcttacaggtttccttcaaaaccaacaagtcccacaaataactcgctcatgctttttttgtacggaatagataattaagagtgaaggagttgaaacttttcttgttagtgtacaactcattttgcgccaattttcacaagtgtttgtctttgtctgaatgagaagtgagaag

SEQ ID NO: 163 - protein, 326 aa, Homo sapien
MSNGYEDHMAEDCRGDIGRTNLIVNYLPQNMTQDELRSLFSSIGEVESAKLIRDKVAGHSLGYGFVNYVTAKDAERAINTLNGLRLQSKTIKVSYARPSSEVIKDANLYISGLPRTMTQKDVEDMFSRFGRIINSRVLVDQTTGLSRGVAFIRFDKRSEAEEAITSFNGHKPPGSSEPIAVKFAANPNQNKNVALLSQLYHSPARRFGGPVHHQAQRFRFSPMGVDHMSGLSGVNVPGNASSGWCIFIYNLGQDADEGILWQMFGPFGAVTNVKVIRDFNTNKCKGFGFVTMTNYEEAAMAIASLNGYRLGDKILQVSFKTNKSHK

SEQ ID NO: 164 - DNA, 3953 bp, Homo sapien
ggggtcacgggcgaactagaacactgggaaaggggctgcaggttccggaccggaccggccctgacccggaataatgagcaaggagggtgtggtgggttgaaagccatcctactttactcccgagttagagcatggattcagttttagtcttaagggggaagtgagattggagatttttatttttaattttgggcagaagcaggttgactctagggatctccagagcgagaggatttaacttcatgttgctcccgtgtttgaaggaggacaataaaagtcccaccgggcaaaattttcgtaacctctgcggtagaaaacgtcaggtatcttttaaatcgcgatagttttcgctgtgtcaggctttcttcggtggagctccgagggtagctaggttctaggtttgaaacagatgcagaatccaaaggcagcgcaaaaaacagccaccgattttgctatgtctctgagctgcgagataatcagacagctaaatggagtctgagcagctgttccatagaggctactatagaaacagctacaacagtataacaagtgcaagtagtgatgaggaacttttagatggagcaggtgttattatggactttcaaacatctgaagatgacaatttattagatggtgacactgcagttggaactcattatacaatgacaaatggaggcagcattaacagttctacacatttactggatcttttggatgaaccaattccaggtgttggtacatatgatgatttccatactattgattgggtgcgagaaaaatgtaaagacagagaaaggcatagacggatcaacagcaaaaagaaagaatcagcatgggaaatgacaaaaagtttgtatgatgcgtggtcaggatggctagtagtaacactaacaggattggcatcaggggcactggccggattaatagacattgctgccgattggatgactgacctaaaggagggcatttgccttagtgcgttgtggtacaaccacgaacagtgctgttggggatctaatgaaacaacatttgaagagagggataaatgtccacagtggaaaacatgggcagaattaatcataggtcaagcagagggtcctggttcttatatcatgaactacataatgtacatcttctgggccttgagttttgcctttcttgcagtttccctggtaaaggtatttgctccatatgcctgtggctctggaattccagagattaaaactattttaagtggattcatcatcagaggttacttgggaaaatggactttaatgattaaaaccatcacattagtcctggctgtggcatcaggtttgagtttaggaaaagaaggtcccctggtacatgttgcctgttgctgcggaaatatcttttcctacctctttccaaagtatagcacaaacgaagctaaaaaaagggaggtgctatcagctgcctcagctgcaggggtttctgtagcttttggtgcaccaattggaggagttctttttagcctggaagaggttagctattattttcctctcaaaactttatggagatcattttttgctgctttagtggctgcatttgttttgaggtccatcaatccatttggtaacagccgtctggtccttttttatgtggagtatcatacaccatggtacctttttgaactgtttccttttattcttctaggggtatttggagggctttggggagcctttttcattagggcaaatattgcctggtgtcgtcgacgcaagtccacgaaatttggaaagtatcccgttctggaagtcattattgttgcagccattactgctgtgatagccttccctaatccatacactaggctaaacaccagtgaactgatcaaagagctttttacagactgtggtcccctggaatcctcttctctttgtgactacagaaatgacatgaatgccagtaaaattgtcgatgacattcctgatcgtccagcaggcattggagtatattcagctatatggcagttatgcctggcactcatatttaaaatcataatgacagtattcacttttggcatcaaggttccatcaggcttgttcatccccagcatggccattggagcgatcgcaggaaggattgtggggattgcggtggagcagcttgcctactatcaccacgactggtttatctttaaggagtggtgtgaggtcggggctgattgcattacacctggcctttatgccatggttggtgctgctgcatgcttaggtggtgtgacaagaatgactgtctccctggtggttattgtttttgagcttactggaggcttggaatatattgttccccttatggctgcagtcatgaccagtaaatgggttggagatgcctttggcagggaaggcatttatgaagcacacatccgattaaatggataccctttcttggatgcaaaagaagaattcgaattcactcataccaccctggctgctgacgttatgagacctcgaaggaatgatcctcccttagctgtcctgacacaggacaatatgacagtggatgatatagaaaacatgattaatgaaaccagctacaatggatttcctgtcataatgtcaaaagaatctcagagattagtgggatttgccctcagaagagacctgacaattgcaatagaaagtgccaggaaaaaacaagaaggtatcgttggcagttctcgggtgtgttttgcacagcacaccccatctcttccagcagaaagtcctcggccattgaagcttcgaagcattcttgacatgagcccttttacagtgacagaccacaccccaatggagattgtggtggatattttccgaaagctgggactgaggcagtgccttgtaactcacaatgggcgcctccttggcattataacaaaaaaagatatcctccggcatatggcccagacggcaaaccaagaccccgcttcaataatgttcaactgaatctcacagatgaggagagagaagaaacggaagaggaagtttatttgttgaatagcacaactctttaacctgagggagtcatctacttttttttcctcctttacaaaaaaagaaaggaaatataaaagccgggtttttgcaacatggtttgcaaataatgctggtggaatggaggagttgtttggggagggaaaggagagagaaggaaaggagtgaggtatttcccgtctaacagaaagcagcgtatcaactcctattgttctgcactggatgcattcagctgaggatgtgcctgatagtgcaggcttgcgcctcaacagagatgacagcagagtcctcgagcacctggcctgtttgctcacatgcaagacacatacagccctattctagaggatacttgaatggacctctataaacgcaaggttcttgcctttttttaatcaaaactgttctgtttaattcatgaattgtatagttaagcattacctttctacattccagaagagcctttatttctctctctctctctctctctctctctctctctactgagctgtaacaaagcctctttaaatcggtgtatccttttgaagcagtcctttctcatattgagatgtactgtgattttactgaggtttcatcacaagaagggagtgtttcttgtgccattaaccatgtagtttgtaccatcactaaatgcttggaacagtacacatgcaccacaacaaaggctcatcaaacaggtaaagtctcgaaggaagcgagaacgaaatctctcattgtgtgccgtgtggctcaaaaccgaaaacaatgaagcttggttttaaaggataaagttttcttttttgttttcctctcagactttatggataatgtgaccgggtcttatgcaaattttctatttctaaaactactactatgatatacaagtgctgttgagcataattaaataaaatgctgctgctttgacagtaaagagaaggaagtattctgaaaaaaaac

SEQ ID NO: 165 - protein, 820 aa, Homo sapien
MESEQLFHRGYYRNSYNSITSASSDEELLDGAGVIMDFQTSEDDNLLDGDTAVGTHYTMTNGGSINSSTHLLDLLDEPIPGVGTYDDFHTIDWVREKCKDRERHRRINSKKKESAWEMTKSLYDAWSGWLVVTLTGLASGALAGLIDIAADWMTDLKEGICLSALWYNHEQCCWGSNETTFEERDKCPQWKTWAELIIGQAEGPGSYIMNYIMYIFWALSFAFLAVSLVKVFAPYACGSGIPEIKTILSGFIIRGYLGKWTLMIKTITLVLAVASGLSLGKEGPLVHVACCCGNIFSYLFPKYSTNEAKKREVLSAASAAGVSVAFGAPIGGVLFSLEEVSYYFPLKTLWRSFFAALVAAFVLRSINPFGNSRLVLFYVEYHTPWYLFELFPFILLGVFGGLWGAFFIRANIAWCRRRKSTKFGKYPVLEVIIVAAITAVIAFPNPYTRLNTSELIKELFTDCGPLESSSLCDYRNDMNASKIVDDIPDRPAGIGVYSAIWQLCLALIFKIIMTVFTFGIKVPSGLFIPSMAIGAIAGRIVGIAVEQLAYYHHDWFIFKEWCEVGADCITPGLYAMVGAAACLGGVTRMTVSLVVIVFELTGGLEYIVPLMAAVMTSKWVGDAFGREGIYEAHIRLNGYPFLDAKEEFEFTHTTLAADVMRPRRNDPPLAVLTQDNMTVDDIENMINETSYNGFPVIMSKESQRLVGFALRRDLTIAIESARKKQEGIVGSSRVCFAQHTPSLPAESPRPLKLRSILDMSPFTVTDHTPMEIVVDIFRKLGLRQCLVTHNGRLLGIITKKDILRHMAQTANQDPASIMFN

SEQ ID NO: 166 - DNA, 2370 bp, Homo sapien
cacgagggagcgctaacgtctttctgtctccccgcggtggtgatgacggtgaaaactgaggctgctaagggcaccctcacttactccaggatgaggggcatggtggcaattctcatcgctttcatgaagcagaggaggatgggtctgaacgactttattcagaagattgccaataactcctatgcatgcaaacaccctgaagttcagtccatcttgaagatctcccaacctcaggagcctgagcttatgaatgccaacccttctcctccaccaagtccttctcagcaaatcaaccttggcccgtcgtccaatcctcatgctaaaccatctgactttcacttcttgaaagtgatcggaaagggcagttttggaaaggttcttctagcaagacacaaggcagaagaagtgttctatgcagtcaaagttttacagaagaaagcaatcctgaaaaagaaagaggagaagcatattatgtcggagcggaatgttctgttgaagaatgtgaagcaccctttcctggtgggccttcacttctctttccagactgctgacaaattgtactttgtcctagactacattaatggtggagagttgttctaccatctccagagggaacgctgcttcctggaaccacgggctcgtttctatgctgctgaaatagccagtgccttgggctacctgcattcactgaacatcgtttatagagacttaaaaccagagaatattttgctagattcacagggacacattgtccttactgatttcggactctgcaaggagaacattgaacacaacagcacaacatccaccttctgtggcacgccggagtatctcgcacctgaggtgcttcataagcagccttatgacaggactgtggactggtggtgcctgggagctgtcttgtatgagatgctgtatggcctgccgcctttttatagccgaaacacagctgaaatgtacgacaacattctgaacaagcctctccagctgaaaccaaatattacaaattccgcaagacacctcctggagggcctcctgcagaaggacaggacaaagcggctcggggccaaggatgacttcatggagattaagagtcatgtcttcttctccttaattaactgggatgatctcattaataagaagattactcccccttttaacccaaatgtgagtgggcccaacgagctacggcactttgaccccgagtttaccgaagagcctgtccccaactccattggcaagtcccctgacagcgtcctcgtcacagccagcgtcaaggaagctgccgaggctttcctaggcttttcctatgcgcctcccacggactctttcctctgaaccctgttagggcttggttttaaaggattttatgtgtgtttccgaatgttttagttagccttttggtggagccgccagctgacaggacatcttacaagagaatttgcacatctctggaagcttagcaatcttattgcacactgttcgctggaattttttgaagagcacattctcctcagtgagctcatgaggttttcatttttattcttccttccaacgtggtgctatctctgaaacgagcgttagagtgccgccttagacggaggcaggagtttcgttagaaagcggacctgttctaaaaaaggtctcctgcagatctgtctgggctgtgatgacgaatattatgaaatgtgccttttctgaagagattgtgttagctccaaagcttttcctatcgcagtgtttcagttctttattttcccttgtggatatgctgtgtgaaccgtcgtgtgagtgtggtatgcctgatcacagatggattttgttataagcatcaatgtgacacttgcaggacactacaacgtgggacattgtttgtttcttccatatttggaagataaatttatgtgtagacttttttgtaagatacggttaataactaaaatttattgaaatggtcttgcaatgactcgtattcagatgcctaaagaaagcattgctgctacaaatatttctatttttagaaagggtttttatggaccaatgccccagttgtcagtcagagccgttggtgtttttcattgtttaaaatgtcacctgtaaaatgggcattatttatgtttttttttttgcattcctgataattgtatgtattgtataaagaacgtctgtacattgggttataacactagtatatttaaacttacaggcttatttgtaatgtaaaccaccattttaatgtactgtaattaacatggttataatacgtacaatccttccctcatcccatcacacaactttttttgtgtgtgataaactgattttggtttgcaataaaaccttgaaaaataaaaaaaaaaaaaaaaaaaaaaa

SEQ ID NO: 167 - protein, 431 aa, Homo sapien [sequence omitted]

SEQ ID NO: 168 - DNA, 3000 bp, Homo sapien
ccgccggccggggcgcctggctgcactcagcgccggagccgggagctagcggccgccgccatgtcccaccagaccggcatccaagcaagtgaagatgttaaagagatctttgccagagccagaaatggaaagtacagacttctgaaaatatctattgaaaatgagcaacttgtgattggatcatatagtcagccttcagattcctgggataaggattatgattcctttgttttacccctgttggaggacaaacaaccatgctatatattattcaggttagattctcagaatgcccagggatatgaatggatattcattgcatggtctccagatcattctcatgttcgtcaaaaaatgttgtatgcagcaacaagagcaactctgaagaaggaatttggaggtggccacattaaagatgaagtatttggaacagtaaaggaagatgtatcattacatggatataaaaaatacttgctgtcacaatcttcccctgccccactgactgcagctgaggaagaactacgacagattaaaatcaatgaggtacagactgacgtgggtgtggacactaagcatcaaacactacaaggagtagcatttcccatttctcgagaagcctttcaggctttggaaaaattgaataatagacagctcaactatgtgcagttggaaatagatataaaaaatgaaattataattttggccaacacaacaaatacagaactgaaagatttgccaaagaggattcccaaggattcagctcgttaccatttctttctgtataaacattcccatgaaggagactatttagagtccatagtttttatttattcaatgcctggatacacatgcagtataagagagcggatgctgtattctagctgcaagagccgtctgctagaaattgtagaaagacaactacaaatggatgtaattagaaagatcgagatagacaatggggatgagttgactgcagacttcctttatgaagaagtacatcccaagcagcatgcacacaagcaaagttttgcaaaaccaaaaggtcctgcaggaaaaagaggaattcgaagactaattaggggcccagcggaaactgaagctactactgattaaagtcatcacattaaacattgtaatactagttttttaaaagtccagcttttagtacaggagaactgaaatcattccatgttgatataaagtagggaaaaaaattgtactttttggaaaatagcacttttcacttctgtgtgtttttaaaattaatgttatagaagactcatgatttctatttttgagttaaagctagaaaagggttcaacataatgtttaattttgtcacactgttttcatagcgttgattccacacttcaaatacttcttaaaattttatacagttgggccagttctagaaagtctgatgtctcaaagggtaaacttactactttcttgtgggacagaaagaccttaaaatattcatattacttaatgaatatgttaaggaccaggctagagtattttctaagctggaaacttagtgtgccttggaaaagccgcaagttgcttactccgagtagctgtgctagctctgtcagactgtaggatcatgtctgcaacttttagaaatagtgctttatattgcagcagtcttttatatttgacttttttttaatagcattaaaattgcagatcagctcactctgaaactttaagggtaccagatattttctatactgcaggatttctgatgacattgaaagactttaaacagccttagtaaattatctttctaatgctctgtgaggccaaacatttatgttcagattgaaatttaaattaatatcattcaaaaggaaacaaaaaatgttgagttttaaaaatcaggattgacttttttctccaaaaccatacatttatgggcaaattgtgttctttatcacttccgagcaaatactcagatttaaaattactttaaagtcctggtacttaacaggctaacgtagataaacaccttaataatctcagttaatactgtatttcaaaacacatttaactgttttctaatgctttgcattatcagttacaacctagagagattttgagcctcatatttctttgatacttgaaatagagggagctagaacacttaatgtttaatctgttaaacctgctgcaagagccataactttgaggcattttctaaatgaactgtggggatccaggatttgtaatttcttgatctaaactttatgctgcataaatcacttatcggaaatgcacatttcatagtgtgaagcactcatttctaaaccttattatctaaggtaatatatgcacctttcagaaatttgtgttcgagtaagtaaagcatattagaataattgtgggttgacagatttttaaaatagaatttagagtatttggggttttgtttgtttacaaataatcagactataatatttaaacatgcaaaataactgacaataatgttgcacttgtttactaaagatataagttgttccatgggtgtacacgtagacagacacacatacacccaaattattgcattaagaatcctggagcagaccatagctgaagctgttattttcagtcaggaagactacctgtcatgaaggtataaaataatttagaagtgaatgtttttctgtaccatctatgtgcaattatactctaaattccactacactacattaaagtaaatggacattccagaatatagatgtgattatagtcttaaactaattattattaaaccaatgattgctgaaaatcagtgatgcatttgttatagagtataactcatcgtttacagtatgttttagttggcagtatcatacctagatggtgaataacatattcccagtaaatttatatagcagtgaagaattacatgccttctggtggacattttataagtgcattttatatcacaataaaaattttttctctttaaaaaaaaaaaacaagaaaaaaaaaaaa

SEQ ID NO: 169 - protein, 350 aa, Homo sapien
MSHQTGIQASEDVKEIFARARNGKYRLLKISIENEQLVIGSYSQPSDSWDKDYDSFVLPLLEDKQPCYILFRLDSQNAQGYEWIFIAWSPDHSHVRQKMLYAATRATLKKEFGGGHIKDEVFGTVKEDVSLHGYKKYLLSQSSPAPLTAAEEELRQIKINEVQTDVGVDTKHQTLQGVAFPISREAFQALEKLNNRQLNYVQLEIDIKNEIIILANTTNTELKDLPKRIPKDSARYHFFLYKHSHEGDYLESIVFIYSMPGYTCSIRERMLYSSCKSRLLEIVERQLQMDVIRKIEIDNGDELTADFLYEEVHPKQHAHKQSFAKPKGPAGKRGIRRLIRGPAETEATTD

SEQ ID NO: 170 - DNA, 2864 bp, Homo sapien
agataacaagagtaatccacagacttaaaacatgagctcagatgccagccaaggcgtgattaccactcctcctcctcccagcatgcctcacaaagagagatattttgaccgcatcaatgaaaatgacccagaatacattagggagaggaacatgtctcctgatctacgacaagacttcaacatgatggagcagaggaaacgagttactcagatcctgcaaagtcctgcctttcgggaagacttggaatgccttattcaagaacagatgaagaaaggccacaacccaactggattactagcattacagcagattgcagattacatcatggccaattctttctcgggtttttcttcacctcctctcagtcttggcatggtcacacctatcaatgaccttcctggtgcagatacatcctcatatgtgaagggagaaaaacttactcgctgtaaacttgccagcctgtacagacttgtagacttgtttggatgggcacacctggcaaatacctatatctcagtaagaataagtaaggagcaagaccacattataataattcccagaggcctatctttttctgaagctacagcctccaatttggtgaaagtcaatataataggagaagtggttgaccagggaagtaccaatttgaaaattgaccatacaggattcagtccccatgctgcaatctattcaacacgtcctgatgttaagtgtgtcatacacatccatacccttgcaacagcagctgtatcctccatgaaatgtgggatccttccaatttctcaagagtctcttcttctgggagatgttgcctattatgactaccaagggtcacttgaagaacaggaggagagaattcaactgcagaaggttctgggaccaagttgtaaggtgctggtactcaggaatcatggtgtggttgcacttggagaaacattagaggaggcttttcattatatttttaatgtgcaactagcctgtgagattcaggtgcaggccctagcaggtgcaggtggagtagacaatctccatgtactggactttcagaagtataaagctttcacttacactgtagcagcgtctggtggaggaggtgtgaatatgggttcccatcaaaaatggaaggttggcgaaattgagtttgaagggcttatgaggactctggacaacttggggtatagaacaggctatgcttacaggcatcctctcattcgagagaagcctaggcacaagagtgatgtggaaatcccagcaactgtgactgctttttcctttgaagacgatacagtgccactctctcctctcaaatacatggcacagaggcaacagcgtgaaaaaacaagatggctgaactcaccaaatacttacatgaaagtgaatgtgcctgaggagtctcggaacggagaaaccagtccccgaaccaaaatcacgtggatgaaagcagaagactcatctaaagttagtggtggaacacctatcaaaattgaagatccaaatcagtttgttcctttaaacacaaacccgaatgaggtactagaaaagagaaataagattcgggaacaaaatcgatatgacttgaaaacagcaggaccacaatctcagttgcttgctggaattgttgtggataagccaccttctactatgcaatttgaagatgatgatcatggcccaccagctcctcctaacccatttagtcatctcacagaaggagaacttgaagagtataagaggacaatcgaacgtaaacaacaaggcctagaagatgctgagcaggaattactctcagatgacgcttcatctgtttcacaaattcagtctcaaactcagtcaccgcaaaatgtccctgaaaaattagaagaaaaccatgagctgttttccaagagcttcatctccatggaagtgcctgtcatggtagtaaatggcaaggatgatatgcatgatgttgaagatgagcttgctaagcgagtgagtaggttaagcacaagtacaaccatagaaaacatcgagattactattaagtctccagagaaaatcgaagaagtcctgtcacctgaaggctccccttcaaaatcgccatccaagaaaaagaagaaattccgcactccttcttttctgaaaaagaacaaaaaaaaggagaaagttgaggcctaaataaagtctttttataattattattataacaatgtgacattgcacatctaaataccacatttaagttgatcattaatatgcaatggtagatcagattgggggatgtagcaaactggactttaagaactggaaagaggttttacaaaagaaaaactttcagattcatctctcattttatatgtccagaaatggctttgaattttaagcaattactagttttaattagctctgccctcatgaagtattattataattcaccataaacagctatctgtctgaattacttcaggccttctccataatatctgttagaaagaaattgccagtgagcaagtgagaatttttatttctcaatacctgcttcacttgataatcatattataattttttatcatgattattgactatatttttggagtcccattgtttcagtgggcattaacagaatgctttaaaaacttctaagacaagaatctatagcattagtatacactggcacataattttttaaaaagttttaagaaaagattcatttggaattttattcacagtataaaatttcctcacctgaagtaactttgtttgccaaaaaagttgttttaataaactataatttttgaaaacttccttttttattagtttagaaagccccttatttttcaacaaaggggattttgtacacataacatgggttatttagtttaactctggc

SEQ ID NO: 171 - protein, 706 aa, Homo sapien
MSSDASQGVITTPPPPSMPHKERYFDRINENDPEYIRERNMSPDLRQDFNMMEQRKRVTQILQSPAFREDLECLIQEQMKKGHNPTGLLALQQIADYIMANSFSGFSSPPLSLGMVTPINDLPGADTSSYVKGEKLTRCKLASLYRLVDLFGWAHLANTYISVRISKEQDHIIIIPRGLSFSEATASNLVKVNIIGEVVDQGSTNLKIDHTGFSPHAAIYSTRPDVKCVIHIHTLATAAVSSMKCGILPISQESLLLGDVAYYDYQGSLEEQEERIQLQKVLGPSCKVLVLRNHGVVALGETLEEAFHYIFNVQLACEIQVQALAGAGGVDNLHVLDFQKYKAFTYTVAASGGGGVNMGSHQKWKVGEIEFEGLMRTLDNLGYRTGYAYRHPLIREKPRHKSDVEIPATVTAFSFEDDTVPLSPLKYMAQRQQREKTRWLNSPNTYMKVNVPEESRNGETSPRTKITWMKAEDSSKVSGGTPIKIEDPNQFVPLNTNPNEVLEKRNKIREQNRYDLKTAGPQSQLLAGIVVDKPPSTMQFEDDDHGPPAPPNPFSHLTEGELEEYKRTIERKQQGLEDAEQELLSDDASSVSQIQSQTQSPQNVPEKLEENHELFSKSFISMEVPVMVVNGKDDMHDVEDELAKRVSRLSTSTTIENIEITIKSPEKIEEVLSPEGSPSKSPSKKKKKFRTPSFLKKNKKKEKVEA

SEQ ID NO: 172 - DNA, 2156 bp, Homo sapien
cccgccgcccatggagcgcgccgcgccgtcgcgccgggtcccgcttccgctgctgctgctcggcggccttgcgctgctggcggccggagtggacgcggatgtcctcctggaggcctgctgtgcggacggacaccggatggccactcatcagaaggactgctcgctgccatatgctacggaatccaaagaatgcaggatggtgcaggagcagtgctgccacagccagctggaggagctgcactgtgccacgggcatcagcctggccaacgagcaggaccgctgtgccacgccccacggtgacaacgccagcctggaggccacatttgtgaagaggtgctgccattgctgtctgctggggagggcggcccaggcccagggccagagctgcgagtacagcctcatggttggctaccagtgtggacaggtcttccgggcatgctgtgtcaagagccaggagaccggagatttggatgtcgggggcctccaagaaacggataagatcattgaggttgaggaggaacaagaggacccatatctgaatgaccgctgccgaggaggcgggccctgcaagcagcagtgccgagacacgggtgacgaggtggtctgctcctgcttcgtgggctaccagctgctgtctgatggtgtctcctgtgaagatgtcaatgaatgcatcacgggcagccacagctgccggcttggagaatcctgcatcaacacagtgggctctttccgctgccagcgggacagcagctgcgggactggctatgagctcacagaggacaatagctgcaaagatattgacgagtgtgagagtggtattcataactgcctccccgattttatctgtcagaatactctgggatccttccgctgccgacccaagctacagtgcaagagtggctttatacaagatgctctaggcaactgtattgatatcaatgagtgtttgagtatcagtgccccgtgccctattgggcatacatgcatcaacacagagggctcctacacgtgccagaagaacgtgcccaactgtggccgtggctaccatctcaacgaggagggaacgcgctgtgttgatgtggacgagtgcgcgccacctgctgagccctgtgggaagggacatcgctgcgtgaactctcccggcagtttccgctgcgaatgcaagacgggttactattttgacggcatcagcaggatgtgtgtcgatgtcaacgagtgccagcgctaccccgggcgcctgtgtggccacaagtgcgagaacacgctgggctcctacctctgcagctgttccgtgggcttccggctctctgtggatggcaggtcatgtgaagacatcaatgagtgcagcagcagcccctgtagccaggagtgtgccaacgtctacggctcctaccagtgttactgccggcgaggctaccagctcagcgatgtggatggagtcacctgtgaagacatcgacgagtgcgccctgcccaccgggggccacatctgctcctaccgctgcatcaacatccctggaagcttccagtgcagctgcccctcgtctggctacaggctggcccccaatggccgcaactgccaagacattgatgagtgtgtgactggcatccacaactgctccatcaacgagacctgcttcaacatccagggcgcgttccgctgcctggccttcgagtgccctgagaactaccgccgctccgcagccacccgctgtgagcgcttgccttgccatgagaatcgggagtgctccaagctgcctctgagaataacctactaccacctctctttccccaccaacatccaagcgcccgcggtggttttccgcatgggcccctccagtgctgtccccggggacagcatgcagctggccatcaccggcggcaatgaggagggctttttcaccacccggaaggtgagcccccacagtggggtggtggccctcaccaagcctgtccccgagcccagggacttgctcctgaccgtcaagatggatctctctcgccacggcaccgtcagctcctttgtggccaagcttttcatctttgtgtctgcagagctctgagcactcgcttcgcgtcgcggggtctccctcctgttgctttcctaaccctgccctccgggggttaataaagtcttagcaagcgtgggacacagtg

SEQ ID NO: 173 - protein, 566 aa, Homo sapien
MERAAPSRRVPLPLLLLGGLALLAAGVDADVLLEACCADGHRMATHQKDCSLPYATESKECRMVQEQCCHSQLEELHCATGISLANEQDRCATPHGDNASLEATFVKRCCHCCLLGRAAQAQGQSCEYSLMVGYQCGQVFRACCVKSQETGDLDVGGLQETDKIIEVEEEQEDPYLNDRCRGGGPCKQQCRDTGDEVVCSCFVGYQLLSDGVSCEDVNECITGSHSCRLGESCINTVGSFRCQRDSSCGTGYELTEDNSCKDIDECESGIHNCLPDFICQNTLGSFRCRPKLQCKSGFIQDALGNCIDINECLSISAPCPIGHTCINTEGSYTCQKNVPNCGRGYHLNEEGTRCVDVDECAPPAEPCGKGHRCVNSPGSFRCECKTGYYFDGISRMCVDVNECQRYPGRLCGHKCENTLGSYLCSCSVGFRLSVDGRSCEDINECSSSPCSQECANVYGSYQCYCRRGYQLSDVDGVTCEDIDECALPTGGHICSYRCINIPGSFQCSCPSSGYRLAPNGRNCQDIDECVTGIHNCSINETCFNIQGAFRCLAFECPENYRRSAAT

SEQ ID NO: 174 - DNA, 1645 bp, Homo sapien
agtcaagatggaggagtacgcgcgagagccttgcccatggcgaattgtggatgactgtggtggggcctttacgatgggtaccattggtggtggtatctttcaagcaatcaaaggttttcgcaattctccagtgggagtaaaccacagactacgagggagtttgacagctattaaaaccagggctccacagttaggaggtagctttgcagtttggggagggctgttttccatgattgactgtagtatggttcaagtcagaggaaaggaagatccctggaactccatcacaagtggtgccttaacgggagccatactggcagcaagaaatggaccagtggccatggttgggtcagccgcaatgggtggcattctcctagctttaattgaaggagctggtatcttgttgacaagatttgcctctgcacagtttcccaatggtcctcagtttgcagaagacccctcccagttgccttcaactcagttaccttcctcaccttttggagactatcgacaatatcagtaggacttctttcctaggatttctttaacagaacgagttgtggttcgagaaggatttcagaagatcaagttacagtctgtttttaaaaccataggtgggacagctatggccaataggctataaagagacatttagcacttttttctatttaaaggaacaagcggggaagggtgctaaaagataatacgtttatttattcacacttgaattgcatttgtgatcaaaataaatgtttaaatcgctaaaggaaaatacagtaagtgcttgaaagatgaaggaccaaaaggccaaaaaacagtgaaatatgatcatcatctcttgcggacttctctgcctggttttgtgtgttctgttattcaaacaataaaaagctggtggaacttactctttcttttaagataagttgtagacttcgatgtttcatgctcatgtacttcaaataatgcatgttttatagttagtccctcatcacttgaagtgacttctgagaattatgcagagtcaacatggatcatttcacagtgagatgctttatggattgaaggatatggtaaaatgtttatagtttactttgaaagtaaaatatactatgtcttggttttgaggatattggatacaaaactctcttcctttagggctactgagtcttgattcctgatcatcagaaatttcaccagaaacaacttgcttccaatatacccaattctatatgaagaattcatggagagtgtactggcactggaagagtttagtgtttcttgtatgcttgaaaataaagtatgtactgttttgaatgtgttccaagtcctctgcataaacgatgtattttggggtctggttgggcctggaaaatggatgagcacttcagaacaggtcattttcctgatattggaagtgacatgtggccctataggaggcatgatgttagttaattacacatttgcctacatctgtgggaaatggagaacaaagccatgtgggtactgtaaacacacgtttatcttttggcccaatgccatacatatggtaggcatttaattactgattgtgtttggataatttgggaattttcgactgtggtaaaatatacataaaataatacttattaaaaaaaaaaaaaaaaaa

SEQ ID NO: 175 - protein, 171 aa, Homo sapien
MEEYAREPCPWRIVDDCGGAFTMGTIGGGIFQAIKGFRNSPVGVNHRLRGSLTAIKTRAPQLGGSFAVWGGLFSMIDCSMVQVRGKEDPWNSITSGALTGAILAARNGPVAMVGSAAMGGILLALIEGAGILLTRFASAQFPNGPQFAEDPSQLPSTQLPSSPFGDYRQYQ

SEQ ID NO: 176 - DNA, 1528 bp, Homo sapien
cggcgagcgagcaccttcgacgcggtccggggaccccctcgtcgctgtcctcccgacgcggacccgcgtgccccaggcctcgcgctgcccggccggctcctcgtgtcccactcccggcgcacgccctcccgcgagtcccgggcccctcccgcgcccctcttctcggcgcgcgcgcagcatggcgcccccgcaggtcctcgcgttcgggcttctgcttgccgcggcgacggcgacttttgccgcagctcaggaagaatgtgtctgtgaaaactacaagctggccgtaaactgctttgtgaataataatcgtcaatgccagtgtacttcagttggtgcacaaaatactgtcatttgctcaaagctggctgccaaatgtttggtgatgaaggcagaaatgaatggctcaaaacttgggagaagagcaaaacctgaaggggccctccagaacaatgatgggctttatgatcctgactgcgatgagagcgggctctttaaggccaagcagtgcaacggcacctccacgtgctggtgtgtgaacactgctggggtcagaagaacagacaaggacactgaaataacctgctctgagcgagtgagaacctactggatcatcattgaactaaaacacaaagcaagagaaaaaccttatgatagtaaaagtttgcggactgcacttcagaaggagatcacaacgcgttatcaactggatccaaaatttatcacgagtattttgtatgagaataatgttatcactattgatctggttcaaaattcttctcaaaaaactcagaatgatgtggacatagctgatgtggcttattattttgaaaaagatgttaaaggtgaatccttgtttcattctaagaaaatggacctgacagtaaatggggaacaactggatctggatcctggtcaaactttaatttattatgttgatgaaaaagcacctgaattctcaatgcagggtctaaaagctggtgttattgctgttattgtggttgtggtgatagcagttgttgctggaattgttgtgctggttatttccagaaagaagagaatggcaaagtatgagaaggctgagataaaggagatgggtgagatgcatagggaactcaatgcataactatataatttgaagattatagaagaagggaaatagcaaatggacacaaattacaaatgtgtgtgcgtgggacgaagacatctttgaaggtcatgagtttgttagtttaacatcatatatttgtaatagtgaaacctgtactcaaaatataagcagcttgaaactggctttaccaatcttgaaatttgaccacaagtgtcttatatatgcagatctaatgtaaaatccagaacttggactccatcgttaaaattatttatgtgtaacattcaaatgtgtgcattaaatatgcttccacagtaaaatctgaaaaactgatttgtgattgaaagctgcctttctatttacttgagtcttgtacatacatacttttttatgagctatgaaataaaacattttaaactg

SEQ ID NO: 177 - protein, 314 aa, Homo sapien
MAPPQVLAFGLLLAAATATFAAAQEECVCENYKLAVNCFVNNNRQCQCTSVGAQNTVICSKLAAKCLVMKAEMNGSKLGRRAKPEGALQNNDGLYDPDCDESGLFKAKQCNGTSTCWCVNTAGVRRTDKDTEITCSERVRTYWIIIELKHKAREKPYDSKSLRTALQKEITTRYQLDPKFITSILYENNVITIDLVQNSSQKTQNDVDIADVAYYFEKDVKGESLFHSKKMDLTVNGEQLDLDPGQTLIYYVDEKAPEFSMQGLKAGVIAVIVVVVIAVVAGIVVLVISRKKRMAKYEKAEIKEMGEMHRELNA

SEQ ID NO: 178 - DNA, 1182 bp, Homo sapien
gaattccgctagactaagttggtcatgatgcagaagctactcaaatgcagtcggcttgtcctggctcttgccctcatcctggttctggaatcctcagttcaaggttatcctacgcagagagccaggtaccaatgggtgcgctgcaatccagacagtaattctgcaaactgccttgaagaaaaaggaccaatgttcgaactacttccaggtgaatccaacaagatcccccgtctgaggactgacctttttccaaagacgagaatccaggacttgaatcgtatcttcccactttctgaggactactctggatcaggcttcggctccggctccggctctggatcaggatctgggagtggcttcctaacggaaatggaacaggattaccaactagtagacgaaagtgatgctttccatgacaaccttaggtctcttgacaggaatctgccctcagacagccaggacttgggtcaacatggattagaagaggattttatgttataaaagaggattttcccaccttgacaccaggcaatgtagttagcatattttatgtaccatggttatatgattaatcttgggacaaagaattttatagaaatttttaaacatctgaaaaagaagcttaagttttatcatccttttttttctcatgaattcttaaaggattatgctttaatgctgttatctatcttattgttcttgaaaatacctgcattttttggtatcatgttcaaccaacatcattatgaaattaattagattcccatggccataaaatggctttaaagaatatatatatatttttaaagtagcttgagaagcaaattggcaggtaatatttcatacctaaattaagactctgacttggattgtgaattataatgatatgccccttttcttataaaaacaaaaaaaaaataatgaaacacagtgaatttgtagagtgggggtatttgacatattttacagggtggagtgtactatatactattacctttgaatgtgtttgcagagctagtggatgtgtttgtctacaagtatgattgctgttacataacaccccaaattaactcccaaattaaaacacagttgtgctgtcaatacctcatactgctttacctttttttcctggatatctgtgtattttcaaatgttactatatattaaagcagaaatataacc

SEQ ID NO: 179 - protein, 158 aa, Homo sapien
MMQKLLKCSRLVLALALILVLESSVQGYPTQRARYQWVRCNPDSNSANCLEEKGPMFELLPGESNKIPRLRTDLFPKTRIQDLNRIFPLSEDYSGSGFGSGSGSGSGSGSGFLTEMEQDYQLVDESDAFHDNLRSLDRNLPSDSQDLGQHGLEEDFML

SEQ ID NO: 180 - DNA, 2534 bp, Homo sapien
atggccctgtccactgagcatcctcccgccacacagaaacccgcccagccggggccaccgaccccaccccctgcctggaaacttaaggaggccggagctgtggggagctcagagctgagatcctacaggagtccagggctggagagaaaacctctgcgaggaaagggaaggagcaagccgtgaatttaagggacgctgtgaagcaatcatggatgcaatgaagagagggctctgctgtgtgctgctgctgtgtggagcagtcttcgtttcgcccagccaggaaatccatgcccgattcagaagaggagccagatcttaccaaggttgcagcgagccaaggtgtttcaacgggggcacctgccagcaggccctgtacttctcagatttcgtgtgccagtgccccgaaggatttgctgggaagtgctgtgaaatagataccagggccacgtgctacgaggaccagggcatcagctacaggggcacgtggagcacagcggagagtggcgccgagtgcaccaactggaacagcagcgcgttggcccagaagccctacagcgggcggaggccagacgccatcaggctgggcctggggaaccacaactactgcagaaacccagatcgagactcaaagccctggtgctacgtctttaaggcggggaagtacagctcagagttctgcagcacccctgcctgctctgagggaaacagtgactgctactttgggaatgggtcagcctaccgtggcacgcacagcctcaccgagtcgggtgcctcctgcctcccgtggaattccatgatcctgataggcaaggtttacacagcacagaaccccagtgcccaggcactgggcctgggcaaacataattactgccggaatcctgatggggatgccaagccctggtgccacgtgctgaagaaccgcaggctgacgtgggagtactgtgatgtgccctcctgctccacctgcggcctgagacagtacagccagcctcagtttcgcatcaaaggagggctcttcgccgacatcgcctcccacccctggcaggctgccatctttgccaagcacaggaggtcgcccggagagcggttcctgtgcgggggcatactcatcagctcctgctggattctctctgccgcccactgcttccaggagaggtttccgccccaccacctgacggtgatcttgggcagaacataccgggtggtccctggcgaggaggagcagaaatttgaagtcgaaaaatacattgtccataaggaattcgatgatgacacttacgacaatgacattgcgctgctgcagctgaaatcggattcgtcccgctgtgcccaggagagcagcgtggtccgcactgtgtgccttcccccggcggacctgcagctgccggactggacggagtgtgagctctccggctacggcaagcatgaggccttgtctcctttctattcggagcggctgaaggaggctcatgtcagactgtacccatccagccgctgcacatcacaacatttacttaacagaacagtcaccgacaacatgctgtgtgctggagacactcggagcggcgggccccaggcaaacttgcacgacgcctgccagggcgattcgggaggccccctggtgtgtctgaacgatggccgcatgactttggtgggcatcatcagctggggcctgggctgtggacagaaggatgtcccgggtgtgtacaccaaggttaccaactacctagactggattcgtgacaacatgcgaccgtgaccaggaacacccgactcctcaaaagcaaatgagatcccgcctcttcttcttcagaagacactgcaaaggcgcagtgcttctctacagacttctccagacccaccacaccgcagaagcgggacgagaccctacaggagagggaagagtgcattttcccagatacttcccattttggaagttttcaggacttggtctgatttcaggatactctgtcagatgggaagacatgaatgcacactagcctctccaggaatgcctcctccctgggcagaaagtggccatgccaccctgttttcagctaaagcccaacctcctgacctgtcaccgtgagcagctttggaaacaggaccacaaaaatgaaagcatgtctcaatagtaaaagataacaagatctttcaggaaagacggattgcattagaaatagacagtatatttatagtcacaagagcccagcagggcctcaaagttggggcaggctggctggcccgtcatgttcctcaaaagcacccttgacgtcaagtctccttcccctttccccactccctggctctcagaaggtattccttttgtgtacagtgtgtaaagtgtaaatcctttttctttataaactttagagtagcatgagagaattgtatcatttgaacaactaggcttcagcatatttatagcaatccatgttagtttttactttctgttgccacaaccctgttttatactgtacttaataaattcagatatatttttcacagtttttccaaaaaaaaaaaaaaaaaaa

SEQ ID NO: 181 - protein, 516 aa, Homo sapien
MDAMKRGLCCVLLLCGAVFVSPSQEIHARFRRGARSYQGCSEPRCFNGGTCQQALYFSDFVCQCPEGFAGKCCEIDTRATCYEDQGISYRGTWSTAESGAECTNWNSSALAQKPYSGRRPDAIRLGLGNHNYCRNPDRDSKPWCYVFKAGKYSSEFCSTPACSEGNSDCYFGNGSAYRGTHSLTESGASCLPWNSMILIGKVYTAQNPSAQALGLGKHNYCRNPDGDAKPWCHVLKNRRLTWEYCDVPSCSTCGLRQYSQPQFRIKGGLFADIASHPWQAAIFAKHRRSPGERFLCGGILISSCWILSAAHCFQERFPPHHLTVILGRTYRVVPGEEEQKFEVEKYIVHKEFDDDTYDNDIALLQLKSDSSRCAQESSVVRTVCLPPADLQLPDWTECELSGYGKHEALSPFYSERLKEAHVRLYPSSRCTSQHLLNRTVTDNMLCAGDTRSGGPQANLHDACQGDSGGPLVCLNDGRMTLVGIISWGLGCGQKDVPGVYTKVTNYLDWIRDNMRP

SEQ ID NO: 182 - DNA, 3393 bp, Homo sapien
cccaggcgcagccaatgggaagggtcggaggcatggcacagccaatgggaagggccggggcaccaaagccaatgggaagggccgggagcgcgcggcgcgggagatttaaaggctgctggagtgaggggtcgcccgtgcaccctgtcccagccgtcctgtcctggctgctcgctctgcttcgctgcgcctccactatgctctccctccgtgtcccgctcgcgcccatcacggacccgcagcagctgcagctctcgccgctgaaggggctcagcttggtcgacaaggagaacacgccgccggccctgagcgggacccgcgtcctggccagcaagaccgcgaggaggatcttccaggagcccacggagccgaaaactaaagcagctgcccccggcgtggaggatgagccgctgctgagagaaaacccccgccgctttgtcatcttccccatcgagtaccatgatatctggcagatgtataagaaggcagaggcttccttttggaccgccgaggaggttgacctctccaaggacattcagcactgggaatccctgaaacccgaggagagatattttatatcccatgttctggctttctttgcagcaagcgatggcatagtaaatgaaaacttggtggagcgatttagccaagaagttcagattacagaagcccgctgtttctatggcttccaaattgccatggaaaacatacattctgaaatgtatagtcttcttattgacacttacataaaagatcccaaagaaagggaatttctcttcaatgccattgaaacgatgccttgtgtcaagaagaaggcagactgggccttgcgctggattggggacaaagaggctacctatggtgaacgtgttgtagcctttgctgcagtggaaggcattttcttttccggttcttttgcgtcgatattctggctcaagaaacgaggactgatgcctggcctcacattttctaatgaacttattagcagagatgagggtttacactgtgattttgcttgcctgatgttcaaacacctggtacacaaaccatcggaggagagagtaagagaaataattatcaatgctgttcggatagaacaggagttcctcactgaggccttgcctgtgaagctcattgggatgaattgcactctaatgaagcaatacattgagtttgtggcagacagacttatgctggaactgggttttagcaaggttttcagagtagagaacccatttgactttatggagaatatttcactggaaggaaagactaacttctttgagaagagagtaggcgagtatcagaggatgggagtgatgtcaagtccaacagagaattcttttaccttggatgctgacttctaaatgaactgaagatgtgcccttacttggctgattttttttttccatctcataagaaaaatcagctgaagtgttaccaactagccacaccatgaattgtccgtaatgttcattaacagcatctttaaaactgtgtagctacctcacaaccagtcctgtctgtttatagtgctggtagtatcaccttttgccagaaggcctggctggctgtgacttaccatagcagtgacaatggcagtcttggctttaaagtgaggggtgaccctttagtgagcttagcacagcgggattaaacagtcctttaaccagcacagccagttaaaagatgcagcctcactgcttcaacgcagattttaatgtttacttaaatataaacctggcactttacaaacaaataaacattgttttgtactcacggcggcgataatagcttgatttatttggtttctacaccaaatacattctcctgaccactaatgggagccaattcacaattcactaagtgactaaagtaagttaaacttgtgtagactaagcatgtaatttttaagttttattttaatgaattaaaatatttgttaaccaactttaaagtcagtcctgtgtatacctagatattagtcagttggtgccagatagaagacaggttgtgtttttatcctgtggcttgtgtagtgtcctgggattctctgccccctctgagtagagtgttgtgggataaaggaatctctcagggcaaggagcttcttaagttaaatcactagaaatttaggggtgatctgggccttcatatgtgtgagaagccgtttcattttatttctcactgtattttcctcaacgtctggttgatgagaaaaaattcttgaagagttttcatatgtgggagctaaggtagtattgtaaaatttcaagtcatccttaaacaaaatgatccacctaagatcttgcccctgttaagtggtgaaatcaactagaggtggttcctacaagttgttcattctagttttgtttggtgtaagtaggttgtgtgagttaattcatttatatttactatgtctgttaaatcagaaattttttattatctatgttcttctagattttacctgtagttcatacttcagtcacccagtgtcttattctggcattgtctaaatctgagcattgtctagggggatcttaaactttagtaggaaaccatgagctgttaatacagtttccattcaaatattaatttcagaatgaaacataattttttttttttttttgagatggagtctcgctctgttgcccaggctggagtgcagtggcgcgattttggctcactgtaacctccatctcctgggttcaagcaattctcctgtctcagcctccctagtagctgggactgcaggtatgtgctaccacacctggctaatttttgtatttttagtagagatggagtttcaccatattggtcaggctggtcttgaactcctgacctcaggtgatccacccacctcggcctcccaaagtgctggggattgcaggcgtgataaacaaatattcttaatagggctactttgaattaatctgcctttatgtttgggagaagaaagctgagacattgcatgaaagatgatgagagataaatgttgatcttttggccccatttgttaattgtattcagtatttgaacgtcgtcctgtttattgttagttttcttcatcatttattgtatagacaatttttaaatctctgtaatatgatacattttcctatcttttaagttattgttacctaaagttaatccagattatatggtccttatatgtgtacaacattaaaatgaaaggctttgtcttgcattgtgaggtacaggcggaagttggaatcaggttttaggattctgtctctcattagctgaataatgtgaggattaacttctgccagctcagaccatttcctaatcagttgaaagggaaacaagtatttcagtctcaaaattgaataatgcacaagtcttaagtgattaaaataaaactgttcttatgtc

SEQ ID NO: 183 - protein, 389 aa, Homo sapien
MLSLRVPLAPITDPQQLQLSPLKGLSLVDKENTPPALSGTRVLASKTARRIFQEPTEPKTKAAAPGVEDEPLLRENPRRFVIFPIEYHDIWQMYKKAEASFWTAEEVDLSKDIQHWESLKPEERYFISHVLAFFAASDGIVNENLVERFSQEVQITEARCFYGFQIAMENIHSEMYSLLIDTYIKDPKEREFLFNAIETMPCVKKKADWALRWIGDKEATYGERVVAFAAVEGIFFSGSFASIFWLKKRGLMPGLTFSNELISRDEGLHCDFACLMFKHLVHKPSEERVREIIINAVRIEQEFLTEALPVKLIGMNCTLMKQYIEFVADRLMLELGFSKVFRVENPFDFMENISLEGKTNFFEKRVGEYQRMGVMSSPTENSFTLDADF

SEQ ID NO: 184 - DNA, 4763 bp, Homo sapien
  Unsure 3847: Unknown base
cccctcaccccactcaactgccccgggcccccgcgcgcgcggccgcccctccactcaccctgtgtcggccccgctcccctctcccccaccaggcgagcaggcgagcgggcagagcccgcggcggaggtcggcgcggctccggggttcatggtgacgaggcggcggccgctcgagcccagcggcggcgggcggcgggagctggggcgcgggcccgggccgcctctcccagagcgcggggccgggcggcgggcgcgcccaggcagcggctgcgagcgcccccccgcgccgcgcccccgcgccccccgcgccgcgcccccgcgcgcttggcttgcggggggccgggcctgcgggcggccgccgcgccgcgcacccatggacggcccggccatcatcacccaggtgaccaaccccaaggaggacgagggccggttgccgggcgcgggcgagaaagcctcccagtgcaacgtcagcttaaagaagcagaggagccgcagcatccttagctccttcttctgctgcttccgtgattacaatgtggaggcccctccacccagcagccccagtgtgcttccgccactggtggaggagaatggtgggcttcagaagccaccagctaagtaccttcttccagaggtgacggtgcttgactatggaaagaaatgtgtggtcattgatttagatgaaacattggtgcacagttcgtttaagcctattagtaatgctgattttattgttccggttgaaatcgatggaactatacatcaggtgtatgtgctgaagcggccacatgtggacgagttcctccagaggatggggcagctttttgaatgtgtgctctttactgccagcttggccaagtatgcagaccctgtggctgacctcctagaccgctggggtgtgttccgggcccggctcttcagagaatcatgtgtttttcatcgtgggaactacgtgaaggacctgagtcgccttgggcgggagctgagcaaagtgatcattgttgacaattcccctgcctcatacatcttccatcctgagaatgcagtgcctgtgcagtcctggttcgatgacatgacggacacggagctgctggacctcatccccttctttgagggcctgagccgggaggacgacgtgtacagcatgctgcacagactctgcaataggtagccctggcctctgcctgcctcccgcctgtgcactctggaacctctggcctcaggggacctgcctgtcctcagctccctgggagctgaaagtgaggatactccgtgctccaggccacagggtgaatgtggccatgcctacctgttttgtttttttaagaacagaaacaactattttaaaagaactcttttaagaaatttcataaagggacatgcattttactgggtttgcttttcttaaaacataccaaaaaagaaaaaaatagaaaaaaaaaaaaaaaaagctgatctctatcagactcttcaactgtcctccctccaagcagaccacctgtccccttctatcccagctcagagcagctgacccaactcagaatctctttcctacaggatgaaagtgccttttgaatgttatttttaagccgagagttaatttttctacacaacatatttccagacatcttttagtcttttattgtcttagatactataagaagatgaacatgacaattttctagaacctggtagcgtgtgtgtgtggttggcggggggtgctgagggaggggagtgagtcacaggagcctgtcccccaacaggtgtgactgctctgacaacctgtggcatgctgcagggtcaggctcctgataggaggatttcatgactatgtcattgtctccactcatttttgacccagtttggaatgtatctgcaattgtgtggctcaacactttaggaaacatagattattttatattattatttctgatggtgacaagtttgtcttgaggtcacattttctccttgaaaagtgacatcctgtcacttctgctctcacactactgccatacatttgtgtttttttgttgttattgtttgggtagagcagttacaagaaaccctaaaacccttggatataaaagaaatctgtttattgatttttaaatctttcctttccaaaagctggatacacatggagctgtttgggaattttccttgctgctaccgcgctgccaccaaatggaattgaccagcggctgttacactgttctttgccactgtgcctatgctcagaatatgctcactgctaagctacaaactcggacagggtcagaaacagaggtgtcccatcccattgcagcctccaccacctgtaaccccttcctggcattggccactgaagggtacaaaggcaaaaggaccacagcaccacttaggtgtagcatggattttaaactgcagtcagtatcagatcctgtttgataaataagctgactgttctctcttgagaacctgtggcctcaaccagccaccaagctgatgtggcccaagctccatctcttggtcttctcctttgaagcacagcctatttctgagccaagggttggggaagcctgtctagatgtgggactcattgccccaaaccagggagaggaagagctcccacagggagagcccaggctctctttgcagcctttcccagtttggtgtttaaagcagtgccatgttccttgtttgacaacaagacagtctgtaaagtattgctcttaaaaacaattaaaaagaaccctttcatattggcaccattgccttagtcctctgtgggttggtcttcagccagcattctggtgggagtgactggcattaacaagactggaaatcgggggtcaaagtaaaatatctttgttttgctttcattcacaaagtaatgaagccagctgccaattacatcctcccaacagcactttggtctgtgactgctgtgtgatattcagaagggaagtagtattcagggggtaaacaggtctcccagcattctgagtgttccaaaccagtaatccacatgccaattcaaatagaacagccccttgctagatattaccacagataatgacagtacatggtagaactgcccatgccacaaatatttatttggaaaagtagtcattaaatgaacccactgccttaaatgtcttgaatgttgcagtcaagtgtctgtcatgtgttgatatccacacagaattaggccctaatgagagccttagaccctcaaccatgcccccttcgttggcatcacagggccttatttggaagagcggggcaaagaggatggaaatcataaaatatttcatgggaatcgaacctagggatagtgctccacttctgacgatggagtgaagacacttggcagacttgagccagacacttcacctagtagttcctgaaactgtgagcaccactgcactaagccagtgcggagctgttagggacgggcccagctcctgcacacggacacagaatgtctggagagggcagcaggcctctgagggttctggaatctgtgccaccttatttgaccacactccaaaattctgtttttattttaacccttgaatctgctttatgtacataatcaaaatatctatatctatatctatatctatatctatatatttttaatcatctacatgtaaatgaagcaatagaattctaacataaggccaagaaatgagacgaatgtttggggtttatgttttttaaggtaaatacgggtattgtttttaattattaccatgtattaaattgtgggctttgaaacctaatgaaacctgttagccacttctctgtgccatatacttcccatgttaccaaaatacgcccaactctttagccaaaagagaacnctgacctcctgagtttccatgctcctttctgtcaggtttaaatgtagtcttctggagaagtatttttgacattgagctctgggacaggacaccttgggtttgtggactgcagcccactatgatgttattacttctctggccaggcctccagtggaagtgcacaggcactcccaatgttgttaatgctctgtcttccatttgttctggaatcctacgtgttggtctgtggttccatgcattagctgtttgtaaataatgcatttgcatactgaaaaaggaatgccacctgccacagttgatggtgagaagctcctttgacgtggtgcaattttgatgagatgtctctggggacacgaggatgccctaatgatgctgacttgtcatggttgcagcatttgaacttttggtgttaaaaaaaaaaacctgtaagtctgtaacctggcaacattttacaaccctgtatttttaaagatggctttctaataaaaaatccagaaccacacagccctatggtcaaacaatcctacgtttgtgcctctgcttttaaaggtgctgtgctggacagttggcatgccagggttcgagaagagtgaatggcttgacgtccttgcagttaactgtgcaaaattggctggctgcctctgttcctactgtactgtaactttgatcatgtctgttcctattccattctcccaggagcttctctgcagactgacacaccctcccccaccccgggtagtggagatgctggtgtctgggtagtcatggatttctgctgacatttgaatgtgataaacaatccagcattacttaggaaatgctacatgcggaatgtgcacgtttccaggggcgagtattgtcaatcaaaaggtttgcaatgatttccttcctgccaaaaataaacatgtgaaactgc

SEQ ID NO: 185 - protein, 340 aa, Homo sapien
  Unsure 3847: Unknown amino acid
MVTRRRPLEPSGGGRRELGRGPGPPLPERGAGRRARPGSGCERPPAPRPRAPRAAPPRAWLAGGRACGRPPRRAPMDGPAIITQVTNPKEDEGRLPGAGEKASQCNVSLKKQRSRSILSSFFCCFRDYNVEAPPPSSPSVLPPLVEENGGLQKPPAKYLLPEVTVLDYGKKCVVIDLDETLVHSSFKPISNADFIVPVEIDGTIHQVYVLKRPHVDEFLQRMGQLFECVLFTASLAKYADPVADLLDRWGVFRARLFRESCVFHRGNYVKDLSRLGRELSKVIIVDNSPASYIFHPENAVPVQSWFDDMTDTELLDLIPFFEGLSREDDVYSMLHRLCNR

SEQ ID NO: 186 - DNA, 2587 bp, Homo sapien
ggcacacacgaggaggagggttgagctgctgccgccgccgcctctgtcgtcgtcgcgagtgtggagtcgggactggagctgctgccgcggcgacgccggggatctttgtcgctagctcccggcccttctgccccgccgccttccctcagtcagcgttgcccactcctctccggccgggcgcccctgcctccatttctcgctctctgtccaccacacacacggcccccccgatcatggatccgggcagtggcggcggcggcggcggcggcggcggcggcgggagcagcagcggcagcagcagcagcgactcggcgcctgactgctgggaccaggcggacatggaagcccccgggccgggcccttgcggcggcggcggcttccctggcggcggcggccgaggcccagcgggagaacctcagcgcggccttcagccggcaactcaacgtcaacgccaagcccttcgtgcccaacgtccacgccgccgagttcgtgccgtccttcctgcggggcccggcagcgccgccacccccagctggcggcgccgccaataaccacggagccggcagcggcgcgggaggccgtgcggcacctgtggaatcctctcaagaggaacagtcattgtgtgaaggttcaaattcagctgttagcatggaactttcagaacctattgtagaaaatggagagacagaaatgtctccagaagaatcatgggagcacaaagaagaaataagtgaagcagagccagggggtggttccttgggagatggaaggccgccagaggaaagtgcccatgaaatgatggaggaggaagaggaaatcccaaaacctaagtctgtggttgcaccgccaggtgctcctaagaaagagcatgtaaatgtagtattcattgggcacgtagatgctggcaagtcaaccattggaggacaaataatgtatttgactggaatggttgacaaaaggacgcttgaaaagtatgaaagagaagctaaagagaaaaacagagaaacttggtacttgtcttgggccttagacacaaatcaggaagaacgagacaagggtaaaacagtagaagtgggtcgtgcctattttgaaaccgaaaagaagcatttcacaattctagatgcccctggccacaagagttttgtcccaaatatgattggtggtgcctctcaagctgatttggctgtgctggtaatctcagccaggaaaggagagtttgaaactggatttgaaaaaggaggacagacaagagaacatgcaatgttggcaaagacagcaggtgtaaaacacctaattgtgctaattaataagatggatgatccaacagtaaattggagcaatgagagatatgaagaatgtaaggagaaactagtgccatttttgaaaaaagttggcttcaatcccaaaaaggacattcactttatgccctgctcaggacttactggagcaaatctcaaagagcagtcggatttctgtccttggtacattggattaccgtttattccatatctggataatttgccgaacttcaatagatcagttgatggaccaatcaggctgccaattgtggataagtacaaggatatgggcactgtggtcctgggaaagctggaatcaggatctatttgtaaaggccagcagcttgtgatgatgccaaacaagcacaacgtggaagttcttggaatactttccgatgatgtagagactgataccgtagccccaggtgaaaacctcaaaatcagactgaaaggaattgaagaagaggagattcttccagggtttatactttgtgatcctaataatctttgtcattctggacgcacatttgatgcccagatagtgattatagagcacaaatccatcatctgcccaggctataatgcggtgctgcatattcatacctgtattgaggaggtggaaataacagccttaatctgcttggtagacaaaaaatcaggagaaaaaagtaagacccgaccccgttttgtgaaacaagatcaagtatgcattgctcgcttaaggacagcaggaaccatctgccttgagacctttaaagacttccctcagatgggtcgtttcaccttaagagatgagggtaagaccattgcaattggaaaagttctgaaactggttccagagaaagactaagcattttcttgatgaccctgcacaatactgtgaggaaaattgactgcagaagcctacttcacaccgccttctcttattttctgcccattgataaacctctccccatattttgcaaagaggaaattcacagcaaaagtccacattatgtcagctttctcatattgagagctctgctatgccactgttgaatttttcccaagattcctgtccctagccctcacttcaaactctgcttccttggacagatttggcaatagctttgtaagtgatgtggacataattgcctacaataatgaaaacctacaggaatttttttatttttcattttccccttaggcatatttagtatttttcccccaggccagatcattcgtgagtgtgcgagtgtgtgtgcacatgttacaaaggcaactaccatgttaataaaatattcaatttg

SEQ ID NO: 187 - protein, 499 aa, Homo sapien
MELSEPIVENGETEMSPEESWEHKEEISEAEPGGGSLGDGRPPEESAHEMMEEEEEIPKPKSVVAPPGAPKKEHVNVVFIGHVDAGKSTIGGQIMYLTGMVDKRTLEKYEREAKEKNRETWYLSWALDTNQEERDKGKTVEVGRAYFETEKKHFTILDAPGHKSFVPNMIGGASQADLAVLVISARKGEFETGFEKGGQTREHAMLAKTAGVKHLIVLINKMDDPTVNWSNERYEECKEKLVPFLKKVGFNPKKDIHFMPCSGLTGANLKEQSDFCPWYIGLPFIPYLDNLPNFNRSVDGPIRLPIVDKYKDMGTVVLGKLESGSICKGQQLVMMPNKHNVEVLGILSDDVETDTVAPGENLKIRLKGIEEEEILPGFILCDPNNLCHSGRTFDAQIVIIEHKSIICPGYNAVLHIHTCIEEVEITALICLVDKKSGEKSKTRPRFVKQDQVCIARLRTAGTICLETFKDFPQMGRFTLRDEGKTIAIGKVLKLVPEKD

SEQ ID NO: 188 - DNA, 2001 bp, Homo sapien
gaagggcggcgcgcttaggcaggcggtggcgcggctggagtgccgcggggagggctgtgccggttgctttctgcagccgcatctcggccagctctcctcgccgtccccggggcgctgtgcgtctccagtccgggaccgaagccgcctgccgtagcgggcggccagatccgcgtcccgcctcagcggccggaggacatgcgggagagagaatgagccagagggacacgctggtgcatctgtttgccggaggatgtggtggtacagtgggagctattctgacatgtccactggaagttgtaaaaacacgactgcagtcatcttctgtgacgctttatatttctgaagttcagctgaacaccatggctggagccagtgtcaaccgagtagtgtctcccggacctcttcattgcctaaaggtgatcttggaaaaagaagggcctcgttccttgtttagaggactaggccccaatttagtgggggtagccccttccagagcaatatactttgctgcttattcaaactgcaaggaaaagttgaatgatgtatttgatcctgattctacccaagtacatatgatttcagctgcaatggcaggttttactgcaatcacagcaaccaaccccatttggcttataaagactcggttacagcttgatgcaaggaaccgcggggaaaggcgaatgggtgcttttgaatgtgttcgtaaagtgtatcagacagatggactaaaaggattttataggggcatgtctgcttcatatgctggtatatcagagactgttatccattttgttatttatgaaagtataaaacaaaaactactggaatataagactgcttctacaatggaaaatggtgaagagtctgtgaaagaagcatcagattttgtgggaatgatgctagctgctgccacctcaaaaacttgtgccacaactatagcatatccacatgttgtaagaacaagactacgtgaagagggaacaaaatacagatctttttttcagactctatctttgcttgttcaagaagaaggttatgggtctctttatcgtggtctgacaactcatctagtgagacagattccaaacacagccattatgatggccacctatgaattggtggtttacctactcaatggatagcagcacgaggactgctgtactgcaaaaaaagaagaccaaaagattacagtggaccatgggatacagaagccagcatggcagacagaagaaaaatagtttgggaacatgtaactattctaagtggaagttttgttgtaggaattatagtaatcacaccacattacttggcctttcggtaatgtgaaaaaaaaaaaaaaacctcagagcctccaaggaaatgcctttagaagcactcctctctcaaaattgccattttctctaccatgtcccccagacacagttgggttttgttgatttatggcagtcttctaaacaaagccatccttaattttacatactgtattgtaactatccaaagatagtattggcagtcataaatttataacttctggcctttgtttaattccagtaaaataacagcaatgacaatgagatcgtcagtattattttcacatttccctgagaggacctggcacaatattttaaatttaattatttggcagtagtcactgtttttgacaaccaatgaaatagcgtctaaatatcttgtatattttttagcatcaaaatgttttggtttccactgctgacaggtgcttgttgtttagcctaatgtggatatttaaattgttaacataccaaacacacatggtaatagtttgggacaaaataactagtaaaatgttgatttctcggctatttcactgactgcggcatgtcctcgtgtcttctctgattttgtggtacatgaatgaatgcatttatctttttagtgacttactagttacgaacttgaattatcacctctttgtcatacttaagtatcatttacataaagtgtaaaagattttttcacttt

SEQ ID NO: 189 - protein, 310 aa, Homo sapien
MSQRDTLVHLFAGGCGGTVGAILTCPLEVVKTRLQSSSVTLYISEVQLNTMAGASVNRVVSPGPLHCLKVILEKEGPRSLFRGLGPNLVGVAPSRAIYFAAYSNCKEKLNDVFDPDSTQVHMISAAMAGFTAITATNPIWLIKTRLQLDARNRGERRMGAFECVRKVYQTDGLKGFYRGMSASYAGISETVIHFVIYESIKQKLLEYKTASTMENGEESVKEASDFVGMMLAAATSKTCATTIAYPHVVRTRLREEGTKYRSFFQTLSLLVQEEGYGSLYRGLTTHLVRQIPNTAIMMATYELVVYLLNG

SEQ ID NO: 190 - DNA, 1935 bp, Homo sapien
ctggtcccgagcacgagctgtgaggggattcacttgtgtgcggaactcctcggaaccatggcgtccctttcccttgcacctgttaacatctttaaggcaggagctgatgaagagagagcagagacagctcgtctgacttcttttattggtgccatcgccattggagacttggtaaagagcaccttgggacccaaaggcatggacaaaattcttctaagcagtggacgagatgcctctcttatggtaaccaatgatggtgccactattctaaaaaacattggtgttgacaatccagcagctaaagttttagttgatatgtcaagggttcaagatgatgaagttggtgatggcactacctctgttaccgttttagcagcagaattattaagggaagcagaatctttaattgcaaaaaagattcatccacagaccatcatagcgggttggagagaagccacgaaggctgcaagagaggcgctgttgagttctgcagttgatcatggttccgatgaagttaaattccgtcaagatttaatgaatattgcgggcacaacattatcctcaaaacttcttactcatcacaaagaccactttacaaagttagctgtagaagcagttctcagactgaaaggctctggcaacctggaggcaattcatattatcaagaagctaggaggaagtttggcagattcctatttagatgaaggcttcctgttggataaaaaaattggagtaaatcaaccaaaacgaattgaaaatgctaaaattcttattgcaaatactggtatggatacagacaaaataaagatatttggttcccgggtaagagttgactctacagcaaaggttgcagaaatagaacatgcggaaaaggaaaaaatgaaggagaaagttgaacgtattcttaagcatggaataaattgctttattaacaggcaattaatttataattatcctgaacagctctttggtgctgctggtgtcatggctattgagcatgcagattttgcaggtgtggaacgcctagctcttgtcacaggtggtgaaattgcctctacctttgatcacccagaactggtgaagcttggaagttgcaaacttatcgaggaagtcatgattggagaagacaaactcattcacttttctggggttgcccttggtgaggcttgtaccattgttttgcgtggtgccactcaacaaattttagatgaagcagaaagatcattgcatgatgctctttgtgttcttgcgcaaactgtaaaggactctagaacagtttatggaggaggctgttctgagatgttgatggctcatgctgtgacacagcttgccaatagaacaccaggcaaagaagctgttgcaatggagtcttatgctaaagcactgagaatgttgccaaccatcatagctgacaatgcaggctatgacagtgcagacctggtggcacagctcagggctgctcacagtgaaggcaataccactgctggattggatatgagggaaggcaccattggagatatggctatcctgggtataacagaaagttttcaagtgaagcgacaggttcttctgagtgcagctgaagcagcagaggtgattctgcgtgtggacaacatcatcaaagcggcacccaggaaacgtgtccctgatcaccacccctgttaagcattcccacgtgctgtcgatctttggaccagtttctagcaaagttgtgtttgaaagatactctattaaagaagactgtggaatctgtttatcggtgcccattatatccttaagtttggatatttagctgaccttcgctttaacataggtctaatttatttgccgtgtcattttccatacaaatcagttgatttaaaggagttcatttcgcatactgggcattaaaataaaaatttgaacaatgaaaggaaaaaaaggagaaaaaaaaaa

SEQ ID NO: 191 - protein, 535 aa, Homo sapien
MASLSLAPVNIFKAGADEERAETARLTSFIGAIAIGDLVKSTLGPKGMDKILLSSGRDASLMVTNDGATILKNIGVDNPAAKVLVDMSRVQDDEVGDGTTSVTVLAAELLREAESLIAKKIHPQTIIAGWREATKAAREALLSSAVDHGSDEVKFRQDLMNIAGTTLSSKLLTHHKDHFTKLAVEAVLRLKGSGNLEAIHIIKKLGGSLADSYLDEGFLLDKKIGVNQPKRIENAKILIANTGMDTDKIKIFGSRVRVDSTAKVAEIEHAEKEKMKEKVERILKHGINCFINRQLIYNYPEQLFGAAGVMAIEHADFAGVERLALVTGGEIASTFDHPELVKLGSCKLIEEVMIGEDKLIHFSGVALGEACTIVLRGATQQILDEAERSLHDALCVLAQTVKDSRTVYGGGCSEMLMAHAVTQLANRTPGKEAVAMESYAKALRMLPTIIADNAGYDSADLVAQLRAAHSEGNTTAGLDMREGTIGDMAILGITESFQVKRQVLLSAAEAAEVILRVDNIIKAAPRKRVPDHHPC

SEQ ID NO: 192 - DNA, 4235 bp, Homo sapien
gaatccaagggggccagttcctgccgtctgctcttctgcctcttgatctccgccaccgtcttcaggccaggccttggatggtatactgtaaattcagcatatggagataccattatcataccttgccgacttgacgtacctcagaatctcatgtttggcaaatggaaatatgaaaagcccgatggctccccagtatttattgccttcagatcctctacaaagaaaagtgtgcagtacgacgatgtaccagaatacaaagacagattgaacctctcagaaaactacactttgtctatcagtaatgcaaggatcagtgatgaaaagagatttgtgtgcatgctagtaactgaggacaacgtgtttgaggcacctacaatagtcaaggtgttcaagcaaccatctaaacctgaaattgtaagcaaagcactgtttctcgaaacagagcagctaaaaaagttgggtgactgcatttcagaagacagttatccagatggcaatatcacatggtacaggaatggaaaagtgctacatccccttgaaggagcggtggtcataatttttaaaaaggaaatggacccagtgactcagctctataccatgacttccaccctggagtacaagacaaccaaggctgacatacaaatgccattcacctgctcggtgacatattatggaccatctggccagaaaacaattcattctgaacaggcagtatttgatatttactatcctacagagcaggtgacaatacaagtgctgccaccaaaaaatgccatcaaagaaggggataacatcactcttaaatgcttagggaatggcaaccctcccccagaggaatttttgttttacttaccaggacagcccgaaggaataagaagctcaaatacttacacactgacggatgtgaggcgcaatgcaacaggagactacaagtgttccctgatagacaaaaaaagcatgattgcttcaacagccatcacagttcactatttggatttgtccttaaacccaagtggagaagtgactagacagattggtgatgccctacccgtgtcatgcacaatatctgctagcaggaatgcaactgtggtatggatgaaagataacatcaggcttcgatctagcccgtcattttctagtcttcattatcaggatgctggaaactatgtctgcgaaactgctctgcaggaggttgaaggactaaagaaaagagagtcattgactctcattgtagaaggcaaacctcaaataaaaatgacaaagaaaactgatcccagtggactatctaaaacaataatctgccatgtggaaggttttccaaagccagccattcagtggacaattactggcagtggaagcgtcataaaccaaacagaggaatctccttatattaatggcaggtattatagtaaaattatcatttcccctgaagagaatgttacattaacttgcacagcagaaaaccaactggagagaacagtaaactccttgaatgtctctgctataagtattccagaacacgatgaggcagacgagataagtgatgaaaacagagaaaaggtgaatgaccaggcaaaactaattgtgggaatcgttgttggtctcctccttgctgcccttgttgctggtgtcgtctactggctgtacatgaagaagtcaaagactgcatcaaaacatgtaaacaaggacctcggtaatatggaagaaaacaaaaagttagaagaaaacaatcacaaaactgaagcctaagagagaaactgtcctagttgtccagagataaaaatcatatagaccaattgaagcatgaacgtggattgtatttaagacataaacaaagacattgacagcaattcatgttcaagtattaagcagttcattctaccaagctgtcacaggttttcagagaattatctcaagtaaaacaaatgaaatttaattacaaacaataagaacaagttttggcagccatgataataggtcatatgttgtgtttggttcaattttttttccgtaaatgtctgcactgaggatttctttttggtttgccttttatgtaaattttttacgtagctatttttatacactgtaagctttgttctgggagttgctgttaatctgatgtataatgtaatgtttttatttcaattgtttatatggataatctgagcaggtacatttctgattctgattgctatcagcaatgccccaaactttctcataagcacctaaaacccaaaggtggcagcttgtgaagattggggacactcatattgccctaattaaaaactgtgatttttatcacaagggaggggaggccgagagtcagactgatagacaccataggagccgactctttgatatgccaccagcgaactctcagaaataaatcacagatgcatatagacacacatacataatggtactcccaaactgacaattttacctattctgaaaaagacataaaacagaatttggtagcacttacctctacagacacctgctaataaattattttctgtcaaaagaaaaaacacaagcatgtgtgagagacagtttggaaaaatcatggtcaacattcccattttcatagatcacaatgtaaatcactataattacaaattggtgttaaatcctttgggttatccactgccttaaaattatacctatttcatgtttaaaaagatatcaatcagaattggagtttttaacagtggtcattatcaaagctgtgttattttccacagaatatagaatatatatttttttcgtgtgtgtttttgttaactaccctacagatattgaatgcaccttgagataatttagtgttttaactgatacataatttatcaagcagtacatgaaagtgtaataataaaatgtctatgtatctttagttacattcaaatttgtaactttataaacatgttttatgcttgaggaaatttttaaggtggtagtataaatggaaactttttgaagtagaccagatatgggctacttgtgactagacttttaaactttgctctttcaagcagaagcctggtttctgggagaacactgcacagtgatttctttcccaggatttacacaactttaaagggaagataaatgaacatcagatttctaggtatagaactatgttattgaaaggaaaaggaaaactggtgtttgtttcttagactcatgaaataaaaaattatgaaggcaatgaaaaataaattgaaaattaaagtcagatgagaataggaataatactttgccacttctgcattatttagaaacatacgttattgtacatttgtaaaccatttactgtctgggcaatagtgactccgtttaataaaagcttccgtagtgcattggtatggattaaatgcataaaatatcttagactcgatgctgtataaaatattatgggaaaaaagaaatacgttattttgcctctaaacttttattgaagttttatttggcaggaaaaaaaattgaatcttggtcaacatttaaaccaaagtaaaaggggaaaaaccaaagttatttgttttgcatggctaagccattctgttatctctgtaaatactgtgatttcttttttattttctctttagaattttgttaaagaaattctaaaatttttaaacacctgctctccacaataaatcacaaacactaaaataaaattacttccatataaatattattttctcttttggtgtgggagatcaaaggtttaaagtctaacttctaagatatatttgcagaaagaagcaacatgacaatagagagagttatgctacattatttcttggtttccacttgcaatggttaattaagtccaaaaacagctgtcagaacctcgagagcagaacatgagaaactcagagctctggaccgaaagcagaaagtttgccggaaaaaaaaagaccacattattaccatcgattcagtgcctggataaagaggaaagcttacttgtttaatggcagccacatgcacgaagatgctaagaagaaaaagaattccaaatcctcaacttttgaggtttcggctctccaatttaactctttggcaacaggaaacaggttttgcaagttcaaggttcactccctatatgtgattataggaattgtttgtggaaatggattaacatacccgtctatgcctaaaagataataagaaaactgaaatatgtcttcaaaaaaaaaaaaaaaaaaaaaaaaaaaaaaaaaaaaaaaaaa

SEQ ID NO: 193 - DNA, 2470 bp, Homo sapien
gaattcggcacgagccgggatcctgtgtagcggctgcagagggtgccgccgccctaggcgaagtagggccgtcctgagcgaaagaaccgcccccagcaggagcaccaccacggcttagcaaagaatcccagaccccgcccgggaaggcagccgcaccatggagtcttccagttcatctaactcttatttctccgttggcccaaccagtcccagcgctgtcgtgctcctctactcgaaggagctcaaaaagtgggatgagtttgaagatattttagaagagaggaggcatgtcagtgacttgaaatttgcaatgaaatgctacacacctcttgtctataagggaattactccatgtaaaccaattgatattaaatgtagtgttctcaattctgaggagattcattatgtcattaaacagctttccaaggaatcccttcaatctgtggatgtcctccgagaggaagtgagtgagatcttagatgaaatgagtcacaaactgcgtcttggagccattcggttttgtgccttcaccctgagcaaagtatttaaacaaattttctcgaaggtgtgtgtaaatgaagaaggtattcagaaactacaaagagccatccaggagcatcctgttgttctgctgcctagtcatcgaagttacattgacttcctcatgttgtcttttcttctatacaattatgatttgcctgtgccagttatagcagcaggaatggacttcctgggaatgaaaatggttggtgagctgctacgaatgtcgggtgcctttttcatgcggcgtacctttggtggcaataaactctactgggctgtattctctgaatatgtaaaaactatgttacggaatggttatgctcctgttgaatttttcctcgaagggacaagaagccgctctgccaagacattgactcctaaatttggtcttctgaatattgtgatggagccattttttaaaagagaagtttttgatacctaccttgtcccaattagtatcagttatgataagatcttggaagaaactctttatgtgtatgagcttctaggggttcctaaaccaaaagagtctacaactgggttgctgaaagccagaaagattctctctgaaaattttggaagcatccatgtgtactttggagatcctgtgtcacttcgatctttggcagctgggaggatgagtcggagctcatataacttggttccaagatacattcctcagaaacagtctgaggacatgcatgcctttgtcactgaagttgcctacaaaatggagcttctgcaaattgaaaacatggttttgagcccctggaccctaatagttgctgttctgcttcagaaccggccatccatggactttgatgctctggtggaaaagactttatggctaaaaggcttaacccaggcatttggagggtttctcatttggcctgataataaacctgctgaagaagttgtcccggccagcattcttctgcattccaacattgccagccttgtcaaagaccaggtgattctgaaagtggactccggagactcggaagtggtcgatgggcttatgctccagcacatcactctcctcatgtgctcagcttataggaaccagctgctcaacatttttgtgcgcccatccttagtagcagtagcattgcagatgacaccagggttcaggaaagaggatgtctacagttgctttcgcttcctacgtgatgtttttgcagatgagttcatcttccttccaggaaacacactaaaggactttgaagaaggctgttacctgctttgtaaaagtgaagccatacaagtgactacgaaagacatcctagttacagagaaaggaaatactgtgttagaatttttagtaggactctttaaaccttttgtggaaagctatcagataatttgcaagtaccttttgagtgaagaagaggaccacttcagtgaggaacagtacttggctgcagtcagaaaattcacaagtcagcttctcgatcaaggtacctctcaatgttatgatgtattatcttctgatgtgcagaaaaacgccttagcagcctgtgtgaggctcggagtagtggagaagaagaagataaataataactgtatatttaatgtgaatgaacctgccacaaccaaattagaagaaatgcttggttgtaagacaccaataggaaaaccagccactgcaaaactttaataatcaacaaatagttatggaaaattcggtcacgtaattactctcatcgaaggactcattacaacaaacagggaagtaaaggaagagacacatcctctcatactccctgagactctgagaacagtggacgcagagggaagagatgatcattggaagcaatcagtttactcttccccaccacagtggttaaaaggcgtttgtatctgacactatgtgtgtgttttaaaataaacttttggaaacatgaaaaaaaaaaaaaaaaaactcgag

SEQ ID NO: 194 - protein, 680 aa, Homo sapien
MESSSSSNSYFSVGPTSPSAVVLLYSKELKKWDEFEDILEERRHVSDLKFAMKCYTPLVYKGITPCKPIDIKCSVLNSEEIHYVIKQLSKESLQSVDVLREEVSEILDEMSHKLRLGAIRFCAFTLSKVFKQIFSKVCVNEEGIQKLQRAIQEHPVVLLPSHRSYIDFLMLSFLLYNYDLPVPVIAAGMDFLGMKMVGELLRMSGAFFMRRTFGGNKLYWAVFSEYVKTMLRNGYAPVEFFLEGTRSRSAKTLTPKFGLLNIVMEPFFKREVFDTYLVPISISYDKILEETLYVYELLGVPKPKESTTGLLKARKILSENFGSIHVYFGDPVSLRSLAAGRMSRSSYNLVPRYIPQKQSEDMHAFVTEVAYKMELLQIENMVLSPWTLIVAVLLQNRPSMDFDALVEKTLWLKGLTQAFGGFLIWPDNKPAEEVVPASILLHSNIASLVKDQVILKVDSGDSEVVDGLMLQHITLLMCSAYRNQLLNIFVRPSLVAVALQMTPGFRKEDVYSCFRFLRDVFADEFIFLPGNTLKDFEEGCYLLCKSEAIQVTTKDILVTEKGNTVLEFLVGLFKPFVESYQIICKYLLSEEEDHFSEEQYLAAVRKFTSQLLDQGTSQCYDVLSSDVQKNALAACVRLGVVEKKKINNNCIFNVNEPATTKLEEMLGCKTPIGKPATAKL

SEQ ID NO: 195 - DNA, 3635 bp, Homo sapien
tcaacacaggacaatgcaagcccatgagctgttccggtattttcgaatgccagagctggttgacttccgacagtacgtgcgtactcttccgaccaacacgcttatgggcttcggagcttttgcagcactcaccaccttctggtacgccacgagacccaaacccctgaagccgccatgcgacctctccatgcagtcagtggaagtggcgggtagtggtggtgcacgaagatccgcactacttgacagcgacgagcccttggtgtatttctatgatgatgtcacaacattatacgaaggtttccagaggggaatacaggtgtcaaataatggcccttgtttaggctctcggaaaccagaccaaccctatgaatggctttcatataaacaggttgcagaattgtcggagtgcataggctcagcactgatccagaagggcttcaagactgccccagatcagttcattggcatctttgctcaaaatagacctgagtgggtgattattgaacaaggatgctttgcttattcgatggtgatcgttccactttatgatacccttggaaatgaagccatcacgtacatagtcaacaaagctgaactctctctggtttttgttgacaagccagagaaggccaaactcttattagagggtgtagaaaataagttaataccaggccttaaaatcatagttgtcatggatgcctacggcagtgaactggtggaacgaggccagaggtgtggggtggaagtcaccagcatgaaggcgatggaggacctgggaagagccaacagacggaagcccaagcctccagcacctgaagatcttgcagtaatttgtttcacaagtggaactacaggcaaccccaaaggagcaatggtcactcaccgaaacatagtgagcgattgttcagcttttgtgaaagcaacagagaatacagtcaatccttgcccagatgatactttgatatctttcttgcctctcgcccatatgtttgagagagttgtagagtgtgtaatgctgtgtcatggagctaaaatcggatttttccaaggagatatcaggctgctcatggatgacctcaaggtgcttcaacccactgtcttccccgtggttccaagactgctgaaccggatgtttgaccgaattttcggacaagcaaacaccacgctgaagcgatggctcttggactttgcctccaagaggaaagaagcagagcttcgcagcggcatcatcagaaacaacagcctgtgggaccggctgatcttccacaaagtacagtcgagcctgggcggaagagtccggctgatggtgacaggagccgccccggtgtctgccactgtgctgacgttcctcagagcagccctgggctgtcagttttatgaaggatacggacagacagagtgcactgccgggtgctgcctaaccatgcctggagactggaccgcaggccatgttggggccccgatgccgtgcaatttgataaaacttgttgatgtggaagaaatgaattacatggctgccgagggcgagggcgaggtgtgtgtgaaagggccaaatgtatttcagggctacttgaaggacccagcgaaaacagcagaagctttggacaaagacggctggttacacacaggggacattggaaaatggttaccaaatggcaccttgaaaattatcgaccggaaaaagcacatatttaagctggcacaaggagaatacatagcccctgaaaagattgaaaatatctacatgcgaagtgagcctgttgctcaggtgtttgtccacggagaaagcctgcaggcatttctcattgcaattgtggtaccagatgttgagacattatgttcctgggcccaaaagagaggatttgaagggtcgtttgaggaactgtgcagaaataaggatgtcaaaaaagctatcctcgaagatatggtgagacttgggaaggattctggtctgaaaccatttgaacaggtcaaaggcatcacattgcaccctgaattattttctatcgacaatggccttctgactccaacaatgaaggcgaaaaggccagagctgcggaactatttcaggtcgcagatagatgacctctattccactatcaaggtttagtgtgaagaagaaagctcagaggaaatggcacagttccacaatctcttctcctgctgatggccttcatgttgttaattttgaatacagcaagtgtagggaaggaagcgttcgtgtttgacttgtccattcggggttcttctcataggaatgctagaggaaacagaacaccgccttacagtcacctcatgttgcagaccatgtttatggtaatacacactttccaaaatgagccttaaaaattgtaaaggggatactataaatgtgctaagttatttgagacttcctcagtttaaaaagtgggttttaaatcttctgtctccctgcttttctaatcaaggggttaggactttgctatctctgagatgtctgctacttgctgcaaattctgcagctgtctgctgctctaaagagtacagtgcactagagggaagtgttccctttaaaaataagaacaactgtcctggctggagaatctcacaagcggaccagagatctttttaaatccctgctactgtcccttctcacaggcattcacagaacccttctgattcgtaagggttacgaaactcatgttcttctccagtcccctgtggtttctgttggagcataaggtttccagtaagcgggagggcagatccaactcagaaccatgcagataaggagcctctggcaaatgggtgctcatcagaacgcgtggattctctttcatggcagaatgctcttggactcggttctccaggcctgattccccgactccatcctttttcaggggttatttaaaaatctgccttagattctatagtgaagacaagcatttcaagaaagagttacctggatcagccatgctcagctgtgacgcctgaataactgtctactttatcttcactgaaccactcactctgtgtaaaggccaacagatttttaatgtggttttcatatcaaaagatcatgttgggattaacttgcctttttccccaaaaaataaactctcaggcaagcatttctttaaagctattaagggagtatatacttgagtacttattgaaatggacagtaataagcaaatgttcttataatgctacctgatttctatgaaatgtgtttgacaagccaaaattctaggatgtagaaatctggaaagttcatttcctgggattcacttctccagggattttttaaagttaatttgggaaattaacagcagttcactttattgtgagtctttgccacatttgactgaattgagctgtcatttgtacatttaaagcagctgttttggggtctgtgagagtacatgtattatatacaagcacaacagggcttgcactaaagaattgtcattgtaataacactacttggtagcctaacttcatatatgtattcttaattgcacaaaaagtcaataatttgtcaccttggggttttgaatgtttgctttaagtgttggctatttctatgttttataaaccaaaacaaaatttccaaaaacaatgaaggaaaccaaaataaatatttctgcatttcg

SEQ ID NO: 196 - protein, 698 aa, Homo sapien
MQAHELFRYFRMPELVDFRQYVRTLPTNTLMGFGAFAALTTFWYATRPKPLKPPCDLSMQSVEVAGSGGARRSALLDSDEPLVYFYDDVTTLYEGFQRGIQVSNNGPCLGSRKPDQPYEWLSYKQVAELSECIGSALIQKGFKTAPDQFIGIFAQNRPEWVIIEQGCFAYSMVIVPLYDTLGNEAITYIVNKAELSLVFVDKPEKAKLLLEGVENKLIPGLKIIVVMDAYGSELVERGQRCGVEVTSMKAMEDLGRANRRKPKPPAPEDLAVICFTSGTTGNPKGAMVTHRNIVSDCSAFVKATENTVNPCPDDTLISFLPLAHMFERVVECVMLCHGAKIGFFQGDIRLLMDDLKVLQPTVFPVVPRLLNRMFDRIFGQANTTLKRWLLDFASKRKEAELRSGIIRNNSLWDRLIFHKVQSSLGGRVRLMVTGAAPVSATVLTFLRAALGCQFYEGYGQTECTAGCCLTMPGDWTAGHVGAPMPCNLIKLVDVEEMNYMAAEGEGEVCVKGPNVFQGYLKDPAKTAEALDKDGWLHTGDIGKWLPNGTLKIIDRKKHIFKLAQGEYIAPEKIENIYMRSEPVAQVFVHGESLQAFLIAIVVPDVETLCSWAQKRGFEGSFEELCRNKDVKKAILEDMVRLGKDSGLKPFEQVKGITLHPELFSIDNGLLTPTMKAKRPELRNYFRSQIDDLYSTIKV

SEQ ID NO: 197 - DNA, 2476 bp, Homo sapien
cggccagcacaccccggcacctcctctgcggcagctgcgcctcgcaagcgcagtgccgcagcgcacgccggagtggctgtagctgcctcggcgcggctgccgccctgcgcgggctgtgggctgcgggctgcgcccccgctgctggccagctctgcacggctgcgggctctgcggcgcccggtgctctgcaacgctgcggcgggcggcatgggataacgcggccatggtgcgccgagatcgcctccgcaggatgagggagtggtgggtccaggtggggctgctggccgtgcccctgcttgctgcgtacctgcacatcccaccccctcagctctcccctgcccttcactcatggaagtcttcaggcaagtttttcacttacaagggactgcgtatcttctaccaagactctgtgggtgtggttggaagtccagagatagttgtgcttttacacggttttccaacatccagctacgactggtacaagatttggaagggtctgaccttgaggtttcatcgggtgattgcccttgatttcttaggctttggcttcagtgacaaaccgagaccacatcactattccatatttgagcaggccagcatcgtggaagcgcttttgcggcatctggggctccagaaccgcagaatcaaccttctttctcatgactatggagatattgttgctcaggagcttctctacaggtacaagcagaatcgatctggtcggcataccataaagagtctctgtctgtcaaatggaggtatctttcctgagactcaccgtccactccttctccaaaagctactcaaagatggaggtgtgctgtcacccatcctcacacgactgatgaacttctttgtattctctcgaggtctcaccccagtctttgggccgtatactcggccctctgagagtgagctgtgggacatgtgggcagggatccgcaacaatgacgggaacttagtcattgacagtctcttacagtacatcaatcagaggaagaagttcagaaggcgctgggtgggagctcttgcctctgtaactatccccattcattttatctatgggccattggatcctgtaaatccctatccagagtttttggagctgtacaggaaaacgctgccgcggtccacagtgtcgattctggatgaccacattagccactatccacagctagaggatcccatgggcttcttgaatgcatatatgggcttcatcaactccttctgagctggaaagagtagcttccctgtattacctcccctactcccttatgtgttgtgtattccacttaggaagaaatgcccaaaagaggtcctggccatcaaacataattctctcacaaagtccactttactcaaattggtgaacagtgtataggaagaagccagcaggagctctgactaaggttgacataatagtccacctcccattactttgatatctgatcaaatgtatagacttggctttgttttttgtgctattaggaaattctgatgagcattactattcactgatgcagaaagacgttcttttgcataaaagacttttttttaacactttggacttctctgaaatatttagaagtgctaatttctggcccacccccaacaggaattctatagtaaggaggaggagaaggggggctccttccctctcctcgaatgacgttatgggcacatgccttttaaaagttctttaagcaacacagagctgagtcctctttgtcatacctttggatttagtgtttcatcagctgtttttagttataaacattttgttaaaatagatattggtttaaatgatacagtattttaggtatgatttaagactatgatttacctatacattatatatattttataaagatactaaaccagcatacccttactctgccagagtagtgaagctaattaaacacgtttggtttctgaataaattgaactaaatccaaactatttcctaaaatcacaggacattaaggaccaatagcatctgtgccagagatgtactgttattagctgggaagaccaattctaacagcaaataacagtctgagactcctcatacctcagtggttagaagcatgtctctcttgagctacagtagaggggaagggattgttgtgtagtcaagtcaccatgctgaatgtacactgattcctttatgatgactgcttaactccccactgcctgtcccagagaggctttccaatgtagctcagtaattcctgttactttacagacaggaaagttccagaaactttaagaacaaactctgaaagacctatgagcaaatggtgctgaatactttttttttaaagccacatttcattgtcttagtcaaagcaggattattaagtgattatttaaaattcgtttttttaaattagcaacttcaagtataacaactttgaaactggaataagtgtttattttctattaataaaaatgaattgtgacaaaaaaaaaaccg

SEQ ID NO: 198 - protein, 335 aa, Homo sapien
MVRRDRLRRMREWWVQVGLLAVPLLAAYLHIPPPQLSPALHSWKSSGKFFTYKGLRIFYQDSVGVVGSPEIVVLLHGFPTSSYDWYKIWKGLTLRFHRVIALDFLGFGFSDKPRPHHYSIFEQASIVEALLRHLGLQNRRINLLSHDYGDIVAQELLYRYKQNRSGRHTIKSLCLSNGGIFPETHRPLLLQKLLKDGGVLSPILTRLMNFFVFSRGLTPVFGPYTRPSESELWDMWAGIRNNDGNLVIDSLLQYINQRKKFRRRWVGALASVTIPIHFIYGPLDPVNPYPEFLELYRKTLPRSTVSILDDHISHYPQLEDPMGFLNAYMGFINSF

SEQ ID NO: 199 - DNA, 1856 bp, Homo sapien
ctgacttggcaggactgtgcaattgtcagaaggccgtggggagtgggggccagtgcctgcagcctgccctgcctctctcacaggcccttagagcatcgccaggtgcagagctccacagctctctttcccaaggagtaatcagagggtgagaacgtggagcctggtggacaggtgaaagcactgggatctttctgcccagaaaggggaaagttgcacatttatatcctagagggaagcgacagcagtgcttctccctgtgctgaggtacaggagccatgtggctagaaatcctcctcacttcagtgctgggctttgccatctactggttcatctcccgggacaaagaggaaactttgccacttgaagatgggtggtgggggccaggcacgaggtccgcagccagggaggacgacagcatccgccctttcaaggtggaaacgtcagatgaggagatccacgacttacaccagaggatcgataagttccgtttcaccccacctttggaggacagctgcttccactatggcttcaactccaactacctgaagaaagtcatctcctactggcggaatgaatttgactggaagaagcaggtggagattctcaacagataccctcacttcaagactaagattgaagggctggacatccacttcatccacgtgaagcccccccagctgcccgcaggccataccccgaagcccttgctgatggtgcacggctggcccggctctttctacgagttttataagatcatcccactcctgactgaccccaagaaccatggcctgagcgatgagcacgtttttgaagtcatctgcccttccatccctggctatggcttctcagaggcatcctccaagaaggggttcaactcggtggccaccgccaggatcttttacaagctgatgctgcggctgggcttccaggaattctacattcaaggaggggactgggggtccctgatctgcactaatatggcccagctggtgcccagccacgtgaaaggcctgcacttgaacatggctttggttttaagcaacttctctaccctgaccctcctcctgggacagcgtttcgggaggtttcttggcctcactgagagggatgtggagctgctgtaccccgtcaaggagaaggtattctacagcctgatgagggagagcggctacatgcacatccagtgcaccaagcctgacaccgtaggctctgctctgaatgactctcctgtgggtctggctgcctatattctagagaagttttccacctggaccaatacggaattccgatacctggaggatggaggcctggaaaggaagttctccctggacgacctgctgaccaacgtcatgctctactggacaacaggcaccatcatctcctcccagcgcttctacaaggagaacctgggacagggctggatgacccagaagcatgagcggatgaaggtctatgtgcccactggcttctctgccttcccttttgagctattgcacacgcctgaaaagtgggtgaggttcaagtacccaaagctcatctcctattcctacatggttcgtgggggccactttgcggcctttgaggagccggagctgctcgcccaggacatccgcaagttcctgtcggtgctggagcggcaatgacccacccctctccccccgcctgccacctccccccacaagtgccctccaggcttttcttggggaagataccccttttctgaggaatgagtttgcctccgtcccctgcccatgctgggagcccacgctcaccccctcacccctccaagctcactccccaacccccaactccgtgtggtaagcaacatggctttgatgataaacgactttactcta

SEQ ID NO: 200 - protein, 455 aa, Homo sapien
MWLEILLTSVLGFAIYWFISRDKEETLPLEDGWWGPGTRSAAREDDSIRPFKVETSDEEIHDLHQRIDKFRFTPPLEDSCFHYGFNSNYLKKVISYWRNEFDWKKQVEILNRYPHFKTKIEGLDIHFIHVKPPQLPAGHTPKPLLMVHGWPGSFYEFYKIIPLLTDPKNHGLSDEHVFEVICPSIPGYGFSEASSKKGFNSVATARIFYKLMLRLGFQEFYIQGGDWGSLICTNMAQLVPSHVKGLHLNMALVLSNFSTLTLLLGQRFGRFLGLTERDVELLYPVKEKVFYSLMRESGYMHIQCTKPDTVGSALNDSPVGLAAYILEKFSTWTNTEFRYLEDGGLERKFSLDDLLTNVMLYWTTGTIISSQRFYKENLGQGWMTQKHERMKVYVPTGFSAFPFELLHTPEKWVRFKYPKLISYSYMVRGGHFAAFEEPELLAQDIRKFLSVLERQ

SEQ ID NO: 201 - DNA, 6455 bp, Homo sapien
gaggaagcgattctggggtttctgtgttgaacggttcttgtccgcgaagatgcgcttcggcctctgtcaggggacttgaacgggcttagtgggcttcagccagcttttctccaccggttccccacggggaccccccccccccggccgttgcaatggcgggcgtggggccggggggctacgcggcggagttcgtgccaccgccagagtgccccgtctttgagccgagttgggaggagttcacagatccgctcagctttatcggccgcatccggcctttggcggagaaaaccggcatctgcaaaattcggccgcccaaggactggcagcctccatttgcctgtgaagtaaaaagctttcgtttcactccaagagtccagcgcctgaatgaacttgaggcaatgaccagagtgagattggatttcttggatcaactagcaaaattttgggaacttcaaggatctactctgaagatccctgtggtagagagaaaaatcctggatctgtatgctttgagcaagattgttgccagcaaaggaggttttgaaatggtcaccaaagagaagaaatggtctaaagtgggtagtcgcttgggatatctgccaggaaaaggaactgggtctcttttgaagtcacattatgaaagaattctctacccatatgagcttttccagtctggtgtgagccttatgggtgtgcagatgcctaatttagatcttaaagaaaaagtggagcctgaggttctcagcactgatacccaaacttccccagagccaggcacaaggatgaacattctgccgaagagaacaagacgtgtgaagactcagtcagaatctggagatgtgagtagaaacacggaactgaagaaacttcagatttttggggctgggcccaaggttgtgggcttggcaatgggaacaaaagataaagaagatgaggtcacccgaagacgaaaagttaccaacaggtcagacgcatttaacatgcaaatgagacaacggaaaggcactctctctgttaactttgttgatctctatgtttgtatgttttgtggtcggggaaacaatgaagataaattgcttttgtgtgatggatgtgatgacagctatcatacattttgtctaattcctccactacctgatgtgcccaaaggagactggaggtgtcctaaatgtgtcgccgaggaatgtagcaaacctcgagaagcctttggatttgaacaagctgtacgagagtatacacttcagagctttggagagatggcagataattttaagtctgattattttaatatgccagtccatatggttcccacagaactagtagaaaaggaattttggcggctggtaagcagcattgaagaagatgttattgtggaatatggagcagatatctcctcaaaagactttggaagtggatttccggtgaaggatgggcggagaaagattctgccagaagaagaggaatatgcactttctggttggaatttgaataacatgcctgtcctggaacagtctgttcttgcacatattaatgtggacatctctggtatgaaagtgccgtggctctatgtgggaatgtgcttctcttctttttgctggcacattgaggatcactggagttattccatcaactacttgcactggggggagccaaagacatggtatggtgtgccatctcatgctgcagagcaactggaggaggtgatgagagagctggcccccgagttatttgaatcccagcctgatcttctgcatcagttagttaccatcatgaaccccaacgtgctaatggagcatggtgtgcctgtgtacaggaccaatcagtgtgctggcgagtttgttgtgacatttcctcgtgcctatcactctggatttaaccagggctacaactttgctgaagctgtgaacttctgtactgctgactggttgcccattggacgtcaatgtgtaaatcattaccgacgcctaaggcgccactgtgtcttttcacacgaggaactaattttcaagatggcagcagatccagaatgcttagatgtggggctggctgccatggtctgcaaagaattgactctcatgactgaagaagaaacacgattaagagagtctgttgtacagatgggtgtcctgatgtcagaagaagaagtgtttgaacttgttcctgatgatgagcggcagtgttcagcatgcagaaccacatgttttctctctgctctcacatgttcctgtaatcctgagcggcttgtatgtctctaccatccaactgatctgtgcccctgccccatgcagaagaaatgtcttagatatcgctacccattagaagacctcccttctctgctatatggtgtaaaagtcagggcacagtcctatgacacttgggtcagtcgtgttacagaagcattgtctgctaacttcaaccacaaaaaagatttgattgaattgcgagtaatgctggaagatgctgaggataggaaatacccagagaatgatctctttcgaaaactcagggatgctgtaaaagaagctgagacctgtgcttctgtggctcagctgcttctgagcaaaaagcagaaacacagacagagcccagatagtgggaggactcggaccaaactgacagtggaagaattgaaggcctttgtccaacaactttttagtcttccgtgtgtcatcagccaagctcggcaagtaaagaatctgctagatgatgtggaagagtttcatgaacgtgctcaggaggccatgatggatgaaaccccagattcttccaaactccagatgttgatagatatgggctctagtctctatgtggaactccctgaattaccacgactgaagcaagagctacaacaggctcggtggttggacgaagtaagactgaccttatcagatccgcaacaagtcactttggatgtcatgaagaagctgatagactctggggtagggttggcaccccaccatgctgtggagaaagcaatggctgaactacaggagctccttacagtctctgaacgatgggaagaaaaggctaaggtctgcctacaggcaagaccgaggcacagtgtggcaagtttagaaagcattgtgaatgaagccaagaacattccagcctttctacccaatgtgttgtccttgaaagaagccttacaaaaggctcgagaatggaccgctaaagtggaagctattcagagtggcagcaattacgcttatttggagcagcttgagagcttgtctgcgaaaggacgccctattcctgtgcgtcttgaagcactgccgcaagtggaatcacaggtagcagcagcacgggcatggagagaacggactgggcggacgtttcttaagaagaattctagccatacattgttacaggtgctgagcccccggaccgacattggtgtatatgggagtggcaaaaataggaggaaaaaagtaaaagaactaatagaaaaagaaaaagaaaaggatctggacctggagcctctgagtgatctggaggaaggattggaggaaaccagagatacagccatggtggtggcagttttcaaagaacgggagcaaaaagagattgaagccatgcattctctcagagcagccaacctagccaagatgacaatggtggaccgcatagaagaagtaaaattttgcatttgccgcaagacagccagtgggtttatgctacagtgtgagctctgcaaagactggttccataacagctgtgttcctcttcctaaatcaagttcccaaaaaaaaggatccagctggcaagctaaagaagtaaaattcctttgccctctttgtatgcggtctcgaaggcccaggctagagactattctgtcactcctggtatcccttcagaagttgcccgtacggttgcctgaaggagaggccctgcagtgtttgacagaacgtgctatgagttggcaagatagagcgcggcaggctctagccacagatgaactatcctctgccctggccaaactatctgtgttgagccagcgtatggtggaacaggcggctcgagaaaaaactgaaaagatcatcagtgcagaactccaaaaagcagctgccaatccagacttacagggacacttacctagtttccagcagtctgcttttaaccgggtggtgagcagtgtgtcatcttctcctcgacaaacaatggactatgatgatgaagaaacagactctgatgaagacattcgagagacatatggctacgacatgaaggacacagccagtgtgaagtcctctagtagtcttgaacccaatcttttttgtgatgaagagattcccatcaaatccgaggaggtggtgacccacatgtggacagcaccttcattttgtgcagagcatgcttattcttctgcttctaagagttgttctcaagtattttttgggaaaggttctagcaccccaaggaaacaacctcggaagagccctttggtgccccgaagtttggaacctccagtgctggagttgtcacctggagctaaggcacaactggaagaacttatgatggttggagatctcctggaagtatctctggacgagactcaacacatatggcggattttgcaggccacacacccaccctctgaagacagattcttgcatatcatggaggatgacagcatggaagagaaaccactaaaagtgaaaggaaaggactcttcagagaagaaacggaaacggaagctagaaaaggtagagcaactttttggagaaggaaaacagaagtccaaggagttaaagaaaatggacaaacctagaaagaagaaattaaaattaggtgcagacaaatcaaagaagctgaataaactggccaagaaactagcaaaagaagaagagagaaagaaaaagaaggagaaggctgctgcagccaaagttgaacttgtgaaagagagcactgaaaagaaaagagagaaaaaggtgctggacatcccctcaaagtatgactggtcaggagcagaggagtctgatgatgagaatgctgtgtgcgcagaaccagactgccaaaggccctgcaaggacaagggagttgtatttgtaacgaagaagagagagataaaaaatattagttttaaaagtgtcctatgtgactgcttttctaaaaaggtagactgggtacaatgtgatggtggctgtgatgagtggtttcatcgggtttgtgtgggtgtatctccagaaatggctgaaaatgaagattacatctgtataaactgtgcaaagaagcaggggccagttagcccaggtccagcaccacctccttccttcataatgagctacaaactaccaatggaggatcttaaagagaccagttagcagatgcttggttagtttgggacatggggggacatggaccacattgagaccttagtcatcaagtagagtggtttatatcacttggaatgttgcttctaaagatgaatggccttcagagaaagtccccttagtgctggcttcctctttgcatggactctgtgggttacattgctctatcaacatatctatgcagagggtgtcttctttggtacaacagccaatatctcatgtctcctttgagtgtggtttactgcattaaggccagatgcttaattgagctctagggtggctggttagtattaatacattggtgtgctaacagggcatataggatgtggcttttgtccagctgatagtagttagaggcttacaacttaggagcagcaccaactgaaggtgctaattgcttggatctccttcattaggatagttggagagggattggagtaccactttcttccactgttaccaggtacttaatgccctaaagatacaactaggagtaacagggccaaagttatttctgttagacgtcaaggaatggtatcacagtctattgacctcagcgatttgtgcttgtttgtgctagaagaacatcccaaataggagaacctctcacaagctggggcaggtcaccttatctttgtaagatgaggatatcatctagatcagaaatctgactagattggattctgaggagaagaacctactacaaggcaaggagccgttttttggctttgaaaagtcttgctgtcttgggtctacattttagggaagagcaggtacatggatccaggcttctgccaaaaaaaaaaagagaagaagatgacgagtatgaccagtcgtactatcttactgagccacagtgatgcatgcttttcggggaaaacttcattcacaagtattccagacaccaggcttcaggcatggccatgagcaagaccagcaaataacagctttttcccttgcagccctgaccccaatgtctgctgtttccaacactggtgatttctaactacggcccacagcagatgctgttgaataacaccatggcttcatcagaggatgtggggttgtagtacctctgggtgatgaagttgttttagcaaatccatttttaaaaaaaaaaaaaaa

SEQ ID NO: 202 - protein, 1722 aa, Homo sapien
MAGVGPGGYAAEFVPPPECPVFEPSWEEFTDPLSFIGRIRPLAEKTGICKIRPPKDWQPPFACEVKSFRFTPRVQRLNELEAMTRVRLDFLDQLAKFWELQGSTLKIPVVERKILDLYALSKIVASKGGFEMVTKEKKWSKVGSRLGYLPGKGTGSLLKSHYERILYPYELFQSGVSLMGVQMPNLDLKEKVEPEVLSTDTQTSPEPGTRMNILPKRTRRVKTQSESGDVSRNTELKKLQIFGAGPKVVGLAMGTKDKEDEVTRRRKVTNRSDAFNMQMRQRKGTLSVNFVDLYVCMFCGRGNNEDKLLLCDGCDDSYHTFCLIPPLPDVPKGDWRCPKCVAEECSKPREAFGFEQAVREYTLQSFGEMADNFKSDYFNMPVHMVPTELVEKEFWRLVSSIEEDVIVEYGADISSKDFGSGFPVKDGRRKILPEEEEYALSGWNLNNMPVLEQSVLAHINVDISGMKVPWLYVGMCFSSFCWHIEDHWSYSINYLHWGEPKTWYGVPSHAAEQLEEVMRELAPELFESQPDLLHQLVTIMNPNVLMEHGVPVYRTNQCAGEFVVTFPRAYHSGFNQGYNFAEAVNFCTADWLPIGRQCVNHYRRLRRHCVFSHEELIFKMAADPECLDVGLAAMVCKELTLMTEEETRLRESVVQMGVLMSEEEVFELVPDDERQCSACRTTCFLSALTCSCNPERLVCLYHPTDLCPCPMQKKCLRYRYPLEDLPSLLYGVKVRAQSYDTWVSRVTEALSANFNHKKDLIELRVMLEDAEDRKYPENDLFRKLRDAVKEAETCASVAQLLLSKKQKHRQSPDSGRTRTKLTVEELKAFVQQLFSLPCVISQARQVKNLLDDVEEFHERAQEAMMDETPDSSKLQMLIDMGSSLYVELPELPRLKQELQQARWLDEVRLTLSDPQQVTLDVMKKLIDSGVGLAPHHAVEKAMAELQELLTVSERWEEKAKVCLQARPRHSVASLESIVNEAKNIPAFLPNVLSLKEALQKAREWTAKVEAIQSGSNYAYLEQLESLSAKGRPIPVRLEALPQVESQVAAARAWRERTGRTFLKKNSSHTLLQVLSPRTDIGVYGSGKNRRKKVKELIEKEKEKDLDLEPLSDLEEGLEETRDTAMVVAVFKEREQKEIEAMHSLRAANLAKMTMVDRIEEVKFCICRKTASGFMLQCELCKDWFHNSCVPLPKSSSQKKGSSWQAKEVKFLCPLCMRSRRPRLETILSLLVSLQKLPVRLPEGEALQCLTERAMSWQDRARQALATDELSSALAKLSVLSQRMVEQAAREKTEKIISAELQKAAANPDLQGHLPSFQQSAFNRVVSSVSSSPRQTMDYDDEETDSDEDIRETYGYDMKDTASVKSSSSLEPNLFCDEEIPIKSEEVVTHMWTAPSFCAEHAYSSASKSCSQVFFGKGSSTPRKQPRKSPLVPRSLEPPVLELSPGAKAQLEELMMVGDLLEVSLDETQHIWRILQATHPPSEDRFLHIMEDDSMEEKPLKVKGKDSSEKKRKRKLEKVEQLFGEGKQKSKELKKMDKPRKKKLKLGADKSKKLNKLAKKLAKEEERKKKKEKAAAAKVELVKESTEKKREKKVLDIPSKYDWSGAEESDDENAVCAEPDCQRPCKDKGVVFVTKKREIKNISFKSVLCDCFSKKVDWVQCDGGCDEWFHRVCVGVSPEMAENEDYICINCAKKQGPVSPGPAPPPSFIMSYKLPMEDLKETS

SEQ ID NO: 203 - DNA, 4925 bp, Homo sapien
gaagcggcgggcggggtggagcagccagctgggtccggggagcgccgccgccgcctcgatggggtgttgaaaagtctcctctagagctttggaaggctgaatgcactaaacatgaagagcttgaaagcgaagttcaggaagagtgacaccaatgagtggaacaagaatgatgaccggctactgcaggccgtggagaatggagatgcggagaaggtggcctcactgctcggcaagaagggggccagtgccaccaaacacgacagtgagggcaagaccgctttccatcttgctgctgcaaaaggacacgtggaatgcctcagggtcatgattacacatggtgtggatgtgacagcccaagatactaccggacacagcgccttacatctcgcagccaagaacagccaccatgaatgcatcaggaggctgcttcagtctaaatgcccagccgaaagtgtcgacagctctgggaaaacagctttacattatgcagcggctcagggctgccttcaagctgtgcagattctctgcgaacacaagagccccataaacctcaaagatttggatgggaatataccgctgcttcttgctgtacaaaatggtcacagtgagatctgtcactttctcctggatcatggagcagatgtcaattccaggaacaaaagtggaagaactgctctcatgctggcctgtgagattggcagctctaacgctgtggaagccttaattaaaaagggtgcagacctaaaccttgtagattctcttggatacaatgccttacattattccaaactctcagaaaatgcaggaattcaaagccttctattatcaaaaatctctcaggatgctgatttaaagaccccaacaaaaccaaagcagcatgaccaagtctctaaaataagctcagaaagaagtggaactccaaaaacacgcaaagctccaccacctcctatcagtcctacccagttgagtgatgtctcttccccaagatcaataacttcgactccactatcgggaaaggaatcggtattttttgctgaaccacccttcaaggctgagatcagttctatacgagaaaacaaagacagactaagtgacagtactacaggtgctgatagcttattggatataagttctgaagctgaccaacaagatcttctctctctattgcaagcaaaagttgcttcccttaccttacacaataaggagttacaagataaattacaggccaaatcacccaaggaggcggaagcagacctaagctttgactcataccattccacccaaactgacttgggcccatccctgggaaaacctggtgaaacctctcccccagactccaaatcatctccatctgtcttaatacattctttaggtaaatccactactgacaatgatgtcagaattcagcaactgcaagagattttgcaagatctacagaagagattagagagctctgaagcagagagaaaacagctacaggtcgaactccaatcccgaagggcagaactggtatgcttaaacaacactgagatttcagagaacagctctgacctcagccagaaacttaaagaaactcagagcaaatacgaggaggctatgaaagaagtccttagtgtgcagaagcagatgaaactcggtcttgtctcacctgaaagcatggataattattcacatttccacgagctgagggtcacggaagaggaaataaatgtgctaaagcaggatctgcagaatgcattagaagaaagtgaaagaaataaagagaaagtgagagagttagaggaaaaactggtagagagggagaaaggtacagtgattaagccacctgtggaagagtacgaggaaatgaaaagttcatattgctctgttattgagaatatgaataaggagaaagcatttttgtttgagaaataccaagaagcccaagaagaaatcatgaaattaaaagacacactaaaaagtcagatgacacaggaagccagtgatgaagctgaggacatgaaagaagccatgaataggatgatagatgaactcaataaacaggtgagcgagctgtcacagctgtacaaagaagcccaggctgagctggaggattacaggaagaggaaatctctagaggatgtcacagctgaatatatccataaagcagagcatgagaaactgatgcaattgacaaacgtgtccagggctaaagcagaagatgcactgtctgaaatgaagtctcagtattcaaaagtgttgaatgagttgacccagctcaaacaactggtggatgcacaaaaagagaactctgtctctatcacagaacatttgcaagtgataaccacgctgcggactgcagcaaaagagatggaagaaaaaataagcaatcttaaggaacaccttgcaagcaaggaagtggaagtagcaaagctggagaaacaactcttagaagagaaagctgctatgactgatgcaatggtacctcggtcttcctatgaaaaactccagtcatccttagagagtgaagtgagtgtgttggcatcgaaattaaaggaatctgtgaaagagaaagagaaggtccattcagaggttgtccagattagaagtgaggtctcacaggtgaaaagagaaaaggaaaatattcagactctcttgaaatccaaagagcaagaagtaaatgaacttctgcaaaaattccagcaagctcaggaagaacttgcagaaatgaaaagatacgctgagagctcttcaaaactggaggaagataaagataaaaagataaatgagatgtcgaaggaagtcaccaaattgaaggaggccttgaacagcctctcccagctctcctactcaacaagctcatccaaaaggcagagtcagcagctggaggcgctgcagcagcaagtcaaacagctccagaaccagctggcggaatgcaagaaacaacaccaggaggtcatatcagtttacagaatgcatcttctgtatgctgtgcagggccagatggatgaagatgtccagaaagtactgaagcaaatccttaccatgtgtaaaaaccagtctcaaaagaagtaaagtggattccttggcaggacactgccccttgtcatctgtctttgtgttagatccagagttgtcggcagccgctgccattgttctcattcgtggtatgcactgtggcctagcgtagcttcttccctttccaaaggtttctgaggacttctcccaggagaagactgcccgcctcagaactgcttagagacttcaaaccagcagaggtgaaagtccctgtcatcccttcagattccagagctgggatcagccatgcccagaggtctggtcctgatgctggcaggggggccccctcctccatccctgactggctgagtggctttatcaccaccgagtgatgtgctgaggcctcctgcagtgaatgctccttccattcctgtactcgggcagtgccattcagcacaggagagctctttttgcctttggctttcaattccaaaacatgatttaatttctaactaaattagtatggcactagttatgaagtatctgcttaaaacccttcatcatgatatcctgtggatttaaaaactctaattccatgttttcttcccatctgccttatatatctcatcaccctgcttatcaatattcagtttgatgagcactattaactaaaatatgaaacttaaaaacaaaagcaagttgtccttaaaagttctttttttaagtaaattgttgacatactgcaaattttctatgcaaacttgcctcctgctgttatctgtgaagctcaggaaatccaaacatttgtgtttcaacaagggacagtaaactgtgtgtttacagccaaaagaaatgcctcatagttcttaacctcaacttttgtagaagtatttttttctctgtaatatttttattggctcataaagatgttttcatatctgaactcctaaataagtgaaattacagtagattatattaacaaaatactttttaggtagccatgcttgagactttttaaaaatataactttttccttaaagttttcagctatagcaaaaggtagttatgtatgccagacctaatatgagctgccaccaacacccctagaactttcagccatggtgtcttcagaattgtagcgcatttctgaatctagcaaatcctccttttacccgttgaatgttttgaatgccctgactctaccagcgcccataaatgatctctagaaggactgttagtaccaatctgtttttcaactttgaagctaaaaaccctgatatggtaatattatggtgcatagcagaggtctcggaaaaaaaatatttctgttcactttactttcaggttaaaaatgtttctaacacgcttgcaacttcccttatggcattaatcttgttgagggagagagacagaatcctggactctccaaagtatttaactgaaagtagggcctgctctgacagggcccatgtcccacaaggctgcttggcctcagtgggtgcttggctgtgctggatgatatgttgatctgtattggataaggaccaatgacagcaaagcaaaaatggctttaaagcttggtgttacttttcttaagttgtttaattatagttaagcaatttcaaaaatgctccaaagaaatgtgaaaggaccttttgtcacagcacttcagaaaatacacaacagccccttctgcccccgcacagaaatgctgcagagtatataaaacttgagacatttttgtaggatgcctgacgaggtgtagccttttatcttgtttccggatgcatatttattacgagtactctggttaaatattgaaaagttatatgctgtagtttttagtattttgtctttgtaatttacagaagttattggagaaaataaacttgtttcattttgcaaaaaaaaaaaaaaaaaaaaaaaaa

SEQ ID NO: 204 - protein, 980 aa, Homo sapien
MKSLKAKFRKSDTNEWNKNDDRLLQAVENGDAEKVASLLGKKGASATKHDSEGKTAFHLAAAKGHVECLRVMITHGVDVTAQDTTGHSALHLAAKNSHHECIRRLLQSKCPAESVDSSGKTALHYAAAQGCLQAVQILCEHKSPINLKDLDGNIPLLLAVQNGHSEICHFLLDHGADVNSRNKSGRTALMLACEIGSSNAVEALIKKGADLNLVDSLGYNALHYSKLSENAGIQSLLLSKISQDADLKTPTKPKQHDQVSKISSERSGTPKTRKAPPPPISPTQLSDVSSPRSITSTPLSGKESVFFAEPPFKAEISSIRENKDRLSDSTTGADSLLDISSEADQQDLLSLLQAKVASLTLHNKELQDKLQAKSPKEAEADLSFDSYHSTQTDLGPSLGKPGETSPPDSKSSPSVLIHSLGKSTTDNDVRIQQLQEILQDLQKRLESSEAERKQLQVELQSRRAELVCLNNTEISENSSDLSQKLKETQSKYEEAMKEVLSVQKQMKLGLVSPESMDNYSHFHELRVTEEEINVLKQDLQNALEESERNKEKVRELEEKLVEREKGTVIKPPVEEYEEMKSSYCSVIENMNKEKAFLFEKYQEAQEEIMKLKDTLKSQMTQEASDEAEDMKEAMNRMIDELNKQVSELSQLYKEAQAELEDYRKRKSLEDVTAEYIHKAEHEKLMQLTNVSRAKAEDALSEMKSQYSKVLNELTQLKQLVDAQKENSVSITEHLQVITTLRTAAKEMEEKISNLKEHLASKEVEVAKLEKQLLEEKAAMTDAMVPRSSYEKLQSSLESEVSVLASKLKESVKEKEKVHSEVVQIRSEVSQVKREKENIQTLLKSKEQEVNELLQKFQQAQEELAEMKRYAESSSKLEEDKDKKINEMSKEVTKLKEALNSLSQLSYSTSSSKRQSQQLEALQQQVKQLQNQLAECKKQHQEVISVYRMHLLYAVQGQMDEDVQKVLKQILTMCKNQSQKK

SEQ ID NO: 205 - DNA, 3673 bp, Homo sapien
agtgggactcagcgggcgtggaggtcgcggcggacggagcgagccctgggcgagtgaattgtggctgtgggttgacggtggagacaccccccggagaggcggagggaagggaggcgaggctgcacctgcatgcttcccgcctcccactccccagcgcccccggaccgtgcagttctctgcaggaccaggccatggagctcgaagtccggcgggtccgacaggcgttcctgtccggccggtcgcgacctctgcggtttcggctgcagcagctggaggccctgcggaggatggtgcaggagcgcgagaaggatatcctgacggccatcgccgccgacctgtgcaagagtgaattcaatgtgtacagtcaggaagtcattactgtccttggggaaattgattttatgcttgagaatcttcctgaatgggttactgctaaaccagttaagaagaacgtgctcaccatgctggatgaggcctatattcagccacagcctctgggagtggtgctgataatcggagcttggaattaccccttcgttctcaccattcagccactgataggagccatcgctgcaggaaatgctgtgattataaagccttctgaactgagtgaaaatacagccaagatcttggcaaagcttctccctcagtatttagaccaggatctctatattgttattaatggtggtgttgaggaaaccacggagctcctgaagcagcgatttgaccacattttctatacgggaaacactgcggttggcaaaattgtcatggaagctgctgccaagcatctgacccctgtgactcttgaactgggagggaaaagtccatgttatattgataaagattgtgacctggacattgtttgcagacgcataacctggggaaaatacatgaattgtggccaaacctgcattgcacccgactatattctctgtgaagcatccctccaaaatcaaattgtatggaagattaaggaaacagtgaaggaattttatggagaaaatataaaagagtctcctgattatgaaaggatcatcaatcttcgtcattttaagaggatactaagtttgcttgaaggacaaaagatagcttttggtggggagactgatgaggccacacgctacatagccccaacagtacttaccgatgttgatcctaaaaccaaggtgatgcaagaagaaatttttggaccaattcttccaatagtgcctgtgaaaaatgtagatgaggccataaatttcataaatgaacgtgaaaagcctctggctctttatgtattttcgcataaccataagctcatcaaacggatgattgatgagacatccagtggaggtgtcacaggcaatgacgtcattatgcacttcacgctcaactctttcccatttggaggagtgggttccagtgggatgggagcttatcacggaaaacatagttttgatactttttctcatcagcgtccctgtttattaaaaagtttaaagagagaaggtgctaacaaactcagatatcctcccaacagccagtcaaaggtggattgggggaaattttttctcttgaaacggttcaacaaagaaaaactcggtctcctgttgctcactttcctgggtattgtagccgctgtgcttgtcaaggcagaatattactgaagaatgatcctgttcaacctcctagtgcctctactgaattattcctcttttaaatggttaatgaaccaataatttttaaatcataccaaaaatagtaagaaaatatgcaaacactctgtgatcaaacttaaaagtcattgccattcatcattaataaaagttgccatttcaactacgtcccaacattccctaatagggtattcagggaacctgtcttaaattgtgcttatctaaatcttggaactttgagctaggggaggagaatgtattagactaaatacaaactgcggggttgtaagggagtctcagaacctcactgaatccttcactccagttaatggcactgctcacttcctgcctctgctgccaccatcactgtgtgaagctttcaagagcttggtacttcccagggctaccggcagtcctctgtagtccagagaggtgagattagatcttcttggttccctgtgaggtttcaggcactaaaactctatgtggggaagggaggggttactcctcctccaatgggactcaaggacttgacctccaggagtaggcccctggtcagaagtgccatctcaccagtggtcttcattcttcctcattcattctttatcatcctgtgttctgtttagttgcaacaatctcttgtgactaatgtcactcaaagcatcttgtaacctagggcttcctggaagttagttgccaaagtcatgcaagcatcacctgtcattcttgtgttggagttatagaattctacatcttataaaacctaactggcatttaaaaaatactgtggccgggcgtggtggctcatgcctgtaatcccagcactttgggaggccgaggtgggaggattgcttgagtccaggaatttgagaccagcctggacaacacagtgagacctcatctctatcaaaaaataaaaattagctagatgtggtggcatgagcctgtgttcccagctgcttaggaggctgaagcaggaggattgattgagcctgcgaggccaaggctgcagcaggctgtgattgcaccactgcacttcagcttgggcaacagagcaagaccctgtctccgaaacaaataaaaaatactgtaataaaagtacttataaacatactaatcctctttcaggaccctaaagttgcaggttagtaggtcttcaaggacaaatctgtaagtttcttttctgtagtgcaagtaaaatttcactttttgaaactatagagagatccctttctgattagcctacagaacttaaagtgagggaaccatttcctctcacagacaaagaggcctgggatattaggactttggggtttgagagcatcatggggcagacagatggtggatggtctggacaagaagcgagtaagccactgcggttggtcatactgaagggaattgatggcaagaggatcccctgagcaagtcagaagttactctcatcagtcgttcatggtcacaacctgaggtactctgctgagtgggcaaggctgaagtaagaggcctgtggaatgcagcattacctgctggacagagcagggcaggcagttctatgccttggagctcctgactgcagggactctgtccccacactcagaaagactcagctcactcaatgagagaatgtgatttactttatagaacgtataatcaactttgttgaataatttgttctattaaggctgtctaaaatgtgatgtcttcatcatagtatgaagtgttgaaaattaataacgagcctagtttaggaaaaagctgcttaaaactgtggctctaagagagtaatcataaaataccttagataaaattgcactatggaattttcattgagtatgtttaaattattggcttgtctactaatacatctgcttcaaaatgaacatatttcataaaattggcatcaattttaatgacgctcctggtatggaacctcagatataccctattggagacaatcctttgatcataaattctccccaactataaatcattttatgtctttaaaaaaaaaaaaa

SEQ ID NO: 206 - protein, 485 aa, Homo sapien
MELEVRRVRQAFLSGRSRPLRFRLQQLEALRRMVQEREKDILTAIAADLCKSEFNVYSQEVITVLGEIDFMLENLPEWVTAKPVKKNVLTMLDEAYIQPQPLGVVLIIGAWNYPFVLTIQPLIGAIAAGNAVIIKPSELSENTAKILAKLLPQYLDQDLYIVINGGVEETTELLKQRFDHIFYTGNTAVGKIVMEAAAKHLTPVTLELGGKSPCYIDKDCDLDIVCRRITWGKYMNCGQTCIAPDYILCEASLQNQIVWKIKETVKEFYGENIKESPDYERIINLRHFKRILSLLEGQKIAFGGETDEATRYIAPTVLTDVDPKTKVMQEEIFGPILPIVPVKNVDEAINFINEREKPLALYVFSHNHKLIKRMIDETSSGGVTGNDVIMHFTLNSFPFGGVGSSGMGAYHGKHSFDTFSHQRPCLLKSLKREGANKLRYPPNSQSKVDWGKFFLLKRFNKEKLGLLLLTFLGIVAAVLVKAEYY

SEQ ID NO: 207 - DNA, 5175 bp, Homo sapien
gccccgagtgcaatcgcgggaagccagggtttccagctaggacacagcaggtcgtgatccgggtcgggacactgcctggcagaggctgcgagcatggggccctggggctggaaattgcgctggaccgtcgccttgctcctcgccgcggcggggactgcagtgggcgacagatgtgaaagaaacgagttccagtgccaagacgggaaatgcatctcctacaagtgggtctgcgatggcagcgctgagtgccaggatggctctgatgagtcccaggagacgtgcttgtctgtcacctgcaaatccggggacttcagctgtgggggccgtgtcaaccgctgcattcctcagttctggaggtgcgatggccaagtggactgcgacaacggctcagacgagcaaggctgtccccccaagacgtgctcccaggacgagtttcgctgccacgatgggaagtgcatctctcggcagttcgtctgtgactcagaccgggactgcttggacggctcagacgaggcctcctgcccggtgctcacctgtggtcccgccagcttccagtgcaacagctccacctgcatcccccagctgtgggcctgcgacaacgaccccgactgcgaagatggctcggatgagtggccgcagcgctgtaggggtctttacgtgttccaaggggacagtagcccctgctcggccttcgagttccactgcctaagtggcgagtgcatccactccagctggcgctgtgatggtggccccgactgcaaggacaaatctgacgaggaaaactgcgctgtggccacctgtcgccctgacgaattccagtgctctgatggaaactgcatccatggcagccggcagtgtgaccgggaatatgactgcaaggacatgagcgatgaagttggctgcgttaatgtgacactctgcgagggacccaacaagttcaagtgtcacagcggcgaatgcatcaccctggacaaagtctgcaacatggctagagactgccgggactggtcagatgaacccatcaaagagtgcgggaccaacgaatgcttggacaacaacggcggctgttcccacgtctgcaatgaccttaagatcggctacgagtgcctgtgccccgacggcttccagctggtggcccagcgaagatgcgaagatatcgatgagtgtcaggatcccgacacctgcagccagctctgcgtgaacctggagggtggctacaagtgccagtgtgaggaaggcttccagctggacccccacacgaaggcctgcaaggctgtgggctccatcgcctacctcttcttcaccaaccggcacgaggtcaggaagatgacgctggaccggagcgagtacaccagcctcatccccaacctgaggaacgtggtcgctctggacacggaggtggccagcaatagaatctactggtctgacctgtcccagagaatgatctgcagcacccagcttgacagagcccacggcgtctcttcctatgacaccgtcatcagcagggacatccaggcccccgacgggctggctgtggactggatccacagcaacatctactggaccgactctgtcctgggcactgtctctgttgcggataccaagggcgtgaagaggaaaacgttattcagggagaacggctccaagccaagggccatcgtggtggatcctgttcatggcttcatgtactggactgactggggaactcccgccaagatcaagaaagggggcctgaatggtgtggacatctactcgctggtgactgaaaacattcagtggcccaatggcatcaccctagatctcctcagtggccgcctctactgggttgactccaaacttcactccatctcaagcatcgatgtcaatgggggcaaccggaagaccatcttggaggatgaaaagaggctggcccaccccttctccttggccgtctttgaggacaaagtattttggacagatatcatcaacgaagccattttcagtgccaaccgcctcacaggttccgatgtcaacttgttggctgaaaacctactgtccccagaggatatggtcctcttccacaacctcacccagccaagaggagtgaactggtgtgagaggaccaccctgagcaatggcggctgccagtatctgtgcctccctgccccgcagatcaacccccactcgcccaagtttacctgcgcctgcccggacggcatgctgctggccagggacatgaggagctgcctcacagaggctgaggctgcagtggccacccaggagacatccaccgtcaggctaaaggtcagctccacagccgtaaggacacagcacacaaccacccggcctgttcccgacacctcccggctgcctggggccacccctgggctcaccacggtggagatagtgacaatgtctcaccaagctctgggcgacgttgctggcagaggaaatgagaagaagcccagtagcgtgagggctctgtccattgtcctccccatcgtgctcctcgtcttcctttgcctgggggtcttccttctatggaagaactggcggcttaagaacatcaacagcatcaactttgacaaccccgtctatcagaagaccacagaggatgaggtccacatttgccacaaccaggacggctacagctacccctcgagacagatggtcagtctggaggatgacgtggcgtgaacatctgcctggagtcccgcccctgcccagaacccttcctgagacctcgccggccttgttttattcaaagacagagaagaccaaagcattgcctgccagagctttgttttatatatttattcatctgggaggcagaacaggcttcggacagtgcccatgcaatggcttgggttgggattttggtttcttcctttcctgtgaaggataagagaaacaggcccggggggaccaggatgacacctccatttctctccaggaagttttgagtttctctccaccgtgacacaatcctcaaacatggaagatgaaagggcaggggatgtcaggcccagagaagcaagtggctttcaacacacaacagcagatggcaccaacgggaccccctggccctgcctcatccaccaatctctaagccaaacccctaaactcaggagtcaacgtgtttacctcttctatgcaagccttgctagacagccaggttagcctttgccctgtcacccccgaatcatgacccacccagtgtctttcgaggtgggtttgtaccttccttaagccaggaaagggattcatggcgtcggaaatgatctggctgaatccgtggtggcaccgagaccaaactcattcaccaaatgatgccacttcccagaggcagagcctgagtcaccggtcacccttaatatttattaagtgcctgagacacccggttaccttggccgtgaggacacgtggcctgcacccaggtgtggctgtcaggacaccagcctggtgcccatcctcccgacccctacccacttccattcccgtggtctccttgcactttctcagttcagagttgtacactgtgtacatttggcatttgtgttattattttgcactgttttctgtcgtgtgtgttgggatgggatcccaggccagggaaagcccgtgtcaatgaatgccggggacagagaggggcaggttgaccgggacttcaaagccgtgatcgtgaatatcgagaactgccattgtcgtctttatgtccgcccacctagtgcttccacttctatgcaaatgcctccaagccattcacttccccaatcttgtcgttgatgggtatgtgtttaaaacatgcacggtgaggccgggcgcagtggcctcacgcctgtaatcccagcactttgggaggccgaggcgggtggatcatgaggtcaggagatcgagaccatcctggctaacaaggtgaaaccccgtctctactaaaaatacaaaaaattagccgggcgcggtggtgggcacctgtagtcccagctactcgggaggctgaggcaggagaatggtgtgaacccgggaagcggagcttgcagtgagccgagattgcgccactgcagtccgcagtctggcctgggcgacagagcgagactccgtctcaaaaaaaacaaaacaaaaaaaaaccatgcatggtgcatcagcagcccatggcctctggccaggcatggcgaggctgaggtgggaggatggtttgagctcaggcatttgaggctgtcgtgagctatgattatgccactgctttccagcctgggcaacatagtaagaccccatctcttaaaaaatgaatttggccagacacaggtgcctcacgcctgtaatcccagcactttgggaggctgagctggatcacttgagttcaggagttggagaccaggcctgagcaacaaagcgagatcccatctctacaaaaaccaaaaagttaaaaatcagctgggtatggtggcacgtgcctgtgatcccagctacttgggaggctgaggcaggaggatcgcctgagcccaggaggtggaggttgcagtgagccatgatcgagccactgcactccagcctgggcaacagatgaagaccctatttcagaaatacaactataaaaaaaataaataaatcctccagtctggatcgtttgacgggacttcaggttctttctgaaatcgccgtgttactgttgcactgatgtccggagagacagtgacagcctccgtcagactcccgcgtgaagatgtcacaagggattggcaattgtccccagggacaaaacactgtgtcccccccagtgcagggaaccgtgataagcctttctggtttcggagcacgtaaatgcgtccctgtacagatagtggggattttttgttatgtttgcactttgtatattggttgaaactgttatcacttatatatatatatacacacatatatataaaatctatttatttttgcaaaccctggttgctgtatttgttcagtgactattctcggggccctgtgtagggggttattgcctctgaaatgcctcttctttatgtacaaagattatttgcacgaactggactgtgtgcaacgctttttgggagaatgatgtccccgttgtatgtatgagtggcttctgggagatgggtgtcactttttaaaccactgtatagaaggtttttgtagcctgaatgtcttactgtgatcaattaaatttcttaaatg

SEQ ID NO: 208 - protein, 860 aa, Homo sapien [sequence omitted]

SEQ ID NO: 209 - DNA, 2628 bp, Homo sapien
aagcgatggctgggcccgcgtggatctccaaggtctctcggctgctgggggcattccacaacccaaaacaggtgaccagaggttttactggtggtgttcagacagtaactttaattccaggagatggtattggcccagaaatttcagctgcagttatgaagatttttgatgctgccaaagcacctattcagtgggaggagcggaacgtcactgccattcaaggacctggaggaaagtggatgatcccttcagaggctaaagagtccatggataagaacaagatgggcttgaaaggccctttgaagaccccaatagcagccggtcacccatctatgaatttactgctgcgcaaaacatttgacctttacgcgaatgtccgaccatgtgtctctatcgaaggctataaaaccccttacaccgatgtaaatattgtgaccattcgagagaacacagaaggagaatacagtggaattgagcatgtgattgttgatggagtcgtgcagagtatcaagctcatcaccgagggggcgagcaagcgcattgctgagtttgcctttgagtatgcccggaacaaccaccggagcaacgtcacggcggtgcacaaagccaacatcatgcggatgtcagatgggctttttctacaaaaatgcagggaagttgcagaaagctgtaaagatattaaatttaatgagatgtaccttgatacagtatgtttgaatatggtacaagatccttcccaatttgatgttcttgttatgccaaatttgtatggagacatccttagtgacttgtgtgcaggattgatcggaggtctcggtgtgacaccaagtggcaacattggagccaatggggttgcaatttttgagtcggttcatgggacggctccagacattgcaggcaaggacatggcgaatcccacagccctcctgctcagtgccgtgatgatgctgcgccacatgggactttttgaccatgctgcaagaattgaggctgcgtgttttgctacaattaaggacggaaagagcttgacaaaagatttgggaggcaatgcaaaatgctcagacttcacagaggaaatctgtcgccgagtaaaagatttagattaacacttctacaactggcatttacatcagtcactctaaatggacaccacatgaacctctgtttagaatacctacgtatgtatgcattggtttgcttgtttcttgacagtacatttttagatctggccttttcttaacaaaatctgtgcaaaagatgcaggtggatgtccctaggtctgttttcaaagaactttttccaagtgcttgttttatttattaagtgtctacctggtaaatgttttttttgtaaactctgagtggactgtatcatttgctattctaaaccattttacacttaagttaaaatagtttctcttcagctgtaaataacaggatacagaattaacaagagaaaatgtctaactttttaagaaaaaccttattttcttcggtttttgaaaaacataatggaaataaaacaggatattgacataatagcacaaaatgacactcttctaaaactaaatgggcacaagagaattttcctgggaaagttcacatcaaaaagagtgaatgtggtatatttctaaatgatatggaaaatagagacagatttgtcctttacagaaattactgagtgtgaataaaaacttcagatccaagaaatatataatgagagatataatttttgttaataagacaaaggtaatatattggatacaaagacacaaatgtattgtgtgttcaattattttgttgtcttgagatttaatattctttccaagagcttttaatgaagcagagagctagtacttcattttcactggatacattttcagcatcatgagttgtcacagcctctgagcccctgatctgaagccagaagggctgagtgtattgtaaacttattcttgcatgttgctgtctgggaatggaccacactacagcaggtagttctgggggcgatactgccgaaaggcccgaacacatgtattttggctgcaattgaggaacttgggatgctattaattttgtatttcagcaactgccccttctcctatcccaaagcaccaattactgccctctgcctcagcagtaccagtataagatgacattccaaagactggaggcaactcagcctgagttaattcacaaaattatgccatgctggggcttgagcttgagcttgggcttaggcttgggctcagcttttgaccctcaggcatctccttttccttcctgtcttcctctcccttctcctctgctgcagcatgattttcttaatcttcagacactcactattttcatgaacagttaccctctgtccccacaaccaaagacaactcatggcctcctttggcccttgtgtaacattgcaaacctgtggctttgcaaaatgtacccaggtcacaaggggatttttttttttttagcaatgatatccctgtctgggtcactttttaagcttgtaaccgcccccccagacttataatcttaaatgtattttcctttgtttaagctgctgcttcctctgtttcattggattgtgccagttatcagtggctcttgggttcaaagtaataaa

SEQ ID NO: 210 - protein, 366 aa, Homo sapien
MAGPAWISKVSRLLGAFHNPKQVTRGFTGGVQTVTLIPGDGIGPEISAAVMKIFDAAKAPIQWEERNVTAIQGPGGKWMIPSEAKESMDKNKMGLKGPLKTPIAAGHPSMNLLLRKTFDLYANVRPCVSIEGYKTPYTDVNIVTIRENTEGEYSGIEHVIVDGVVQSIKLITEGASKRIAEFAFEYARNNHRSNVTAVHKANIMRMSDGLFLQKCREVAESCKDIKFNEMYLDTVCLNMVQDPSQFDVLVMPNLYGDILSDLCAGLIGGLGVTPSGNIGANGVAIFESVHGTAPDIAGKDMANPTALLLSAVMMLRHMGLFDHAARIEAACFATIKDGKSLTKDLGGNAKCSDFTEEICRRVKDLD

SEQ ID NO: 211 - DNA, 2613 bp, Homo sapien
gcgcgccttctccagtccgcggtgccatggcccccgcccgtctgttcgcgctgctgctgctcttcgtaggcggagtcgccgagtcgatccgagagactgaggtcatcgacccccaggacctcctagaaggccgatacttctccggagccctaccagacgatgaggatgtagtggggcccgggcaggaatctgatgactttgagctgtctggctctggagatctggatgacttggaagactccatgatcggccctgaagttgtccatcccttggtgcctctagataaccatatccctgagagggcagggtctgggagccaagtccccaccgaacccaagaaactagaggagaatgaggttatccccaagagaatctcacccgttgaagagagtgaggatgtgtccaacaaggtgtcaatgtccagcactgtgcagggcagcaacatctttgagagaacggaggtcctggcagctctgattgtgggtggcatcgtgggcatcctctttgccgtcttcctgatcctactgctcatgtaccgtatgaagaagaaggatgaaggcagctatgacctgggcaagaaacccatctacaagaaagcccccaccaatgagttctacgcgtgaagcttgcttgtgggcactggcttggactttagcggggagggaagccaggggattttgaagggtggacattagggtagggtgaggtcaacctaatactgacttgtcagtatctccagctctgattacctttgaagtgttcagaagagacattgtcttctactgttctgccaggttcttcttgagctttgggcctcagttgccctggcagaaaaatggattcaacttggcctttctgaaggcaagactgggattggatcacttcttaaacttccagttaagaatctaggtccgccctcaagcccatactgaccatgcctcatccagagctcctctgaagccagggggctaacggatgttgtgtggagtcctggctggaggtcctcccccagtggccttcctcccttcctttcacagccggtctctctgccaggaaatgggggaaggaactagaaccacctgcaccttgagatgtttctgtaaatgggtacttgtgatcacactacgggaatctctgtggtatatacctggggccattctaggctctttcaagtgacttttggaaatcaaccttttttatttgggggggaggatggggaaaagagctgagagtttatgctgaaatggatttatagaatatttgtaaatctatttttagtgtttgttcgtttttttaactgttcattcctttgtgcagagtgtatatctctgcctgggcaagagtgtggaggtgccgaggtgtcttcattctctcgcacatttccacagcacctgctaagtttgtatttaatggtttttgtttttgtttttgtttgtttcttgaaaatgagagaagagccggagagatgatttttattaattttttttttttttttttttttactatttatagctttagatagggcctcccttcccctcttctttctttgttctctttcattaaaccccttccccagttttttttttatactttaaaccccgctcctcatggccttggccctttctgaagctgcttcctcttataaaatagcttttgccgaaacatagtttttttttagcagatcccaaaatataatgaaggggatggtgggatatttgtgtctgtgttcttataatatattattattcttccttggttctagaaaaatagataaatatatttttttcaggaaatagtgtggtgtttccagtttgatgttgctgggtggttgagtgagtgaattttcatgtggctgggtgggtttttgcctttttctcttgccctgttcctggtgccttctgatggggctggaatagttgaggtggatggttctaccctttctgccttctgtttgggacccagctggtgttctttggtttgctttcttcaggctctagggctgtgctatccaatacagtaaccacatgcggctgtttaaagttaagccaattaaaatcacataagattaaaaattccttcctcagttgcactaaccacgtttctagaggcgtcactgtatgtagttcatggctactgtactgacagcgagagcatgtccatctgttggacagcactattctagagaactaaactggcttaacgagtcacagcctcagctgtgctgggacgacccttgtctccctgggtaggggggggggaatgggggagggctgatgaggccccagctggggcctgttgtctgggaccctccctctcctgagaggggaggcctggtggcttagcctgggcaggtcgtgtctcctcctgaccccagtggctgcggtgaggggaaccaccctcccttgctgcaccagtggccattagctcccgtcaccactgcaacccagggtcccagctggctgggtcctcttctgcccccagtgcccttccccttgggctgtgttggagtgagcacctcctctgtaggcacctctcacactgttgtctgttactgattttttttgataaaaagataataaaacctggtactttctaaaaaaaaaaaaaaaaaaa

SEQ ID NO: 212 - protein, 198 aa, Homo sapien
MAPARLFALLLLFVGGVAESIRETEVIDPQDLLEGRYFSGALPDDEDVVGPGQESDDFELSGSGDLDDLEDSMIGPEVVHPLVPLDNHIPERAGSGSQVPTEPKKLEENEVIPKRISPVEESEDVSNKVSMSSTVQGSNIFERTEVLAALIVGGIVGILFAVFLILLLMYRMKKKDEGSYDLGKKPIYKKAPTNEFYA

SEQ ID NO: 213 - DNA, 5434 bp, Homo sapien
caagtgccgtcgccgcgccccttccccctcccgcctccccggccccctccccggaaccggcggtcgagctacggtcgcggacgagtggaaccgagactgccccgcggagccgccggtatgagcgcccctcgccaccccgtgtcccaggcccggcctttctgacaagagctagacttcgggctccttgaggatattcagttttgtatgtttgaatatcctctcaccatgttcagcataaagtaccattcttaatgattatcctcaacaagacaggtgtgagagggttgctgttgcattgcaatcatggtgcaaaaataccagtccccagtgagagtgtacaaatacccctttgaattaattatggctgcctatgaaaggaggttccctacatgtcctttgattccgatgttcgtgggcagtgacactgtgagtgaattcaagagcgaagatggggctattcatgtcattgaaaggcgctgcaagctggatgtagatgcacccagactgctgaagaagattgcaggagttgattatgtttattttgtccagaaaaactcactgaattctcgggaacgtactttgcacattgaggcttataatgaaacgttttccaatcgggtcatcattaatgagcattgctgctacaccgttcaccctgaaaatgaagattggacctgttttgaacagtctgcaagtttagatattaaatctttctttggttttgaaagtacagtggaaaaaattgcaatgaaacaatataccagcaacattaaaaaaggaaaggaaatcatcgaatactaccttcgccaattagaagaagaaggcataacctttgtgccccgttggagtccgccttccatcacgccctcttcagagacatcttcatcatcctccaagaaacaagcagcgtccatggccgtcgtcatcccagaagctgccctcaaggaggggctgagtggtgatgccctcagcagccccagtgcacctgagcccgtggtgggcacccctgacgacaaactagatgccgaccacatcaagagatacctgggcgatttgactccgctgcaggagagctgcctcattagacttcgccagtggctccaggagacccacaagggcaaaattccaaaagatgagcatattcttcggttcctccgtgcacgggattttaatattgacaaagccagagagatcatgtgtcagtctttgacgtggagaaagcagcatcaggtagactacattcttgaaacctggacccctcctcaggtccttcaggattactacgcgggaggctggcatcatcacgacaaagatgggcggcccctctacgtgctcaggctggggcagatggacaccaaaggcttggtgagagcgctcggggaggaagccctgctgagatacgttctctccgtaaatgaagaacggctaaggcgatgcgaagagaatacaaaagtctttggtcggcctatcagctcatggacctgcctggtggacttggaagggctgaacatgcgccacttgtggagacctggtgtgaaagcgctgctgcggatcatcgaggtggtggaggccaactaccctgagacactgggccgccttctcatcctgcgggcgcccagggtatttcctgtgctctggacgctggttagtccgttcattgatgacaacaccagaaggaagttcctcatttatgcaggaaatgactaccagggtcctggaggcctgctggattacatcgacaaagagattattccagatttcctgagtggggagtgcatgtgcgaagtgccagagggtggactggtccccaaatctctgtaccggactgcagaggagctggagaacgaagacctgaagctctggactgagaccatctaccagtctgcaagcgtcttcaaaggagccccacatgagattctcattcagattgtggatgcctcgtcagtcatcacttgggatttcgacgtgtgcaaaggggacattgtgtttaacatctatcactccaagaggtcgccacaaccacccaaaaaggactccctgggagcccacagcatcacctctccgggtgggaacaatgtgcagctcatagacaaagtctggcagctgggccgcgactacagcatggtggagtcgcctctgatctgcaaagaaggagaaagcgtgcagggttcccatgtgaccaggtggccgggcttctacatcctgcagtggaaattccacagcatgcctgcgtgcgccgccagcagccttccccgggtggacgacgtgcttgcgtccctgcaggtctcttcgcacaagtgtaaagtgatgtactacaccgaggtgatcggctcggaggatttcagaggttccatgacgagcctggagtccagccacagcggcttctcccagctgagtgccgccaccacctcctccagccagtcccactccagctccatgatctccaggtagtgccgcgctgcctgcacctagtgtgcagaggggacggccgcccctcctcggacagcagctgcacccgcccacccagcggcgacattgtacagactcctctcacctctagatagcaaatagctctcagatggtaaacgtagtcgtttgatcccaaaactaccttggcaggtagttttaactctgatcctaacttaactcaatagccatagattttgtatacgttgtgcacaaaatccaaccagagcgcaagggctctcttgaaagaaaagtagtttctgtaccaattaaaggattgacgtggtctcagatattgatgcaaaaaatttttccaacgaactccgcattgtccattagtgaatgaattcctgtgacatcctccagagatggcccctcctcacctgggacggaagctgccagctcgcttcccccaagctgcctcatggcccgcacgccgcctcacggcccccatgcttcccgccagtcaagatggtctgtggacttagggccagcccttgaggtccttatcctctgaggattcagaggttgcctgcggagtaccttgtcccagggccagacacacccacaccacccactgtctgcagtggggccgggggctcaggaggggctctcagggactcctggtgactccaggaaaatgctgccatcgttaaacattactttctctttcctccttttcaaatctttttgatactttttagagcaggatttttctgtatgtgaacttgggtgggggggttcttcccgtttccttccgtgcgtcgcccctctcacctgcagtcagctcccagcccagtgtaggccatctcctctgtgccctctggaggctcattgtctcagagcccagacagttccagccactaggaggccgtcttggaaccagcaagtcgcatttgccacttgacactgtccatggggttttattagtagctaagcagcagctctcgcatccacttcagggtggcgtgtggcatgtaggagtcctgcttctttgtacatgggaattgtggactcatgcgtgtgtgtgtgtgcatgtgctgtgtgtgtgcatgtgtgcatgacggtgggggtgctggggggacggggtgagtggaaacttagtttgagtaatgaaggaatcttcacagaagcaaatcagaatatgggatttgtttgccttttacattttgtttaattcctgattttaaagcctgctctatctggtacaggcccttattttttcagctttttatgggaaaagcaggttatttgagaatctgtccagaagttgcataggggatggcctccacgataaggacatgcaacacgtgtttctgtgtgcagcagaggccgtgtttttcatgccaaaccccacgcggctgtcaactgtgtgcgtggtaggcatggagatcctggttgtgccgtctcagctccgctctgaaggcactgtgtgggtgctgcgtgactggagagctgtgtggaggccatgtgtgccccgtgcagggatcaggagggcgggggagggaccgagcagccctcttgcccggtcgggtcagccctagtggctgcctgcacactgtagacgtcccagggcctgtgctgtgatcacctgcctttggaccacatttgtgtttgctcttagagatcgagctcctcagtggtacctgaagcctttgcttccggaaagcgcggtagggttcgtaggtagggctagtaggtagggttagtaggtagggctagtaggtagggctagtaggtagggttagtaggtagggttcgtaggtagggctggtaggtagggttagtaggtagggctagtaggtagggttcgtaggtagggctagtaggtagggttagtaggtagggctagtaggtagggctagtaggtagggttagtaggtagggttcgtaggtagggctggtaggtagggttagtaggtagggctagtaggtagggttcgtaggtagggctagtaggtagggttagtaggtagggctagtaggtagggctagtaggtagggttagtaggtagggttcgtaggtagggctggtaggtagggttagtaggtagggctagtaggtagggctagtaggtagggctagtaggtagggttagtaggtagggctagtaggtagggctagtaggtagggttagtaggtagggttcgtaggtagggctggtaggtagggttagtaggtagggctagtaggtagggctagtaggtagggctagtaggtagggctagtaggtagggctagtaggtagggctagtaggtagggctagtaggtagggttcgtaggtagggttcgtaggtagggttcgtaggtagggttagtagcgcgtctgtgctgcttccacctggtgcttcctgttcccaaatcacaagggcctgaaggtggtccctgctttctctttctctttctctgtgtctcagatggcgattttgctgacagctgccaagaaaatgcttcactcaacagtcctcatgtgcccagagatgtttatagaactgtttgaattgcagccatcccctgccccctcccaggctgaagatctgttctttttaagttgattcgggagtggcattcttttatacccaaagactgtagtgcatcttgaagagctcaaagcacatgaccgcacaaatgcttacagggtttcctcccgagtaatccaatctcactccccttgtaagggaattctggggcagctatggtttgagtatgcagtttgcatcgtgtttctacctttagtaccttgccactcttttaaaacgctgctgtcatttcccatttcttagtactaatgattctttgattctccctctattatgtcttaattcactttccttcctaaatttgttatttgcatatcaaattctgtaaatgttttgtaaacatattacctcacttggtaatacaatactgatagtctttaaaagatttttttattgttatcaataataaatgtgaactatttaaag

SEQ ID NO: 214 - protein, 715 aa, Homo sapien
MVQKYQSPVRVYKYPFELIMAAYERRFPTCPLIPMFVGSDTVSEFKSEDGAIHVIERRCKLDVDAPRLLKKIAGVDYVYFVQKNSLNSRERTLHIEAYNETFSNRVIINEHCCYTVHPENEDWTCFEQSASLDIKSFFGFESTVEKIAMKQYTSNIKKGKEIIEYYLRQLEEEGITFVPRWSPPSITPSSETSSSSSKKQAASMAVVIPEAALKEGLSGDALSSPSAPEPVVGTPDDKLDADHIKRYLGDLTPLQESCLIRLRQWLQETHKGKIPKDEHILRFLRARDFNIDKAREIMCQSLTWRKQHQVDYILETWTPPQVLQDYYAGGWHHHDKDGRPLYVLRLGQMDTKGLVRALGEEALLRYVLSVNEERLRRCEENTKVFGRPISSWTCLVDLEGLNMRHLWRPGVKALLRIIEVVEANYPETLGRLLILRAPRVFPVLWTLVSPFIDDNTRRKFLIYAGNDYQGPGGLLDYIDKEIIPDFLSGECMCEVPEGGLVPKSLYRTAEELENEDLKLWTETIYQSASVFKGAPHEILIQIVDASSVITWDFDVCKGDIVFNIYHSKRSPQPPKKDSLGAHSITSPGGNNVQLIDKVWQLGRDYSMVESPLICKEGESVQGSHVTRWPGFYILQWKFHSMPACAASSLPRVDDVLASLQVSSHKCKVMYYTEVIGSEDFRGSMTSLESSHSGFSQLSAATTSSSQSHSSSMISR

SEQ ID NO: 215 - DNA, 2787 bp, Homo sapien
agagcggaggccgcactccagcactgcgcagggaccgccttggaccgcagttgccggccaggaatcccagtgtcacggtggacacgcctccctcgcgcccttgccgcccacctgctcacccagctcaggggctttggaattctgtggccacactgcgaggagatcggttctgggtcggaggctacaggaagactcccactccctgaaatctggagtgaagaacgccgccatccagccaccattccaaggaggtgcaggagaacagctctgtgataccatttaacttgttgacattacttttatttgaaggaacgtatattagagcttactttgcaaagaaggaagatggttgtttccgaagtggacatcgcaaaagctgatccagctgctgcatcccaccctctattactgaatggagatgctactgtggcccagaaaaatccaggctcggtggctgagaacaacctgtgcagccagtatgaggagaaggtgcgcccctgcatcgacctcattgactccctgcgggctctaggtgtggagcaggacctggccctgccagccatcgccgtcatcggggaccagagctcgggcaagagctccgtgttggaggcactgtcaggagttgcccttcccagaggcagcgggatcgtgaccagatgcccgctggtgctgaaactgaagaaacttgtgaacgaagataagtggagaggcaaggtcagttaccaggactacgagattgagatttcggatgcttcagaggtagaaaaggaaattaataaagcccagaatgccatcgccggggaaggaatgggaatcagtcatgagctaatcaccctggagatcagctcccgagatgtcccggatctgactctaatagaccttcctggcataaccagagtggctgtgggcaatcagcctgctgacattgggtataagatcaagacactcatcaagaagtacatccagaggcaggagacaatcagcctggtggtggtccccagtaatgtggacatcgccaccacagaggctctcagcatggcccaggaggtggaccccgagggagacaggaccatcggaatcttgacgaagcctgatctggtggacaaaggaactgaagacaaggttgtggacgtggtgcggaacctcgtgttccacctgaagaagggttacatgattgtcaagtgccggggccagcaggagatccaggaccagctgagcctgtccgaagccctgcagagagagaagatcttctttgagaaccacccatatttcagggatctgctggaggaaggaaaggccacggttccctgcctggcagaaaaacttaccagcgagctcatcacacatatctgtaaatctctgcccctgttagaaaatcaaatcaaggagactcaccagagaataacagaggagctacaaaagtatggtgtcgacataccggaagacgaaaatgaaaaaatgttcttcctgatagataaaattaatgcctttaatcaggacatcactgctctcatgcaaggagaggaaactgtaggggaggaagacattcggctgtttaccagactccgacacgagttccacaaatggagtacaataattgaaaacaattttcaagaaggccataaaattttgagtagaaaaatccagaaatttgaaaatcagtatcgtggtagagagctgccaggctttgtgaattacaggacatttgagacaatcgtgaaacagcaaatcaaggcactggaagagccggctgtggatatgctacacaccgtgacggatatggtccggcttgctttcacagatgtttcgataaaaaattttgaagagttttttaacctccacagaaccgccaagtccaaaattgaagacattagagcagaacaagagagagaaggtgagaagctgatccgcctccacttccagatggaacagattgtctactgccaggaccaggtatacaggggtgcattgcagaaggtcagagagaaggagctggaagaagaaaagaagaagaaatcctgggattttggggctttccagtccagctcggcaacagactcttccatggaggagatctttcagcacctgatggcctatcaccaggaggccagcaagcgcatctccagccacatccctttgatcatccagttcttcatgctccagacgtacggccagcagcttcagaaggccatgctgcagctcctgcaggacaaggacacctacagctggctcctgaaggagcggagcgacaccagcgacaagcggaagttcctgaaggagcggcttgcacggctgacgcaggctcggcgccggcttgcccagttccccggttaaccacactctgtccagccccgtagacgtgcacgcacactgtctgcccccgttcccgggtagccactggactgacgacttgagtgctcagtagtcagactggatagtccgtctctgcttatccgttagccgtggtgatttagcaggaagctgtgagagcagtttggtttctagcatgaagacagagccccaccctcagatgcacatgagctggcgggattgaaggatgctgtcttcgtactgggaaagggattttcagccctcagaatcgctccaccttgcagctctccccttctctgtattcctagaaactgacacatgctgaacatcacagcttatttcctcatttttataatgtcccttcacaaacccagtgttttaggagcatgagtgccgtgtgtgtgcgtcctgtcggagccctgtctcctctctctgtaataaactcatttctagcag

SEQ ID NO: 216 - protein, 662 aa, Homo sapien
MVVSEVDIAKADPAAASHPLLLNGDATVAQKNPGSVAENNLCSQYEEKVRPCIDLIDSLRALGVEQDLALPAIAVIGDQSSGKSSVLEALSGVALPRGSGIVTRCPLVLKLKKLVNEDKWRGKVSYQDYEIEISDASEVEKEINKAQNAIAGEGMGISHELITLEISSRDVPDLTLIDLPGITRVAVGNQPADIGYKIKTLIKKYIQRQETISLVVVPSNVDIATTEALSMAQEVDPEGDRTIGILTKPDLVDKGTEDKVVDVVRNLVFHLKKGYMIVKCRGQQEIQDQLSLSEALQREKIFFENHPYFRDLLEEGKATVPCLAEKLTSELITHICKSLPLLENQIKETHQRITEELQKYGVDIPEDENEKMFFLIDKINAFNQDITALMQGEETVGEEDIRLFTRLRHEFHKWSTIIENNFQEGHKILSRKIQKFENQYRGRELPGFVNYRTFETIVKQQIKALEEPAVDMLHTVTDMVRLAFTDVSIKNFEEFFNLHRTAKSKIEDIRAEQEREGEKLIRLHFQMEQIVYCQDQVYRGALQKVREKELEEEKKKKSWDFGAFQSSSATDSSMEEIFQHLMAYHQEASKRISSHIPLIIQFFMLQTYGQQLQKAMLQLLQDKDTYSWLLKERSDTSDKRKFLKERLARLTQARRRLAQFPG

SEQ ID NO: 217 - DNA, 1632 bp, Homo sapien
gccggccgaacccagacccgaggttttagaagcagagtcaggcgaagctgggccagaaccgcgacctccgcaaccttgagcggcatccgtggagtgcgcctgcgcagctacgaccgcagcaggaaagcgccgccggccaggcccagctgtggccggacagggactggaagagaggacgcggtcgagtaggtgtgcaccagccctggcaacgagagcgtctaccccgaactctgctggccttgaggtggggaagccggggagggcagttgaggaccccgcggaggcgcgtgactggttgagcgggcaggccagcctccgagccgggtggacacaggttttaaaacatgaatcctacactcatccttgctgccttttgcctgggaattgcctcagctactctaacatttgatcacagtttagaggcacagtggaccaagtggaaggcgatgcacaacagattatacggcatgaatgaagaaggatggaggagagcagtgtgggagaagaacatgaagatgattgaactgcacaatcaggaatacagggaagggaaacacagcttcacaatggccatgaacgcctttggagacatgaccagtgaagaattcaggcaggtgatgaatggctttcaaaaccgtaagcccaggaaggggaaagtgttccaggaacctctgttttatgaggcccccagatctgtggattggagagagaaaggctacgtgactcctgtgaagaatcagggtcagtgtggttcttgttgggcttttagtgctactggtgctcttgaaggacagatgttccggaaaactgggaggcttatctcactgagtgagcagaatctggtagactgctctgggcctcaaggcaatgaaggctgcaatggtggcctaatggattatgctttccagtatgttcaggataatggaggcctggactctgaggaatcctatccatatgaggcaacagaagaatcctgtaagtacaatcccaagtattctgttgctaatgacaccggctttgtggacatccctaagcaggagaaggccctgatgaaggcagttgcaactgtggggcccatttctgttgctattgatgcaggtcatgagtccttcctgttctataaagaaggcatttattttgagccagactgtagcagtgaagacatggatcatggtgtgctggtggttggctacggatttgaaagcacagaatcagataacaataaatattggctggtgaagaacagctggggtgaagaatggggcatgggtggctacgtaaagatggccaaagaccggagaaaccattgtggaattgcctcagcagccagctaccccactgtgtgagctggtggacggtgatgaggaaggacttgactggggatggcgcatgcatgggaggaattcatcttcagtctaccagcccccgctgtgtcggatacacactcgaatcattgaagatccgagtgtgatttgaattctgtgatattttcacactggtaaatgttacctctattttaattactgctataaataggtttatattattgattcacttactgactttgcattttcgtttttaaaaggatgtataaatttttacctgtttaaataaaatttaatttcaaatgta

SEQ ID NO: 218 - protein, 333 aa, Homo sapien [sequence omitted]

SEQ ID NO: 219 - DNA, 2236 bp, Homo sapien
cttttttacaccttcttccacattctcatgcaagtcaccaccatagtcatagccatgaagaaccagcaatggaaatgaaaagaggaccacttttcagtcatctgtcttctcaaaacatagaagaaagtgcctattttgattccacgtggaagggtctaacagctctaggaggcctgtatttcatgtttcttgttgaacatgtcctcacattgatcaaacaatttaaagataagaagaaaaagaatcagaagaaacctgaaaatgatgatgatgtggagattaagaagcagttgtccaagtatgaatctcaactttcaacaaatgaggagaaagtagatacagatgatcgaactgaaggctatttacgagcagactcacaagagccctcccactttgattctcagcagcctgcagtcttggaagaagaagaggtcatgatagctcatgctcatccacaggaagtctacaatgaatatgtacccagagggtgcaagaataaatgccattcacatttccacgatacactcggccagtcagacgatctcattcaccaccatcatgactaccatcatattctccatcatcaccaccaccaaaaccaccatcctcacagtcacagccagcgctactctcgggaggagctgaaagatgccggcgtcgccactttggcctggatggtgataatgggtgatggcctgcacaatttcagcgatggcctagcaattggtgctgcttttactgaaggcttatcaagtggtttaagtacttctgttgctgtgttctgtcatgagttgcctcatgaattaggtgactttgctgttctactaaaggctggcatgaccgttaagcaggctgtcctttataatgcattgtcagccatgctggcgtatcttggaatggcaacaggaattttcattggtcattatgctgaaaatgtttctatgtggatatttgcacttactgctggcttattcatgtatgttgctctggttgatatggtacctgaaatgctgcacaatgatgctagtgaccatggatgtagccgctgggggtatttctttttacagaatgctgggatgcttttgggttttggaattatgttacttatttccatatttgaacataaaatcgtgtttcgtataaatttctagttaaggtttaaatgctagagtagcttaaaaagttgtcatagtttcagtaggtcatagggagatgagtttgtatgctgtactatgcagcgtttaaagttagtgggttttgtgatttttgtattgaatattgctgtctgttacaaagtcagttaaaggtacgttttaatatttaagttattctatcttggagataaaatctgtatgtgcaattcaccggtattaccagtttattatgtaaacaagagatttggcatgacatgttctgtatgtttcagggaaaaatgtctttaatgctttttcaagaactaacacagttattcctatactggattttaggtctctgaagaactgctggtgtttaggaataagaatgtgcatgaagcctaaaataccaagaaagcttatactgaatttaagcaaagaaataaaggagaaaagagaagaatctgagaattggggaggcatagattcttataaaaatcacaaaatttgttgtaaattagaggggagaaatttagaattaagtataaaaaggcagaattagtatagagtacattcattaaacatttttgtcaggattatttcccgtaaaaacgtagtgagcacttttcatatactaatttagttgtacatttaactttgtataatacagaaatctaaatatatttaatgaattcaagcaatatatcacttgaccaagaaattggaatttcaaaatgttcgtgcgggtatataccagatgagtacagtgagtagttttatgtatcaccagactgggttattgccaagttatatatcaccaaaagctgtatgactggatgttctggttacctggtttacaaaattatcagagtagtaaaactttgatatatatgaggatattaaaactacactaagtatcatttgattcgattcagaaagtactttgatatctctcagtgcttcagtgctatcattgtgagcaattgtcttttatatacggtactgtagccatactaggcctgtctgtggcattctctagatgtttcttttttacacaataaattccttatatcagcttgaaaaaaaaaaaaaaaaaaaaaaaa

SEQ ID NO: 220 - DNA, 2744 bp, Homo sapien
ctcgtgccgaattcggcacgagaccgcgtgttcgcgcctggtagagatttctcgaagacaccagtgggcccgtgtggaaccaaacctgcgcgcgtggccgggccgtgggacaacgaggccgcggagacgaaggcgcaatggcgaggaagttatctgtaatcttgatcctgacctttgccctctctgtcacaaatccccttcatgaactaaaagcagctgctttcccccagaccactgagaaaattagtccgaattgggaatctggcattaatgttgacttggcaatttccacacggcaatatcatctacaacagcttttctaccgctatggagaaaataattctttgtcagttgaagggttcagaaaattacttcaaaatataggcatagataagattaaaagaatccatatacaccatgaccacgaccatcactcagaccacgagcatcactcagaccatgagcgtcactcagaccatgagcatcactcagaccacgagcatcactctgaccataatcatgctgcttctggtaaaaataagcgaaaagctctttgcccagaccatgactcagatagttcaggtaaagatcctagaaacagccaggggaaaggagctcaccgaccagaacatgccagtggtagaaggaatgtcaaggacagtgttagtgctagtgaagtgacctcaactgtgtacaacactgtctctgaaggaactcactttctagagacaatagagactccaagacctggaaaactcttccccaaagatgtaagcagctccactccacccagtgtcacatcaaagagccgggtgagccggctggctggtaggaaaacaaatgaatctgtgagtgagccccgaaaaggctttatgtattccagaaacacaaatgaaaatcctcaggagtgtttcaatgcatcaaagctactgacatctcatggcatgggcatccaggttccgctgaatgcaacagagttcaactatctctgtccagccatcatcaaccaaattgatgctagatcttgtctgattcatacaagtgaaaagaaggctgaaatccctccaaagacctattcattacaaatagcctgggttggtggttttatagccatttccatcatcagtttcctgtctctgctgggggttatcttagtgcctctcatgaatcgggtgtttttcaaatttctcctgagtttccttgtggcactggccgttgggactttgagtggtgatgcttttttacaccttcttccacattctcatgcaagtcaccaccatagtcatagccatgaagaaccagcaatggaaatgaaaagaggaccacttttcagtcatctgtcttctcaaaacatagaagaaagtgcctattttgattccacgtggaagggtctaacagctctaggaggcctgtatttcatgtttcttgttgaacatgtcctcacattgatcaaacaatttaaagataagaagaaaaagaatcagaagaaacctgaaaatgatgatgatgtggagattaagaagcagttgtccaagtatgaatctcaactttcaacaaatgaggagaaagtagatacagatgatcgaactgaaggctatttacgagcagactcacaagagccctcccactttgattctcagcagcctgcagtcttggaagaagaagaggtcatgatagctcatgctcatccacaggaagtctacaatgaatatgtacccagagggtgcaagaataaatgccattcacatttccacgatacactcggccagtcagacgatctcattcaccaccatcatgactaccatcatattctccatcatcaccaccaccaaaaccaccatcctcacagtcacagccagcgctactctcgggaggagctgaaagatgccggcgtcgccactttggcctggatggtgataatgggtgatggcctgcacaatttcagcgatggcctagcaattggtgctgcttttactgaaggcttatcaagtggtttaagtacttctgttgctgtgttctgtcatgagttgcctcatgaattaggtgactttgctgttctactaaaggctggcatgaccgttaagcaggctgtcctttataatgcattgtcagccatgctggcgtatcttggaatggcaacaggaattttcattggtcattatgctgaaaatgtttctatgtggatatttgcacttactgctggcttattcatgtatgttgctctggttgatatggtacctgaaatgctgcacaatgatgctagtgaccatggatgtagccgctgggggtatttctttttacagaatgctgggatgcttttgggttttggaattatgttacttatttccatatttgaacataaaatcgtgtttcgtataaatttctagttaaggtttaaatgctagagtagcttaaaaagttgtcatagtttcagtaggtcatagggagatgagtttgtatgctgtactatgcagcgtttaaagttagtgggttttgtgatttttgtattgaatattgctgtctgttacaaagtcagttaaaggtacgttttaatatttaagttattctatcttggagataaaatctgtatgtgcaattcaccggtattaccagtttattatgtaaacaagagatttggcatgacatgttctgtatgtttcagggaaaaatgtctttaatgctttttcaagaactaacacagttattcctatactggattttaggtctctgaagaactgctggtg

SEQ ID NO: 221 - protein, 752 aa, Homo sapien
MARKLSVILILTFALSVTNPLHELKAAAFPQTTEKISPNWESGINVDLAISTRQYHLQQLFYRYGENNSLSVEGFRKLLQNIGIDKIKRIHIHHDHDHHSDHEHHSDHERHSDHEHHSDHEHHSDHNHAASGKNKRKALCPDHDSDSSGKDPRNSQGKGAHRPEHASGRRNVKDSVSASEVTSTVYNTVSEGTHFLETIETPRPGKLFPKDVSSSTPPSVTSKSRVSRLAGRKTNESVSEPRKGFMYSRNTNENPQECFNASKLLTSHGMGIQVPLNATEFNYLCPAIINQIDARSCLIHTSEKKAEIPPKTYSLQIAWVGGFIAISIISFLSLLGVILVPLMNRVFFKFLLSFLVALAVGTLSGDAFLHLLPHSHASHHHSHSHEEPAMEMKRGPLFSHLSSQNIEESAYFDSTWKGLTALGGLYFMFLVEHVLTLIKQFKDKKKKNQKKPENDDDVEIKKQLSKYESQLSTNEEKVDTDDRTEGYLRADSQEPSHFDSQQPAVLEEEEVMIAHAHPQEVYNEYVPRGCKNKCHSHFHDTLGQSDDLIHHHHDYHHILHHHHHQNHHPHSHSQRYSREELKDAGVATLAWMVIMGDGLHNFSDGLAIGAAFTEGLSSGLSTSVAVFCHELPHELGDFAVLLKAGMTVKQAVLYNALSAMLAYLGMATGIFIGHYAENVSMWIFALTAGLFMYVALVDMVPEMLHNDASDHGCSRWGYFFLQNAGMLLGFGIMLLIPYLNIKSCSYKFLVKV

SEQ ID NO: 222 - DNA, 1619 bp, Homo sapien
ccgccagatttgaatcgcgggacccgttggcagaggtggcggcggcggcatgggtgccccgacgttgccccctgcctggcagccctttctcaaggaccaccgcatctctacattcaagaactggcccttcttggagggctgcgcctgcaccccggagcggatggccgaggctggcttcatccactgccccactgagaacgagccagacttggcccagtgtttcttctgcttcaaggagctggaaggctgggagccagatgacgaccccatagaggaacataaaaagcattcgtccggttgcgctttcctttctgtcaagaagcagtttgaagaattaacccttggtgaatttttgaaactggacagagaaagagccaagaacaaaattgcaaaggaaaccaacaataagaagaaagaatttgaggaaactgcgaagaaagtgcgccgtgccatcgagcagctggctgccatggattgaggcctctggccggagctgcctggtcccagagtggctgcaccacttccagggtttattccctggtgccaccagccttcctgtgggccccttagcaatgtcttaggaaaggagatcaacattttcaaattagatgtttcaactgtgctcctgttttgtcttgaaagtggcaccagaggtgcttctgcctgtgcagcgggtgctgctggtaacagtggctgcttctctctctctctctcttttttgggggctcatttttgctgttttgattcccgggcttaccaggtgagaagtgagggaggaagaaggcagtgtcccttttgctagagctgacagctttgttcgcgtgggcagagccttccacagtgaatgtgtctggacctcatgttgttgaggctgtcacagtcctgagtgtggacttggcaggtgcctgttgaatctgagctgcaggttccttatctgtcacacctgtgcctcctcagaggacagtttttttgttgttgtgtttttttgttttttttttttggtagatgcatgacttgtgtgtgatgagagaatggagacagagtccctggctcctctactgtttaacaacatggctttcttattttgtttgaattgttaattcacagaatagcacaaactacaattaaaactaagcacaaagccattctaagtcattggggaaacggggtgaacttcaggtggatgaggagacagaatagagtgataggaagcgtctggcagatactccttttgccactgctgtgtgattagacaggcccagtgagccgcggggcacatgctggccgctcctccctcagaaaaaggcagtggcctaaatcctttttaaatgacttggctcgatgctgtgggggactggctgggctgctgcaggccgtgtgtctgtcagcccaaccttcacatctgtcacgttctccacacgggggagagacgcagtccgcccaggtccccgctttctttggaggcagcagctcccgcagggctgaagtctggcgtaagatgatggatttgattcgccctcctccctgtcatagagctgcagggtggattgttacagcttcgctggaaacctctggaggtcatctcggctgttcctgagaaataaaaagcctgtcatttc

SEQ ID NO: 223 - protein, 142 aa, Homo sapien
MGAPTLPPAWQPFLKDHRISTFKNWPFLEGCACTPERMAEAGFIHCPTENEPDLAQCFFCFKELEGWEPDDDPIEEHKKHSSGCAFLSVKKQFEELTLGEFLKLDRERAKNKIAKETNNKKKEFEETAKKVRRAIEQLAAMD

SEQ ID NO: 224 - DNA, 6470 bp, Homo sapien
cgcagaaccgaggtcgccgagtgatgatgttgtgaagtcgcccgcctgtccctgccacgcccgggcggttgctggcagtgggagcagcggcagcagcttcggctgctgctttcaggctgccgctgcattaggggcttcctgaggaaacgcgggcggacgacagaggatgccgaaccactccagtcatgactgtccaaagtatgataatcacatgagagtgctcgttgctacggatgtcatttgactcatcagagaaaatctgtctaaaagaaaatatccatgtgaccaaatccatttcattattgaatggcttgatggatttcctttactctgattcataccaaagctgtccttctcaaccaaagcaagaaaggatcctgcatgagtcaatcccagaatgcaatttttacatcaccaacaggtgaagaaaacctcatgaatagcaatcacagagactcggagagcatcactgatgtctgctccaatgaggatctccctgaagttgagctggtgagtctgctagaagaacaactaccacagtataggctaaaagtagacactctctttctatatgaaaatcaagactggactcagtctccacaccagcggcagcatgcatctgatgctctctctccagtccttgctgaagagactttccgttacatgattctaggcacagacagggtggagcagatgaccaaaacttacaatgacatcgacatggttacacatctcctggcagagagggatcgtgatctggaactcgctgctcgaattggacaagctctcttaaagcggaaccatatcttatctgagcagaacgaatccctggaggagcaattgggacaagcctttgatcaagttaatcagctgcagcatgagctatgcaagaaagatgagttacttcgaatcgtctccattgcttctgaagaaagtgaaactgattccagctgttctacacctcttcggttcaatgagtcctttagcttatctcaagggttgctgcagttggaaatgctgcaagaaaagctcaaggaactggaagaagagaatatggctcttcgatccaaggcttgtcacataaagacagaaactgttacctatgaagaaaaggaacaacagcttgtcagcgactgtgttaaagaacttcgtgaaacaaatgctcagatgtccagaatgactgaagaattgtcagggaagagtgatgagctgattcgataccaagaagagctttcctctcttttgtcacagattgtagaccttcagcataaacttaaagaacatgtgattgagaaggaagaactaaaacttcacctgcaagcttccaaagatgcccaacggcaactgacaatggagctgcacgagttacaagacaggaatatggagtgtctaggaatgttacatgaatcccaagaagaaataaaggaacttcgtagtagatctggccctactgctcatctctacttctcccaatcatatggagcttttactggggaatctttggcagctgagattgaggggactatgcgtaaaaagctgagtttggatgaggaatcttctctctttaaacaaaaagcccaacagaagcgggtatttgataccgtcaggattgccaatgacacacggggccgctctatctcattcccagctctgttacccattccaggctccaaccgttcaagtgtcatcatgacagcaaaaccttttgagtctggtcttcagcaaacagaggacaaatcactcctgaaccaggggagcagctcagaggaggttgcagggagctcccagaagatgggccaaccaggaccctcaggagatagtgatttggctacagcactgcatcgccttagcttgcgtcgacaaaactatttaagtgagaagcagttctttgctgaagaatggcagcggaagatccaggttctggcagaccagaaggaaggagttagtggctgtgtcaccccgacagagagccttgcctctctctgcaccacccagtcagagatcacagacctcagcagtgccagttgccttcgaggttttatgccagaaaaattacaaattgtcaagccccttgaaggatcacaaactctgtatcactggcagcagcttgctcaaccaaacttgggaaccatccttgatccacgaccaggtgtcattactaaaggctttacccagttgcccggggatgctatttatcacatctcagatttagaagaggatgaagaggagggtattacttttcaggttcagcaacctcttgaagtggaagagaaactttcaacatccaagccagtaacagggatcttcctgccacccattacttcagcaggtggaccagttacagttgcaaccgccaacccaggaaagtgcctgtcgtgcacaaactcaacattcactttcaccacctgtagaatattacatccctctgacatcactcaggttacccccagctctgggttcccttcattatcctgtggaagtagcggtagcagttcatccaacacggctgtgaattctcctgccttgtcctatagactcagcattggtgagtccatcaccaaccgacgagattccactacaaccttcagtagcaccatgagcttggccaaacttctacaagagcgaggcatctctgccaaagtgtaccacagcccaatttcagagaaccccctccagcctctccctaaatccctggctatcccttccacaccaccaaattcaccatctcactcaccttgcccttctcctttaccctttgagcctcgagtgcatctctctgaaaattttttggcctctcgaccagctgagacattcctccaggagatgtatggcttgagaccctcccggaaccctcctgatgttggccagttgaagatgaacttagtggacaggctgaagagactggggatagccagagtggtcaagaaccctggtgcccaagagaatggaagatgccaggaggcagaaattggtcctcaaaaaccagattctgctgtttatttaaattcaggtagcagtttattaggtggactaaggaggaatcagagtcttccagtcataatgggtagctttgctgccccagtttgcacatcctcacccaaaatgggtgtcctgaaggaggactgaggttcagcagttaactgaccttttatacaagttagcacatgaaggatagatatgcactgaaacatgtggtctggtctgacttgagagaaaaggaatgttgcacaagggttgtgaatgtgaaagggggaatggaggaatggaaataaaattgggatgagccctaatggaggaagtcgggcaaattgaaagtataaatgaatgggccatgagtgttcagagggagaaaagaaaggtttaatatactccttcagttgagttttcttgtcttgaacataaaaagtgaatacaaataaattcagtaatactaaaacatacagagatactgaacttgctggcacatttacttctggtaagcataaagcagagagaacccaggttagaaggatgggaagagaaaaggagcagttttattgcttatagaaagccgttctgaggggttggtggggtaagctcagtctattactgagacaatagtgagatggcttatatgtttcccctgttaatatctggttaaattatgtatccatcaaatggtatgctcgcagcattagcaaaattaggagtttcatctttttcattgaatcacaggtggagactcctattttcctttctgttttcaggcctttgagcccctgggagcccaaataccactcaattattttgtatttatgattaataaaagttcattttttaaatttgtatttttatacaacctccaaaaaaaaaaacaactgggtagagggtgggagggatttacttttaagaggcaaaatgtgagtaaattgaaaccaagaaaacttgtttttagaatatttcgtctgaataagtacagtagccaaggaatacaaacctaattgcatgtttttaaaaattccttggaggctggaaggggttaagccagaagtgcaatcaataggaattagggaatgttgtatatttatatatgtaaactttttttgtaagaaaagttggtgacaactaaaccaactttttccaaagtgcgctatgcatatttttaatgaaagatgacatgtatttgcacaaaaattctcaggcacattaaattattgtaaactgaagtaaaacccgggtgcttgctttgagattgtggttttttcttcctaatgtaaaataaaataaaacacatctgccttcttgatatttatagaattagagaataaactttttaatgggggagtcaaagctttttctttttctctaaggttcttttttttattcaaactgtatgaaatggcaaagtgaggctctggggttagatttcagcattcagcagttgacacaggctaagaaatggaaagaagtagatctgttttttctcaatgttgctgagcaaagtctgcttctcatcagatgacgtggctttgtctagacagcacgcagttcagaaagaaatgtctttatacaaaagacatgatagagaaaagatgagagaggggactaattattttgtttatgaaaatggcaagtaaattacttgatctttttggtgcttaatttgcaaatgttttgttcctttgtcctgacttaaaggcagttttctgaagaactcttgactcttgctcctatggttcccataggcacacctattcccaggccaaggagagtccttcctctccccttttgaggcatccccgccatccccccacttagagctatgtgctcaaaaagccaacatgaatgcagtggtaaaaatttgttagtttcttatactttttagaatctctcaataaaatttttctaaataaattccacaaaaacaaagggtgaagatggtctctccctttcgttccccttcactcagttgtgctgaggtcaatagagtgtagagtttcagaaaggattccagcaggtttatatgtgaatataagtgtccctgaatggggcaggcattaaatagaagaatccctgctgtttaaatttcccgcatattccaattcacttttaaaaaataccatttgaatttgtatttcataaagtgactctggggtgcttactttagtcaattcttaaaattttttatttgttccctaagaaagtaattactgtttctgttgcctggacagttacagtttccaggaaacatcaggaagtaggaaactgtagggccagagagtagtacaacgttaaattgtccgatttatgtgtattacttaaagctataaattgaactagatcttgccgtgctctgtattgagtataatttgtatacttttttataattaatgactaaatgatcactttggaggcagggtggtgggggtgtattagcagccaaataagcatatctgatcaaaaagaaccaggcttagattttttttaagtacattgatgttgatgttccaccagaaacaccttaagtgtatactgttgtgtaatgtctctagaaaggaatcctgtcttaaaactgggttttgctgttttttgaagtttctacctaaaatcatttttggtatatcctgataatctctataatactagaattgtctgcaaaatatagtaagaagaattggagcctaatagctgattcctcccaatttatctgttatgttttgtcactattcacattttagtcttttctacgataaaaattgtatgtgtactttcatgccagtataggaaacctcaatcttttttttttttcgcctttaagaaggttttcagtgattatacctcaggtatttctgagtgtcctattgtctaataggagaaatatcttcccgagctcagaattaaaagttctcctaaattatgaagatcccaaatcttatgtaaataaccttaggcatgagtccttagggagaagttaatgaccattgttaaagtgcttttttagaaaatgttgtgctgtatgttcttgatttgacataaatgaatagactttggcaagggaggaaataagttaaaaggcagcttacaagagcctattccctataaagggtataattttacacagtactcaaagcttgttatcttttctgaccattttagtacagaattagtacttggtggttactaacatcaacttgtgacatctagaactagggctcttagtgtttagtgggccacttctctgatgtcagatgcatgcagacctgtactccacatgcaacccaacagcagtgcagtgtgataactgagcggtcgcatggcagaggacatccccctcagagtgggcacaagtgccctctagggcagccaggggaatactattgttcgatacctgggatttgactttgtcaaacagctctttgtgcccctatctttgttttgtcaaatgtagatcagttaataaacatgagtagcttgaattttcaaaaaaaaaa

SEQ ID NO: 225 - protein, 914 aa, Homo sapien
MSQSQNAIFTSPTGEENLMNSNHRDSESITDVCSNEDLPEVELVSLLEEQLPQYRLKVDTLFLYENQDWTQSPHQRQHASDALSPVLAEETFRYMILGTDRVEQMTKTYNDIDMVTHLLAERDRDLELAARIGQALLKRNHILSEQNESLEEQLGQAFDQVNQLQHELCKKDELLRIVSIASEESETDSSCSTPLRFNESFSLSQGLLQLEMLQEKLKELEEENMALRSKACHIKTETVTYEEKEQQLVSDCVKELRETNAQMSRMTEELSGKSDELIRYQEELSSLLSQIVDLQHKLKEHVIEKEELKLHLQASKDAQRQLTMELHELQDRNMECLGMLHESQEEIKELRSRSGPTAHLYFSQSYGAFTGESLAAEIEGTMRKKLSLDEESSLFKQKAQQKRVFDTVRIANDTRGRSISFPALLPIPGSNRSSVIMTAKPFESGLQQTEDKSLLNQGSSSEEVAGSSQKMGQPGPSGDSDLATALHRLSLRRQNYLSEKQFFAEEWQRKIQVLADQKEGVSGCVTPTESLASLCTTQSEITDLSSASCLRGFMPEKLQIVKPLEGSQTLYHWQQLAQPNLGTILDPRPGVITKGFTQLPGDAIYHISDLEEDEEEGITFQVQQPLEVEEKLSTSKPVTGIFLPPITSAGGPVTVATANPGKCLSCTNSTFTFTTCRILHPSDITQVTPSSGFPSLSCGSSGSSSSNTAVNSPALSYRLSIGESITNRRDSTTTFSSTMSLAKLLQERGISAKVYHSPISENPLQPLPKSLAIPSTPPNSPSHSPCPSPLPFEPRVHLSENFLASRPAETFLQEMYGLRPSRNPPDVGQLKMNLVDRLKRLGIARVVKNPGAQENGRCQEAEIGPQKPDSAVYLNSGSSLLGGLRRNQSLPVIMGSFAAPVCTSSPKMGVLKED

SEQ ID NO: 226 - DNA, 2024 bp, Homo sapien
ggcacgagggcttctcctgcgcctccttttcgcccagcactagcgccttaggccagctcgggggatgtgagagccgaagcccttagactgccaggcacagagtcgggtcgggatttgtcagccaagcctcggctccagctccgcaatctcgggactcacccgagcgacccaggcccgacggcaagttcgggcgggacggcggccgccgcgcgctcaggctcagcttcgctgcccgcccagaagatgaatccggcctcggcgccccctccgctcccgccgcctgggcagcaagtgatccacgtcacgcaggacctagacacagacctcgaagccctcttcaactctgtcatgaatccgaagcctagctcgtggcggaagaagatcctgccggagtctttctttaaggagcctgattcgggctcgcactcgcgccagtccagcaccgactcgtcgggcggccacccggggcctcgactggctgggggtgcccagcatgtccgctcgcactcgtcgcccgcgtccctgcagctgggcaccggcgcgggtgctgcgggtagccccgcgcagcagcacgcgcacctccgccagcagtcctacgacgtgaccgacgagctgccactgcccccgggctgggagatgaccttcacggccactggccagaggtacttcctcaatcacatagaaaaaatcaccacatggcaagaccctaggaaggcgatgaatcagcctctgaatcatatgaacctccaccctgccgtcagttccacaccagtgcctcagaggtccatggcagtatcccagccaaatctcgtgatgaatcaccaacaccagcagcagatggcccccagtaccctgagccagcagaaccaccccactcagaacccacccgcagggctcatgagtatgcccaatgcgctgaccactcagcagcagcagcagcagaaactgcggcttcagagaatccagatggagagagaaaggattcgaatgcgccaagaggagctcatgaggcaggaagctgccctctgtcgacagctccccatggaagctgagactcttgccccagttcaggctgctgtcaacccacccacgatgaccccagacatgagatccatcactaataatagctcagatcctttcctcaatggagggccatatcattcgagggagcagagcactgacagtggcctggggttagggtgctacagtgtccccacaactccggaggacttcctcagcaatgtggatgagatggatacaggagaaaacgcaggacaaacacccatgaacatcaatccccaacagacccgtttccctgatttccttgactgtcttccaggaacaaacgttgacttaggaactttggaatctgaagacctgatccccctcttcaatgatgtagagtctgctctgaacaaaagtgagccctttctaacctggctgtaatcactaccattgtaacttggatgtagccatgaccttacatttcctgggcctcttggaaaaagtgatggagcagagcaagtctgcaggtgcaccacttcccgcctccatgactcgtgctccctcctttttatgttgccagtttaatcattgcctggttttgattgagagtaacttaagttaaacataaataaatattctattttcattttctgcaagcctgcgttcttgtgacagattatacagaattgtgtctgcaggattgattatgcagaatacttttctctttcttctctgctgccccatggctaagctttatgggtgttaattgaaatttatacaccaattgattttaaaccataaaaagctgaccacaggcagttacttctgagggcatcttggtccaggaaatgtgcacaaaattcgacctgatttacagtttcaaaaactgtattgatgacagtagtaccaaatgctttaaaaactatttaacttgagctttaaaaatcattgtatggatagtaaaattctactgtatggaatacaatgtaattttgaatccaaaaaaaaaaaaaaaaaaa

SEQ ID NO: 227 - protein, 400 aa, Homo sapien
MNPASAPPPLPPPGQQVIHVTQDLDTDLEALFNSVMNPKPSSWRKKILPESFFKEPDSGSHSRQSSTDSSGGHPGPRLAGGAQHVRSHSSPASLQLGTGAGAAGSPAQQHAHLRQQSYDVTDELPLPPGWEMTFTATGQRYFLNHIEKITTWQDPRKAMNQPLNHMNLHPAVSSTPVPQRSMAVSQPNLVMNHQHQQQMAPSTLSQQNHPTQNPPAGLMSMPNALTTQQQQQQKLRLQRIQMERERIRMRQEELMRQEAALCRQLPMEAETLAPVQAAVNPPTMTPDMRSITNNSSDPFLNGGPYHSREQSTDSGLGLGCYSVPTTPEDFLSNVDEMDTGENAGQTPMNINPQQTRFPDFLDCLPGTNVDLGTLESEDLIPLFNDVESALNKSEPFLTWL

SEQ ID NO: 228 - DNA, 3355 bp, Homo sapien
ggcacgaggggctaagggtgcgcgagtagccgccacccgttcggcgttggctctggcgtcggggtcgttgtgtcgtgacaaccgctgcggtagccgtttccgaggcagcagttgcggccgctttagccctgagcgggatctgcggctgcctgcgagtctctgctgtgccgacccttctcttcgcggaccccacgccaagcagcgaccctgagccgacagccggagcgcccggcaatggcggcctcgacggcctcgcaccggcccatcaaggggatcttgaagaacaagacctctacgacttcctctatggtggcgtcggccgaacagccccgcgggaatgtcgacgaggagctgagcaaaaaatcccagaagtgggatgaaatgaacatcttggcgacgtatcatccagcagacaaagactatggtttaatgaaaatagatgaaccaagcactccttaccatagtatgatgggggatgatgaagatgcctgtagtgacaccgaggccactgaagccatggcgccagacatcttagccaggaaattagctgcagctgaaggcttggagccaaagtatcggattcaggaacaagaaagcagtggagaggaggatagtgacctctcacctgaagaacgagaaaaaaagcgacaatttgaaatgaaaaggaagcttcactacaatgaaggactcaatatcaaactagccagacaattaatttcaaaagacctacatgatgatgatgaagatgaagaaatgttagagactgcagatggagaaagcatgaatacggaagaatcaaatcaaggatctactccaagtgaccaacagcaaaacaaattacgaagttcatagacgagatttgttcaacactgcaattgtttgttagatgtaaaccctgtgactatagtacgttgcttcttgttcttcacaattcatgacttaagtaccaaaatgcataccagttattatatattgccaagaattaaatgataaacttagagactgattagactgaaaatgcctaatcgatatatatattcttgtgcctagtactttaccacaaatacagtgtaatatcatcagtccaaaactgcattacttttgtaaaaacactggttaatttgtataagatattatagagctttttatgctttagaagttaaacaatatctttgggggggaactaatttattttcatcacttgaaatgtggtagctcttacaaagtttattgatttgatttttttaaaaatcaaaagccaattgaacaacaggatatatagactgataaatatttaggctgaatagtattttaacacttgtcttcaacttgatttgtctgtttaattgaaaagaattataagagttactgttgcattttctgacctactatttttaaaattcctgttgagtttctttgtgtttacaaggaaaggactgaactttttctcatcaaaactagcttttttccccacaaataaattatcaggttaaactttcaccaatgtctgctctgttttttgtttttggggggtttttgtttgtttttgttttttaatgtttttggtacactgggcagacttcagagcagttttttaaaaaaataaatattctaatgtagctatctcgccattccctttaaatacctgtcttaacctcctgcttttctttcctactcctttccacacatacgcacacaatcttctaccttttaaaggatcattaagactgtcaccacattaggagctctttctctcactcttctgtcatttgctgctatgttgaaattcttattttgaccatcaatgcctatgaattcttctaatacgtgaagaaaatagtttgagtagcagcagtgctataggtgggaaatacagtttagctgctgaatttctatacctctctgatttacagattgctaattaaatggctattattagtttggattaattagacttaagaaaacaactaactgagggttttttttgtttgttttttgagggttttctttgcatgagagttgtatgtaaccagtgatatgattattcctgaatgtacagacagaagtaagcctggacattgttaaatagtccctgctttaagggactacgataatgtgtactatgacaaacgtgctttattcttctaacgcagtaagaattaggtggaattttttccttcaaccaagtgcaggaaagccctgtgtgtcttggtttagttatggtttcatttctagccatacaattgatgaattgtgtacaacttttgttagtaccaaaataatctgttatatgaacagacttctaaaataacgtctgtatattttatatatagatacatatatgaaagaaggcttttattgaacagcttatcttccacttgcaggtttatggaaacagcagtatttgaaaataaataaaaagtgggagaattccttgctgttagaagaatgtggccattattttgattttttgaatgagatatataatcaaagtactgctgaactgtgagtgcagtattctaaacatttcagctaggaataccactgatttagaaacaaaactgtttgtctctggtttctgaatttaaaatgttgggattacctgtttaaatctgtcttgggggatgtagagattaagtctgtacatgtgcgtgcacatatattcatgcaccctctgattttggttttcttgtttctgagttcttagaaagtacccacatactcttttttttttttttgtagaagtagctgtcatagagtgaagaaaaggataagactttaaacagttgattctttttgtgttttctacaaactattttttgaaatttaaatcacaaactcattttctggtttttagaaagtagatgatgatttcagaggagtaaggcatgccaagcagcatgctcagtggggttttaggctgtcacatgcagctgagaaaaggtatgttcaagtcataagtaggtaattgatagggtatgaactagtcaaaatatgaaccattatgattcaagttagattttcctctggagagacagatctgaatgttcagttctagccaaggtagattttactttcaactttttaatcagtatcactttctgtgcttaactatttggtgttaccttgtctgttttcatttgtctaaaattctgcagagatgactaaaatttgacataatggtgtaaatggattgttaaggtaactttcagttgaagattaaagcaagatgccattttccccatgactttggttttgtttacatttttccctttcagttagtatacactacacgtactgtaataaaatacaataatatgaaaaaaaaaaaaaaaaaaaaaaaaaaaaaaaaaaa

SEQ ID NO: 229 - protein, 205 aa, Homo sapien
MAASTASHRPIKGILKNKTSTTSSMVASAEQPRGNVDEELSKKSQKWDEMNILATYHPADKDYGLMKIDEPSTPYHSMMGDDEDACSDTEATEAMAPDILARKLAAAEGLEPKYRIQEQESSGEEDSDLSPEEREKKRQFEMKRKLHYNEGLNIKLARQLISKDLHDDDEDEEMLETADGESMNTEESNQGSTPSDQQQNKLRSS

SEQ ID NO: 230 - DNA, 3149 bp, Homo sapien
agggggcgcggtgggaggagtaggagaagacaaaagccgaaagcgaagagggcccgggctgcacacaccggctgggaggcagccgtctgtgcagcgagcagccggcgcggggaggccgcagtgcacggggcgtcacagtcggcaggcagcatggggaagggagggaaccagggcgagggggccgccgagcgcgaggtgtcggtgcccaccttcagctgggaggagattcagaagcataacctgcgcaccgacaggtggctggtcattgaccgcaaggtttacaacatcaccaaatggtccatccagcacccggggggccagcgggtcatcgggcactacgctggagaagatgcaacggatgccttccgcgccttccaccctgacctggaattcgtgggcaagttcttgaaacccctgctgattggtgaactggccccggaggagcccagccaggaccacggcaagaactcaaagatcactgaggacttccgggccctgaggaagacggctgaggacatgaacctgttcaagaccaaccacgtgttcttcctcctcctcctggcccacatcatcgccctggagagcattgcatggttcactgtcttttactttggcaatggctggattcctaccctcatcacggcctttgtccttgctacctctcaggcccaagctggatggctgcaacatgattatggccacctgtctgtctacagaaaacccaagtggaaccaccttgtccacaaattcgtcattggccacttaaagggtgcctctgccaactggtggaatcatcgccacttccagcaccacgccaagcctaacatcttccacaaggatcccgatgtgaacatgctgcacgtgtttgttctgggcgaatggcagcccatcgagtacggcaagaagaagctgaaatacctgccctacaatcaccagcacgaatacttcttcctgattgggccgccgctgctcatccccatgtatttccagtaccagatcatcatgaccatgatcgtccataagaactgggtggacctggcctgggccgtcagctactacatccggttcttcatcacctacatccctttctacggcatcctgggagccctccttttcctcaacttcatcaggttcctggagagccactggtttgtgtgggtcacacagatgaatcacatcgtcatggagattgaccaggaggcctaccgtgactggttcagtagccagctgacagccacctgcaacgtggagcagtccttcttcaacgactggttcagtggacaccttaacttccagattgagcaccacctcttccccaccatgccccggcacaacttacacaagatcgccccgctggtgaagtctctatgtgccaagcatggcattgaataccaggagaagccgctactgagggccctgctggacatcatcaggtccctgaagaagtctgggaagctgtggctggacgcctaccttcacaaatgaagccacagcccccgggacaccgtggggaaggggtgcaggtggggtgatggccagaggaatgatgggcttttgttctgaggggtgtccgagaggctggtgtatgcactgctcacggaccccatgttggatctttctccctttctcctctcctttttctcttcacatctcccccatagcaccctgccctcatgggacctgccctccctcagccgtcagccatcagccatggccctcccagtgcctcctagccccttcttccaaggagcagagaggtggccaccgggggtggctctgtcctacctccactctctgcccctaaagatgggaggagaccagcggtccatgggtctggcctgtgagtctccccttgcagcctggtcactaggcatcacccccgctttggttcttcagatgctcttggggttcataggggcaggtcctagtcgggcagggcccctgaccctcccggcctggcttcactctccctgacggctgccattggtccaccctttcatagagaggcctgctttgttacaaagctcgggtctccctcctgcagctcggttaagtacccgaggcctctcttaagatgtccagggccccaggcccgcgggcacagccagcccaaaccttgggccctggaagagtcctccaccccatcactagagtgctctgaccctgggctttcacgggccccattccaccgcctccccaacttgagcctgtgaccttgggaccaaagggggagtccctcgtctcttgtgactcagcagaggcagtggccacgttcagggaggggccggctggcctggaggctcagcccaccctccagcttttcctcagggtgtcctgaggtccaagattctggagcaatctgacccttctccaaaggctctgttatcagctgggcagtgccagccaatccctggccatttggccccaggggacgtgggccctgcaggctgcaggagggcactggagctgggaggtctcgtcccagccctccccatctcggggctgctgtgtggacggcgctgcctcaggcactctcctgtctgaacctgcccttactgtgtttaacctgttgctccaggatgcattctgataggagggggcggcagggctgggccttgtgacaatctgcctttcaccacatggccttgcctcggtggccctgactgtcagggagggccagggaggcagagcgggagggagtctcaggaggaggctgccctgaggggctggggagggggtacctcatgaggaccagggtggagctgagaagaggaggaggtgggggctggaggtgctggtagctgaggggacgggcaagtgagaggggagggagggaagtcctgggaggatcctgagctgctgttgcagtctaacccactaatcagttcttagattcaggggaagggcaggcaccaacaactcagaatgggggctttcggggagggcgcctagtccccccagctctaagcagccaggagggacctgcatctaagcatctgggttgccatggcaatggcatgccccccagctactgtatgcccccgacccccgcagaggcagaatgaacccatagggagctgatcgtaatgtttatcatgttacttccccacccctacattttttgaaataaaataaggaattttattctc

SEQ ID NO: 231 - protein, 444 aa, Homo sapien
MGKGGNQGEGAAEREVSVPTFSWEEIQKHNLRTDRWLVIDRKVYNITKWSIQHPGGQRVIGHYAGEDATDAFRAFHPDLEFVGKFLKPLLIGELAPEEPSQDHGKNSKITEDFRALRKTAEDMNLFKTNHVFFLLLLAHIIALESIAWFTVFYFGNGWIPTLITAFVLATSQAQAGWLQHDYGHLSVYRKPKWNHLVHKFVIGHLKGASANWWNHRHFQHHAKPNIFHKDPDVNMLHVFVLGEWQPIEYGKKKLKYLPYNHQHEYFFLIGPPLLIPMYFQYQIIMTMIVHKNWVDLAWAVSYYIRFFITYIPFYGILGALLFLNFIRFLESHWFVWVTQMNHIVMEIDQEAYRDWFSSQLTATCNVEQSFFNDWFSGHLNFQIEHHLFPTMPRHNLHKIAPLVKSLCAKHGIEYQEKPLLRALLDIIRSLKKSGKLWLDAYLHK

SEQ ID NO: 232 - DNA, 2236 bp, Homo sapien
cctcgccgcatccactctccggccggccgcctgcccgccgcctcctccgtgcgcccgccagcctcgcccgcgccgtcaccatgagccaggcctactcgtccagccagcgcgtgtcctcctaccgccgcaccttcggcggcgccccggtcttcccgctcggctccccgctgagctcgcccgtgttcccgcgggcgcctttcggctctaagggctcctccagctcggtgacgtcccgcgtgtaccaggtgtcgcgcacgtcgggaggggccgggggcctggggtcgctgcgggccagccggctggggaccacccgcacgccctcctcctacggcgcaggcgagctgctggacttctcactggccgacgcggtgaaccaggagtttctgaccacgcgcaccaacgagaaggtggagctgcaggagctcaatgaccgttcgccaatctacatggagaaggtgcgcttcctggagcagcagaacgcgctcgccgccgaagtgaaccggctcaagggccgcgagccgacgcgagtggccgagctctacgaggaggagctgcgggagctgcggcgccaggtggaggtgctcactaaccagcgcgcgcgcgtcgacgtcgagcgcgacaacctgctcgacgacctgcagcggctcaaggccaagctgcaggaggagattcagttgaaggaagaagcagagaacaatttggctgccttccgagcggacgtggatgcagctactctagctcgcattgacctggagcgcagaattgaatctctcaacgaggagatcgcgttccttaagaaagtgcatgaagaggagatccgtgagttgcaggctcagcttcaggaacagcaggtccaggtggagatggacatgtctaagccagacctcactgccgccctcagggatatccgggctcagtatgagaccatcgcggctaagaacatttctgaagctgaggagtggtacaagtcgaaggtgtcagacctgacccaggcagccaacaagaacaacgacgccctgcgccaggccaagcaggagatgatggaataccgacaccagatccagtcctacacctgcgagattgacgccctcaagggcactaacgattccctgatgaggcagatgcgggaattggaggaccgatttgccagtgaggccagtggctaccaggacaacattgcacgcctggaggaggaaatccggcacctcaaggatgagatggcccgccatctgcgcgagtaccaggacctgctcaacgtgaagatggccctggatgtggagattgccacctaccggaagctgctggagggagaggagagccggatcaatctccccatccagacctactctgccctcaacttccgagaaaccagccctgagcaaaggggttctgaggtccataccaagaagacggtgatgatcaagaccatcgagacacgggatggggaggtcgtcagtgaggccacacagcagcagcatgaagtgctctaaagacgagagaccctctgccaccagagaccgtcctcacccctgtcctcactgctccctgaagcccagccttcttcatcccaggacaccacacccagcctcagtcctccaaatcacagcctctgacccctcctcactggccatccctcgtggtccccaacagcgacatagcccatccctgcctggtcacaggcatgccccggccacctctgcggaccccagctgtgagccttggctgttggcagtgagtgagcctggctcttgtgctggatggagcccaggcgggagcggtggccctgtccctcccacctctgtgacctcaggcctacgctttggctctggagatagccccagagcagggtgttgggatactgcagggccaggactgagccccgcagacctccccagcccctagcccaggagagagaaagccaggcaggtagcctgggggactagccctgtggagactggggggcttgaaattgtccccgtggtctcttactttcctttccccagcccagggtggacttagaaagcaggggctacaagagggaatccccgaaggtgctggaggtgggagcaggagattgagaaggagagaaagtgggtgagatgctggagaagagaggagaggagagaggcagagagcggtctcaggctggtgggaggggcgcccacctccccacgccctccccccccctgctgcaggggctctggagagaaacaataaagagattcacacacaagcc

SEQ ID NO: 233 - protein, 469 aa, Homo sapien
MSQAYSSSQRVSSYRRTFGGAPVFPLGSPLSSPVFPRAPFGSKGSSSSVTSRVYQVSRTSGGAGGLGSLRASRLGTTRTPSSYGAGELLDFSLADAVNQEFLTTRTNEKVELQELNDRSPIYMEKVRFLEQQNALAAEVNRLKGREPTRVAELYEEELRELRRQVEVLTNQRARVDVERDNLLDDLQRLKAKLQEEIQLKEEAENNLAAFRADVDAATLARIDLERRIESLNEEIAFLKKVHEEEIRELQAQLQEQQVQVEMDMSKPDLTAALRDIRAQYETIAAKNISEAEEWYKSKVSDLTQAANKNNDALRQAKQEMMEYRHQIQSYTCEIDALKGTNDSLMRQMRELEDRFASEASGYQDNIARLEEEIRHLKDEMARHLREYQDLLNVKMALDVEIATYRKLLEGEESRINLPIQTYSALNFRETSPEQRGSEVHTKKTVMIKTIETRDGEVVSEATQQQHEVL

SEQ ID NO: 234 - DNA, 1299 bp, Homo sapien
agtcctcttccgggtgatggcggcgggtgccccggatgtagccctggcgcaagcatctcttcttttttccacctcgccttccgcggattcccagcttgagaaacacctctttgccccgtcatgccaaagaggaaagtgaccttccaaggcgtgggagatgaggaggatgaggatgaaatcattgtccccaagaagaagctggtggaccctgtggctgggtcagggggtcctgggagccgctttaaaggcaaacactctttggatagcgatgaggaggaggatgatgatgatggggggtccagcaaatatgacatcttggcctcagaggatgtagaaggtcaggaggcagccacactccccagcgaggggggtgttcggatcacaccctttaacctgcaggaggagatggaggaaggccactttgatgccgatggcaactacttcctgaaccgggatgctcagatccgagacagctggctggacaacattgactgggtgaagatccgggagcggccacctggccagcgccaggcctcagactcggaggaggaggacagcttgggccagacctcaatgagtgcccaagccctcttggagggacttttggagctcctattgcctagagagacagtggctggggcactgaggcgtctgggggcccgaggaggaggcaaagggagaaaggggcctgggcaacccagttcccctcagcgcctggaccggctctccgggttggccgaccagatggtggcccggggcaaccttggtgtgtaccaggaaacaagggaacggttggctatgcgtctgaagggtttggggtgtcagaccctaggaccccacaatcccacacccccaccctccctggacatgttcgctgaggagttggcggaggaggaactggagaccccaacccctacccagagaggagaagcagagtcgcggggagatggtctggtggatgtgatgtgggaatataagtgggagaacacgggggatgccgagctgtatgggcccttcaccagcgcccagatgcagacctgggtgagtgaaggctacttcccggacggtgtttattgccggaagctggacccccctggtggtcagttctacaactccaaacgcattgactttgacctctacacctgagcctgctgggggcccagtttggtgggcccttctttcctggactttgtggaggaggcaccaagtgtctcaggcagcgaggaaattggaggccatttttcagtcaatttccctttcccaataaaagcctttagttgtgtaaaaaaaaaaaaaaaa

SEQ ID NO: 235 - protein, 341 aa, Homo sapien
MPKRKVTFQGVGDEEDEDEIIVPKKKLVDPVAGSGGPGSRFKGKHSLDSDEEEDDDDGGSSKYDILASEDVEGQEAATLPSEGGVRITPFNLQEEMEEGHFDADGNYFLNRDAQIRDSWLDNIDWVKIRERPPGQRQASDSEEEDSLGQTSMSAQALLEGLLELLLPRETVAGALRRLGARGGGKGRKGPGQPSSPQRLDRLSGLADQMVARGNLGVYQETRERLAMRLKGLGCQTLGPHNPTPPPSLDMFAEELAEEELETPTPTQRGEAESRGDGLVDVMWEYKWENTGDAELYGPFTSAQMQTWVSEGYFPDGVYCRKLDPPGGQFYNSKRIDFDLYT

SEQ ID NO: 236 - DNA, 2881 bp, Homo sapien
acagaagtgctagaagccagtgctcgtgaactaaggagaaaaagaacagacaagggaacagcctggacatggcatcagagatccacatgacaggcccaatgtgcctcattgagaacactaatgggcgactgatggcgaatccagaagctctgaagatcctttctgccattacacagcctatggtggtggtggcaattgtgggcctctaccgcacaggcaaatcctacctgatgaacaagctggctggaaagaaaaagggcttctctctgggctccacggtgcagtctcacactaaaggaatctggatgtggtgtgtgccccaccccaagaagccaggccacatcctagttctgctggacaccgagggtctgggagatgtagagaagggtgacaaccagaatgactcctggatcttcgccctggccgtcctcctgagcagcaccttcgtgtacaatagcataggaaccatcaaccagcaggctatggaccaactgtactatgtgacagagctgacacatagaatccgatcaaaatcctcacctgatgagaatgagaatgaggttgaggattcagctgactttgtgagcttcttcccagactttgtgtggacactgagagatttctccctggacttggaagcagatggacaacccctcacaccagatgagtacctgacatactccctgaagctgaagaaaggtaccagtcaaaaagatgaaacttttaacctgcccagactctgtatccggaaattcttcccaaagaaaaaatgctttgtctttgatcggcccgttcaccgcaggaagcttgcccagctcgagaaactacaagatgaagagctggaccccgaatttgtgcaacaagtagcagacttctgttcctacatctttagtaattccaaaactaaaactctttcaggaggcatccaggtcaacgggcctcgtctagagagcctggtgctgacctacgtcaatgccatcagcagtggggatctgccgtgcatggagaacgcagtcctggccttggcccagatagagaactcagctgcagtgcaaaaggctattgcccactatgaacagcagatgggccagaaggtgcagctgcccacagaaagcctccaggagctgctggacctgcacagggacagtgagagagaggccattgaagtcttcatcaggagttccttcaaagatgtggaccatctatttcaaaaggagttagcggcccagctagaaaaaaagcgggatgacttttgtaaacagaatcaggaagcatcatcagatcgttgctcaggtttacttcaggtcattttcagtcctctagaagaagaagtgaaggcgggaatttattcgaaaccagggggctatcgtctctttgttcagaagctacaagacctgaagaaaaagtactatgaggaaccgaggaaggggatacaggctgaagagattctgcagacatacttgaaatccaaggagtctatgactgatgcaattctccagacagaccagactctcacagaaaaagaaaaggagattgaagtggaacgtgtgaaagctgagtctgcacaggcttcagcaaaaatgttgcaggaaatgcaaagaaagaatgagcagatgatggaacagaaggagaggagttatcaggaacacttgaaacaactgactgagaagatggagaacgacagggtccagttgctgaaagagcaagagaggaccctcgctcttaaacttcaggaacaggagcaactactaaaagagggatttcaaaaagaaagcagaataatgaaaaatgagatacaggatctccagacgaaaatgagacgacgaaaggcatgtaccataagctaaagaccagagccttcctgtcacccctaaccaaggcataattgaaacaattttagaatttggaacaagcgtcactacatttgataataattagatcttgcatcataacaccaaaagtttataaaggcatgtggtacaatgatcaaaatcatgttttttcttaaaaaaaaaaaaaagactgtaaattgtgcaacaaagatgcatttacctctgtatcaactcaggaaatctcataagctggtaccactcaggagaagtttattcttccagatgaccagcagtagacaaatggatactgagcagagtcttaggtaaaagtcttgggaaatatttgggcattggtctggccaagtctacaatgtcccaatatcaaggacaaccaccctagcttcttagtgaagacaatgtacagttatccattagatcaagactacacggtctatgagcaataatgtgatttctggacattgcccatgtataatcctcactgatgatttcaagctaaagcaaaccaccttatacagagatctagaatctctttatgttctccagaggaaggtggaagaaaccatgggcaggagtaggaattgagtgataaacaattgggctaatgaagaaaacttctcttattgttcagttcatccagattataacttcaatgggacactttagaccattagacaattgacactggattaaacaaattcacataatgccaaatacacaatgtatttatagcaacgtataatttgcaaagatggactttaaaagatgctgtgtaactaaactgaaataattcaattacttattatttagaatgttaaagcttatgatagtcttttctaattcttaacactcatacttgaaatctttccgagtttccccagaagagaatatgggattttttttgacatttttgacccatttaataatgctcttgtgtttacctagtatatgtagactttgtcttatgtgtcaaaagtcctaggaaagtggttgatgtttcttatagcaattaaaaattatttttgaactga

SEQ ID NO: 237 - protein, 592 aa, Homo sapien
MASEIHMTGPMCLIENTNGRLMANPEALKILSAITQPMVVVAIVGLYRTGKSYLMNKLAGKKKGFSLGSTVQSHTKGIWMWCVPHPKKPGHILVLLDTEGLGDVEKGDNQNDSWIFALAVLLSSTFVYNSIGTINQQAMDQLYYVTELTHRIRSKSSPDENENEVEDSADFVSFFPDFVWTLRDFSLDLEADGQPLTPDEYLTYSLKLKKGTSQKDETFNLPRLCIRKFFPKKKCFVFDRPVHRRKLAQLEKLQDEELDPEFVQQVADFCSYIFSNSKTKTLSGGIQVNGPRLESLVLTYVNAISSGDLPCMENAVLALAQIENSAAVQKAIAHYEQQMGQKVQLPTESLQELLDLHRDSEREAIEVFIRSSFKDVDHLFQKELAAQLEKKRDDFCKQNQEASSDRCSGLLQVIFSPLEEEVKAGIYSKPGGYRLFVQKLQDLKKKYYEEPRKGIQAEEILQTYLKSKESMTDAILQTDQTLTEKEKEIEVERVKAESAQASAKMLQEMQRKNEQMMEQKERSYQEHLKQLTEKMENDRVQLLKEQERTLALKLQEQEQLLKEGFQKESRIMKNEIQDLQTKMRRRKACTIS

SEQ ID NO: 238 - DNA, 1288 bp, Homo sapien
acaccagccctcagtcactgggagaagaacctctcataccctcggtgctccagtccccagctcactcagccacacacaccatgtgtgaagaggagaccaccgcgctcgtgtgtgacaatggctctggcctgtgcaaggcaggcttcgcaggagatgatgccccccgggctgtcttcccctccattgtgggccgccctcgccaccagggtgtgatggtgggaatgggccagaaagacagctatgtgggggatgaggctcagagcaagcgagggatcctaactctcaaataccccattgaacacggcatcatcaccaactgggatgacatggagaagatctggcaccactccttctacaatgagctgcgtgtagcacctgaagagcaccccaccctgctcacagaggctcccctaaatcccaaggccaacagggaaaagatgacccagatcatgtttgaaaccttcaatgtccctgccatgtacgtcgccattcaagctgtgctctccctctatgcctctggccgcacgacaggcatcgtcctggattcaggtgatggcgtcacccacaatgtccccatctatgaaggctatgccctgccccatgccatcatgcgcctggacttggctggccgtgacctcacggactacctcatgaagatcctcacagagagaggctattcctttgtgaccacagctgagagagaaattgtgcgagacatcaaggagaagctgtgctatgtggccctggattttgagaatgagatggccacagcagcttcctcttcctccctggagaagagctatgagctgccagatgggcaggttatcaccattggcaatgagcgcttccgctgccctgagaccctcttccagccttcctttattggcatggagtccgctggaattcatgagacaacctacaattccatcatgaagtgtgacattgacatccgtaaggacttatatgccaacaatgtcctctctgggggcaccaccatgtaccctggcattgctgacaggatgcagaaggagatcacagccctggcccccagcaccatgaagatcaagattattgctcccccagagcggaagtactcagtctggatcgggggctctatcctggcctctctctccaccttccagcagatgtggatcagcaagcctgagtatgatgaggcagggccctccattgtccacaggaagtgcttctaaagtcagaacaggttctccaaggatcccctcgagactactctgttaccagtcatgaaacattaaaacctacaagcctt

SEQ ID NO: 239 - protein, 376 aa, Homo sapien
MCEEETTALVCDNGSGLCKAGFAGDDAPRAVFPSIVGRPRHQGVMVGMGQKDSYVGDEAQSKRGILTLKYPIEHGIITNWDDMEKIWHHSFYNELRVAPEEHPTLLTEAPLNPKANREKMTQIMFETFNVPAMYVAIQAVLSLYASGRTTGIVLDSGDGVTHNVPIYEGYALPHAIMRLDLAGRDLTDYLMKILTERGYSFVTTAEREIVRDIKEKLCYVALDFENEMATAASSSSLEKSYELPDGQVITIGNERFRCPETLFQPSFIGMESAGIHETTYNSIMKCDIDIRKDLYANNVLSGGTTMYPGIADRMQKEITALAPSTMKIKIIAPPERKYSVWIGGSILASLSTFQQMWISKPEYDEAGPSIVHRKCF

SEQ ID NO: 240 - DNA, 14136 bp, Homo sapien
gcactgcagcgccagcgtccgagcgggcggccgagctcccggagcggcctggccccgagccccgagcgggcgtcgctcagcagcaggtcgcggccgcgcagccccatccagccccgcgcccgccatgccgtccgcgggccccgcctgagctgcggtctccgcgcgcgggcgggcctggggacggcggggccatgcgcgcgctgccctaacgatgccgcccgccgcgcccgcccgcctggcgctggccctgggcctgggcctgtggctcggggcgctggcggggggccccgggcgcggctgcgggccctgcgagcccccctgcctctgcggcccagcgcccggcgccgcctgccgcgtcaactgctcgggccgcgggctgcggacgctcggtcccgcgctgcgcatccccgcggacgccacagcgctagacgtctcccacaacctgctccgggcgctggacgttgggctcctggcgaacctctcggcgctggcagagctggatataagcaacaacaagatttctacgttagaagaaggaatatttgctaatttatttaatttaagtgaaataaacctgagtgggaacccgtttgagtgtgactgtggcctggcgtggctgccgcgatgggcggaggagcagcaggtgcgggtggtgcagcccgaggcagccacgtgtgctgggcctggctccctggctggccagcctctgcttggcatccccttgctggacagtggctgtggtgaggagtatgtcgcctgcctccctgacaacagctcaggcaccgtggcagcagtgtccttttcagctgcccacgaaggcctgcttcagccagaggcctgcagcgccttctgcttctccaccggccagggcctcgcagccctctcggagcagggctggtgcctgtgtggggcggcccagccctccagtgcctcctttgcctgcctgtccctctgctccggccccccgccacctcctgcccccacctgtaggggccccaccctcctccagcacgtcttccctgcctccccaggggccaccctggtggggccccacggacctctggcctctggccagctagcagccttccacatcgctgccccgctccctgtcactgccacacgctgggacttcggagacggctccgccgaggtggatgccgctgggccggctgcctcgcatcgctatgtgctgcctgggcgctatcacgtgacggccgtgctggccctgggggccggctcagccctgctggggacagacgtgcaggtggaagcggcacctgccgccctggagctcgtgtgcccgtcctcggtgcagagtgacgagagccttgacctcagcatccagaaccgcggtggttcaggcctggaggccgcctacagcatcgtggccctgggcgaggagccggcccgagcggtgcacccgctctgcccctcggacacggagatcttccctggcaacgggcactgctaccgcctggtggtggagaaggcggcctggctgcaggcgcaggagcagtgtcaggcctgggccggggccgccctggcaatggtggacagtcccgccgtgcagcgcttcctggtctcccgggtcaccaggagcctagacgtgtggatcggcttctcgactgtgcagggggtggaggtgggcccagcgccgcagggcgaggccttcagcctggagagctgccagaactggctgcccggggagccacacccagccacagccgagcactgcgtccggctcgggcccaccgggtggtgtaacaccgacctgtgctcagcgccgcacagctacgtctgcgagctgcagcccggaggcccagtgcaggatgccgagaacctcctcgtgggagcgcccagtggggacctgcagggacccctgacgcctctggcacagcaggacggcctctcagccccgcacgagcccgtggaggtcatggtattcccgggcctgcgtctgagccgtgaagccttcctcaccacggccgaatttgggacccaggagctccggcggcccgcccagctgcggctgcaggtgtaccggctcctcagcacagcagggaccccggagaacggcagcgagcctgagagcaggtccccggacaacaggacccagctggcccccgcgtgcatgccagggggacgctggtgccctggagccaacatctgcttgccgctggacgcctcttgccacccccaggcctgcgccaatggctgcacgtcagggccagggctacccggggccccctatgcgctatggagagagttcctcttctccgttgccgcggggccccccgcgcagtactcggtcaccctccacggccaggatgtcctcatgctccctggtgacctcgttggcttgcagcacgacgctggccctggcgccctcctgcactgctcgccggctcccggccaccctggtccccaggccccgtacctctccgccaacgcctcgtcatggctgccccacttgccagcccagctggagggcacttgggcctgccctgcctgtgccctgcggctgcttgcagccacggaacagctcaccgtgctgctgggcttgaggcccaaccctggactgcggatgcctgggcgctatgaggtccgggcagaggtgggcaatggcgtgtccaggcacaacctctcctgcagctttgacgtggtctccccagtggctgggctgcgggtcatctaccctgccccccgcgacggccgcctctacgtgcccaccaacggctcagccttggtgctccaggtggactctggtgccaacgccacggccacggctcgctggcctgggggcagtgtcagcgcccgctttgagaatgtctgccctgccctggtggccaccttcgtgcccggctgcccctgggagaccaacgataccctgttctcagtggtagcactgccgtggctcagtgagggggagcacgtggtggacgtggtggtggaaaacagcgccagccgggccaacctcagcctgcgggtgacggcggaggagcccatctgtggcctccgcgccacgcccagccccgaggcccgtgtactgcagggagtcctagtgaggtacagccccgtggtggaggccggctcggacatggtcttccggtggaccatcaacgacaagcagtccctgaccttccagaacgtggtcttcaatgtcatttatcagagcgcggcggtcttcaagctctcactgacggcctccaaccacgtgagcaacgtcaccgtgaactacaacgtaaccgtggagcggatgaacaggatgcagggtctgcaggtctccacagtgccggccgtgctgtcccccaatgccacgctagcactgacggcgggcgtgctggtggactcggccgtggaggtggccttcctgtggaactttggggatggggagcaggccctccaccagttccagcctccgtacaacgagtccttcccggttccagacccctcggtggcccaggtgctggtggagcacaatgtcatgcacacctacgctgccccaggtgagtacctcctgaccgtgctggcatctaatgccttcgagaacctgacgcagcaggtgcctgtgagcgtgcgcgcctccctgccctccgtggctgtgggtgtgagtgacggcgtcctggtggccggccggcccgtcaccttctacccgcacccgctgccctcgcctgggggtgttctttacacgtgggacttcggggacggctcccctgtcctgacccagagccagccggctgccaaccacacctatgcctcgaggggcacctaccacgtgcgcctggaggtcaacaacacggtgagcggtgcggcggcccaggcggatgtgcgcgtctttgaggagctccgcggactcagcgtggacatgagcctggccgtggagcagggcgcccccgtggtggtcagcgccgcggtgcagacgggcgacaacatcacgtggaccttcgacatgggggacggcaccgtgctgtcgggcccggaggcaacagtggagcatgtgtacctgcgggcacagaactgcacagtgaccgtgggtgcggccagccccgccggccacctggcccggagcctgcacgtgctggtcttcgtcctggaggtgctgcgcgttgaacccgccgcctgcatccccacgcagcctgacgcgcggctcacggcctacgtcaccgggaacccggcccactacctcttcgactggaccttcggggatggctcctccaacacgaccgtgcgggggtgcccgacggtgacacacaacttcacgcggagcggcacgttccccctggcgctggtgctgtccagccgcgtgaacagggcgcattacttcaccagcatctgcgtggagccagaggtgggcaacgtcaccctgcagccagagaggcagtttgtgcagctcggggacgaggcctggctggtggcatgtgcctggcccccgttcccctaccgctacacctgggactttggcaccgaggaagccgcccccacccgtgccaggggccctgaggtgacgttcatctaccgagacccaggctcctatcttgtgacagtcaccgcgtccaacaacatctctgctgccaatgactcagccctggtggaggtgcaggagcccgtgctggtcaccagcatcaaggtcaatggctcccttgggctggagctgcagcagccgtacctgttctctgctgtgggccgtgggcgccccgccagctacctgtgggatctgggggacggtgggtggctcgagggtccggaggtcacccacgcttacaacagcacaggtgacttcaccgttagggtggccggctggaatgaggtgagccgcagcgaggcctggctcaatgtgacggtgaagcggcgcgtgcgggggctcgtcgtcaatgcaagccgcacggtggtgcccctgaatgggagcgtgagcttcagcacgtcgctggaggccggcagtgatgtgcgctattcctgggtgctctgtgaccgctgcacgcccatccctgggggtcctaccatctcttacaccttccgctccgtgggcaccttcaatatcatcgtcacggctgagaacgaggtgggctccgcccaggacagcatcttcgtctatgtcctgcagctcatagaggggctgcaggtggtgggcggtggccgctacttccccaccaaccacacggtacagctgcaggccgtggttagggatggcaccaacgtctcctacagctggactgcctggagggacaggggcccggccctggccggcagcggcaaaggcttctcgctcaccgtgctcgaggccggcacctaccatgtgcagctgcgggccaccaacatgctgggcagcgcctgggccgactgcaccatggacttcgtggagcctgtggggtggctgatggtgaccgcctccccgaacccagctgccgtcaacacaagcgtcaccctcagtgccgagctggctggtggcagtggtgtcgtatacacttggtccttggaggaggggctgagctgggagacctccgagccatttaccacccatagcttccccacacccggcctgcacttggtcaccatgacggcagggaacccgctgggctcagccaacgccaccgtggaagtggatgtgcaggtgcctgtgagtggcctcagcatcagggccagcgagcccggaggcagcttcgtggcggccgggtcctctgtgcccttttgggggcagctggccacgggcaccaatgtgagctggtgctgggctgtgcccggcggcagcagcaagcgtggccctcatgtcaccatggtcttcccggatgctggcaccttctccatccggctcaatgcctccaacgcagtcagctgggtctcagccacgtacaacctcacggcggaggagcccatcgtgggcctggtgctgtgggccagcagcaaggtggtggcgcccgggcagctggtccattttcagatcctgctggctgccggctcagctgtcaccttccgcctgcaggtcggcggggccaaccccgaggtgctccccgggccccgtttctcccacagcttcccccgcgtcggagaccacgtggtgagcgtgcggggcaaaaaccacgtgagctgggcccaggcgcaggtgcgcatcgtggtgctggaggccgtgagtgggctgcagatgcccaactgctgcgagcctggcatcgccacgggcactgagaggaacttcacagcccgcgtgcagcgcggctctcgggtcgcctacgcctggtacttctcgctgcagaaggtccagggcgactcgctggtcatcctgtcgggccgcgacgtcacctacacgcccgtggccgcggggctgttggagatccaggtgcgcgccttcaacgccctgggcagtgagaaccgcacgctggtgctggaggttcaggacgccgtccagtatgtggccctgcagagcggcccctgcttcaccaaccgctcggcgcagtttgaggccgccaccagccccagcccccggcgtgtggcctaccactgggactttggggatgggtcgccagggcaggacacagatgagcccagggccgagcactcctacctgaggcctggggactaccgcgtgcaggtgaacgcctccaacctggtgagcttcttcgtggcgcaggccacggtgaccgtccaggtgctggcctgccgggagccggaggtggacgtggtcctgcccctgcaggtgctgatgcggcgatcacagcgcaactacttggaggcccacgttgacctgcgcgactgcgtcacctaccagactgagtaccgctgggaggtgtatcgcaccgccagctgccagcggccggggcgcccagcgcgtgtggccctgcccggcgtggacgtgagccggcctcggctggtgctgccgcggctggcgctgcctgtggggcactactgctttgtgtttgtcgtgtcatttggggacacgccactgacacagagcatccaggccaatgtgacggtggcccccgagcgcctggtgcccatcattgagggtggctcataccgcgtgtggtcagacacacgggacctggtgctggatgggagcgagtcctacgaccccaacctggaggacggcgaccagacgccgctcagtttccactgggcctgtgtggcttcgacacagagggaggctggcgggtgtgcgctgaactttgggccccgcgggagcagcacggtcaccattccacgggagcggctggcggctggcgtggagtacaccttcagcctgaccgtgtggaaggccggccgcaaggaggaggccaccaaccagacggtgctgatccggagtggccgggtgcccattgtgtccttggagtgtgtgtcctgcaaggcacaggccgtgtacgaagtgagccgcagctcctacgtgtacttggagggccgctgcctcaattgcagcagcggctccaagcgagggcggtgggctgcacgtacgttcagcaacaagacgctggtgctggatgagaccaccacatccacgggcagtgcaggcatgcgactggtgctgcggcggggcgtgctgcgggacggcgagggatacaccttcacgctcacggtgctgggccgctctggcgaggaggagggctgcgcctccatccgcctgtcccccaaccgcccgccgctggggggctcttgccgcctcttcccactgggcgctgtgcacgccctcaccaccaaggtgcacttcgaatgcacgggctggcatgacgcggaggatgctggcgccccgctggtgtacgccctgctgctgcggcgctgtcgccagggccactgcgaggagttctgtgtctacaagggcagcctctccagctacggagccgtgctgcccccgggtttcaggccacacttcgaggtgggcctggccgtggtggtgcaggaccagctgggagccgctgtggtcgccctcaacaggtctttggccatcaccctcccagagcccaacggcagcgcaacggggctcacagtctggctgcacgggctcaccgctagtgtgctcccagggctgctgcggcaggccgatccccagcacgtcatcgagtactcgttggccctggtcaccgtgctgaacgagtacgagcgggccctggacgtggcggcagagcccaagcacgagcggcagcaccgagcccagatacgcaagaacatcacggagactctggtgtccctgagggtccacactgtggatgacatccagcagatcgctgctgcgctggcccagtgcatggggcccagcagggagctcgtatgccgctcgtgcctgaagcagacgctgcacaagctggaggccatgatgctcatcctgcaggcagagaccaccgcgggcaccgtgacgcccaccgccatcggagacagcatcctcaacatcacaggagacctcatccacctggccagctcggacgtgcgggcaccacagccctcagagctgggagccgagtcaccatctcggatggtggcgtcccaggcctacaacctgacctctgccctcatgcgcatcctcatgcgctcccgcgtgctcaacgaggagcccctgacgctggcgggcgaggagatcgtggcccagggcaagcgctcggacccgcggagcctgctgtgctatggcggcgccccagggcctggctgccacttctccatccccgaggctttcagcggggccctggccaacctcagtgacgtggtgcagctcatctttctggtggactccaatccctttccctttggctatatcagcaactacaccgtctccaccaaggtggcctcgatggcattccagacacaggccggcgcccagatccccatcgagcggctggcctcagagcgcgccatcaccgtgaaggtgcccaacaactcggactgggctgcccggggccaccgcagctccgccaactccgccaactccgttgtggtccagccccaggcctccgtcggtgctgtggtcaccctggacagcagcaaccctgcggccgggctgcatctgcagctcaactatacgctgctggacggccactacctgtctgaggaacctgagccctacctggcagtctacctacactcggagccccggcccaatgagcacaactgctcggctagcaggaggatccgcccagagtcactccagggtgctgaccaccggccctacaccttcttcatttccccggggagcagagacccagcggggagttaccatctgaacctctccagccacttccgctggtcggcgctgcaggtgtccgtgggcctgtacacgtccctgtgccagtacttcagcgaggaggacatggtgtggcggacagaggggctgctgcccctggaggagacctcgccccgccaggccgtctgcctcacccgccacctcaccgccttcggcgccagcctcttcgtgcccccaagccatgtccgctttgtgtttcctgagccgacagcggatgtaaactacatcgtcatgctgacatgtgctgtgtgcctggtgacctacatggtcatggccgccatcctgcacaagctggaccagttggatgccagccggggccgcgccatccctttctgtgggcagcggggccgcttcaagtacgagatcctcgtcaagacaggctggggccggggctcaggtaccacggcccacgtgggcatcatgctgtatggggtggacagccggagcggccaccggcacctggacggcgacagagccttccaccgcaacagcctggacatcttccggatcgccaccccgcacagcctgggtagcgtgtggaagatccgagtgtggcacgacaacaaagggctcagccctgcctggttcctgcagcacgtcatcgtcagggacctgcagacggcacgcagcgccttcttcctggtcaatgactggctttcggtggagacggaggccaacgggggcctggtggagaaggaggtgctggccgcgagcgacgcagcccttttgcgcttccggcgcctgctggtggctgagctgcagcgtggcttctttgacaagcacatctggctctccatatgggaccggccgcctcgtagccgtttcactcgcatccagagggccacctgctgcgttctcctcatctgcctcttcctgggcgccaacgccgtgtggtacggggctgttggcgactctgcctacagcacggggcatgtgtccaggctgagcccgctgagcgtcgacacagtcgctgttggcctggtgtccagcgtggttgtctatcccgtctacctggccatcctttttctcttccggatgtcccggagcaaggtggctgggagcccgagccccacacctgccgggcagcaggtgctggacatcgacagctgcctggactcgtccgtgctggacagctccttcctcacgttctcaggcctccacgctgaggcctttgttggacagatgaagagtgacttgtttctggatgattctaagagtctggtgtgctggccctccggcgagggaacgctcagttggccggacctgctcagtgacccgtccattgtgggtagcaatctgcggcagctggcacggggccaggcgggccatgggctgggcccagaggaggacggcttctccctggccagcccctactcgcctgccaaatccttctcagcatcagatgaagacctgatccagcaggtccttgccgagggggtcagcagcccagcccctacccaagacacccacatggaaacggacctgctcagcagcctgtccagcactcctggggagaagacagagacgctggcgctgcagaggctgggggagctggggccacccagcccaggcctgaactgggaacagccccaggcagcgaggctgtccaggacaggactggtggagggtctgcggaagcgcctgctgccggcctggtgtgcctccctggcccacgggctcagcctgctcctggtggctgtggctgtggctgtctcagggtgggtgggtgcgagcttccccccgggcgtgagtgttgcgtggctcctgtccagcagcgccagcttcctggcctcattcctcggctgggagccactgaaggtcttgctggaagccctgtacttctcactggtggccaagcggctgcacccggatgaagatgacaccctggtagagagcccggctgtgacgcctgtgagcgcacgtgtgccccgcgtacggccaccccacggctttgcactcttcctggccaaggaagaagcccgcaaggtcaagaggctacatggcatgctgcggagcctcctggtgtacatgctttttctgctggtgaccctgctggccagctatggggatgcctcatgccatgggcacgcctaccgtctgcaaagcgccatcaagcaggagctgcacagccgggccttcctggccatcacgcggtctgaggagctctggccatggatggcccacgtgctgctgccctacgtccacgggaaccagtccagcccagagctggggcccccacggctgcggcaggtgcggctgcaggaagcactctacccagaccctcccggccccagggtccacacgtgctcggccgcaggaggcttcagcaccagcgattacgacgttggctgggagagtcctcacaatggctcggggacgtgggcctattcagcgccggatctgctgggggcatggtcctggggctcctgtgccgtgtatgacagcgggggctacgtgcaggagctgggcctgagcctggaggagagccgcgaccggctgcgcttcctgcagctgcacaactggctggacaacaggagccgcgctgtgttcctggagctcacgcgctacagcccggccgtggggctgcacgccgccgtcacgctgcgcctcgagttcccggcggccggccgcgccctggccgccctcagcgtccgcccctttgcgctgcgccgcctcagcgcgggcctctcgctgcctctgctcacctcggtgtgcctgctgctgttcgccgtgcacttcgccgtggccgaggcccgtacttggcacagggaagggcgctggcgcgtgctgcggctcggagcctgggcgcggtggctgctggtggcgctgacggcggccacggcactggtacgcctcgcccagctgggtgccgctgaccgccagtggacccgtttcgtgcgcggccgcccgcgccgcttcactagcttcgaccaggtggcgcagctgagctccgcagcccgtggcctggcggcctcgctgctcttcctgcttttggtcaaggctgcccagcagctacgcttcgtgcgccagtggtccgtctttggcaagacattatgccgagctctgccagagctcctgggggtcaccttgggcctggtggtgctcggggtagcctacgcccagctggccatcctgctcgtgtcttcctgtgtggactccctctggagcgtggcccaggccctgttggtgctgtgccctgggactgggctctctaccctgtgtcctgccgagtcctggcacctgtcacccctgctgtgtgtggggctctgggcactgcggctgtggggcgccctacggctgggggctgttattctccgctggcgctaccacgccttgcgtggagagctgtaccggccggcctgggagccccaggactacgagatggtggagttgttcctgcgcaggctgcgcctctggatgggcctcagcaaggtcaaggagttccgccacaaagtccgctttgaagggatggagccgctgccctctcgctcctccaggggctccaaggtatccccggatgtgcccccacccagcgctggctccgatgcctcgcacccctccacctcctccagccagctggatgggctgagcgtgagcctgggccggctggggacaaggtgtgagcctgagccctcccgcctccaagccgtgttcgaggccctgctcacccagtttgaccgactcaaccaggccacagaggacgtctaccagctggagcagcagctgcacagcctgcaaggccgcaggagcagccgggcgcccgccggatcttcccgtggcccatccccgggcctgcggccagcactgcccagccgccttgcccgggccagtcggggtgtggacctggccactggccccagcaggacaccccttcgggccaagaacaaggtccaccccagcagcacttagtcctccttcctggcgggggtgggccgtggagtcggagtggacaccgctcagtattactttctgccgctgtcaaggccgagggccaggcagaatggctgcacgtaggttccccagagagcaggcaggggcatctgtctgtctgtgggcttcagcactttaaagaggctgtgtggccaaccaggacccagggtcccctccccagctcccttgggaaggacacagcagtattggacggtttctagcctctgagatgctaatttatttccccgagtcctcaggtacagcgggctgtgcccggccccaccccctgggcagatgtcccccactgctaaggctgctggcttcagggagggttagcctgcaccgccgccaccctgcccctaagttattacctctccagttcctaccgtactccctgcaccgtctcactgtgtgtctcgtgtcagtaatttatatggtgttaaaatgtgtatatttttgtatgtcactattttcactagggctgaggggcctgcgcccagagctggcctcccccaacacctgctgcgcttggtaggtgtggtggcgttatggcagcccggctgctgcttggatgcgagcttggccttgggccggtgctgggggcacagctgtctgccaggcactctcatcaccccagaggccttgtcatcctcccttgccccaggccaggtagcaagagagcagcgcccaggcctgctggcatcaggtctgggcaagtagcaggactaggcatgtcagaggaccccagggtggttagaggaaaagactcctcctgggggctggctcccagggtggaggaaggtgactgtgtgtgtgtgtgtgtgcgcgcgcgacgcgcgagtgtgctgtatggcccaggcagcctcaaggccctcggagctggctgtgcctgcttctgtgtaccacttctgtgggcatggccgcttctagagcctcgacacccccccaacccccgcaccaagcagacaaagtcaataaaagagctgtctgactgc

SEQ ID NO: 241 - protein, 2000 aa, Homo sapien
MPPAAPARLALALGLGLWLGALAGGPGRGCGPCEPPCLCGPAPGAACRVNCSGRGLRTLGPALRIPADATALDVSHNLLRALDVGLLANLSALAELDISNNKISTLEEGIFANLFNLSEINLSGNPFECDCGLAWLPRWAEEQQVRVVQPEAATCAGPGSLAGQPLLGIPLLDSGCGEEYVACLPDNSSGTVAAVSFSAAHEGLLQPEACSAFCFSTGQGLAALSEQGWCLCGAAQPSSASFACLSLCSGPPPPPAPTCRGPTLLQHVFPASPGATLVGPHGPLASGQLAAFHIAAPLPVTATRWDFGDGSAEVDAAGPAASHRYVLPGRYHVTAVLALGAGSALLGTDVQVEAAPAALELVCPSSVQSDESLDLSIQNRGGSGLEAAYSIVALGEEPARAVHPLCPSDTEIFPGNGHCYRLVVEKAAWLQAQEQCQAWAGAALAMVDSPAVQRFLVSRVTRSLDVWIGFSTVQGVEVGPAPQGEAFSLESCQNWLPGEPHPATAEHCVRLGPTGWCNTDLCSAPHSYVCELQPGGPVQDAENLLVGAPSGDLQGPLTPLAQQDGLSAPHEPVEVMVFPGLRLSREAFLTTAEFGTQELRRPAQLRLQVYRLLSTAGTPENGSEPESRSPDNRTQLAPACMPGGRWCPGANICLPLDASCHPQACANGCTSGPGLPGAPYALWREFLFSVAAGPPAQYSVTLHGQDVLMLPGDLVGLQHDAGPGALLHCSPAPGHPGPQAPYLSANASSWLPHLPAQLEGTWACPACALRLLAATEQLTVLLGLRPNPGLRMPGRYEVRAEVGNGVSRHNLSCSFDVVSPVAGLRVIYPAPRDGRLYVPTNGSALVLQVDSGANATATARWPGGSVSARFENVCPALVATFVPGCPWETNDTLFSVVALPWLSEGEHVVDVVVENSASRANLSLRVTAEEPICGLRATPSPEARVLQGVLVRYSPVVEAGSDMVFRWTINDKQSLTFQNVVFNVIYQSAAVFKLSLTASNHVSNVTVNYNVTVERMNRMQGLQVSTVPAVLSPNATLALTAGVLVDSAVEVAFLWNFGDGEQALHQFQPPYNESFPVPDPSVAQVLVEHNVMHTYAAPGEYLLTVLASNAFENLTQQVPVSVRASLPSVAVGVSDGVLVAGRPVTFYPHPLPSPGGVLYTWDFGDGSPVLTQSQPAANHTYASRGTYHVRLEVNNTVSGAAAQADVRVFEELRGLSVDMSLAVEQGAPVVVSAAVQTGDNITWTFDMGDGTVLSGPEATVEHVYLRAQNCTVTVGAASPAGHLARSLHVLVFVLEVLRVEPAACIPTQPDARLTAYVTGNPAHYLFDWTFGDGSSNTTVRGCPTVTHNFTRSGTFPLALVLSSRVNRAHYFTSICVEPEVGNVTLQPERQFVQLGDEAWLVACAWPPFPYRYTWDFGTEEAAPTRARGPEVTFIYRDPGSYLVTVTASNNISAANDSALVEVQEPVLVTSIKVNGSLGLELQQPYLFSAVGRGRPASYLWDLGDGGWLEGPEVTHAYNSTGDFTVRVAGWNEVSRSEAWLNVTVKRRVRGLVVNASRTVVPLNGSVSFSTSLEAGSDVRYSWVLCDRCTPIPGGPTISYTFRSVGTFNIIVTAENEVGSAQDSIFVYVLQLIEGLQVVGGGRYFPTNHTVQLQAVVRDGTNVSYSWTAWRDRGPALAGSGKGFSLTVLEAGTYHVQLRATNMLGSAWADCTMDFVEPVGWLMVTASPNPAAVNTSVTLSAELAGGSGVVYTWSLEEGLSWETSEPFTTHSFPTPGLHLVTMTAGNPLGSANATVEVDVQVPVSGLSIRASEPGGSFVAAGSSVPFWGQLATGTNVSWCWAVPGGSSKRGPHVTMVFPDAGTFSIRLNASNAVSWVSATYNLTAEEPIVGLVLWASSKVVAPGQLVHFQILLAAGSAVTFRLQVGGANPEVLPGPRFSHSFPRVGDHVVSVRGKNHVSWAQAQVRIVVLEAVSGLQMPNCCEPGIATGTERNFTARVQRGS

SEQ ID NO: 242 - DNA, 1421 bp, Homo sapien
acttactgcgggacggccttggagagtactcgggttcgtgaacttcccggaggcgcaatgagctgcattaacctgcccactgtgctgcccggctcccccagcaagacccgggggcagatccaggtgattctcgggccgatgttctcaggaaaaagcacagagttgatgagacgcgtccgtcgcttccagattgctcagtacaagtgcctggtgatcaagtatgccaaagacactcgctacagcagcagcttctgcacacatgaccggaacaccatggaggcgctgcccgcctgcctgctccgagacgtggcccaggaggccctgggcgtggctgtcataggcatcgacgaggggcagtttttccctgacatcatggagttctgcgaggccatggccaacgccgggaagaccgtaattgtggctgcactggatgggaccttccagaggaagccatttggggccatcctgaacctggtgccgctggccgagagcgtggtgaagctgacggcggtgtgcatggagtgcttccgggaagccgcctataccaagaggctcggcacagagaaggaggtcgaggtgattgggggagcagacaagtaccactccgtgtgtcggctctgctacttcaagaaggcctcaggccagcctgccgggccggacaacaaagagaactgcccagtgccaggaaagccaggggaagccgtggctgccaggaagctctttgccccacagcagattctgcaatgcagccctgccaactgagggacctgcaagggccgcccgctcccttcctgccactgccgcctactggacgctgccctgcatgctgcccagccactccaggaggaagtcgggaggcgtggagggtgaccacaccttggccttctgggaactctcctttgtgtggctgccccacctgccgcatgctccctcctctcctacccactggtctgcttaaagcttccctctcagctgctgggacgatcgcccaggctggagctggccccgcttggtggcctgggatctggcacactccctctccttggggtgagggacagagccccacgctgttgacatcagcctgcttcttcccctctgcggctttcactgctgagtttctgttctccctgggaagcctgtgccagcacctttgagccttggcccacactgaggcttaggcctctctgcctgggatgggctcccaccctcccctgaggatggcctggattcacgccctcttgtttccttttgggctcaaagcccttcctacctctggtgatggtttccacaggaacaacagcatctttcaccaagatgggtggcaccaaccttgctgggacttggatcccaggggcttatctcttcaagtgtggagagggcagggtccacgcctctgctgtagcttatgaaattaactaatt

SEQ ID NO: 243 - protein, 234 aa, Homo sapien
MSCINLPTVLPGSPSKTRGQIQVILGPMFSGKSTELMRRVRRFQIAQYKCLVIKYAKDTRYSSSFCTHDRNTMEALPACLLRDVAQEALGVAVIGIDEGQFFPDIMEFCEAMANAGKTVIVAALDGTFQRKPFGAILNLVPLAESVVKLTAVCMECFREAAYTKRLGTEKEVEVIGGADKYHSVCRLCYFKKASGQPAGPDNKENCPVPGKPGEAVAARKLFAPQQILQCSPAN

SEQ ID NO: 244 - DNA, 6734 bp, Homo sapien
cccagttgtctgcgggctgcggggagctaagtccccagattggaggaggctggctctggtcttcgatgcacaggagtggccgttatggaacgcagcagcagcgtgcagggtcaaagacagccggccccccatgtcagtggtctaggatggccagtgaaggcaccaacatcccaagtcctgtggtgcgccagattgacaagcagtttctgatttgcagtatatgcctggaacggtacaagaatcccaaggttctcccctgtctgcacactttctgcgagaggtgcctgcagaactacattcctgcccacagtttaaccctctcctgcccagtgtgccgccagacctccatcctgcccgagaaaggggtggccgcgctccagaacaatttcttcatcacaaacctgatggacgtgctgcagcgaactccaggcagcaacgctgaggagtcttccatcctggagacagtcactgctgtggctgcgggaaagcctctctcttgcccaaaccacgatgggaatgtgatggaattttactgccagtcctgtgagactgccatgtgtcgggagtgcacggagggggagcacgcagagcaccccacagttccactcaaggatgtggtggaacagcacaaggcctcgctccaggtccagctggatgctgtcaacaaaaggctcccagaaatagattctgctcttcagttcatctctgaaatcattcatcagttaaccaaccaaaaggccagcatcgtggatgacattcattccacctttgatgagctccagaagactttaaatgtgcgcaagagtgtgctgcttatggaattggaggtcaactatggcctcaaacacaaagtcctccagtcgcagctggatactctgctccaggggcaggagagcattaagagctgcagcaacttcacagcgcaggccctcaaccatggcacggagaccgaggtcctactggtgaagaagcagatgagcgagaagctgaacgagctggccgaccaggacttccccttgcacccgcgggagaacgaccagctggatttcatcgtggaaaccgaggggctgaagaagtccatccacaacctcgggacgatcttaaccaccaacgccgttgcctcagagacagtggccacgggcgaggggctgcggcagaccatcatcgggcagcccatgtccgtcaccatcaccaccaaggacaaagacggtgagctgtgcaaaaccggcaacgcctacctcaccgccgaactgagcacccccgacgggagcgtggcagacggggagatcctggacaacaagaacggcacctatgagtttttgtacactgtccagaaggaaggggactttaccctgtctctgagactctatgaccagcacatccgaggcagcccgtttaagctgaaagtgatccgatccgctgatgtgtctcccaccacagaaggcgtgaagaggcgcgttaagtccccggggagcggccacgtcaagcagaaagctgtgaaaagacccgcaagcatgtacagcactggaaaacgaaaagagaatcccatcgaagacgatttgatctttcgagtgggtaccaaaggaagaaataaaggagagtttacaaatcttcagggggtagctgcatctacaaatggaaagatattaattgcagacagtaacaaccaatgtgtgcagatattttccaatgatggccagttcaaaagtcgttttggcatacggggacgctctccggggcagctgcagcggcccacaggagtggctgtacatcccagtggggacataatcattgccgattatgataataaatgggtcagcattttctcctccgatgggaaatttaagacaaaaattggatcaggaaagctgatgggacccaaaggagtttctgtggaccgcaatgggcacattattgttgtggacaacaaggcgtgctgcgtgtttatcttccagccaaacgggaaaatagtcaccaggtttggtagccgaggaaatggggacaggcagtttgcaggtccccattttgcagctgtaaatagcaataatgagattattattacagatttccataatcattctgtcaaggtgtttaatcaggaaggagaattcatgttgaagtttggctcaaatggagaaggaaatgggcagtttaatgctccaacaggtgtagcagtggattcaaatggaaacatcattgtggccgactggggaaacagcaggatccaggtttttgatgggagtggatcatttttgtcctacattaacacatctgctgacccactctatggcccccaaggcctggccctaacttcagatggtcatgttgtggttgcagactctggaaatcactgtttcaaagtctatcgatacttacagtaatggtgggcaggtggatacccgcttccatggtcttgcactataaactggaatggatttctcaatgcgggaccagattatgactagagtttttatgccagaaggaatcattggtgaactttccaaggttatttctgaatgtaacaatttccttaaaaatgacttatccaatttctgtatttcacctttagggttaaaaaaaactcttctactgaatctataaaaactgcagttttacatctgtgaactatggcttaagggacaggatttatgtagctaaactaattttgcaaatcaaacagacacttaaaaaaactagcatatgtaaaggtattcgttaatcctgtgaatggtagcttttgcacagaacttccaaaagcaaaacaaaaacaaaatctattgtagttatatacttcatttaacctaggtcacaagacccagggaatcttctaacctcacttttacagtaggtattactcttgtgacatttttttggttatcaacaactaaatataaattactttggaaaaagtaaggctgtcttgcaaaatgatcccagctctgattagcagccctctggagttcagaacttaagtatcagtgcaaatttctcaacctttctgggttagacaaagatccttttttgtgtgttcttttcaccacccctttggctcaccttgtatcagcaaacaaagtacttcttcagggaaacctgaaatttctaatgccttgaaaagcatattacaaaagtaatgctaccttttgggaaacaaactgccccgttaactccagatcattgcactggaatgtaatcaagaaagttagtcatgttttatgtaccatgttttcacacgtgtctcttctcttcgacttcctgaaagcgaaagctttacctcctgcaaatgtcagcacatgtagtaggacaccagtatcctaggacagagagccataagtagccctttggaggactgatggtgtcaaccaaaggcatgtgattgattaatgattcccccttagaaagcaagtgttaccaaagttgtgttatcttgaaagcattacaggtaagggcatgttatggttatttatcattgtttaatgaatagtagaggtgtcaagggactatgtatacatgattagggtaagatagaatgtattatatatatatatatatatacacacacacatatatatagctgaatctttggtgtattgaaataggcagcactctgaaagacagaagcttcgtccagccactcttcagcacattcctttactaagcagtttaaagccgtcctagtggagcaagccctaaagcagatttaatttttgccattttccaagaatgacggtggtggcttttagtcagaaaatggccttctgtgctttcaaaaaaaaaacaaaaaaaaaaccacacacacacataaaaaacccaacaggtcaaaataaaagttgaacttgagttacatttaatttaaatataaatgcattttgagaaatgttaagaacaatttagtcaatcgttcatctgtcattggtactgtaaaataagctgtggtctatttccactgtttaattttctactcagttctaccaaataggatgtcatgtttgacatttttgatagtgactttggggtcttcttcactgaaagcaccttagaactgtactataagaaaacatttcccctatgtataattatatgaatgtgatgtttattgcttattaatttataattcagtcattctctatataggacttcttaaaatttagaagggaaatctagctacttcaaattgtctgttaaatttattatgcccaaatcaacctctgaaaaaaggtttttccaggaagatttacatttaggtttaatatttttttagttaggtagagttttaaaaaatacttgagcctgtccgtgataaagctataaaattcaataactttttagaatgttaaatgaagacactgtttcctaacatcagtgagatacatctttgaatttaaacattcatatttactgagtacctactaggtaccaagtactcttttaggcactggaaatacagtgatggacaaaacaggtaaaaaatcgctgccccctcagagctgacattctggggtgggaatttcattttgccacgtactaacgttctgcacaaaagacaggctagactcttgtctagattgtttaaaagaaacttttcaaattggttacattaattttagtttattttcacaagtaaaaatggctttttatttagattctttctgtcccaggctgttgatcttaaaactagttgatttaaagagtttttttgcacaacatttcaattatatttgtgaacttagaaattaacttacaatctaaccagccatcatatcatatcctatcaggctagatatctcaatagtagactgaatacaaagctaattttttttacatgtcaatattggcacaaactggaatgaaagaatagtttgattcagacctgctccactatgtgttgctaaaacacatgctatgagcactcgaggaaacactatattttttccaaaaaatatgtgattatatatgttaaagtatagataacatttcacacttggatacatatgtgcatttactgtatttcttggtaagcatatttttgggggaaagtgctgctgatatgatacaagtagacaaaatttaaatgaaattttgtcacattctatggaaaatggtttctggtaaactgagaaggatattaaaataagtggcttttttctgggctaccattattgtttgatttctctttgtcaagtgtatagaacctgtcatacattcatgataagtagcactgaaaaattactcattcaaatttcccctgggcacgtaaggcaaaatattgccggttgggatttcaaggtcagtgacgacgcatttcctcccagtacagaccccccagccccccttgctggacatggggaggcagagagtcacttgaccatccagaaatacatgactacaagtcctttatgactgtttgccattttttttaatggtacttagtattttgatcaaactttagtctccagaactaaacaagtccctaagtttccttattttaatttactgtgactagatttgaagcaaataaatactccagatccatgcagctagaacacacttgcttccactactaaatatacagggtatgtcctaacatggagttaactggaatagcagtacactagcaagtatctgtgaatccttagcactgacgggttaacagaaatgctttggtaatacctacttagttaattggaggaagtagtaaataaacattaggtaatctgcagattacttcaaatgggaaaaatctttttgtagactctatagtaccctctctattcactagcttctgaaaagggaggagtatttttagtttgacaatttaataatttaaaaacaagacatctccaggtaggaaaaaatgaaagctatttcatgcaaacattatctaatttagcttaaaagtgaaagtggtaatactgttggtttctgtaaatgttgcagggttttaaactttataattactttaatatttttgataactagaaatctagtattgccataaaggaaactaagtgcccatcaaagatttgtttggtataaataaagaattatttgttttgttttcaatgacagtaagctacaaatcatgatgcttaaaaactttctaaagatgaattgtgtggcagtgattggtctgtttgtggagaatgtatgaaagctattaatattctagaatagattaataaattggctatgttgttccaatgaatgtacagcacttccattaacttttgaaagcaacacagccttaaactcaatgcttttgctttatgacatgggaatgttctgtcatcaatggagtgtattcttgtaatagaattctttatatcgttctcaattctatagactttcaagcctatgtatgaatatgaaggggtttttttttttttgctttgttttctttttagattttgtacattccatctttataggtctgtttcatatgttttatgtatagaacactaagtcttgcactctctgacattgatactgatatattctcgtcatttgttcttttatgaatcaaaatgttgactgcctatttaaagaaaagaatgaacgctgtgcatcaaagtgtttgtatgttcgtagctacatacgtaccacagtattttggatgctttagtctacaatgaaactttcaattaattctgtcttgaaacataggagaaacaggattcatgtgtatctctttaccatgcacaaaatctcaaatcattataataaagcttgttttctcc

SEQ ID NO: 245 - protein, 744 aa, Homo sapien
MASEGTNIPSPVVRQIDKQFLICSICLERYKNPKVLPCLHTFCERCLQNYIPAHSLTLSCPVCRQTSILPEKGVAALQNNFFITNLMDVLQRTPGSNAEESSILETVTAVAAGKPLSCPNHDGNVMEFYCQSCETAMCRECTEGEHAEHPTVPLKDVVEQHKASLQVQLDAVNKRLPEIDSALQFISEIIHQLTNQKASIVDDIHSTFDELQKTLNVRKSVLLMELEVNYGLKHKVLQSQLDTLLQGQESIKSCSNFTAQALNHGTETEVLLVKKQMSEKLNELADQDFPLHPRENDQLDFIVETEGLKKSIHNLGTILTTNAVASETVATGEGLRQTIIGQPMSVTITTKDKDGELCKTGNAYLTAELSTPDGSVADGEILDNKNGTYEFLYTVQKEGDFTLSLRLYDQHIRGSPFKLKVIRSADVSPTTEGVKRRVKSPGSGHVKQKAVKRPASMYSTGKRKENPIEDDLIFRVGTKGRNKGEFTNLQGVAASTNGKILIADSNNQCVQIFSNDGQFKSRFGIRGRSPGQLQRPTGVAVHPSGDIIIADYDNKWVSIFSSDGKFKTKIGSGKLMGPKGVSVDRNGHIIVVDNKACCVFIFQPNGKIVTRFGSRGNGDRQFAGPHFAAVNSNNEIIITDFHNHSVKVFNQEGEFMLKFGSNGEGNGQFNAPTGVAVDSNGNIIVADWGNSRIQVFDGSGSFLSYINTSADPLYGPQGLALTSDGHVVVADSGNHCFKVYRYLQ

SEQ ID NO: 246 - DNA, 662 bp, Homo sapien
accgccgacgcagacccctctctgcacgccagcccgcccgcacccaccatggccacagttcagcagctggaaggaagatggcgcctggtggacagcaaaggctttgatgaatacatgaaggagctaggagtgggaatagctttgcgaaaaatgggcgcaatggccaagccagattgtatcatcacttgtgatggtaaaaacctcaccataaaaactgagagcactttgaaaacaacacagttttcttgtaccctgggagagaagtttgaagaaaccacagctgatggcagaaaaactcagactgtctgcaactttacagatggtgcattggttcagcatcaggagtgggatgggaaggaaagcacaataacaagaaaattgaaagatgggaaattagtggtggagtgtgtcatgaacaatgtcacctgtactcggatctatgaaaaagtagaataaaaattccatcatcactttggacaggagttaattaagagaatgaccaagctcagttcaatgagcaaatctccatactgtttctttcttttttttttcattactgtgttcaattatctttatcataaacattttacatgcagctatttcaaagtgtgttggattaattaggatcatccctttggttaataaataaatgtgtttgtgct

SEQ ID NO: 247 - protein, 135 aa, Homo sapien
MATVQQLEGRWRLVDSKGFDEYMKELGVGIALRKMGAMAKPDCIITCDGKNLTIKTESTLKTTQFSCTLGEKFEETTADGRKTQTVCNFTDGALVQHQEWDGKESTITRKLKDGKLVVECVMNNVTCTRIYEKVE

SEQ ID NO: 248 - DNA, 3496 bp, Homo sapien
cgaactctgaaaaggcggggcagcgggcctgcagctcctggagttcagggagacccggaaatctcaccctgccctcttcttgtgttgtgtttgtcacagccttgcccctcttgctcgccttgaaaatggaaaagatgctcgcaggctgctttctgctgatcctcggacagatcgtcctcctccctgccgaggccagggagcggtcacgtgggaggtccatctctaggggcagacacgctcggacccacccgcagacggcccttctggagagttcctgtgagaacaagcgggcagacctggttttcatcattgacagctctcgcagtgtcaacacccatgactatgcaaaggtcaaggagttcatcgtggacatcttgcaattcttggacattggtcctgatgtcacccgagtgggcctgctccaatatggcagcactgtcaagaatgagttctccctcaagaccttcaagaggaagtccgaggtggagcgtgctgtcaagaggatgcggcatctgtccacgggcaccatgaccgggctggccatccagtatgccctgaacatcgcattctcagaagcagagggggcccggcccctgagggagaatgtgccacgggtcataatgatcgtgacagatgggagacctcaggactccgtggccgaggtggctgctaaggcacgggacacgggcatcctaatctttgccattggtgtgggccaggtagacttcaacaccttgaagtccattgggagtgagccccatgaggaccatgtcttccttgtggccaatttcagccagattgagacgctgacctccgtgttccagaagaagttgtgcacggcccacatgtgcagcaccctggagcataactgtgcccacttctgcatcaacatccctggctcatacgtctgcaggtgcaaacaaggctacattctcaactcggatcagacgacttgcagaatccaggatctgtgtgccatggaggaccacaactgtgagcagctctgtgtgaatgtgccgggctccttcgtctgccagtgctacagtggctacgccctggctgaggatgggaagaggtgtgtggctgtggactactgtgcctcagaaaaccacggatgtgaacatgagtgtgtaaatgctgatggctcctacctttgccagtgccatgaaggatttgctcttaacccagatgaaaaaacgtgcacaaagatagactactgtgcctcatctaatcacggatgtcagcacgagtgtgttaacacagatgattcctattcctgccactgcctgaaaggctttaccctgaatccagataagaaaacctgcagaaggatcaactactgtgcactgaacaaaccgggctgtgagcatgagtgcgtcaacatggaggagagctactactgccgctgccaccgtggctacactctggaccccaatggcaaaacctgcagccgagtggaccactgtgcacagcaggaccatggctgtgagcagctgtgtctgaacacggaggattccttcgtctgccagtgctcagaaggcttcctcatcaacgaggacctcaagacctgctcccgggtggattactgcctgctgagtgaccatggttgtgaatactcctgtgtcaacatggacagatcctttgcctgtcagtgtcctgagggacacgtgctccgcagcgatgggaagacgtgtgcaaaattggactcttgtgctctgggggaccacggttgtgaacattcgtgtgtaagcagtgaagattcgtttgtgtgccagtgctttgaaggttatatactccgtgaagatggaaaaacctgcagaaggaaagatgtctgccaagctatagaccatggctgtgaacacatttgtgtgaacagtgatgactcatacacgtgcgagtgcttggagggattccggctcgctgaggatgggaaacgctgccgaaggaaggatgtctgcaaatcaacccaccatggctgcgaacacatttgtgttaataatgggaattcctacatctgcaaatgctcagagggatttgttctagctgaggacggaagacggtgcaagaaatgcactgaaggcccaattgacctggtctttgtgatcgatggatccaagagtcttggagaagagaattttgaggtcgtgaagcagtttgtcactggaattatagattccttgacaatttcccccaaagccgctcgagtggggctgctccagtattccacacaggtccacacagagttcactctgagaaacttcaactcagccaaagacatgaaaaaagccgtggcccacatgaaatacatgggaaagggctctatgactgggctggccctgaaacacatgtttgagagaagttttacccaaggagaaggggccaggcctttttccacaagggtgcccagagcagccattgtgttcaccgacggacgggctcaggatgacgtctccgagtgggccagtaaagccaaggccaatggtatcactatgtatgctgttggggtaggaaaagccattgaggaggaactacaagagattgcctctgagcccacaaacaagcatctcttctatgccgaagacttcagcacaatggatgagataagtgaaaaactcaagaaaggcatctgtgaagctctagaagactccgatggaagacaggactctccagcaggggaactgccaaaaacggtccaacagccaacagaatctgagccagtcaccataaatatccaagacctactttcctgttctaattttgcagtgcaacacagatatctgtttgaagaagacaatcttttacggtctacacaaaagctttcccattcaacaaaaccttcaggaagccctttggaagaaaaacacgatcaatgcaaatgtgaaaaccttataatgttccagaaccttgcaaacgaagaagtaagaaaattaacacagcgcttagaagaaatgacacagagaatggaagccctggaaaatcgcctgagatacagatgaagattagaaatcgcgacacatttgtagtcattgtatcacggattacaatgaacgcagtgcagagccccaaagctcaggctattgttaaatcaataatgttgtgaagtaaaacaatcagtactgagaaacctggtttgccacagaacaaagacaagaagtatacactaacttgtataaatttatctaggaaaaaaatccttcagaattctaagatgaatttaccaggtgagaatgaataagctatgcaaggtattttgtaatatactgtggacacaacttgcttctgcctcatcctgccttagtgtgcaatctcatttgactatacgataaagtttgcacagtcttacttctgtagaacactggccataggaaatgctgtttttttgtactggactttaccttgatatatgtatatggatgtatgcataaaatcataggacatatgtacttgtggaacaagttggattttttatacaatattaaaattcaccacttcagag

SEQ ID NO: 249 - protein, 956 aa, Homo sapien
MEKMLAGCFLLILGQIVLLPAEARERSRGRSISRGRHARTHPQTALLESSCENKRADLVFIIDSSRSVNTHDYAKVKEFIVDILQFLDIGPDVTRVGLLQYGSTVKNEFSLKTFKRKSEVERAVKRMRHLSTGTMTGLAIQYALNIAFSEAEGARPLRENVPRVIMIVTDGRPQDSVAEVAAKARDTGILIFAIGVGQVDFNTLKSIGSEPHEDHVFLVANFSQIETLTSVFQKKLCTAHMCSTLEHNCAHFCINIPGSYVCRCKQGYILNSDQTTCRIQDLCAMEDHNCEQLCVNVPGSFVCQCYSGYALAEDGKRCVAVDYCASENHGCEHECVNADGSYLCQCHEGFALNPDEKTCTKIDYCASSNHGCQHECVNTDDSYSCHCLKGFTLNPDKKTCRRINYCALNKPGCEHECVNMEESYYCRCHRGYTLDPNGKTCSRVDHCAQQDHGCEQLCLNTEDSFVCQCSEGFLINEDLKTCSRVDYCLLSDHGCEYSCVNMDRSFACQCPEGHVLRSDGKTCAKLDSCALGDHGCEHSCVSSEDSFVCQCFEGYILREDGKTCRRKDVCQAIDHGCEHICVNSDDSYTCECLEGFRLAEDGKRCRRKDVCKSTHHGCEHICVNNGNSYICKCSEGFVLAEDGRRCKKCTEGPIDLVFVIDGSKSLGEENFEVVKQFVTGIIDSLTISPKAARVGLLQYSTQVHTEFTLRNFNSAKDMKKAVAHMKYMGKGSMTGLALKHMFERSFTQGEGARPFSTRVPRAAIVFTDGRAQDDVSEWASKAKANGITMYAVGVGKAIEEELQEIASEPTNKHLFYAEDFSTMDEISEKLKKGICEALEDSDGRQDSPAGELPKTVQQPTESEPVTINIQDLLSCSNFAVQHRYLFEEDNLLRSTQKLSHSTKPSGSPLEEKHDQCKCENLIMFQNLANEEVRKLTQRLEEMTQRMEALENRLRYR

SEQ ID NO: 250 - DNA, 3548 bp, Homo sapien
tggccgaagcagggggacagcaagggacgctcaggcggggaccatggcggacggcggctcggagcgggctgacgggcgcatcgtcaagatggaggtggactacagcgccacggtggatcagcgcctacccgagtgtgcgaagctagccaaggaaggaagacttcaagaagtcattgaaacccttctctctctggaaaagcagactcgtactgcttccgatatggtatcgacatcccgtatcttagttgcagtagtgaagatgtgctatgaggctaaagaatgggatttacttaatgaaaatattatgcttttgtccaaaaggcggagtcagttaaaacaagctgttgccaaaatggttcaacagtgctgtacttatgttgaggaaatcacagaccttcctatcaaacttcgattaattgatactctacgaatggttaccgaaggcaagatttatgttgaaattgagcgtgcgcgactgactaaaacattagcaactataaaagaacaaaatggtgatgtgaaagaggcagcctccattttacaggagttacaggtggaaacctacgggtcaatggaaaagaaagagcgagtggaatttattttggagcaaatgaggctctgcctagctgtgaaggattacattcgaacacaaatcatcagcaagaaaattaacaccaaatttttccaggaagaaaatacagagaaattaaagttgaagtactataatttaatgattcagctggatcaacatgagggatcctatttgtctatttgtaagcactacagagcaatatatgatactccctgtatacaggcagaaagtgaaaaatggcagcaggctctgaagagtgttgtactctatgttatcctggctccttttgacaatgaacagtcagatttggttcaccgaataagtggtgacaagaagttagaagaaattcccaaatacaaggatcttttaaagctttttaccacaatggagttgatgcgttggtccacacttgttgaggactatggaatggaattaagaaaaggttcccttgagagtcctgcaacggatgtttttggttctacagaggaaggtgaaaaaaggtggaaagacttgaagaacagagttgttgaacataatattagaataatggccaagtattatactcggataacaatgaaaaggatggcacagcttctggatctatctgttgatgagtccgaagcctttctctcaaatctagtagttaacaagaccatctttgctaaagtagacagattagcaggaattatcaacttccagagacccaaggatccaaataatttattaaatgactggtctcagaaactgaactcattaatgtctctggttaacaaaactacgcatctcatagccaaagaggagatgatacataatctacaataagggtcttagtgctttagaaaaaagttaaaattggaagtcattaaaaaaagactgttataatggtgtatatgttggggttttttttctaagcttctttgtcttaaattttaaaatagtgaatatgtttgagactccctttgacctttcagttccccaagttcattgttaactttgcatttgcaattggtgcaaaaatacagatttctgtcgtctgaatacacaaaaagttgtgtcataacttacccagatatgtttttctatcatttgaaacctttttagctactgtttgttttcattcaactaacaaacatattccaataataaaagcagtatatacatatttcctttctacagttacctctgattctcaacattttgtggggtagtgatttggcaagtgttttttaaataaaacaaatctcattgtaaagttatcagtcatttagtagaatagaaaagcaacatagagcatacaagaacatttgggatagagttgtgatttgtgaagaatttgtactttgatattgtggcggaaagtctagactgagtgtgtatgctggtaaactgtagacttttttttttttttttgagtccggctggttccaatcacagtagcttgattgctttcagccctcatcctctcacttgatcagttgttcaacagaatcagctgacataattgacacagtttattgggtgttaagtccgctctatagggatagtgactacttttttttttttttttttttttgctcttcttcctctcccctttctttatatgggtttaaatttaacataaagttgtttttataaggcttatttgtggctttaacttgtaagtctgattacatcattattgttccaaattcattatctctgtaggaacttttagttccattatatgaacactggataacctaattttttttaatgctttaaaaaaatggcaaaaagacgtcaggccaccctcatagtaagtggtgtagtattaaaatattttcacggaattaaaagtagcttgctgtcaaagaaacacctgagatgaattggtgtgaacgaattttgcaagtttaatttgatttatttcagagaaaatagaaaaaacaatgttagaaggttatttaaaatgatacttaaataaagaaagtgtgaggtctactttaaaaaaattcaaatgaagagaaaaagaaaaacagcattctagaaatggcatttctcctaattaattttccacttaatggaagattatcaattgtcctattttatgatcccaggactgaagacagttgtgggatatctgtcatatttatcctgtgagtcattgtgaataatgacatacagtactgaagtaatctgattttattctttggaaattcaatgcattggtcacactaataacatcaacatctgctatcacttatctttttaaaactaaccaaaaaaggctgggattacaggcatgagccactgcacccaactcctctttcgtctttctttaacacacactaggctctttgtgtattatgattcagtgctatttgtaactgtgtcccagtgaccaaattgcactcgactcgatcagctgttcatccatttcgtgttttttcctgtcaaacattaatccagcaaatatatgaggtatttaccaatttattttcttagtattacaaaataattcattagcataaagtacaatagtgaaatatttgagttgttcggaacctcaattaatcctgttttacatttcagacctaaagctggcaatcaggagaagaagcactttgttttaaatgtggagaagataacacttgattccatttcattgtcattagtgtattaaccagcaggagaggtgatgagccatttttcaaatgaaataccttttatttccatataatttttttattttagagttcaatagctgtttctatgattatcctcaatttccatatgttactgaatctgaaaaacatctttaaaattcaaacagttccattttctctcttgtaagtgttaaatgtgataaaagtacatattttaaattgttttcagctcttggatatagcagcaataaaaacactaatttgtgggtatttaagaaaacctggagaataaactcatactttaaaagatc

SEQ ID NO: 251 - protein, 456 aa, Homo sapien
MADGGSERADGRIVKMEVDYSATVDQRLPECAKLAKEGRLQEVIETLLSLEKQTRTASDMVSTSRILVAVVKMCYEAKEWDLLNENIMLLSKRRSQLKQAVAKMVQQCCTYVEEITDLPIKLRLIDTLRMVTEGKIYVEIERARLTKTLATIKEQNGDVKEAASILQELQVETYGSMEKKERVEFILEQMRLCLAVKDYIRTQIISKKINTKFFQEENTEKLKLKYYNLMIQLDQHEGSYLSICKHYRAIYDTPCIQAESEKWQQALKSVVLYVILAPFDNEQSDLVHRISGDKKLEEIPKYKDLLKLFTTMELMRWSTLVEDYGMELRKGSLESPATDVFGSTEEGEKRWKDLKNRVVEHNIRIMAKYYTRITMKRMAQLLDLSVDESEAFLSNLVVNKTIFAKVDRLAGIINFQRPKDPNNLLNDWSQKLNSLMSLVNKTTHLIAKEEMIHNLQ

SEQ ID NO: 252 - DNA, 597 bp, Homo sapien
agctgaagttgaggatctcttactctctaagccacggaattaacccgagcaggcatggaggcctctgctctcacctcatcagcagtgaccagtgtggccaaagtggtcagggtggcctctggctctgccgtagttttgcccctggccaggattgctacagttgtgattggaggagttgtggccatggcggctgtgcccatggtgctcagtgccatgggcttcactgcggcgggaatcgcctcgtcctccatagcagccaagatgatgtccgcggcggccattgccaatgggggtggagttgcctcgggcagccttgtgggtactctgcagtcactgggagcaactggactctccggattgaccaagttcatcctgggctccattgggtctgccattgcggctgtcattgcgaggttctactagctccctgcccctcgccctgcagagaagagaaccatgccaggggagaaggcacccagccatcctgacccagcgaggagccaactatcccaaatatacctgggtgaaatataccaaattctgcatctccagaggaaaataagaaataaagatgaattgttgcaactcttaaaaaaa

SEQ ID NO: 253 - protein, 122 aa, Homo sapien
MEASALTSSAVTSVAKVVRVASGSAVVLPLARIATVVIGGVVAMAAVPMVLSAMGFTAAGIASSSIAAKMMSAAAIANGGGVASGSLVGTLQSLGATGLSGLTKFILGSIGSAIAAVIARFY

SEQ ID NO: 254 - DNA, 2077 bp, Homo sapien
ccgagcgccagcgcggggaaccgggaaaaggaaaccgtgttgtgtacgtaagattcaggaaacgaaaccaggagccgcgggtgttggcgcaaaggttactcccagacccttttccggctgacttctgagaaggttgcgcacagctgtgcccggcagtctagaggcgcagaagaggaagccatcgcctggccccggctctctggaccttgtctcgctcgggagcggaaacagcggcagccagagaactgttttaatcatggacaaacaaaactcacagatgaatgcttctcacccggaaacaaacttgccagttgggtatcctcctcagtatccaccgacagcattccaaggacctccaggatatagtggctaccctgggccccaggtcagctacccacccccaccagccggccattcaggtcctggcccagctggctttcctgtcccaaatcagccagtgtataatcagccagtatataatcagccagttggagctgcaggggtaccatggatgccagcgccacagcctccattaaactgtccacctggattagaatatttaagtcagatagatcagatactgattcatcagcaaattgaacttctggaagttttaacaggttttgaaactaataacaaatatgaaattaagaacagctttggacagagggtttactttgcagcggaagatactgattgctgtacccgaaattgctgtgggccatctagaccttttaccttgaggattattgataatatgggtcaagaagtcataactctggagagaccactaagatgtagcagctgttgttgtccctgctgccttcaggagatagaaatccaagctcctcctggtgtaccaataggttatgttattcagacttggcacccatgtctaccaaagtttacaattcaaaatgagaaaagagaggatgtactaaaaataagtggtccatgtgttgtgtgcagctgttgtggagatgttgattttgagattaaatctcttgatgaacagtgtgtggttggcaaaatttccaagcactggactggaattttgagagaggcatttacagacgctgataactttggaatccagttccctttagaccttgatgttaaaatgaaagctgtaatgattggtgcctgtttcctcattgacttcatgttttttgaaagcactggcagccaggaacaaaaatcaggagtgtggtagtggattagtgaaagtctcctcaggaaatctgaagtctgtatattgattgagactatctaaactcatacctgtatgaattaagctgtaaggcctgtagctctggttgtatacttttgcttttcaaattatagtttatcttctgtataactgatttataaaggtttttgtacattttttaatactcattgtcaatttgagaaaaaggacatatgagtttttgcatttattaatgaaacttcctttgaaaaactgctttgaattatgatctctgattcattgtccattttactaccaaatattaactaaggccttattaatttttatataaattatatcttgtcctattaaatctagttacaatttatttcatgcataagagctaatgttattttgcaaatgccatatattcaaaaaagctcaaagataattttctttactattatgttcaaataatattcaatatgcatattatctttaaaaagttaaatgtttttttaatcttcaagaaatcatgctacacttaacttctcctagaagctaatctataccataatattttcatattcacaagatattaaattaccaattttcaaattattgttagtaaagaacaaaatgattctctcccaaagaaagacacattttaaatactccttcactctaaaactctggtattataacttttgaaagttaatatttctacatgaaatgtttagctcttacactctatccttcctagaaaatggtaattgagattactcagatattaattaaatacaatatcatatatatattcacagagtataaacctaaataatgatctattagattcaaatatttgaaataaaaacttgatttttttgt

SEQ ID NO: 255 - protein, 318 aa, Homo sapien
MDKQNSQMNASHPETNLPVGYPPQYPPTAFQGPPGYSGYPGPQVSYPPPPAGHSGPGPAGFPVPNQPVYNQPVYNQPVGAAGVPWMPAPQPPLNCPPGLEYLSQIDQILIHQQIELLEVLTGFETNNKYEIKNSFGQRVYFAAEDTDCCTRNCCGPSRPFTLRIIDNMGQEVITLERPLRCSSCCCPCCLQEIEIQAPPGVPIGYVIQTWHPCLPKFTIQNEKREDVLKISGPCVVCSCCGDVDFEIKSLDEQCVVGKISKHWTGILREAFTDADNFGIQFPLDLDVKMKAVMIGACFLIDFMFFESTGSQEQKSGVW

SEQ ID NO: 256 - DNA, 5128 bp, Homo sapien
actctggagtgggagtgggagcgagcgcttctgcgactccagttgtgagagccgcaagggcatgggaattgacgccactcaccgacccccagtctcaatctcaacgctgtgaggaaacctcgactttgccaggtccccaagggcagcggggctcggcgagcgaggcacccttctccgtccccatcccaatccaagcgctcctggcactgacgacgccaagagactcgagtgggagttaaagcttccagtgagggcagcaggtgtccaggccgggcctgcgggttcctgttgacgtcttgccctaggcaaaggtcccagttccttctcggagccggctgtcccgcgccactggaaaccgcacctccccgcagcatgggcaccagcctcagcccgaacgacccttggccgctaaacccgctgtccatccagcagaccacgctcctgctactcctgtcggtgctggccactgtgcatgtgggccagcggctgctgaggcaacggaggcggcagctccggtccgcgcccccgggcccgtttgcgtggccactgatcggaaacgcggcggcggtgggccaggcggctcacctctcgttcgctcgcctggcgcggcgctacggcgacgttttccagatccgcctgggcagctgccccatagtggtgctgaatggcgagcgcgccatccaccaggccctggtgcagcagggctcggccttcgccgaccggccggccttcgcctccttccgtgtggtgtccggcggccgcagcatggctttcggccactactcggagcactggaaggtgcagcggcgcgcagcccacagcatgatgcgcaacttcttcacgcgccagccgcgcagccgccaagtcctcgagggccacgtgctgagcgaggcgcgcgagctggtggcgctgctggtgcgcggcagcgcggacggcgccttcctcgacccgaggccgctgaccgtcgtggccgtggccaacgtcatgagtgccgtgtgtttcggctgccgctacagccacgacgaccccgagttccgtgagctgctcagccacaacgaagagttcgggcgcacggtgggcgcgggcagcctggtggacgtgatgccctggctgcagtacttccccaacccggtgcgcaccgttttccgcgaattcgagcagctcaaccgcaacttcagcaacttcatcctggacaagttcttgaggcactgcgaaagccttcggcccggggccgccccccgcgacatgatggacgcctttatcctctctgcggaaaagaaggcggccggggactcgcacggtggtggcgcgcggctggatttggagaacgtaccggccactatcactgacatcttcggcgccagccaggacaccctgtccaccgcgctgcagtggctgctcctcctcttcaccaggtatcctgatgtgcagactcgagtgcaggcagaattggatcaggtcgtggggagggaccgtctgccttgtatgggtgaccagcccaacctgccctatgtcctggccttcctttatgaagccatgcgcttctccagctttgtgcctgtcactattcctcatgccaccactgccaacacctctgtcttgggctaccacattcccaaggacactgtggtttttgtcaaccagtggtctgtgaatcatgacccagtgaagtggcctaacccggagaactttgatccagctcgattcttggacaaggatggcctcatcaacaaggacctgaccagcagagtgatgattttttcagtgggcaaaaggcggtgcattggcgaagaactttctaagatgcagctttttctcttcatctccatcctggctcaccagtgcgatttcagggccaacccaaatgagcctgcgaaaatgaatttcagttatggtctaaccattaaacccaagtcatttaaagtcaatgtcactctcagagagtccatggagctccttgatagtgctgtccaaaatttacaagccaaggaaacttgccaataagaagcaagaggcaagctgaaattttagaaatattcacatcttcggagatgaggagtaaaattcagtttttttccagttcctcttttgtgctgcttctcaattagcgtttaaggtgagcataaatcaactgtccatcaggtgaggtgtgctccatacccagcggttcttcatgagtagtgggctatgcaggagcttctgggagatttttttgagtcaaagacttaaagggcccaatgaattattatatacatactgcatcttggttatttctgaaggtagcattctttggagttaaaatgcacatatagacacatacacccaaacacttacaccaaactactgaatgaagaagtattttggtaaccaggccatttttggtgggaatccaagattggtctcccatatgcagaaatagacaaaaagtatattaaacaaagtttcagagtatattgttgaagagacagagacaagtaatttcagtgtaaagtgtgtgattgaaggtgataagggaaaagataaagaccagaaattcccttttcaccttttcaggaaaataacttagactctagtatttatgggtggatttatccttttgccttctggtatacttccttacttttaaggataaatcataaagtcagttgctcaaaaagaaatcaatagttgaattagtgagtatagtggggttccatgagttatcatgaattttaaagtatgcattattaaattgtaaaactccaaggtgatgttgtacctcttttgcttgccaaagtacagaatttgaattatcagcaaagaaaaaaaaaaaagccagccaagctttaaattatgtgaccataatgtactgatttcagtaagtctcataggttaaaaaaaaaagtcaccaaatagtgtgaaatatattacttaactgtccgtaagcagtatattagtattatcttgttcaggaaaaggttgaataatatatgccttgtgtaatattgaaaattgaaaagtacaactaacgcaaccaagtgtgctaaaaatgagcttgattaaatcaaccacctatttttgacatggaaatgaagcagggtttcttttcttcactcaaattttggcgaatctcaaaattagatcctaagatgtgttcttatttttataacatctttattgaaattctatttataatacagaatcttgttttgaaaataacctaattaatatattaaaattccaaattcatggcatgcttaaattttaactaaattttaaagccattctgattattgagttccagttgaagttagtggaaatctgaacattctcctgtggaaggcagagaaatctaagctgtgtctgcccaatgaataatggaaaatgccatgaattacctggatgttctttttacgaggtgacaagagttggggacagaactcccattacaactgaccaagtttctcttctagatgattttttgaaagttaacattaatgcctgctttttggaaagtcagaatcagaagatagtcttggaagctgtttggaaaagacagtggagatgaggtcagttgtgttttttaagatggcaattactttggtagctgggaaagcataaagctcaaatgaaatgtatgcattcacatttagaaaagtgaattgaagtttcaagttttaaagttcattgcaattaaacttccaaagaaagttctacagtgtcctaagtgctaagtgcttattacattttattaagctttttggaatctttgtaccaaaattttaaaaaagggagtttttgatagttgtgtgtatgtgtgtgtggggtggggggatggtaagagaaaagagagaaacactgaaaagaaggaaagatggttaaacattttcccactcattctgaattaattaatttggagcacaaaattcaaagcatggacatttagaagaaagatgtttggcgtagcagagttaaatctcaaataggctattaaaaaagtctacaacatagcagatctgttttgtggtttggaatattaaaaaacttcatgtaattttattttaaaatttcatagctgtacttcttgaatataaaaaatcatgccagtatttttaaaggcattagagtcaactacacaaagcaggcttgcccagtacatttaaattttttggcacttgccattccaaaatattatgccccaccaaggctgagacagtgaatttgggctgctgtagcctatttttttagattgagaaatgtgtagctgcaaaaataatcatgaaccaatctggatgcctcattatgtcaaccaggtccagatgtgctataatctgtttttacgtatgtaggcccagtcgtcatcagatgcttgcggcaaaagaaagctgtgtttatatggaagaaagtaaggtgcttggagtttacctggcttatttaatatgcttataacctagttaaagaaaggaaaagaaaacaaaaaacgaatgaaaataactgaatttggaggctggagtaatcagattactgctttaatcagaaaccctcattgtgtttctaccggagagagaatgtatttgctgacaaccattaaagtcagaagttttactccaggttattgcaataaagtataatgtttattaaatgcttcatttgtatgtcaaagctttgactctataagcaaattgcttttttccaaaacaaaaagatgtctcaggtttgttttgtgaattttctaaaagctttcatgtcccagaacttagcctttacctgtgaagtgttactacagccttaatattttcctagtagatctatattagatcaaatagttgcatagcagtatatgttaatttgtgtgtttttagctgtgacacaactgtgtgattaaaaggtatactttagtagacatttataactcaaggataccttcttatttaatcttttcttatttttgtactttatcatgaatgcttttagtgtgtgcataatagctacagtgcatagttgtagacaaagtacattctggggaaacaacatttatatgtagcctttactgtttgatataccaaattaaaaaaaaattgtatctcattacttatactgggacaccattaccaaaataataaaaatcactttcataatcttgaaaaaa

SEQ ID NO: 257 - protein, 543 aa, Homo sapien
MGTSLSPNDPWPLNPLSIQQTTLLLLLSVLATVHVGQRLLRQRRRQLRSAPPGPFAWPLIGNAAAVGQAAHLSFARLARRYGDVFQIRLGSCPIVVLNGERAIHQALVQQGSAFADRPAFASFRVVSGGRSMAFGHYSEHWKVQRRAAHSMMRNFFTRQPRSRQVLEGHVLSEARELVALLVRGSADGAFLDPRPLTVVAVANVMSAVCFGCRYSHDDPEFRELLSHNEEFGRTVGAGSLVDVMPWLQYFPNPVRTVFREFEQLNRNFSNFILDKFLRHCESLRPGAAPRDMMDAFILSAEKKAAGDSHGGGARLDLENVPATITDIFGASQDTLSTALQWLLLLFTRYPDVQTRVQAELDQVVGRDRLPCMGDQPNLPYVLAFLYEAMRFSSFVPVTIPHATTANTSVLGYHIPKDTVVFVNQWSVNHDPVKWPNPENFDPARFLDKDGLINKDLTSRVMIFSVGKRRCIGEELSKMQLFLFISILAHQCDFRANPNEPAKMNFSYGLTIKPKSFKVNVTLRESMELLDSAVQNLQAKETCQ

SEQ ID NO: 258 - DNA, 2895 bp, Homo sapien
cccgcctgacgactgaccagttgccatggcatcctactacgagatcctagacgtgccgcgaagtgcgtccgctgatgacatcaagaaggcgtatcggcgcaaggctctccagtggcacccagacaaaaacccagataataaagagtttgctgagaagaaatttaaggaggtggccgaggcatatgaagtgctgtctgacaagcacaagcgggagatttacgaccgctatggccgggaagggctgacagggacaggaactggcccatctcgggcagaagctggcagtggtgggcctggcttcaccttcaccttccgcagccccgaggaggtcttccgggaattctttgggagtggagacccttttgcagagctctttgatgacctgggccccttctcagagcttcagaaccggggttcccgacactcaggccccttctttaccttctcttcctccttccctgggcactccgatttctcctcctcatctttctccttcagtcctggggctggtgcttttcgctctgtttctacatctaccacctttgtccaaggacgccgcatcaccacacgcagaatcatggagaacgggcaggagcgggtggaagtggaggaggatgggcagctgaagtcagtcacaatcaatggtgtcccagatgacctggcacgtggcttggagctgagccgtcgcgagcagcagccgtcagtcacttccaggtctgggggcactcaggtccagcagacccctgcctcatgccccttggacagcgacctctctgaggatgaggacctgcagctggccatggcctacagcctgtcagagatggaggcagctgggaagaaacccgcaggtgggcgggaggcacagcaccgacggcaggggcgcccaaggcccagcaccaagatccaggcttgggggggacccaggagggtgcgaggggtgaagcaaccaaacgcagtccatccccagaggagaaggcctctcgctgcctcatcctctgaacaccgggcccaacctgatctgatccagatcttgactggggggtctgactcactgtgggaagagaagaggggagtatcctgagttgtaggaactgctttccaactccaagctccctccacaagtttccctccccaggccccccacaccccagtgtggacttgggatttgctgtgctcagcccagggctgataggtccctggtgaagcccagggtggggggtgtcagggcagtggaggggcccgaggagccaggttgcatttattggatggggagctccaaggggcattagtggtttgggctgggcttttgtgccctggtactctgccacctgtgttgctgatggtgtcaaggaaggaggacttggcctagggttgtctgagccggagccggcagctccactggagagcagtgcaggcagagtggagcctcctgctctcctggaccagctgcagacccccaaccctggtttctgtgccatgttgcgctctgaccgtctctgttgcttctcttctggtgttgcttctcctccctcccattctctctgcaactcctgcgggcgcatcgcttgctttcactgccgtctggctaggactcccttcttccttccttccccgagaaggcctcaatgtggcgaggaagatgctggggccggtagggctgtgagatcttctggggaggctagccgggtggggcgggagcctctcagctgtccagattcagaactggagcccactcctcctccctctcgttgcctcagccctgccctcaccctcagactaggcagaggtgaggctggctcaccctgaagaggtgggataggaggggactgcacccatactgcttccctaccacaaatcagggctcagggagaggccatgcggcagcccaggtctgcatgctgagccccatcctccacagcttgccgctgacgctctctcctgtcaccccgcccctgctctctccccagatgtgttctgagctggatgccgggttccagaatcgctgcacagttccaacaggacagcgccttcccccatgcgctgggaggggaccctccatttctccccctcacccatgctgagtgtagagccggggcctgggtggcgggtgggggccgggtgggaggtggcagtagtcttagcctgtgcactctcttccttgggtgtttggtgctggctcctggggactacaaatcccagagtgcggtgtgcccggcctcatttctgatagatcccgcttgggggaggtggtgtatggttacggagctgtgcatcttgggacatgtagtagcccaggtcttgtcactcgctgtgagatggggagattttgtcttttgatttatccctgtagggctggcagggttgtagatgaagggggaatgatctgagccttggttcccctgacacgtcttgctagccccagggttagagtgggcagggcagagccgcgcagcacctgggagcggtacctttcccttgggcagcctggggtcccaggaacaagccagggcgagtggcatgtctgcctgagcagggtgtggccccagaaagctgaggagtgtgggctggcagagagcttcgagggcaaggccacccgcgggggcgtgtgtgtggtggggcttggcatgtgatggcagctccagctccaggcatgccgctgcttgtatggctttctttggcctctgaccctgctgcccattctttccaacatcacagatgaactgcctctcctcctccctgcctggggagcccagtggccagggagggagtggtggagccagtcgctgtaacactgagcctcagagacgaaccaaaaccagctgggctgagctcagatccagggggaagaaatgctggaagtcaataaaactgagtttgagaaaaaaaaaaaaaaaa

SEQ ID NO: 259 - protein, 351 aa, Homo sapien [sequence omitted]

SEQ ID NO: 260 - DNA, 836 bp, Homo sapien
gtgaaacaccctcggctgggaagtcagttcgttctctcctctcctctcttcttgtttgaacatggtgcggactaaagcagacagtgttccaggcacttacagaaaagtggtggctgctcgagcccccagaaaggtgcttggttcttccacctctgccactaattcgacatcagtttcatcgaggaaagctgaaaataaatatgcaggagggaaccccgtttgcgtgcgcccaactcccaagtggcaaaaaggaattggagaattctttaggttgtcccctaaagattctgaaaaagagaatcagattcctgaagaggcaggaagcagtggcttaggaaaagcaaagagaaaagcatgtcctttgcaacctgatcacacaaatgatgaaaaagaatagaactttctcattcatctttgaataacgtctccttgtttaccctggtattctagaatgtaaatttacataaatgtgtttgttccaattagctttgttgaacaggcatttaattaaaaaatttaggtttaaatttagatgttcaaaagtagttgtgaaatttgagaatttgtaagactaattatggtaacttagcttagtattcaatataatgcattgtttggtttcttttaccaaattaagtgtctagttcttgctaaaatcaagtcattgcattgtgttctaattacaagtatgttgtatttgagatttgcttagattgttgtactgctgccatttttattggtgtttgattattggaatggtgccatattgtcactccttctacttgctttaaaaagcagagttagatttttgcacattaaaaaattcagtattaatt

SEQ ID NO: 261 - protein, 111 aa, Homo sapien
MVRTKADSVPGTYRKVVAARAPRKVLGSSTSATNSTSVSSRKAENKYAGGNPVCVRPTPKWQKGIGEFFRLSPKDSEKENQIPEEAGSSGLGKAKRKACPLQPDHTNDEKE

SEQ ID NO: 262 - DNA, 4339 bp, Homo sapien
tgcagcgctagaaaggaattgtctgaccccagcattgcttcctggctcctttcttcctttttcaggagagcatcctgccgaccacagccctccccactgtgagccttcctgacagcctcatcgcgccccctaccgccccatccctggctcacatggatgagcagggctgtgaacacacctcccggactgaggacccgtttatccagcccacggacttcggtccctcagagccgccactgagtgtcccgcagcccttcctccctgtcttcaccatgcccctgctgtctcccagccccgccccaccgcccatctcccccgtgttaccattagttcctcctcctgccactgccctgaaccccccggctccacccaccttccatcagccacagaagtttgctggagtcaacaaagcgccgtctgtcatcacccacacggcctctgccaccctcacccacgatgcccccgccaccacctttagccagagtcagggccttgtgatcaccacccatcaccctgccccgtcagcggccccttgtgggctggcactgtctcctgtcacccggcctccccagccacggttaacttttgtgcaccccaaacctgtatccttgactgggggcaggcctaagcagccccacaaaatagtgcctgctcccaaaccagagcccgtgtccttggtgttgaagaatgcccgtatcgccccagctgccttttcaggccaaccacaagcggtgatcatgacgtcagggcctctgaagagagaagggatgttggcctccaccgtgtcccagtccaacgtggtcattgcgcctgctgccatcgccagggctcctggggtcccggagttccacagcagcatcctggtgacagatctcggccatggcacgagcagcccgcctgcccccgtctcccggctcttcccaagcacagcgcaagaccccctggggaagggcgagcaggtcccgctgcatgggggcagcccccaggtcactgtcacagggcccagtcgggactgcccaaactcagggcaggcctctccgtgtgcatcggagcagagccccagtcctcaatctccccagaacaactgctcagggaaatccgaccccaaaaatgtggctgcactaaagaaccggcagatgaagcacatctcagctgagcagaaaaggcgcttcaacatcaagatgtgcttcgacatgctcaacagcctcatctccaacaattccaagctgaccagtcacgccatcacactgcagaagactgtggagtacatcaccaagctgcagcaggagagaggccagatgcaggaggaggcccggcggctgcgggaggagatcgaggagctcaatgccaccatcatctcctgccagcagctgctccctgccacgggagtccccgttacccggcgccagtttgatcacatgaaagacatgtttgacgaatacgtgaaaacccggaccttgcagaattggaagttctggattttcagcatcatcatcaagccgctgtttgagtcgttcaagggcatggtgtccaccagcagcctggaggagctgcaccggacggcgctctcctggctggaccagcactgctccctgcccatcctcaggccgatggtattgagcacgctgcggcagctgagcacctccacctccatcctcacagacccggcacagctgccagagcaggcgtccaaggctgtcaccaggattggcaagagattgggagagtcctagctgcttagctggcatgtggccgcatgagatgccaggagacccttccctgcccatggagagtaggctgcgccccccagcccttcctgacgctcagcctcggggcctctctccaactctgccggcccaccgtggcatcgggaggccatgctcaggtctgaagcaggtttggggcctgctgacagcaatagcccgcctttgggaaccccttgctgtgaactctctcactcagtgacctcagtcaccaacctcctctgccctcggggcagcccacacaaaagggaagtgctggccgtgctggtcctgccctgctggtggcctgccgggcctggcgccggtgagcggaatcgatgggatgagggtgacagggcctgctcctgtcctgaggcccagccttgtccctcctgccacgtcctgtccacatgcatgcctctgcctgatgccctgctccactctctggtctgcccgtggggcagttggaaggcgtctttctttctcccctcaactctgacagcacccagcccttgtggatggacttgggcttctattcaggcttatgcatggcaggctgccagggggaagtgccttcttcagaggtcctccaggacacatgtgtgcagaaacggtggatgtggaacacacaggaccagaatggaagcgtgtgatgcacggtggctgctctggctgagaggccctgctgggcatgtttcatctgtccccttttagctccacctgacattgcaggatccatggggactcagcccagggccttctcggatgtcacctcaccgctgtggcccttctgccgttcttctccacttggctccagctgcagctgttgacagatcaagcatgtcctgtgggagcttagaaccctgaagttctagtgtctgaaagatcagactccacgtcctgctgtcagccttgtcatcttgtctgatgtctttcagctgggagccccaaaccaggacagttctcggaccaaagatgcccccacactcaaaagtctgtcccgtcttgtgtttggagaaggaaacaatgttggcaggcagcactctgtggtggtcagccctcagagctgtttctaggcatctctcagatcagacagcaaagaatctacccagatctgggctgggtggaggtgtggctgggctgggggccattctgagcctgcagtgagagtttggcccagcctcagtccttgctcttctctggctacctctgcagggagctgcaggggcaagcactctctccagcactcaggaagcccggccgagggtacctcctcgtggaaagaatgcactttaaagctctgctgaggagttcggagcccaggctttcaggcgacctctgccctccctgcctctcctcaccctccctctcttcctgcagggcctgggaagggctttgagggagcctgggagccatgtgaagaggggcacgcctgggctgtcccacagtttagatccagttggaggttctccctggctcctgcaggcctgcggggatctctccccacttcaggcctccggccagctgcctgccctcttgtctgtgcttcagccctgcacaaaagcagcttggtgacaccactcagccacccagagtacgtgtttacaggctttccagatcaccttcctgtggggtgaacgtaatgaggcggggctggtccttggaatttcccctggaaaatggtaacagactccatccttgacccggggatgagcatgaaggcattgtcccaaaggcagaggccaccgtggtaggaattccaccaaggccagaagggaaaaaggaagaacccaccgtgtctggctgtgcgggccctggggagggtcgtgagtgcagcccctctctacttctgtgcctttgtaaaacgtgtagataaccgcagtggttggctgagccaagaactctcctaaatcagtggctttctccccaccccttgctggggagtcatttttaaaaaaatctgtgggatataaaattggcctcctgctgcttcagcctacctctccctctgctgacttaatgtcgtgattctgtttcttcagatatttaaggctgttaggttgtgtgagccttgaagtgtgtgtgtgtgtcccagcgactgtccactgtccaggagatgcatgtctttgtattggagatatttctgtaactcattctcttggtgctcacgattgccatggccatagggccacagtgccgtatctgctgcagacatgattgtttcttgttctagaggttttcttgttttcgaatcttgcctgatgaatccagccagaccaaggggcctagatttgacctctgtcctgggctcctgggccaggtgcaggaacatctgaggccactctgctggccacctccagtgggtgctgaccacaggatgggctttgtttacactcattttcaccctgattcttgcccccactttcataaaagaaacttcaaaatgctgacgctttggagagtaagaaaatcaatcttggctgggcacggtggctcctgcctgtgatcctagcactttgggaggctgaagctgaaggatcacttgagctcaggagttggagaccaaccctggcaacataacaagaccctgtctctac

SEQ ID NO: 263 - protein, 526 aa, Homo sapien
MDEQGCEHTSRTEDPFIQPTDFGPSEPPLSVPQPFLPVFTMPLLSPSPAPPPISPVLPLVPPPATALNPPAPPTFHQPQKFAGVNKAPSVITHTASATLTHDAPATTFSQSQGLVITTHHPAPSAAPCGLALSPVTRPPQPRLTFVHPKPVSLTGGRPKQPHKIVPAPKPEPVSLVLKNARIAPAAFSGQPQAVIMTSGPLKREGMLASTVSQSNVVIAPAAIARAPGVPEFHSSILVTDLGHGTSSPPAPVSRLFPSTAQDPLGKGEQVPLHGGSPQVTVTGPSRDCPNSGQASPCASEQSPSPQSPQNNCSGKSDPKNVAALKNRQMKHISAEQKRRFNIKMCFDMLNSLISNNSKLTSHAITLQKTVEYITKLQQERGQMQEEARRLREEIEELNATIISCQQLLPATGVPVTRRQFDHMKDMFDEYVKTRTLQNWKFWIFSIIIKPLFESFKGMVSTSSLEELHRTALSWLDQHCSLPILRPMVLSTLRQLSTSTSILTDPAQLPEQASKAVTRIGKRLGES

SEQ ID NO: 264 - DNA, 1938 bp, Homo sapien
gactttggtggcaagaggagctggcggagcccagccagtgggcggggccaggggaggggcgggcaggtaggtgcagccactcctgggaggaccctgcgtggccagacggtgctggtgactcgtccacactgctcgcttcggatactccaggcgtctcccgttgcggccgctccctgccttagaggccagccttggacacttgctgcccctttccagcccggattctgggatccttccctctgagccaacatctgggtcctgccttcgacaccaccccaaggcttcctaccttgcgtgcctggagtctgccccaggggcccttgtcctgggccatggcccagaagggggtcctggggcctgggcagctgggggctgtggccattctgctctatcttggattactccggtcggggacaggagcggaaggggcagaagctccctgcggtgtggccccccaagcacgcatcacaggtggcagcagtgcagtcgccggtcagtggccctggcaggtcagcatcacctatgaaggcgtccatgtgtgtggtggctctctcgtgtctgagcagtgggtgctgtcagctgctcactgcttccccagcgagcaccacaaggaagcctatgaggtcaagctgggggcccaccagctagactcctactccgaggacgccaaggtcagcaccctgaaggacatcatcccccaccccagctacctccaggagggctcccagggcgacattgcactcctccaactcagcagacccatcaccttctcccgctacatccggcccatctgcctccctgcagccaacgcctccttccccaacggcctccactgcactgtcactggctggggtcatgtggccccctcagtgagcctcctgacgcccaagccactgcagcaactcgaggtgcctctgatcagtcgtgagacgtgtaactgcctgtacaacatcgacgccaagcctgaggagccgcactttgtccaagaggacatggtgtgtgctggctatgtggaggggggcaaggacgcctgccagggtgactctgggggcccactctcctgccctgtggagggtctctggtacctgacgggcattgtgagctggggagatgcctgtggggcccgcaacaggcctggtgtgtacactctggcctccagctatgcctcctggatccaaagcaaggtgacagaactccagcctcgtgtggtgccccaaacccaggagtcccagcccgacagcaacctctgtggcagccacctggccttcagctctgccccagcccagggcttgctgaggcccatccttttcctgcctctgggcctggctctgggcctcctctccccatggctcagcgagcactgagctggccctacttccaggatggatgcatcacactcaaggacaggagcctggtccttccctgatggcctttggacccagggcctgacttgagccactccttccttcaggactctgcgggaggctggggccccatcttgatctttgagcccattcttctgggtgtgctttttgggaccatcactgagagtcaggagttttactgcctgtagcaatggccagagcctctggcccctcacccaccatggaccagcccattggccgagctcctggggagctcctgggacccttggctatgaaaatgagccctggctcccacctgtttctggaagactgctcccggcccgcctgcccagactgatgagcacatctctctgccctctccctgtgttctgggctggggccacctttgtgcagcttcgaggacaggaaaggccccaatcttgcccactggccgctgagcgcccccgagccctgactcctggactccggaggactgagcccccaccggaactgggctggcgcttggatctggggtgggagtaacagggcagaaatgattaaaatgtttgagcac

SEQ ID NO: 265 - protein, 343 aa, Homo sapien
MAQKGVLGPGQLGAVAILLYLGLLRSGTGAEGAEAPCGVAPQARITGGSSAVAGQWPWQVSITYEGVHVCGGSLVSEQWVLSAAHCFPSEHHKEAYEVKLGAHQLDSYSEDAKVSTLKDIIPHPSYLQEGSQGDIALLQLSRPITFSRYIRPICLPAANASFPNGLHCTVTGWGHVAPSVSLLTPKPLQQLEVPLISRETCNCLYNIDAKPEEPHFVQEDMVCAGYVEGGKDACQGDSGGPLSCPVEGLWYLTGIVSWGDACGARNRPGVYTLASSYASWIQSKVTELQPRVVPQTQESQPDSNLCGSHLAFSSAPAQGLLRPILFLPLGLALGLLSPWLSEH

SEQ ID NO: 266 - DNA, 4131 bp, Homo sapien
ctgggccaggcgccggggcaggaagggaggcggccgccgtggccattcttaaaggcgcccgagtgtaggcgacaggccgctgacggcgggaaggaaaatgagtgagtctttggttgtttgtgatgttgccgaagatttagtggaaaagctgagaaagtttcgttttcgcaaagaaacgaacaacgctgctattataatgaagattgacaaggataaacgcctggtggtactggatgaggagcttgagggcatttcaccagatgaacttaaagatgaactacctgaacgacaacctcgcttcattgtgtatagttataaatatcaacatgatgatggaagagtttcatatcctctgtgctttattttctccagtcctgttggatgtaagcctgaacaacagatgatgtatgctggaagtaagaataagctagtccagacagctgaactaaccaaggtatttgaaataagaaataccgaagacctaactgaagaatggttacgtgagaaacttggattttttcactaatgtgaacttctgtgtttctaaagtatttatgtattaacctgaccatactggaatcagacataaatacttatttatgcctaaaaatgcactgttacttacagtttgtttcctgcagtaaagaaaaattcttcatttgtgcaaaatttgaacaaagaggaaatcatcttcatagtaatgaaactttgtaaagtgtttccttatattggtaattgttaggtggactacttttctccagggactttttgcactcttgtgactaatttctataacttatggttcggaatttgttactatttacagacaccattggaaagtggatatattagattgtgagagacaacagttgcctccttttgacaaatactggatattagcagtttatttatgaaaatagcgtattatcacttgtcaaatcattgaaattcatttggggtcaaagacttgagtgacccagtattgagccatgaataatttagtgtaacctgtattacaagtacattgatgaattctgtatcttctttggtttcctgtatctttttaatcaagtctagaaactatgttcatcagtcactcatttttaaggtcgggagttagattttatgatagaattatgactgttagcttttctccttatagcatcttagtcttagaaattggtgggttgtaataatcaagggcttcattccttttatgtcatttctagacagttttgaatctaggttaataacactttatttataaagcacctcaatgtcctgtgaacactaattattttaaatgtgttaatactgtgcctttgatttgttagctttaaagttagtttaagacttttacactgccagtattccacatttggtgaaattaatacttttttaaagggtccaaataaaataattttctaatgtgtatatctgaaatttgtaataaaatcaacttcatattttaaaaattccaactatctgcttgcattggtgtaatatatggcagtcgagagttataattttgggtatacttgtggttagttttgtgccataggaaaaaattatcttaaaactttggccatagttaataacattaacacttcaatagcaatcacatcttatatcctaaatgtcagaagatattctgaactggatgcctgaatagttaactaaaccagtcttggttagatgatggtactcttggcataaagcgtaggattctgatatttggcatacttgtaaaaacaaatacataagtaaccattgaacattaatttgataataggtctagagactctaaaaactaaccaaacttggtgagtgtattcttatattaagaatatcttagtcatctcaaaactagcaaaatttaaattttggcatgttttccattcatatgttctttgcattttatttttgaggtttctgtgagaagtaaagatagttggaatttttgcgatattgaatagaacatcttctgttcccaacactgtttggcttcactaatttagaagtcaggaagcaatagaaagttggagatgaggaagtgctagagtaggtgtttgttttggttcttggagggaaaagattctttattccaatttccagagagaagagaaaactcacccaggaagtttaaaaattctttaaacaggtattttgatattggagaataacatgcatataattctgtaggaatgcacatgtaatccaagtgagtggagagtgtttttaatgtttttgaatgaaggaaatgaggttttgtttcacctgttttgcagcagtaagagaaactagtgctgcaagaatgtattttttaatgaagttccttattttgtcttgcatgttttagttttgcttatttttaaatttggaggtcctccataatgtcagataatattgacctgccatacgttagcactcttagttccgctactgtctttaacaggagcaaagagctgtgataaaccatgcttttttgagcttgtctgactcctaattaataacatgtttttggcaagacaacagattgaggttagaggatcagtaggacatttttattccatctgtcctatggggaaatttacaaatcccgtgctctaaaatgttctcaaacatttatatagatttccctttcatcttactaaattttgcattgttcttttcaagtatgtttcgtatttactgtctttttttctgccatttcccaaataataactccagatttcataattccagtttttacattccgttatctttctggtacaaccattcccattcagccttaaatctgagtcctttttagcagcaacttttttcctgggatcctccttcgtggtcttctaagtcagtgttagttttgaaatttttggccctgcataagttctgcatagcatctaatgtcaaaatagaaccaactggtaatcacagtattatttagtgtggtttccatgacaacaaaaatacatacgaagaaaacttctcaggttactatgctgaaattccaaaatgtctgagttttgaatagtgatcactttgttctggtattgacgcaattatattaggaaaaaagttggttgactgtttttgtttaattgacttctaaaatgttcaaattgtctagttctaaaagtttactaaatgcctagtgcagttaaacatactcttgtttaagtgtgtgttgctaaattttttactgtcattactaaataatctgtgtggcaaaatgtgtgtcagcacttttccctccttttttatctcctattttcaggagtcaaatgtagccataaactgtatccttgtctgacactttagctaaaaatttccagttaggggagtttattgccaaattaaatttggctgttccccccaacccatatagatattaaggaaggtgtacttaaaaaatgtttggactgcttttaaaacctgagcaatgtcattaatccatatgtggactagtgatgaatagatattttcataagagtttaaatgactgatatttggtggaagtagagagtaactcaatattctatcaattcaagtattcttactatggttgcctttccctatttgttcaatagactgataatactggtatttatagagtttgagccattacaacttttgtgaggatgtgtttcaaacatttctggacaaatcttattttgtatttctggaagaatgtagtaatcttctagaccgcttaaaaccaatgctcccaagctgaatattcttgagcaaatttgttttttattatgccatttgacatttcaaatcagtgctcatatacagtaaacttgtgatagaaattgtattttattgctttttggattataattcatataaatataattacttgaatattgtttgagatcattaacatgccagggcagttcccactgatttagatggtccaagataatctcattcaggaggcttgaaacattaatggtttagtcttgtgaattttaacagttctctgtcatcgtttaacaaaaccaacaactgacacaactccttaagctgtggtttcagtctctgctagttcatattgcatgtttattttggacagtcttttgttaagcatggtgcttgtactggtttaaataaaatgttaacatt

SEQ ID NO: 267 - protein, 142 aa, Homo sapien
MSESLVVCDVAEDLVEKLRKFRFRKETNNAAIIMKIDKDKRLVVLDEELEGISPDELKDELPERQPRFIVYSYKYQHDDGRVSYPLCFIFSSPVGCKPEQQMMYAGSKNKLVQTAELTKVFEIRNTEDLTEEWLREKLGFFH

SEQ ID NO: 268 - DNA, 5925 bp, Homo sapien
ccggctgcctctgctgcagttcagagcaacttcaggagcttcccagccgagagcttcaggacgcctttcctgtcccactggcccagttgccacaacaaacaacagagaagacggtgaccatgggggatgtgaagctggttgcctcgtcacacatttccaaaacctccctcagtgtggatccctcaagagttgactccatgcccctgacagaggcccctgctttcattttgccccctcggaacctctgcatcaaagaaggagccaccgccaagttcgaagggcgggtccggggttacccagagccccaggtgacatggcacagaaacgggcaacccatcaccagcgggggccgcttcctgctggattgcggcatccgggggactttcagccttgtgattcatgctgtccatgaggaggacaggggaaagtatacctgtgaagccaccaatggcagtggtgctcgccaggtgacagtggagttgacagtagaaggaagttttgcgaagcagcttggtcagcctgttgtttccaaaaccttaggggatagattttcagcttcagcagtggagacccgtcctagcatctggggggagtgcccaccaaagtttgctaccaagctgggccgagttgtggtcaaagaaggacagatgggacgattctcctgcaagatcactggccggccccaaccgcaggtcacctggctcaagggaaatgttccactgcagccgagtgcccgtgtgtctgtgtctgagaagaacggcatgcaggttctggaaatccatggagtcaaccaagatgacgtgggagtgtacacgtgcctggtggtgaacgggtcggggaaggcctcgatgtcagctgaactttccatccaaggtttggacagtgccaataggtcatttgtgagagaaacaaaagccaccaattcagatgtcaggaaagaggtgaccaatgtaatctcaaaggagtcgaagctggacagtctggaggctgcagccaaaagcaagaactgctccagcccccagagaggtggctccccaccctgggctgcaaacagccagcctcagcccccaagggagtccaagctggagtcatgcaaggactcgcccagaacggccccgcagaccccggtccttcagaagacttccagctccatcaccctgcaggccgcaagagttcagccggaaccaagagcaccaggcctgggggtcctatcaccttctggagaagagaggaagaggccagctcctccccgtccagccaccttccccaccaggcagcctggcctggggagccaagatgttgtgagcaaggctgctaacaggagaatccccatggagggccagagggattcagcattccccaaatttgagagcaagccccaaagccaggaggtcaaggaaaatcaaactgtcaagttcagatgtgaagtttccgggattccaaagcctgaagtggcctggttcctggaaggcacccccgtgaggagacaggaaggcagcattgaggtttatgaagatgctggctcccattacctctgcctgctgaaagcccggaccagggacagtgggacatacagctgcactgcttccaacgcccaaggccaggtgtcctgtagctggaccctccaagtggaaaggcttgccgtgatggaggtggccccctccttctccagtgtcctgaaggactgcgctgttattgagggccaggattttgtgctgcagtgctccgtacgggggaccccagtgccccggatcacttggctgctgaatgggcagcccatccagtacgctcgctccacctgcgaggccggcgtggctgagctccacatccaggatgccctgccggaggaccatggcacctacacctgcctagctgagaatgccttggggcaggtgtcctgcagcgcctgggtcaccgtccatgaaaagaagagtagcaggaagagtgagtaccttctgcctgtggctcccagcaagcccactgcacccatcttcctgcagggcctctctgatctcaaagtcatggatggaagccaggtcactatgactgtccaagtgtcagggaatccaccccctgaagtcatctggctgcacaatgggaatgagatccaagagtcagaggacttccactttgaacagagaggaactcagcacagcctttggatccaggaagtgttcccggaggacacgggcacgtacacctgcgaggcctggaacagcgctggagaggtccgcacccaggccgtgctcacggtacaagagcctcacgatggcacccagccctggttcatcagtaagcctcgctcagtgacagcctccctgggccagagtgtcctcatctcctgcgccatagctggtgacccctttcctaccgtgcactggctcagagatggcaaagccctctgcaaagacactggccacttcgaggtgcttcagaatgaggacgtgttcaccctggttctaaagaaggtgcagccctggcatgccggccagtatgagatcctgctcaagaaccgggttggcgaatgcagttgccaggtgtcactgatgctacagaacagctctgccagagcccttccacgggggagggagcctgccagctgcgaggacctctgtggtggaggagttggtgctgatggtggtggtagtgaccgctatgggtccctgaggcctggctggccagcaagagggcagggttggctagaggaggaagacggcgaggacgtgcgaggggtgctgaagaggcgcgtggagacgaggcagcacactgaggaggcgatccgccagcaggaggtggagcagctggacttccgagacctcctggggaagaaggtgagtacaaagaccctatcggaagacgacctgaaggagatcccagccgagcagatggatttccgtgccaacctgcagcggcaagtgaagccaaagactgtgtctgaggaagagaggaaggtgcacagcccccagcaggtcgattttcgctctgtcctggccaagaaggggacttccaagacccccgtgcctgagaaggtgccaccgccaaaacctgccaccccggattttcgctcagtgctgggtggcaagaagaaattaccagcagagaatggcagcagcagtgccgagaccctgaatgccaaggcagtggagagttccaagcccctgagcaatgcacagccttcagggcccttgaaacccgtgggcaacgccaagcctgctgagaccctgaagccaatgggcaacgccaagcctgccgagaccctgaagcccatgggcaatgccaagcctgatgagaacctgaaatccgctagcaaagaagaactcaagaaagacgttaagaatgatgtgaactgcaagagaggccatgcagggaccacagataatgaaaagagatcagagagccaggggacagccccagccttcaagcagaagctgcaagatgttcatgtggcagagggcaagaagctgctgctccagtgccaggtgtcttctgaccccccagccaccatcatctggacgctgaacggaaagaccctcaagaccaccaagttcatcatcctctcccaggaaggctcactctgctccgtctccatcgagaaggcactgcctgaggacagaggcttatacaagtgtgtagccaagaatgacgctggccaggcggagtgctcctgccaagtcaccgtggatgatgctccagccagtgagaacaccaaggccccagagatgaaatcccggaggcccaagagctctcttcctcccgtgctaggaactgagagtgatgcgactgtgaaaaagaaacctgcccccaagacacctccgaaggcagcaatgccccctcagatcatccagttccctgaggaccagaaggtacgcgcaggagagtcagtggagctgtttggcaaagtgacaggcactcagcccatcacctgtacctggatgaagttccgaaagcagatccaggaaagcgagcacatgaaggtggagaacagcgagaatggcagcaagctcaccatcctggccgcgcgccaggagcactgcggctgctacacactgctggtggagaacaagctgggcagcaggcaggcccaggtcaacctcactgtcgtggataagccagaccccccagctggcacaccttgtgcctctgacattcggagctcctcactgaccctgtcctggtatggctcctcatatgatgggggcagtgctgtacagtcctacagcatcgagatctgggactcagccaacaagacgtggaaggaactagccacatgccgcagcacctctttcaacgtccaggacctgctgcctgaccacgaatataagttccgtgtacgtgcaatcaacgtgtatggaaccagtgagccaagccaggagtctgaactcacaacggtaggagagaaacctgaagagccgaaggatgaagtggaggtgtcagatgatgatgagaaggagcccgaggttgattaccggacagtgacaatcaatactgaacaaaaagtatctgacttctacgacattgaggagagattaggatctgggaaatttggacaggtctttcgacttgtagaaaagaaaactcgaaaagtctgggcagggaagttcttcaaggcatattcagcaaaagagaaagagaatatccggcaggagattagcatcatgaactgcctccaccaccctaagctggtccagtgtgtggatgcctttgaagaaaaggccaacatcgtcatggtcctggagatcgtgtcaggaggggagctgtttgagcgcatcattgacgaggactttgagctgacggagcgtgagtgcatcaagtacatgcggcagatctcggagggagtggagtacatccacaagcagggcatcgtgcacctggacctcaagccggagaacatcatgtgtgtcaacaagacgggcaccaggatcaagctcatcgactttggtctggccaggaggctggagaatgcggggtctctgaaggtcctctttggcaccccagaatttgtggctcctgaagtgatcaactatgagcccatcggctacgccacagacatgtggagcatcggggtcatctgctacatcctagtcagtggcctttcccccttcatgggagacaacgataacgaaaccttggccaacgttacctcagccacctgggacttcgacgacgaggcattcgatgagatctccgacgatgccaaggatttcatcagcaatctgctgaagaaagatatgaaaaaccgcctggactgcacgcagtgccttcagcatccatggctaatgaaagataccaagaacatggaggccaagaaactctccaaggaccggatgaagaagtacatggcaagaaggaaatggcagaaaacgggcaatgctgtgagagccattggaagactgtcctctatggcaatgatctcagggctcagtggcaggaaatcctcaacagggtcaccaaccagcccgctcaatgcagaaaaactagaatctgaagaagatgtgtcccaagctttccttgaggctgttgctgaggaaaagcctcatgtaaaaccctatttctctaagaccattcgcgatttagaagttgtggagggaagtgctgctagatttgactgcaagattgaaggatacccagaccccgaggttgtctggttcaaagatgaccagtcaatcagggagtcccgccacttccagatagactacgatgaggacgggaactgctctttaattattagtgatgtttgcggggatgacgatgccaagtacacctgcaaggctgtcaacagtcttggagaagccacctgcacagcagagctcattgtggaaacgatggaggaaggtgaaggggaaggggaagaggaagaagagtgaaacaaagccagagaaaagcagtttctaagtcatattaaaaggactatttctctaaaactca

SEQ ID NO: 269 - protein, 1914 aa, Homo sapien
MGDVKLVASSHISKTSLSVDPSRVDSMPLTEAPAFILPPRNLCIKEGATAKFEGRVRGYPEPQVTWHRNGQPITSGGRFLLDCGIRGTFSLVIHAVHEEDRGKYTCEATNGSGARQVTVELTVEGSFAKQLGQPVVSKTLGDRFSASAVETRPSIWGECPPKFATKLGRVVVKEGQMGRFSCKITGRPQPQVTWLKGNVPLQPSARVSVSEKNGMQVLEIHGVNQDDVGVYTCLVVNGSGKASMSAELSIQGLDSANRSFVRETKATNSDVRKEVTNVISKESKLDSLEAAAKSKNCSSPQRGGSPPWAANSQPQPPRESKLESCKDSPRTAPQTPVLQKTSSSITLQAARVQPEPRAPGLGVLSPSGEERKRPAPPRPATFPTRQPGLGSQDVVSKAANRRIPMEGQRDSAFPKFESKPQSQEVKENQTVKFRCEVSGIPKPEVAWFLEGTPVRRQEGSIEVYEDAGSHYLCLLKARTRDSGTYSCTASNAQGQVSCSWTLQVERLAVMEVAPSFSSVLKDCAVIEGQDFVLQCSVRGTPVPRITWLLNGQPIQYARSTCEAGVAELHIQDALPEDHGTYTCLAENALGQVSCSAWVTVHEKKSSRKSEYLLPVAPSKPTAPIFLQGLSDLKVMDGSQVTMTVQVSGNPPPEVIWLHNGNEIQESEDFHFEQRGTQHSLWIQEVFPEDTGTYTCEAWNSAGEVRTQAVLTVQEPHDGTQPWFISKPRSVTASLGQSVLISCAIAGDPFPTVHWLRDGKALCKDTGHFEVLQNEDVFTLVLKKVQPWHAGQYEILLKNRVGECSCQVSLMLQNSSARALPRGREPASCEDLCGGGVGADGGGSDRYGSLRPGWPARGQGWLEEEDGEDVRGVLKRRVETRQHTEEAIRQQEVEQLDFRDLLGKKVSTKTLSEDDLKEIPAEQMDFRANLQRQVKPKTVSEEERKVHSPQQVDFRSVLAKKGTSKTPVPEKVPPPKPATPDFRSVLGGKKKLPAENGSSSAETLNAKAVESSKPLSNAQPSGPLKPVGNAKPAETLKPMGNAKPAETLKPMGNAKPDENLKSASKEELKKDVKNDVNCKRGHAGTTDNEKRSESQGTAPAFKQKLQDVHVAEGKKLLLQCQVSSDPPATIIWTLNGKTLKTTKFIILSQEGSLCSVSIEKALPEDRGLYKCVAKNDAGQAECSCQVTVDDAPASENTKAPEMKSRRPKSSLPPVLGTESDATVKKKPAPKTPPKAAMPPQIIQFPEDQKVRAGESVELFGKVTGTQPITCTWMKFRKQIQESEHMKVENSENGSKLTILAARQEHCGCYTLLVENKLGSRQAQVNLTVVDKPDPPAGTPCASDIRSSSLTLSWYGSSYDGGSAVQSYSIEIWDSANKTWKELATCRSTSFNVQDLLPDHEYKFRVRAINVYGTSEPSQESELTTVGEKPEEPKDEVEVSDDDEKEPEVDYRTVTINTEQKVSDFYDIEERLGSGKFGQVFRLVEKKTRKVWAGKFFKAYSAKEKENIRQEISIMNCLHHPKLVQCVDAFEEKANIVMVLEIVSGGELFERIIDEDFELTERECIKYMRQISEGVEYIHKQGIVHLDLKPENIMCVNKTGTRIKLIDFGLARRLENAGSLKVLFGTPEFVAPEVINYEPIGYATDMWSIGVICYILVSGLSPFMGDNDNETLANVTSATWDFDDEAFDEISDDAKDFISNLLKKDMKNRLDCTQCLQHPWLMKDTKNMEAKKLSKDRMKKYMARRKWQKTGNAVRAIGRLSSMAMISGLSGRKSSTGSPTSPLNAEKLESEEDVSQAFLEAVAEEKPHVKPYFSKTIRDLEVVEGSAARFDCKIEGYPDPEVVWFKDDQSIRESRHFQIDYDEDGNCSLIISDVCGDDDAKYTCKAVNSLGEATCTAELIVETMEEGEGEGEEEEE

SEQ ID NO: 270 - DNA, 8901 bp, Homo sapien
cacttactacagatgggtgctaatgtccacgctcgtgatgatggaggtctcatcccgcttcataatgcctgttcttttggccatgctgaggttgtgagtctgttattgtgccaaggagctgatccaaatgccagggataactggaactatacacctctgcatgaagctgctattaaagggaagatcgatgtgtgcattgtgctgctgcagcacggagctgacccaaacattcggaacactgatgggaaatcagccctggacctggcagatccttcagcaaaagctgtccttacaggtgaatacaagaaagacgaactcctagaagctgctaggagtggtaatgaagaaaaactaatggctttactgactcctctaaatgtgaattgccatgcaagtgatgggcgaaagtcgactcctttacatctagcagcgggctacaacagagttcgaatagttcagcttcttcttcagcatggtgctgatgttcatgcaaaagacaaaggtggacttgtgcctcttcataatgcatgttcatatggacattatgaagtcacagaactgctactaaagcatggagcttgtgttaatgccatggatctctggcagtttactccactgcacgaggctgcttccaagaaccgtgtagaagtctgctctttgttacttagccatggcgctgatcctacgttagtcaactgccatggcaaaagtgctgtggatatggctccaactccggagcttagggagagattgacttatgaatttaaaggtcattctttactacaagcagccagagaagcagacttagctaaagttaaaaaaacactcgctctggaaatcattaatttcaaacaaccgcagtctcatgaaacagcactgcactgtgctgtggcctctctgcatcccaaacgtaaacaagtgacagaattgttacttagaaaaggagcaaatgttaatgaaaaaaataaagatttcatgactcccctgcatgttgcagccgaaagagcccataatgatgtcatggaagttctgcataagcatggcgccaagatgaatgcactggacacccttggtcagactgctttgcatagagccgccctagcaggccacctgcagacctgccgcctcctgctgagttacggctctgacccctccatcatctccttacaaggcttcacagcagcacagatgggcaatgaagcagtgcagcagattctgagtgagagtacacctatacgtacttctgatgttgattatcgactcttagaggcatctaaagctggagacttggaaactgtgaagcaactttgcagctctcaaaatgtgaattgtagagacttagagggccggcattccacgcccttacacttcgcagcaggctacaaccgcgtgtctgttgtagagtacctgctacaccacggtgccgatgtccatgccaaagacaagggtggcttggtgccccttcataatgcctgttcatatggacactatgaggtggctgagcttttagtaaggcatggggcttctgtcaatgtggcggacttatggaaatttacccctctccatgaagcagcagctaaaggaaagtatgaaatctgcaagctccttttaaaacatggagcagatccaactaaaaagaacagagatggaaatacacctttggatttggtaaaggaaggagacacagatattcaggacttactgaaaggggatgctgctttgttggatgctgccaagaagggctgcctggcaagagtgcagaagctctgtaccccagagaatatcaactgcagagacacccagggcagaaattcaacccctctgcacctggcagcaggctataataacctggaagtagctgaatatcttctagagcatggagctgatgttaatgcccaggacaagggtggtttaattcctcttcataatgcggcatcttatgggcatgttgacatagcggctttattgataaaatacaacacgtgtgtaaatgcaacagataagtgggcgtttactcccctccatgaagcagcccagaaaggaaggacgcagctgtgcgccctcctcctagcgcatggtgcagaccccaccatgaagaaccaggaaggccagacgcctctggatctggcaacagctgacgatatcagagctttgctgatagatgccatgcccccagaggccttacctacctgttttaaacctcaggctactgtagtgagtgcctctctgatctcaccagcatccaccccctcctgcctctcggctgccagcagcatagacaacctcactggccctttagcagagttggccgtaggaggagcctccaatgcaggggatggcgccgcgggaacagaaaggaaggaaggagaagttgctggtcttgacatgaatatcagccaatttctaaaaagccttggccttgaacaccttcgggatatctttgaaacagaacagattacactagatgtgttggctgatatgggtcatgaagagttgaaagaaataggcatcaatgcatatgggcaccgccacaaattaatcaaaggagtagaaagactcttaggtggacaacaaggcaccaatccttatttgacttttcactgtgttaatcagggaacgattttgctggatcttgctccagaagataaagaatatcagtcagtggaagaagagatgcaaagtactattcgagaacacagagatggtggtaatgctggcggcatcttcaacagatacaatgtcattcgaattcaaaaagttgtcaacaagaagttgagggagcggttctgccaccgacagaaggaagtgtctgaggagaatcacaaccatcacaatgagcgcatgttgtttcatggttctcctttcattaatgccattattcataaagggtttgatgagcgacatgcatacataggaggaatgtttggggccgggatttattttgctgaaaactcctcaaaaagcaaccaatatgtttatggaattggaggaggaacaggctgccctacacacaaggacaggtcatgctatatatgtcacagacaaatgctcttctgtagagtgacccttgggaaatcctttctgcagtttagcaccatgaaaatggcccacgcgcctccagggcaccactcagtcattggtagaccgagcgtcaatgggctggcatatgctgaatatgtcatctacagaggagaacaggcatacccagagtatcttatcacttaccagatcatgaagccagaagccccttcccagaccgcaacagccgcagagcagaagacctagtgaatgcctgctggtgaaggccagatcagatttcaacctgggactggattacagaggattgtttctaataacaacatcaatattctagaagtccctgacagcctagaaataagctgtttgtcttctataaagcattgctatagtgatgaatagtatgagtaactgatacatactcaactgctactgttccctttgaggaaatgtttacaggggcggccttttaacatatctcaggctcattttcattgcaattatccatttctaaaacaagattgcttcgatctagacttggaaatggaaaataagaaaaccaatgctttttcaaatgttcacaattcacacactacatttgttttgttatgcatgacgtgtctataacaaatatacacatacgacaggcaacaagcttgtttttgatttgccagacatgcatcattggctattgtttgtttgttttttgtttttttgtgttttttgggttactttgaaaatgagccagagccttcttgaggatattttgcacaaagtcacgctgacaaaatcattagcagtgcaacccaagcttctggctgagcaagattcagtttccactttttaaaatttttttattttgctctgtagctgcacttctcgttatcataaattgagatgaaaaggaaaaaacatcaagttttagtacctttttatgaattggcctatcttacaagagaagggcacaaacaccaacctgacttaggaacgcctaaattcagagaagtcaaagccggtgaaggccacttgctctttccaacacaagcctgccacagaggtcttcgggacagtactggagatgcaggttgacacgggcttgagttccaaggtgaaaaaactggggaggctgtgaaggaagagctgcattaaggagggtgaggagcgtgtggttctgtatcatggcagccccaatggatccaggggatgcctccaaaaaatacatgcttcccttcccttaatctgtactgttgggattgttacccctccaaattagctgccttatttcaaaagtcagtgaaattactgcacttgatgagggtcacaaaaataccacttgattgtttctttagttgagaatgctgggattcagactcgaatagtggatagatacacacaaatgcaaggacttttttgtttactccagatttggggtttattttgagtggcatgcttcaaatagttcataaagatccttgcattaaatttctgaaccatttcttcaaacttcttagtgtgtttagacaaggagaacaaaaattgaaaccaaagccctttctgttattttttcaatgaaggtgagaaagaaataccatacaattttctttgtgaaattactgtttattttcatcaacatttaccaagtgccattgacatttataaaaaaaatgatcctttatagttcttacacttgcccttttcaccttaactgaatatgaattgagtgcactaacttatttacttgatatactgtgcatctactctgctttgaagcgaaagaaatataaacacgaggaggaataggaaagacagtgtgacacaaacttgccattgcaattcaaagccctgaaaacgatgggtttaatgcaaggtgattaagctgtgacctcctttaatctcctgaagcaaaataaaatggttacatgcaaaacttctagaaatacactcttaaaatatatacattttgctttgattttggcttcaacccagtgctggaactaggcatccagactagtttgaatgtttgtagctgaatttttatgggtcctcaaaattaaatcgagaattagcctcagttgttgcttcttttgaagtttcagtgacccaagctgggtgtttgtgtcttggctacttgtttaatagcactagaattccaggtgaagctttgagagttgatattcattaagagggctttttttccccttctttccttctcttttgctgtaacaaagggttgaagaaattgccatctgtgtagttttcagtagctgtcaagtgtgtcttacttaccttcccccagacgtagtttaaaatggtaaacacagctgtgatttttagttaagtaaaagagttaatatgatatagatatggaaagctttatggcttcattaaaaagataaaccactacctaactgtggttgtatgttgtttccatcatactaactagatgaatggatgcgccagttttcatcttggtccttacacttgagaagttaaactgtggttcagtatttaaactgccagtgttatacgtctcatgctctgtgtgccaggtgaaggtactgtgtaaggaagacatttgcggtgcttcttgtcctataatgattcaagtatatagtagttcttgaaagagtgtgcatatattactcatctgcttaagagagtgggttaatggatatatcagaggagccaaatacatttttttcagaacttgaaaaccaaaggtcatcatgagtgcactcaaaagttaggacaagtttattacatttgggattttcatctgtagccgtatgaagaaccctttccaatataaaagcatggcattaaattaggctgaagtcttttattttttgtatatgtactatatagaaatactagcaagttaggatcatccaatatggcctaccccgaaatggcccctctgtttccctaaccacatggaagaaagaatctgaacgtctccaccggctctacccgagttccaaaactaaagggcttctccagacctgatggttccagtttacctgctgttggcctgctggatacttgactcaggcataaattaagtgccctggtcccgaactttctcccagtatttgacctccttccctctttcctaaattactagtctggaattaaaattagctccagcaatgacctttgactccattcattttctcctcatcttgggtcttaaaaaaggagaccagatacctcctagcttttgtatcacaaccaggaatgggtattaggcctcatgcgctttgctcagaacactgccgctttgttaacaaatgacagcatggaacccagagttttgattcgatgcaaaataacagcagtgcaaccaggattcttgttttccttttccttcttggagtttggaatttctagcttttcaagcagcataagtagaatcaacattaggatgttttcatgaaatagcatccttatacttctttgagcttgatgttagtggctagactgatttccctttgctctcaaaatacaaagtgcattgaagtatacagagaaatgcctgaatatggcaagcaaataatgtagattaacattctattattgtatccgttttacaaaaaataaaattttgatatatgccggagaacggcattagaatgcaataagttgtctaggtttttctgtttcagtgtctctcccaatggcacgaagggttattgggcattgtccccacccccgcctttttaacatgtgcactatctggattcctgtaaatggccttgcaaacagaagtggtgtgtattttcaagcacctttcccccattgtatccgaatccctcttgtgtgatatctgtgacaaataccattcttcttgtgttttctgttgggactaattgtctcacgtaaagctatagaccttactaatttggcaggtattcaaaactgccattaagataggatttcatgtcagatacgtatttaaagagtaaagtcaaatttgtttaatgtcagatcagtgacagaagtgaaaagaaagtaattgtgaaagtgatgtttgagctattgtacacatctagcatatggaaagcaaatgcactcgaaaactactattctagaacatgaggcttcttcagcaacttgtgcactctgccattaataaattaaatttttcccctctagaaagccttaactatggcggaaactttttaaccttttatattttaataaataaaacattgtagtcccatttcttagtgtttgaaaggtgtgtcagtgagtcggccatgtctccatgtgtttcagacctgttcatcttattttatgatggtatatttcataagtaatattcccttacatgcaatggagctgattaaaattaatccatttcaatttctccatattggaacttcctcagctaccagatttctggtttggagaagtgctggaaagatttcaaagcctattcagttgtgtatgtggggatacgacagcaactgtgataccttgtagaatatgagtgatatgcaagctgtgttttttaattgttttaaaatgtaaattatggttatgctaaagtgaaaacctagaggaagctaatgattttatatactttgcacgaccaaatatggtcgtagtatgacgagttttatacattgccagagagttctgcctcctctgaaataacattcgcactgtagattgcatttcggcttttcctcctttcacattcttttttgctttacacttcacgtcttcgcacctgccctacctcccatcctttcaaagaggtttctttcacgttccagaattcagattgttctgtgatttcttttacatcagtctacccatttctgcaggcagccctgaaagcccttgtgttgattcagagtgtttgcagagaaatgcagttgaaccctggtagtggggtgtccctcacacacccgcgcacccctcccaaagttcaggatgaaaggctagaaaacccattcaaagttaggaaagaacacagatctttgaggccgatagcctagacctagaagatgaccttgagtatgtaaacattgtctccgtgacacaaaacactgaaactcttcatgtgcatataacacctgcttctgctcccattgtttcaagctcatcttatctttgtagtagtaatgtttgtctttgatacctacaaactaaaaaggtacttttatcaaggtttctcaaaacatttacaaaaccagctttgagaaaatgttatgttgcctggcaacagcactcggagtagtaattgtgttttctcattgtgatgttggtctgtgtgagcaaccagtgtagtgactctttggttcattattcgtgttgtttttatttttagtctctgtgtgacccaacagtggcaggggttacaaccccctctcctttcttttttgtatttatctatttgtaggattgtcagatcaagtacaagatgcccagttaagtttgaatttcagagaaacaatttcacgttaagaatgtttcatgcaatatttggcatatatttacagtaaaagcattcattatttgtctgaaattcaaatttaactgagcatgctggtttttctcattgtttggtttttctaaatctggcaatcctacagctgtggtcatgggaaatcacctacagcatgttaaagtcctctagtcatcatctcgtcacctgaaatggaagtcctttttccctcaccctccacttctttccaaaggagggcatcaaggaacttaacctgcctgcctggtgggtttctatttaagacatctttgtgattatatttaacctgcaattgtgctttggcttaatgtctagctcactgtacttgtaaatgattaatattcaataaaaccatttttaaagtaaaaaaa

SEQ ID NO: 271 - DNA, 626 bp, Homo sapien
tcttgactcacgccttcgccgtagcatctttcgcagcggaccgaagagaagaaaagtaggccagagccgaactctcttcctgccaagatgtctattggtgtgccgattaaagtactgcatgaggccgagggccacattgtgacatgtgagacgaacaccggtgaggtatatcgggggaagctcattgaagcagaggacaacatgaactgccagatgtccaacatcacagtcacatacagagatggccgagtggcacagctggagcaggtatacatccgtggcagcaaaatccgctttctgattttgcctgacatgctgaagaacgcacccatgttaaagagcatgaaaaataaaaaccaaggctcaggggctggccgaggaaaagctgccattctcaaggcccaagtggccgcaagaggaagaggacgtggaatgggacgtggaaacatctttcaaaagcgaagataattttctaagttgaacagaactttgtccttttttctttcaggttatctgagttcattggagtgggtgcttgtgcatatatctaggtatcttttgccatctttctctttagatcaggggaaatgtttaagctaaataaatctggggggttttttgttctg

SEQ ID NO: 272 - protein, 126 aa, Homo sapien
MSIGVPIKVLHEAEGHIVTCETNTGEVYRGKLIEAEDNMNCQMSNITVTYRDGRVAQLEQVYIRGSKIRFLILPDMLKNAPMLKSMKNKNQGSGAGRGKAAILKAQVAARGRGRGMGRGNIFQKRR

SEQ ID NO: 273 - DNA, 969 bp, Homo sapien
agctttggggttgtccctggacttgtcttggttccagaacctgacgacccggcgacggcgacgtctcttttgactaaaagacagtgtccagtgctccagcctaggagtctacggggaccgcctcccgcgccgccaccatgcccaacttctctggcaactggaaaatcatccgatcggaaaacttcgaggaattgctcaaagtgctgggggtgaatgtgatgctgaggaagattgctgtggctgcagcgtccaagccagcagtggagatcaaacaggagggagacactttctacatcaaaacctccaccaccgtgcgcaccacagagattaacttcaaggttggggaggagtttgaggagcagactgtggatgggaggccctgtaagagcctggtgaaatgggagagtgagaataaaatggtctgtgagcagaagctcctgaagggagagggccccaagacctcgtggaccagagaactgaccaacgatggggaactgatcctgaccatgacggcggatgacgttgtgtgcaccagggtctacgtccgagagtgagtggccacaggtagaaccgcggccgaagcccaccactggccatgctcaccgccctgcttcactgccccctccgtcccaccccctccttctaggatagcgctccccttaccccagtcacttctgggggtcactgggatgcctcttgcagggtcttgctttctttgacctcttctctcctcccctacaccaacaaagaggaatggctgcaagagcccagatcacccattccgggttcactccccgcctccccaagtcagcagtcctagccccaaaccagcccagagcagggtctctctaaaggggacttgagggcctgagcaggaaagactggccctctagcttctaccctttgtccctgtagcctatacagtttagaatatttatttgttaattttattaaaatgctttaaaaaaa

SEQ ID NO: 274 - protein, 138 aa, Homo sapien
MPNFSGNWKIIRSENFEELLKVLGVNVMLRKIAVAAASKPAVEIKQEGDTFYIKTSTTVRTTEINFKVGEEFEEQTVDGRPCKSLVKWESENKMVCEQKLLKGEGPKTSWTRELTNDGELILTMTADDVVCTRVYVRE

SEQ ID NO: 275 - DNA, 12483 bp, Homo sapien
aaggtgttggagagaaaacttcagaaaggaacaggaaacctgccggggagcgggcggcggctgcggcttctctgggcgcctgggctgcgctcttcgcggggtgtccgcagctgcggcttggccccggtctggcttccccggcgcgcacgcacggctgagccgcgacgctcagtggctcgggccgtgcccttcgccgtggctcttggccgctgtagtcccgcgatccgatccgcttctgccgcggcggctccctggagagagggcggcgagggcgcagggaagaagagggacgtccactgtggaacatgaagcagcatgaagcagcatgactgagaaaatgtccagcttcctctacataggggacatcgtgtccctgtacgcggagggctcggtcaacggcttcatcagcaccttggggttagtggatgacagatgtgtggtgcacccagaggccggggaccttgccaaccctcccaagaagttcagagactgccttttcaaggtgtgccctatgaacagatattctgcccagaagcaatattggaaagcaaagcaagccaaacaagggaaccacaccgaggcagccttgctgaagaaactacagcacgctgcagaactggaacaaaaacaaaatgaatcggagaataagaaactgttgggagaaattgtaaaatacagtaatgttatacaactactgcatataaaaagcaacaaatatcttactgtcaacaagagattacctgctttactggagaagaatgccatgcgtgtgtccttggatgctgcaggaaatgaagggtcttggttttatattcatccattctggaaactgagaagcgagggtgacaatattgttgtaggagataaagttgttttgatgcctgtgaatgcagggcagccactacatgccagcaacatagagcttcttgataacccagggtgtaaagaggtgaatgctgtcaattgcaacaccagctggaaaatcactttattcatgaaatatagttcctatcgagaggatgtattaaaaggaggggacgttgttagattatttcatgcggaacaagagaagtttttgacttgtgatgaatatgagaaaaaacagcacattttccttcgtacgaccttgcgccaatcagctacttctgctactagttctaaagcactctgggaaatagaggtggttcatcatgacccatgccgtgggggtgcaggacagtggaacagcttgttcagatttaagcatcttgcaactggaaactatttagctgcagagcttaatcctgattatcgagatgcccaaaatgaaggaaaaaatgtgagagatggagtccctccaacttcaaagaaaaaacgccaggcaggggagaagatcatgtatactttggtttcagtcccgcatggcaatgacattgcatccctttttgaactagatgccacaactcttcagagagctgactgcctggttccaaggaactcatatgttcggttaaggcatttatgcaccaacacatgggtaaccagtactagtatccccatagacacagatgaagagaggcctgttatgttaaagattggaacctgccaaaccaaagaagataaagaagcgttcgcaatcgtgtctgttccactgtctgaagttcgagacttagactttgccaatgatgccaataaagtactagcgaccacagttaaaaagctagaaaacggcacaataactcagaatgaaaggaggtttgtaaccaaattattggaagatctcatattctttgttgctgatgtgcctaataatggacaagaagttctggatgtggttatcactaagccaaaccgagagcgtcaaaaattgatgagggaacaaaacatactggcacaggtatttggaattcttaaagcaccctttaaagagaaagcaggagaaggctcgatgctgagacttgaagatctgggggatcaaagatatgcaccctacaagtacatgctgcggctctgttaccgcgtcctgagacactcgcagcaggattaccggaaaaatcaggaatatattgctaagaatttctgtgtcatgcagtcccagattggctatgatattttggcagaagatactatcacacctttgttgcacaacaacagaaaactactagagaaacatatcacagcaaaagaaatagaaacatttgtcagtttactcaggagaaatcgggagccaaggtttttggattatttgtcagatctgtgtgtgtctaataccactgctatccctgtaactcaagaactcatctgtaaatttatgttgagtccaggcaatgcagacattctcattcaaactaaggtggtctcaatgcaagcagacaaccccatggagagctccatcctttcagatgacattgatgatgaagaagtttggctctattggattgacagcaacaaggaacctcatggcaaagctatcaggcaccttgctcaagaggcaaaagaaggcaccaaagctgacttagaagttcttacctattacaggtaccagctaaacctctttgcaaggatgtgcttggatcgccagtatctggccataaaccagatttctacacagctgtctgtagacctgatcctgcggtgtgtgtcggatgagagcctgccgttcgacctccgagcgtccttctgtcgcctcatgctccacatgcacgttgaccgggatccccaggagtccgtggtgcctgttcgctatgccaggctctggacagaaatccccacaaagatcacaattcatgagtatgattctataacagactcttccagaaatgatatgaagaggaaatttgccctgacaatggaatttgttgaagaatatttgaaagaagttgtaaaccagccctttccttttggggataaagaaaaaaataaactgacatttgaggtggtccacttggctcggaatcttatatactttggattttatagtttcagtgagttattaaggctaacaagaacacttctggctattttagacattgtacaggcccccatgtcatcatactttgaaagattaagcaaatttcaagatggaggaaacaatgtgatgagaaccattcatggggtgggagagatgatgacccagatggtactcagtagaggctccatcttccccatgagcgtgccggatgtgccacccagcatccacccgagcaagcaagggagccccaccgagcatgaggatgtgactgtgatggacaccaagctgaagatcattgagattttgcagtttatcctgagtgtcagactggattataggatctcatatatgctgtcaatatataagaaggagtttggagaggacaatgacaatgcggagacatctgccagtggatctccagacactttactaccatcagctattgttcctgatatagatgaaattgcagctcaggcagaaactatgtttgcgggaagaaaagaaaaaaatccagttcaacttgacgatgaaggaggcaggacgtttttacgggtcctcattcatctgatcatgcacgactacccgcctttgctgtctggagccctgcagctgttgtttaagcacttcagccagagggcagaggttttacaggcatttaagcaggtgcaattactggtgtctaatcaagacgtagataactacaagcaaatcaaggcagatctagaccagcttcgactgacagtagaaaagtctgagctatgggtggagaagagcagcaactatgagaatggagaaataggggaaagtcaagtgaaaggtggtgaagagccaattgaggaatcaaacattttaagtccagtgcaggatggaacaaagaaacctcagattgacagcaacaagagcaataactaccggattgtaaaggagattttgatcaggctaagtaaactctgtgtgcagaataaaaagtgtcggaatcaacatcaacgattactgaaaaatatgggggcgcattcggtggtgttggatcttctgcagataccctatgaaaagaatgatgaaaagatgaatgaagtaatgaatctagcccatacatttctgcagaatttctgtcgaggaaatccacagaatcaagttcttcttcataaacatctgaatttgtttttaactccaggtctccttgaagcagaaaccatgcggcacatcttcatgaacaattaccatctgtgcaacgaaattagcgagagagttgtacaacactttgtgcactgcattgagacacatggccgccacgtggagtacctgaggtttttgcaaacaattgtaaaagcagatggtaaatatgtgaagaaatgccaggatatggtaatgacagagttgataaatgggggtgaagacgtgctgatattttacaatgatagagcatcatttccaatccttctccatatgatgtgttcagagagagaccgaggggatgagagtggccccttagcctaccacatcaccctggtggagttgctggcagcatgcacagaggggaaaaatgtctacactgaaatcaagtgtaattcccttctcccgctggacgacatagtgagggtggtgacccatgacgactgcatccctgaggttaaaattgcttatgtgaactttgttaatcactgttatgttgacactgaagtggaaatgaaagaaatctatacaagtaaccacatttggaaattatttgagaacttcttggtggatatggcaagggtttgcaacacaactacagacaggaagcatgcagacatctttttggaaaagtgtgttactgagtcaataatgaatattgtgagcggcttctttaattctcccttttcagacaatagtaccagcctccagacacatcagccagtttttattcagctactgcaatctgccttcagaatttacaattgcacctggccaaacccagcgcagaaagcctcagtggaatcctgtatcagaactttggctgaagtggcaaaaaatcgtggaattgccattccagtggatttggacagccaagttaatactcttttcatgaagagccattcaaatatggtgcagagagcagcaatgggttggagactatcagctcgctctgggccacgctttaaggaagctcttggagggcctgcttgggattacagaaatattattgaaaagttacaggatgtagtggcctccttggagcaccagttcagcccaatgatgcaggctgaattctcagtgttggttgatgtattgtacagtccagaactgctgttccctgagggaagcgatgcaagaataagatgtggcgctttcatgtcgaagttgattaatcatacaaagaaactaatggagaaagaagaaaaactgtgcattaaaattcttcagacattacgagaaatgttagagaagaaagacagctttgtggaagagggtaacacattaagaaagatacttctgaatcgatactttaaaggtgattatagtattggtgtgaatggacacctatcaggagcctactccaaaactgcacaggtgggaggaagcttttctggacaagattcagataagatggggatatcaatgtcagacattcagtgtctgctggataaagaaggtgcatcagaacttgtcatcgatgttatagtgaacaccaaaaatgacagaattttttcagaaggcattttcctcggcattgccttgcttgaaggaggaaatacacaaacacagtattctttctaccagcagttgcatgaacaaaaaaagtcagaaaaattctttaaagttctctatgatcgaatgaaggctgctcagaaagaaataagatcaacagtgacagttaataccatagatttaggtaacaaaaaaagggacgatgacaatgaattgatgacatctggtccacgaatgagagtaagagattcaacactacatttaaaagagggaatgaaagggcaattaacagaagcttcttcagcaacatccaaagcatattgtgtatacagaagagaaatggatccagaaatagacattatgtgcacaggaccagaagcgggaaacactgaggaaaaatccgcagaggaagtaacaatgagtcccgcaattgccatcatgcagccaatactgagatttcttcagttactgtgtgagaatcacaaccgggaattgcagaacttcttgaggaatcaaaacaacaaaacaaattacaacctagtctgtgagacccttcagtttctggactgcatttgtggaagtacaaccggtggcctgggcctgttgggtctctacatcaatgagaagaatgtagcgctggtcaaccagaacctggagagcttgactgagtattgccagggcccttgccatgaaaatcagacctgtatcgctacacatgagtctaatgggattgatatcatcattgctttgattctgaatgacataaaccctcttggtaaataccgaatggacctggtgctccagctaaagaacaatgcatctaaacttttgctggccattatggaaagcagacatgacagtgagaatgcagaaagaattctttttaacatgagacccagagaactggtggatgtgatgaagaatgcctataaccaaggattggaatgtgaccatggggatgatgagggtggagatgatggtgtttctccaaaagatgttggacacaatatctatattctggcccatcagttggcccgccacaataaactgttgcagcagatgctcaaaccaggatcggatccagatgaaggagatgaagccttaaagtattatgccaaccacactgcacagattgagattgtccggcatgataggaccatggaacaaatagtttttcctgtccccaatatatgtgaatacctcactcgagaatccaagtgccgtgtgttcaatacaactgaaagggatgaacaaggaagtaaagtgaatgactttttccagcaaacagaagatctctacaatgaaatgaagtggcagaagaaaatcaggaataaccctgcactgttctggttctcgaggcacatctctctctgggggagcatttccttcaacctggctgtgttcatcaatttagctgttgctctcttctacccatttggggatgatggagatgaaggtacactttctccattgttctcggttcttctttggatagcagttgcgatctgcacatctatgctgtttttcttctccaagcctgtgggtattcggccgtttcttgtatcaataatgctcagatcaatatatacaataggtcttgggcctacattaatacttcttggtgcagctaatctttgtaataaaattgtttttctggtgagttttgttggaaatcgtggcacgttcacccgtgggtaccgagcagtcatcctggatatggcctttctctatcacgtggcgtatgtcctggtttgcatgctgggcctttttgtccatgaattcttctatagcttcctgctttttgatttggtgtacagggaagagactttgctgaatgtcataaaaagtgtcacacgaaatggccgctctattattctaactgcagtcctggctctcatcctcgtctacctgttttccattattgggttcctttttttgaaggatgacttcactatggaagttgataggctgaaaaaccgaactcctgttacaggcagtcatcaagtgcctactatgactttaactaccatgatggaagcatgtgccaaggagaactgttcacccacaattccagcttcaaatacagctgatgaagagtatgaagatggaattgaaaggacgtgtgacactctccttatgtgcattgtcaccgtgctgaaccagggcctcaggaatggcggtggtgtgggggatgtgctaagaaggccatcgaaagatgagcccttgtttgctgcccgagtggtttatgaccttcttttttatttcattgttatcattattgttctgaacttgatttttggtgttatcatcgatacttttgctgatctcagaagcgaaaaacagaaaaaagaagaaattctaaagacaacttgtttcatctgtggacttgagagagacaagtttgataataaaacggtttcatttgaggagcacattaagtcagaacacaatatgtggcattatttgtacttcatagtcctggtgaaagttaaagacccaacagaatacactggacctgaaagttatgtggctcaaatgattgtggagaagaatttggattggtttcctcggatgcgagccatgtccctcgttagcaatgaaggcgacagtgagcaaaatgaaattcggagccttcaggagaagttggaatcgaccatgagtctggtcaaacagctgtcgggtcagctggcggagctcaaggagcagatgacagaacaaaggaagaataagcagagactgggcttcctcggatcaaacacaccccatgtgaatcatcacatgccaccacactgataccatggggggaagccgtgactagcctttcatcagtgtcctgcctgatcactgaataaagaactgagatggaggggagtgaacagtgcctattgttgaaaagttaaaaacaaccaagtgccaagatgttgagtgggttagctccgagaacaatttataactgtgttttcatggttgcgaagacctaacctcaaatgcatctgctagaaagcgtacatcacacattcgcaatgcatcaggaagaaaaggcttgcccaaaaggctggagagggcagggagcggcaggatggaaggagacacggggcagggagaactctcttctgctaaatcgataggagtcagttttgtcttaaatgctgactacagccactgacatggttggctggaatttctttcttttaattgtggcatataggtttgtgacacaagaagtcatactttggtggctaagttttactaaggaaaataactgaaaagattaaaagtgagagctgaaaagagaaatgataatgcttccaaactgtagctgtcacagggcaatttctttatttataacatgaagcacaatggatttacagctctaggaacttagtactttggagcttttgcctctcacactgacaacataacaggatgtgattgccttctctgggattcagacaggctctgtcaatgtggagcacaaaaggagattttcatataacttgttaaaaacatgttctaagtcatgtataggctaagattttaagaagatctgggggaataaaaagccaacagtaagccccaggaaagggttttttgagaccatatgtatgctattaaaatatattgagattaatacatgaaaatgcttagaagtgataggaattattgagaaacttatgatggtggcattgccttttataaacatggagtgaaagccatttgactcaacgtttgctgtgcttaaagaattgcttcaggacccgagcgtttttatgtatgctgttcctgcagttaggaaaaaaaaatccaagaaatgtattgaatactcaagaaaatgccacatttcaattacatatttaaaactgtatctgtaagggcttttcaaaatgtagcaagataaaaatctcttattcaaattgtttttgtattaaatcatgcactcagaatttgtcgagggagagaataacctggtgtgttcaggttattcttagagactacacatttggaatagcagagcaaaatatggataatgaaagtgttgggaaaaaagtgatgtgacagggagtgaagacacttgataccagactctgggagatactctgcaagttgacctggcctctcccccacaggaacaaaacactgcctccagagtctttaaattctcagttatcaacgccaaggtttaaggtctagatagggtttgctatagggtttgctctgacaatttttaaagcttttggattgttctaacatagcttaagctattggttcctaaaaatcccaaatcaagatctatgtagaatataaaggaagcctgaaccaatccttccacatactgttaagatgtagacttggaacaaagctgttgggacccagagcaatgaatttttgaactgaagctactggtactccccagcaccacctcatactaagaattcctcactctgacatgacagtattttttctgaccaggagctgaaagaccctgacattcatgatccaaagatataagaaattttgatatgtctgcatgcagcacagaactttgaacctaggaggcagtcaataaatacatgagaaattcagctgtcattcagttactcttaattctttataaaactttaaatgataccacatatttgtttgtttaaaatggctttcccaaaatcaaagtagactaaagcagccatctttaaaatccaggatcatcaatgctattaacagtatcaggtaaaaagtacactttaaaatattttaatcaggcagagttttatggatagagaatagaagagaaaggtagtaaatattgaacatattccaatataggaacctatctctgttttagtacaaaatatttctgacatctgaactagaggtcaagagaataaattcatttgtatacatctgagcaacctgtctttcagatgataaagtatctagccttttctgacaccataatagttcattttatagggaataagccattaggtgtatataattgctttctagaaatgacctaatgtccccaaccactgtgtagtggcagatcactgtttcacagcatattttctcccaaggaaagtattcaaaagagactgcaactaacaagactcttatttcatcaaaatttaaatatttctgagttgtatttttaatgcctctttcttttctgcctaaatgcttagaaattataaagcaaaaaatataaaaacagcaacaaaaaatcgaagcagacaaaaaaggcacttttcagaacatcaaattcctaatgaagaagaggagaagataatggggaaatttgacatttgatataaatttatatttgttatgtgtatgtttgttaatgcaactggaatatttgacttaggtgagtatcagttaacatccttgtatttatatagtgacatcaaaataaatgcaatcatcttgaactttgatgttaagggagattttgaaaaaatatttagttatttcaaattcatattggttcaaaagtatcagtttctgctgaataatatttttaatttcaaaagggttttgttccctctgtgctccattctgaggctcaagagcttaatgccagtatgttttctgagttaaaataacacttttagatgagaaaatgcttgtatcatacagggctataatataaataaataaattgtatgtatgcaaaatttatcatattttctaccccttaaaaaattaagttagaaataagcttattttcttgcacatcaatatttttctgttggtaaagaggacacaatttctagtagattgttaataacatcaggaagatatttctttcgtcagaactaattgtgtgcttattcccatattctcagctcataactccctgttttggctgctctctttattttacaattgtttcattgcaaacagcaaggcagtatagcccacactcagccactagcccccagtccccaggactgagaatgagtggggaggctggggagttggtgagagaaggtggagatagggatttctgcttcccagtactctatcattagagaaaaggaggggtaaatattagctaagaagaagaaaaaagcttattcttcagggacccagtagattggacgtaagcaagtaaatattgcacaggcatcatgatgtaatagttgatggaccccagagatacccctcacccatgcagagaacaaagctgtgtggaagagcaactaccataagatggtgtgttccttccagcggctgttaaagccatcctgaataacaaatcagctattcctacctacagacccattccaatatgctgtgatacacgacacggtgcaccgcagaggagacagacatcttcagcacaaacacagatgcctgcaggagcttggcaagtcactaaattgcatgaaattgtgaggtgcacaccaaatgcagggatgggggaggccgtgggaagctctgtattctcaaaatttgacagctaattccggtttttagaaaatgcctgaggccagtagaggccctctagtcactcactgctgctgtttctgatataattattgagaaagctatctcacttaatagaagaaaacacgcactatcaaaaccagatagcctaacgtgcatgtgaaaatcgagaaagctgaaaacaaatccaggtacccttctctgaactggagtgtttccacagacttgaataatttatgaaattatcacaccagtatttctcatatcaccaagaagactttctctcctgcagtagaggattgttatatttgcctaaaaaacacgattccaatatatgacaagggcagataatttataagtgaatgttaataaaattggatgtgtataacttaaaa

SEQ ID NO: 276 - protein, 2809 aa, Homo sapien
  unsure 106: unknown amino acid
RCWRENFRKEQETCRGAGGGCGFSGRLGCALRGVSAAAAWPRSGFPGAHARLSRDAQWLGPCPSPWLLAAVVPRSDPLLPRRLPGERAARAQGRRGTSTVEHEAAXSSMTEKMSSFLYIGDIVSLYAEGSVNGFISTLGLVDDRCVVHPEAGDLANPPKKFRDCLFKVCPMNRYSAQKQYWKAKQAKQGNHTEAALLKKLQHAAELEQKQNESENKKLLGEIVKYSNVIQLLHIKSNKYLTVNKRLPALLEKNAMRVSLDAAGNEGSWFYIHPFWKLRSEGDNIVVGDKVVLMPVNAGQPLHASNIELLDNPGCKEVNAVNCNTSWKITLFMKYSSYREDVLKGGDVVRLFHAEQEKFLTCDEYEKKQHIFLRTTLRQSATSATSSKALWEIEVVHHDPCRGGAGQWNSLFRFKHLATGNYLAAELNPDYRDAQNEGKNVRDGVPPTSKKKRQAGEKIMYTLVSVPHGNDIASLFELDATTLQRADCLVPRNSYVRLRHLCTNTWVTSTSIPIDTDEERPVMLKIGTCQTKEDKEAFAIVSVPLSEVRDLDFANDANKVLATTVKKLENGTITQNERRFVTKLLEDLIFFVADVPNNGQEVLDVVITKPNRERQKLMREQNILAQVFGILKAPFKEKAGEGSMLRLEDLGDQRYAPYKYMLRLCYRVLRHSQQDYRKNQEYIAKNFCVMQSQIGYDILAEDTITPLLHNNRKLLEKHITAKEIETFVSLLRRNREPRFLDYLSDLCVSNTTAIPVTQELICKFMLSPGNADILIQTKVVSMQADNPMESSILSDDIDDEEVWLYWIDSNKEPHGKAIRHLAQEAKEGTKADLEVLTYYRYQLNLFARMCLDRQYLAINQISTQLSVDLILRCVSDESLPFDLRASFCRLMLHMHVDRDPQESVVPVRYARLWTEIPTKITIHEYDSITDSSRNDMKRKFALTMEFVEEYLKEVVNQPFPFGDKEKNKLTFEVVHLARNLIYFGFYSFSELLRLTRTLLAILDIVQAPMSSYFERLSKFQDGGNNVMRTIHGVGEMMTQMVLSRGSIFPMSVPDVPPSIHPSKQGSPTEHEDVTVMDTKLKIIEILQFILSVRLDYRISYMLSIYKKEFGEDNDNAETSASGSPDTLLPSAIVPDIDEIAAQAETMFAGRKEKNPVQLDDEGGRTFLRVLIHLIMHDYPPLLSGALQLLFKHFSQRAEVLQAFKQVQLLVSNQDVDNYKQIKADLDQLRLTVEKSELWVEKSSNYENGEIGESQVKGGEEPIEESNILSPVQDGTKKPQIDSNKSNNYRIVKEILIRLSKLCVQNKKCRNQHQRLLKNMGAHSVVLDLLQIPYEKNDEKMNEVMNLAHTFLQNFCRGNPQNQVLLHKHLNLFLTPGLLEAETMRHIFMNNYHLCNEISERVVQHFVHCIETHGRHVEYLRFLQTIVKADGKYVKKCQDMVMTELINGGEDVLIFYNDRASFPILLHMMCSERDRGDESGPLAYHITLVELLAACTEGKNVYTEIKCNSLLPLDDIVRVVTHDDCIPEVKIAYVNFVNHCYVDTEVEMKEIYTSNHIWKLFENFLVDMARVCNTTTDRKHADIFLEKCVTESIMNIVSGFFNSPFSDNSTSLQTHQPVFIQLLQSAFRIYNCTWPNPAQKASVESCIRTLAEVAKNRGIAIPVDLDSQVNTLFMKSHSNMVQRAAMGWRLSARSGPRFKEALGGPAWDYRNIIEKLQDVVASLEHQFSPMMQAEFSVLVDVLYSPELLFPEGSDARIRCGAFMSKLINHTKKLMEKEEKLCIKILQTLREMLEKKDSFVEEGNTLRKILLNRYFKGDYSIGVNGHLSGAYSKTAQVGGSFSGQDSDKMGISMSDIQCLLDKEGASELVIDVIVNTKNDRIFSEGIFLGIALLEGGNTQTQYSFYQQLHEQKKSEKFFKVLYDRMKAAQKEIRSTVTVNTIDLGNKKRDDDNELMTSGPRMRVRDSTLHLKEGMKGQLTEASSATSKAYCVYRREMDPEIDIMCTGPEAGNTEEKSAEEVTMSPAIAIMQPILRFLQLLCENHNRELQNFLRNQNNKTNYNLVCETLQFLDCICGSTTGGLGLLGLYINEKNVALVNQNLESLTEYCQGPCHENQTCIATHESNGIDIIIALILNDINPLGKYRMDLVLQLKNNASKLLLAIMESRHDSENAERILFNMRPRELVDVMKNAYNQGLECDHGDDEGGDDGVSPKDVGHNIYILAHQLARHNKLLQQMLKPGSDPDEGDEALKYYANHTAQIEIVRHDRTMEQIVFPVPNICEYLTRESKCRVFNTTERDEQGSKVNDFFQQTEDLYNEMKWQKKIRNNPALFWFSRHISLWGSISFNLAVFINLAVALFYPFGDDGDEGTLSPLFSVLLWIAVAICTSMLFFFSKPVGIRPFLVSIMLRSIYTIGLGPTLILLGAANLCNKIVFLVSFVGNRGTFTRGYRAVILDMAFLYHVAYVLVCMLGLFVHEFFYSFLLFDLVYREETLLNVIKSVTRNGRSIILTAVLALILVYLFSIIGFLFLKDDFTMEVDRLKNRTPVTGSHQVPTMTLTTMMEACAKENCSPTIPASNTADEEYEDGIERTCDTLLMCIVTVLNQGLRNGGGVGDVLRRPSKDEPLFAARVVYDLLFYFIVIIIVLNLIFGVIIDTFADLRSEKQKKEEILKTTCFICGLERDKFDNKTVSFEEHIKSEHNMWHYLYFIVLVKVKDPTEYTGPESYVAQMIVEKNLDWFPRMRAMSLVSNEGDSEQNEIRSLQEKLESTMSLVKQLSGQLAELKEQMTEQRKNKQRLGFLGSNTPHVNHHMPPH

SEQ ID NO: 277 - DNA, 4380 bp, Homo sapien
gcgcggagctgggagtggcttcgccatggctgtgagaagggactccgtgtggaagtactgctggggtgttttgatggttttatgcagaactgcgatttccaaatcgatagttttagagcctatctattggaattcctcgaactccaaatttctacctggacaaggactggtactatacccacagataggagacaaattggatattatttgccccaaagtggactctaaaactgttggccagtatgaatattataaagtttatatggttgataaagaccaagcagacagatgcactattaagaaggaaaatacccctctcctcaactgtgccaaaccagaccaagatatcaaattcaccatcaagtttcaagaattcagccctaacctctggggtctagaatttcagaagaacaaagattattacattatatctacatcaaatgggtctttggagggcctggataaccaggagggaggggtgtgccagacaagagccatgaagatcctcatgaaagttggacaagatgcaagttctgctggatcaaccaggaataaagatccaacaagacgtccagaactagaagctggtacaaatggaagaagttcgacaacaagtccctttgtaaaaccaaatccaggttctagcacagacggcaacagcgccggacattcggggaacaacatcctcggttccgaagtggccttatttgcagggattgcttcaggatgcatcatcttcatcgtcactcatcatcacgctggtggtcctcttgctgaagtaccggaggagacacaggaagcactcgccgcagcacacgaccacgctgtcgctcagcacactggccacacccaagcgcagcggcaacaacaacggctcagagcccagtgacattatcatcccgctaaggactgcggacagcgtcttctgccctcactacgagaaggtcagcggggactacgggcacccggtgtacatcgtccaggagatgcccccgcagagcccggcgaacatttactacaaggtctgagagggaccctggtggtacctgtgctttcccagaggacacctaatgtcccgatgcctcccttgagggtttgagagcccgcgtgctggagaattgactgaagcacagcaccgggggagagggacactcctcctcggaagagcccgtcgcgctggacagcttacctagtcttgtagcattcggccttggtgaacacacacgctccctggaagctggaagactgtgcagaagacgcccattcggactgctgtgccgcgtcccacgtctcctcctcgaagccatgtgctgcggtcactcaggcctctgcagaagccaagggaagacagtggtttgtggacgagagggctgtgagcatcctggcaggtgccccaggatgccacgcctggaagggccggcttctgcctggggtgcatttcccccgcagtgcataccggacttgtcacacggacctcgggctagttaaggtgtgcaaagatctctagagtttagtccttactgtctcactcgttctgttacccagggctctgcagcacctcacctgagacctccactccacatctgcatcactcatggaacactcatgtctggagtcccctcctccagccgctggcaacaacagcttcagtccatgggtaatccgttcatagaaattgtgtttgctaacaaggtgccctttagccagatgctaggctgtctgcgaagaaggctaggagttcatagaagggagtggggctggggaaagggctggctgcaattgcagctcactgctgctgcctctgaaacagaaagttggaaaggaaaaaagaaaaaagcaattaggtagcacagcactttggttttgctgagatcgaagaggccagtaggagacacgacagcacacacagtggattccagtgcatggggaggcactcgctgttatcaaatagcgatgtgcaggaagaaaagcccctcttcattccggggaacaaagacgggtattgttgggaaaggaacaggcttggagggaagggagaaagtaggccgctgatgatatattcgggcaggactgttgtggtactggcaataagatacacagctccgagctgtaggagagtcggtctgctttggatgattttttaagcagactcagctgctatacttatcacattttattaaacacagggaaagcatttaggagaatagcagagagccaaatctgacctaaaagttgaaaagccaaaggtcaaacaggctgtaattccatcatcatcgttgttattaaagaatccttatctataaaaggtaggtcagatccccctccccccaggttcctccttcccctcccgattgagccttacgacactttggtttatgcggtgctgtccgggtgccagggctgcagggtcggtactgatggaggctgcagcgcccggtgctctgtgtcaaggtgaagcacatacggcagacctcttagagtccttaagacggaagtaaattatgatgtccagggggagaaggaagataggacgtatttataataggtatatagaacacaagggatataaaatgaaagatttttactaatatatattttaaggttgcacacagtacacaccagaagatgtgaaattcatttgtggcaattaagtggtcccaatgctcagcgcttaaaaaaacaaattggacagctacttctgggaaaaacaacatcattccaaaaagaacaataatgagagcaaatgcaaaaataaccaagtcctccgaaggcatctcacggaaccgtagactaggaagtacgagccccacagagcaggaagccgatgtgactgcatcatatatttaacaatgacaagatgttccggcgtttatttctgcgttgggttttcccttgccttatgggctgaagtgttctctagaatccagcaggtcacactgggggcttcaggtgacgatttagctgtggctccctcctcctgtcctcccccgcaccccctcccttctgggaaacaagaagagtaaacaggaaacctactttttatgtgctatgcaaaatagacatctttaacatagtcctgttactatggtaacactttgctttctgaattggaagggaaaaaaatgtagcgacagcattttaaggttctcagacctccagtgagtacctgcaaaaatgagttgtcacagaaattatgatcctctatttcctgaacctggaaatgatgttggtccaaagtgcgtgtgtgtatgtgtgagtgggtgcgtggtatacatgtgtacatatatgtataatatatatctacaatatatattatatatatctatatcatatttctgtggagggttgccatggtaaccagccacagtacatatgtaattctttccatcaccccaacctctcctttctgtgcattcatgcaagagtttcttgtaagccatcagaagttacttttaggatgggggagaggggcgagaaggggaaaaatgggaaatagtctgattttaatgaaatcaaatgtatgtatcatcagttggctacgttttggttctatgctaaactgtgaaaaatcagatgaattgataaaagagttccctgcaaccaattgaaaagtgttctgtgcgtctgttttgtgtctggtgcagaatatgacaatctaccaactgtccctttgtttgaagttggtttagctttggaaagttactgtaaatgccttgcttgtatgatcgtccctggtcacccgactttggaatttgcaccatcatgtttcagtgaagatgctgtaaataggttcagattttactgtctatggatttggggtgttacagtagccttattcacctttttaataaaaatacacatgaaaacaagaaagaaatggcttttcttacccagattgtgtacatagagcaatgttggttttttataaagtctaagcaagatgttttgtataaaatctgaattttgcaatgtatttagctacagcttgtttaacggcagtgtcattcccctttgcactgtaatgaggaaaaaatggtataaaaggttgccaaattgctgcatatttgtgccgtaattatgtaccatgaatatttatttaaaatttcgttgtccaatttgtaagtaacacagtattatgcctgagttataaatatttttttctttctttgttttattttaatagcctgtcataggttttaaatctgctttagtttcacattgcagttagccccagaaaatgaaatccgtgaagtcacattccacatctgtttcaaactgaatttgttcttaaaaaaataaaatatttttttcctatggaaaaaaaatctatgtcgggtgcggagaaagaggtaatgaaatgcaggattcgatatcagctat

SEQ ID NO: 278 - protein, 295 aa, Homo sapien
RGAGSGFAMAVRRDSVWKYCWGVLMVLCRTAISKSIVLEPIYWNSSNSKFLPGQGLVLYPQIGDKLDIICPKVDSKTVGQYEYYKVYMVDKDQADRCTIKKENTPLLNCAKPDQDIKFTIKFQEFSPNLWGLEFQKNKDYYIISTSNGSLEGLDNQEGGVCQTRAMKILMKVGQDASSAGSTRNKDPTRRPELEAGTNGRSSTTSPFVKPNPGSSTDGNSAGHSGNNILGSEVALFAGIASGCIIFIVTHHHAGGPLAEVPEETQEALAAAHDHAVAQHTGHTQAQRQQQRLRAQ

SEQ ID NO: 279 - DNA, 2902 bp, Homo sapien
cacagccatggctgtgagaagggactccgtgtggaagtactgctggggtgttttgatggttttatgcagaactgcgatttccaaatcgatagttttagagcctatctattggaattcctcgaactccaaatttctacctggacaaggactggtactatacccacagataggagacaaattggatattatttgccccaaagtggactctaaaactgttggccagtatgaatattataaagtttatatggttgataaagaccaagcagacagatgcactattaagaaggaaaatacccctctcctcaactgtgccaaaccagaccaagatatcaaattcaccatcaagtttcaagaattcagccctaacctctggggtctagaatttcagaagaacaaagattattacattatatctacatcaaatgggtctttggagggcctggataaccaggagggaggggtgtgccagacaagagccatgaagatcctcatgaaagttggacaagatgcaagttctgctggatcaaccaggaataaagatccaacaagacgtccagaactagaagctggtacaaatggaagaagttcgacaacaagtccctttgtaaaaccaaatccaggttctagcacagacggcaacagcgccggacattcggggaacaacatcctcggttccgaagtggccttatttgcagggattgcttcaggatgcatcatcttcatcgtcatcatcatcacgctggtggtcctcttgctgaagtaccggaggagacacaggaagcactcgccgcagcacacgaccacgctgtcgctcagcacactggccacacccaagcgcagcggcaacaacaacggctcagagcccagtgacattatcatcccgctaaggactgcggacagcgtcttctgccctcactacgagaaggtcagcggggactacgggcacccggtgtacatcgtccaggagatgcccccgcagagcccggcgaacatttactacaaggtctgagagggaccctggtggtacctgtgctttcccagaggacacctaatgtcccgatgcctcccttgagggtttgagagcccgcgtgctggagaattgactgaagcacagcaccgggggagagggacactcctcctcggaagagcccgtcgcgctggacagcttacctagtcttgtagcattcggccttggtgaacacacacgctccctggaagctggaagactgtgcagaagacgcccattcggactgctgtgccgcgtcccacgtctcctcctcgaagccatgtgctgcggtcactcaggcctctgcagaagccaagggaagacagtggtttgtggacgagagggctgtgagcatcctggcaggtgccccaggatgccacgcctggaagggccggcttctgcctggggtgcatttcccccgcagtgcataccggacttgtcacacggacctcgggctagttaaggtgtgcaaagatctctagagtttagtccttactgtctcactcgttctgttacccagggctctgcagcacctcacctgagacctccactccacatctgcatcactcatggaacactcatgtctggagtcccctcctccagccgctggcaacaacagcttcagtccatgggtaatccgttcatagaaattgtgtttgctaacaaggtgccctttagccagatgctaggctgtctgcgaagaaggctaggagttcatagaagggagtggggctggggaaagggctggctgcaattgcagctcactgctgctgcctctgaaacagaaagttggaaaggaaaaaagaaaaaagcaattaggtagcacagcactttggttttgctgagatcgaagaggccagtaggagacacgacagcacacacagtggattccagtgcatggggaggcactcgctgttatcaaatagcgatgtgcaggaagaaaagcccctcttcattccggggaacaaagacgggtattgttgggaaaggaacaggcttggagggaagggagaaagtaggccgctgatgatatattcgggcaggactgttgtggtactggcaataagatacacagctccgagctgtaggagagtcggtctgctttggatgattttttaagcagactcagctgctatacttatcacattttattaaacacagggaaagcatttaggagaatagcagagagccaaatctgacctaaaagttgaaaagccaaaggtcaaacaggctgtaattccatcatcatcgttgttattaaagaatccttatctataaaaggtaggtcagatccccctccccccaggttcctccttcccctcccgattgagccttacgacactttggtttatgcggtgctgtccgggtgccagggctgcagggtcggtactgatggagcctgcagcgcccggtgctctgtgtcaaggtgaagcacatacggcagacctcttagagtccttaagacggaagtaaattatgatgtccagggggagaaggaagataggacgtatttataataggtatatagaacacaagggatataaaatgaaagatttttactaatatatattttaaggttgcacacagtacacaccagaagatgtgaaattcatttgtggcaattaagtggtcccaatgctcagcgcttaaaaaaacaaattggacagctacttctgggaaaaacaacatcattccaaaaagaacaataatgagagcaaatgcaaaaataaccaagtcctccgaaggcatctcacggaaccgtagactaggaagtacgagccccacagagcaggaagccgatgtgactgcatcatatatttaacaatgacaagatgttccggcgtttatttctgcgttgggttttcccttgccttatgggctgaagtgttctctaga

SEQ ID NO: 280 - protein, 333 aa, Homo sapien
MAVRRDSVWKYCWGVLMVLCRTAISKSIVLEPIYWNSSNSKFLPGQGLVLYPQIGDKLDIICPKVDSKTVGQYEYYKVYMVDKDQADRCTIKKENTPLLNCAKPDQDIKFTIKFQEFSPNLWGLEFQKNKDYYIISTSNGSLEGLDNQEGGVCQTRAMKILMKVGQDASSAGSTRNKDPTRRPELEAGTNGRSSTTSPFVKPNPGSSTDGNSAGHSGNNILGSEVALFAGIASGCIIFIVIIITLVVLLLKYRRRHRKHSPQHTTTLSLSTLATPKRSGNNNGSEPSDIIIPLRTADSVFCPHYEKVSGDYGHPVYIVQEMPPQSPANIYYKV

SEQ ID NO: 281 - DNA, 1331 bp, Homo sapien
cggagccgcccgctgaggtcagaaggaggcgtctgcgctgatcgggtccgccgcgcgccagagccagagtcgcagccgaggggagccggggccggagcccgagcccgagccgagccggagcccgagcgagcggcggagaccgtgcccccgcctcggccccgcgccgccgcggccaggcccggcatggaggaggagtgccgggtgctctccatacagagccacgtcatccgcggctacgtgggcaaccgggcggccacgttcccgctgcaggttttgggatttgagattgacgcggtgaactctgtccagttttcaaaccacacaggctatgcccactggaagggccaagtgctgaattcagatgagctccaggagttgtacgaaggcctgaggctgaacaacatgaataaatatgactacgtgctcacaggttatacgagggacaagtcgttcctggccatggtggtggacattgtgcaggagctgaagcagcagaaccccaggctggtgtacgtgtgtgatccagtcttgggtgacaagtgggacggcgaaggctcgatgtacgtcccggaggacctccttcccgtctacaaagaaaaagtggtgccgcttgcagacattatcacgcccaaccagtttgaggccgagttactgagtggccggaagatccacagccaggaggaagccttgcgggtgatggacatgctgcactctatgggccccgacaccgtggtcatcaccagctccgacctgccctccccgcagggcagcaactacctgattgtgctggggagtcagaggaggaggaatcccgctggctccgtggtgatggaacgcatccggatggacattcgcaaagtggacgccgtctttgtgggcactggggacctgtttgctgccatgctcctggcgtggacacacaagcaccccaataacctcaaggtggcctgtgagaagaccgtgtctaccttgcaccacgttctgcagaggaccatccagtgtgcaaaagcccaggccggggaaggagtgaggcccagccccatgcagctggagctgcggatggtgcagagcaaaagggacatcgaggacccagagatcgtcgtccaggccacggtgctgtgagggccccgccgcttgcccgtgacacgcagcgcgttggtgtctccgtgtttgtccctgtgaaaacatgtaacgtctgccttagagccatgaccgaaacttgatatttttttctttcatgagtgtccggcatctgctggtcttcattgtgaaacgtgccagtcgtgctttgtgaaaaataacaaagtggtcacaaaaaaaaaaaaaaaaaa

SEQ ID NO: 282 - protein, 312 aa, Homo sapien
MEEECRVLSIQSHVIRGYVGNRAATFPLQVLGFEIDAVNSVQFSNHTGYAHWKGQVLNSDELQELYEGLRLNNMNKYDYVLTGYTRDKSFLAMVVDIVQELKQQNPRLVYVCDPVLGDKWDGEGSMYVPEDLLPVYKEKVVPLADIITPNQFEAELLSGRKIHSQEEALRVMDMLHSMGPDTVVITSSDLPSPQGSNYLIVLGSQRRRNPAGSVVMERIRMDIRKVDAVFVGTGDLFAAMLLAWTHKHPNNLKVACEKTVSTLHHVLQRTIQCAKAQAGEGVRPSPMQLELRMVQSKRDIEDPEIVVQATVL

SEQ ID NO: 283 - DNA, 1530 bp, Homo sapien
aatcctggaacaaggctacagcgtcgaagatccccagcgctgcgggctcggagagcagtcctaacggcgcctcgtacgctagtgtcctcccttttcagtccgcgtccctccctgggccgggctggcactcttgccttccccgtccctcatggcgctgctccgacgcccgacggtgtccagtgatttggagaatattgacacaggagttaattctaaagttaagagtcatgtgactattaggcgaactgttttagaagaaattggaaatagagttacaaccagagcagcacaagtagctaagaaagctcagaacaccaaagttccagttcaacccaccaaaacaacaaatgtcaacaaacaactgaaacctactgcttctgtcaaaccagtacagatggaaaagttggctccaaagggtccttctcccacacctgaggatgtctccatgaaggaagagaatctctgccaagctttttctgatgccttgctctgcaaaatcgaggacattgataacgaagattgggagaaccctcagctctgcagtgactacgttaaggatatctatcagtatctcaggcagctggaggttttgcagtccataaacccacatttcttagatggaagagatataaatggacgcatgcgtgccatcctagtggattggctggtacaagtccactccaagtttaggcttctgcaggagactctgtacatgtgcgttggcattatggatcgatttttacaggttcagccagtttcccggaagaagcttcaattagttgggattactgctctgctcttggcttccaagtatgaggagatgttttctccaaatattgaagactttgtttacatcacagacaatgcttataccagttcccaaatccgagaaatggaaactctaattttgaaagaattgaaatttgagttgggtcgacccttgccactacacttcttaaggcgagcatcaaaagccggggaggttgatgttgaacagcacactttagccaagtatttgatggagctgactctcatcgactatgatatggtgcattatcatccttctaaggtagcagcagctgcttcctgcttgtctcagaaggttctaggacaaggaaaatggaacttaaagcagcagtattacacaggatacacagagaatgaagtattggaagtcatgcagcacatggccaagaatgtggtgaaagtaaatgaaaacttaactaaattcatcgccatcaagaataagtatgcaagcagcaaactcctgaagatcagcatgatccctcagctgaactcaaaagccgtcaaagaccttgcctccccactgataggaaggtcctaggctgccgtgggccctggggatgtgtgcttcattgtgccctttttcttattggtttagaactcttgattttgtacatagtcctctggtctatctcatgaaacctcttctcagaccagttttctaaacatatattgaggaaaaataaagcgattggtttttcttaaggtaaaaaaaaaaaaaaaaaa

SEQ ID NO: 284 - protein, 398 aa, Homo sapien
MALLRRPTVSSDLENIDTGVNSKVKSHVTIRRTVLEEIGNRVTTRAAQVAKKAQNTKVPVQPTKTTNVNKQLKPTASVKPVQMEKLAPKGPSPTPEDVSMKEENLCQAFSDALLCKIEDIDNEDWENPQLCSDYVKDIYQYLRQLEVLQSINPHFLDGRDINGRMRAILVDWLVQVHSKFRLLQETLYMCVGIMDRFLQVQPVSRKKLQLVGITALLLASKYEEMFSPNIEDFVYITDNAYTSSQIREMETLILKELKFELGRPLPLHFLRRASKAGEVDVEQHTLAKYLMELTLIDYDMVHYHPSKVAAAASCLSQKVLGQGKWNLKQQYYTGYTENEVLEVMQHMAKNVVKVNENLTKFIAIKNKYASSKLLKISMIPQLNSKAVKDLASPLIGRS

SEQ ID NO: 285 - DNA, 1528 bp, Homo sapien
ccggctcccattccggctccagcctccaatccgacccccatttcggctgcagcctcggacctagctccggccctcggtctatccggttgcatcctccctccctgttccggatcttatcttgcgccagcgcctactccaggatcccgtagccagacctcaagccatggctggtcccttctcccgtctgctgtccgcccgcccgggactcaggctcctggctttggccggagcggggtctctagccgctgggtttctgctccgaccggaacctgtacgagctgccagtgaacgacggaggctgtatcccccgagcgctgagtacccagacctccgaaagcacaacaactgcatggccagtcacctgaccccagcagtctatgcacggctctgcgacaagaccacacccactggttggacgctagatcagtgtatccagactggcgtggacaaccctggccaccccttcatcaagactgtgggcatggtggctggagatgaggagacctatgaggtatttgctgacctgtttgaccctgtgatccaagagcgacacaatggatatgacccccggacaatgaagcacaccacggatctagatgccagtaaaatccgttctggctactttgatgagaggtatgtattgtcctctagagtcagaactggccgaagcatccgaggactcagtctgcctccagcttgcactcgagcagagcgacgagaggtggaacgtgttgtggtggatgcactgagtggcctgaagggtgacctggctggacgttactataggctcagtgagatgacagaggctgaacagcagcagcttattgatgaccactttctgtttgataagcctgtgtccccgttgctgactgcagcaggaatggctcgagactggccagatgctcgtggaatttggcacaacaatgagaagagcttcctgatctgggtgaatgaggaggatcatacacgggtgatctccatggagaagggtggtaacatgaagagagtgtttgaaagattctgccgaggcctcaaagaggtggagagacttatccaagaacgtggctgggagttcatgtggaatgagcgtttgggatacatcttgacctgtccatctaacctgggcactggacttcgggcaggagtgcacatcaaactgcccctgctaagcaaagatagccgcttcccaaagatcctggagaacctaagactccaaaaacgtggtactggaggagtggacactgctgctacaggcggtgtctttgatatttctaatttggaccgactaggcaaatcagaggtggagctggtgcaactggtcatcgatggagtaaactatttgattgattgtgaacggcgtctggagagaggccaggatatccgcatccccacacctgtcatccacaccaagcattaactccccatcgccagctgatgactcaagattcccaggagttttgctcattctaatgatggcccattctacttgctctggacctgcccccgcatcccctgcctccatcctagt

SEQ ID NO: 286 - protein, 417 aa, Homo sapien
MAGPFSRLLSARPGLRLLALAGAGSLAAGFLLRPEPVRAASERRRLYPPSAEYPDLRKHNNCMASHLTPAVYARLCDKTTPTGWTLDQCIQTGVDNPGHPFIKTVGMVAGDEETYEVFADLFDPVIQERHNGYDPRTMKHTTDLDASKIRSGYFDERYVLSSRVRTGRSIRGLSLPPACTRAERREVERVVVDALSGLKGDLAGRYYRLSEMTEAEQQQLIDDHFLFDKPVSPLLTAAGMARDWPDARGIWHNNEKSFLIWVNEEDHTRVISMEKGGNMKRVFERFCRGLKEVERLIQERGWEFMWNERLGYILTCPSNLGTGLRAGVHIKLPLLSKDSRFPKILENLRLQKRGTGGVDTAATGGVFDISNLDRLGKSEVELVQLVIDGVNYLIDCERRLERGQDIRIPTPVIHTKH

SEQ ID NO: 287 - DNA, 1594 bp, Homo sapien
aacaggatctcctcttgcagtctgcagcccaggacgctgattccagcagcgccttaccgcgcagcccgaagattcactatggtgaaaatcgccttcaatacccctaccgccgtgcaaaaggaggaggcgcggcaagacgtggaggccctcctgagccgcacggtcagaactcagatactgaccggcaaggagctccgagttgccacccaggaaaaagagggctcctctgggagatgtatgcttactctcttaggcctttcattcatcttggcaggacttattgttggtggagcctgcatttacaagtacttcatgcccaagagcaccatttaccgtggagagatgtgcttttttgattctgaggatcctgcaaattcccttcgtggaggagagcctaacttcctgcctgtgactgaggaggctgacattcgtgaggatgacaacattgcaatcattgatgtgcctgtccccagtttctctgatagtgaccctgcagcaattattcatgactttgaaaagggaatgactgcttacctggacttgttgctggggaactgctatctgatgcccctcaatacttctattgttatgcctccaaaaaatctggtagagctctttggcaaactggcgagtggcagatatctgcctcaaacttatgtggttcgagaagacctagttgctgtggaggaaattcgtgatgttagtaaccttggcatctttatttaccaactttgcaataacagaaagtccttccgccttcgtcgcagagacctcttgctgggtttcaacaaacgtgccattgataaatgctggaagattagacacttccccaacgaatttattgttgagaccaagatctgtcaagagtaagaggcaacagatagagtgtccttggtaataagaagtcagagatttacaatatgactttaacattaaggtttatgggatactcaagatatttactcatgcatttactctattgcttatgctttaaaaaaaggaaaaaaaaaaaaactactaaccactgcaagctcttgtcaaattttagtttaattggcattgcttgttttttgaaactgaaattacatgagtttcattttttctttgcatttatagggtttagatttctgaaagcagcatgaatatatcacctaacatcctgacaataaattccatccgttgttttttttgtttgtttgttttttcttttcctttaagtaagctctttattcatcttatggtggagcaattttaaaatttgaaatattttaaattgtttttgaactttttgtgtaaaatatatcagatctcaacattgttggtttcttttgtttttcattttgtacaactttcttgaatttagaaattacatctttgcagttctgttaggtgctctgtaattaacctgacttatatgtgaacaattttcatgagacagtcatttttaactaatgcagtgattctttctcactactatctgtattgtggaatgcacaaaattgtgtaggtgctgaatgctgtaaggagtttaggttgtatgaattctacaaccctataataaattttactctatacaaaaaaaaaaaaaaaaaaa

SEQ ID NO: 288 - protein, 263 aa, Homo sapien
MVKIAFNTPTAVQKEEARQDVEALLSRTVRTQILTGKELRVATQEKEGSSGRCMLTLLGLSFILAGLIVGGACIYKYFMPKSTIYRGEMCFFDSEDPANSLRGGEPNFLPVTEEADIREDDNIAIIDVPVPSFSDSDPAAIIHDFEKGMTAYLDLLLGNCYLMPLNTSIVMPPKNLVELFGKLASGRYLPQTYVVREDLVAVEEIRDVSNLGIFIYQLCNNRKSFRLRRRDLLLGFNKRAIDKCWKIRHFPNEFIVETKICQE

SEQ ID NO: 289 - DNA, 1082 bp, Homo sapien
gatcccagacctcggcttgcagtagtgttagactgaagataaagtaagtgctgtttgggctaacaggatctcctcttgcagtctgcagcccaggacgctgattccagcagcgccttaccgcgcagcccgaagattcactatggtgaaaatcgccttcaatacccctaccgccgtgcaaaaggaggaggcgcggcaagacgtggaggccctcctgagccgcacggtcagaactcagatactgaccggcaaggagctccgagttgccacccaggaaaaagagggctcctctgggagatgtatgcttactctcttaggcctttcattcatcttggcaggacttattgttggtggagcctgcatttacaagtacttcatgcccaagagcaccatttaccgtggagagatgtgcttttttgattctgaggatcctgcaaattcccttcgtggaggagagcctaacttcctgcctgtgactgaggaggctgacattcgtgaggatgacaacattgcaatcattgatgtgcctgtccccagtttctctgatagtgaccctgcagcaattattcatgactttgaaaagggaatgactgcttacctggacttgttgctggggaactgctatctgatgcccctcaatacttctattgttatgcctccaaaaaatctggtagagctctttggcaaactggcgagtggcagatatctgcctcaaacttatgtggttcgagaagacctagttgctgtggaggaaattcgtgatgttagtaaccttggcatctttatttaccaactttgcaataacagaaagtccttccgccttcgtcgcagagacctcttgctgggtttcaacaaacgtgccattgataaatgctggaagattagacacttccccaacgaatttattgttgagaccaagatctgtcaagagtaagaggcaacagatagagtgtccttggtaataagaagtcagagatttacaatatgactttaacattaaggtttatgggatactcaagatatttactcatgcatttactctattgcttatgccgtaaaaaaaaaaaaaaaaaaaaaaaaaaaaa

SEQ ID NO: 290 - protein, 263 aa, Homo sapien; identical to SEQ ID NO: 288

SEQ ID NO: 291 - DNA, 21794 bp, Homo sapien
gccaaggagcggagcgcgctcagctgcgcccagagccttcggccggacctgaaaaagcgagagggagagcgagcaaaaggcgcgatccagagagccaggcaagcggggcgccgacctggggcggccccggcccgcgcccttgcccctcggccgggcggacgttcacttcttcaactgagatggacatgatataatctccattgagtcaaagaatggcatctagtcctgagcttcccaccgaagatgaacagggttcctggggcatcgacgatctccatatttcattgcaagctgaacaggaagacacccagaagaaagccttcacgtgctggataaactcacagttggccaggcacacttctccctcagttatatccgacctattcacagacattaaaaaggggcatgtcctcctggatctgctagaagtactttctgggcaacagttgcctcgggataaaggatctaataccttccagtgtagaatcaatatagaacatgccttgacattcctaagaaaccgatcaattaagctaataaatattcatgttactgatatcattgatggaaacccatccattatccttggcctaatttggacaattatcctgcactttcatattgagaagcttgcccagactctttcttgcaattacaatcagccttccctggatgatgtgagtgtggttgactcatctcctgcctcaagtcctccagctaagaaatgctctaaagtgcaagcaagatggcaaatgtctgcaagaaaggcccttcttttgtgggctcaggaacaatgcgccacctatgagtctgtcaatgtgaccgattttaagtcaagttggagaaatgggatggcttttttggccatcattcatgccttgcgaccagacctaattgacatgaagagtgtgaagcatagatccaacaaagacaatctgagagaggccttcagaattgcagaacaagaattaaaaatccccagattgctggaaccagaagatgtggatgttgttgatcctgatgaaaagtccatcatgacctatgtggcacagtttctgcagtattccaaagatgcccctgggactggagaggaggctcagggaaaggtgaaagatgctatgggctggttaactctgcaaaaggaaaaactacagaagttgctaaaggattcagagaatgatacctactttaaaaagtataatagcctgctgtcctttatggagtcattcaatgaagaaaaaaagtcctttttggatgtcctgtcaataaaacgggatctggatgagctggacaaggatcatttacagttgagagaagcctgggatggcctcgatcaccagattaatgcatggaaaataaagctaaattatgccttgcccccacccctccatcaaactgaagcttggctccaggaggtagaagagcttatggatgaagatttgtcagcctcccaggatcactctcaagccgtgactctgatacaagagaaaatgactttattcaagagcctgatggatagatttgagcatcattcgaacattctccttacctttgaaaataaggatgaaaatcacttgccattggtaccacctaacaaattggaggaaatgaaaagacgaatcaacaacattttggagaaaaaatttattctacttctagaatttcattactacaagtgcttagttcttggtttggtagatgaagtgaaatcaaaattggatatttggaacattaaatatgggagcagagaatctgtggaattattgctggaagactggcataaatttattgaagaaaaagaattcctagctcgacttgatacttcttttcaaaaatgtggagaaatttataagaatttggctggagaatgtcagaatattaataaacagtatatgatggtgaaatctgatgtttgtatgtatagaaaaaatatatataatgtgaagtccactctacaaaaagtgctggcatgttgggctacttatgtggaaaaccttcgcttactaagggcttgctttgaggagacaaagaaggaagaaattaaagaggtaccctttgagacactagcccagtggaatctagaacacgctactttaaatgaagcaggaaatttcttagtcgaagtcagcaatgatgtggttggatcatctatttctaaagaactgagaaggctgaataaaagatggagaaagttggtttcaaaaactcaacttgaaatgaacctgccactgatgataaaaaaacaggatcagcccacttttgacaattctggaaatattctatctaaagaagagaaagcaactgttgagttttcaacagatatgtcagtagaacttcctgaaaattataatcaaaatataaaggctggagagaaacatgaaaaagaaaatgaagaattcacagggcaactaaaagtggctaaagatgttgaaaaactcattggacaagtggaaatctgggaggcagaagccaaatctgttttggatcaagatgatgtggacacctcaatggaagaatctttgaagcatcttattgccaaaggctctatgtttgatgagcttatggcaagaagtgaagatatgttacaaatggatatacaaaatatttcaagccaggagtcctttcaacatgttctcacaactgggcttcaggcaaagattcaagaagctaaagagaaagtccagatcaatgtggtaaaactcattgcagcgttgaagaacttaactgacgtttcaccagatttggacatcaggctgaagatggaagaatcccagaaggaacttgaatcatatatgatgagggctcagcagttactggggcaaagagagagccccggtgaactcatttcaaaacacaaggaagcactaataatttctaatacaaaaagtctggccaagtatttgaaagctgttgaagaactaaaaaataatgtaactgaggacataaagatgtctttagaagaaaagagtagagatgtctgtgccaaatgggagtctcttcatcatgaactgtctttatatgttcaacaactaaaaatagatattgaaaaaggaaagcttagtgacaatattttaaaacttgaaaagcaaataaataaagaaaagaaacttatccgtagaggaaggaccaagggtctcatcaaagaacatgaggcctgcttttctgaggaaggctgcctgtaccagcttaatcaccacatggaagtcctgagggagctgtgtgaagagctgccttcacagaagagtcaacaagaagtgaagagactactcaaagattatgaacaaaagatagaaagacttctgaaatgtgcttccgagattcatatgacactgcagcccacagcgggaggcacgtcgaaaaacgaggggaccatcaccacatctgagaatagaggaggggatccccacagtgaggcaccatttgcaaaatcagataatcagccatcaactgaaaaggcaatggaacccactatgaagtttagcctggcatcagtgttaaggcctctgcaagaagaaagcattatggaaaaggattacagtgcatctataaatagtttactagagaggtatgatacatacagagatattcttgaacaccacctgcaaaacaacaaattcaggattacttctgatttctctagtgaagaggacaggagtagttcttgtctgcaggctaaactgacagatctacaggtcataaaaaatgaaactgatgctcgctggaaagagtttgaaattatttcattgaagttagaaaatcatgtgaatgacataaaaaagccttttgtaattaaggaaagagacacactaaaggaaagagaaagagagcttcagatgactcttaataccagaatggaatctttagagacagcactgcggcttgtgttacctgtagagaaggcatcacttcttctctgtggctcggacctgcctctccataaaatggccatccagggatttcatctcattgatgctgatcgcatctatcaacacctaaggaatatccaagattccatagcaaaacagattgaaatatgtaaccgcttagaagagccaggcaactttgtattaaaggagttacacccatttgatctacacgcaatgcagaatattatactgaaatacaaaacacaatttgaaggaatgaaccacagggtgcagaggagtgaagatactctcaaagctctggaagactttttggcgtctctcagaacagctaaactctctgctgagcccgttacagacctttcagcctcagatacacaggtggcacaagaaaatacgttgacagtaaaaaataaagagggagaaattcatctgatgaaagacaaggccaaacatttggataaatgtttgaagatgctcgatatgagctttaaagatgctgaacggggtgatgacacctcctgtgaaaacctgcttgatgctttttcaataaagttatctgagacacatggctatggggtacaggaggaattcactgaggaaaacaaattactagaggcttgtattttcaaaaataatgaactccttaaaaatattcaagatgtgcagagtcaaatcagtaaaattggtcttaaggatcctactgttccagctgtgaaacatcggaaaaaatcattaatcagactggataaggttctagatgaatatgaagaagagaagagacatttacaagaaatggctaattctcttccacacttcaaagatggcagagaaaaaaccgtgaatcaacagtgccaaaatacagtagtcttgtgggagaataccaaagccttggtcaccgaatgtcttgaacaatgtgggagagttttggagctcttaaaacaatatcagaattttaaaagcatcttgacaactttgattcaaaaagaagagagtgtcatctccctgcaggcttcgtacatgggaaaggagaacctgaagaaaaggatagcagagattgaaattgtcaaagaagaatttaatgagcatttagaagttgtagacaagataaaccaggtctgcaaaaatctacaattttatctaaataaaatgaaaacttttgaagagcccccttttgaaaaagaggctaatattattgtggatagatggcttgatataaatgagaagacagaagattactatgaaaatcttggtcgagctctagctttgtgggacaaactttttaacttaaaaaatgtcattgatgagtggacagaaaaggcccttcaaaaaatggaattacatcaattgactgaagaggacagagaaaggctgaaggaagaattacaagtccatgaacaaaaaacttcagaattttctagaagagtggctgaaatacagtttttgctccaaagcagtgaaatacctcttgaattgcaggtcatggagtcctctattttgaacaagatggaacatgtacagaagtgcttaacaggagaatccaactgccatgcactcagtggcagcactgctgagctaagggaggatctcgaccaagccaagacccagatcgggatgactgaatccctcttaaaagccctgtctccttctgacagcttggagatcttcactaaactagaggagatacaacagcagattctacagcaaaaacacagtatgatattacttgagaatcaaataggttgtctgactcctgaactctctgaattgaaaaagcaatatgaaagtgtcagtgatttatttaataccaaaaaaagtgttttgcaagatcacttttctaagttattgaatgatcaatgcaagaactttaatgactggttcagcaacattaaagtgaaccttaaggagtgttttgaatcatcagaaacaaaaaagagtgtggaacaaaagctacaaaaactttctgatttcttgactcttgaaggaagaaacagtaaaataaagcaggtggacagcgtactgaagcatgtgaagaagcatctgcccaaagcacatgtgaaggagcttatcagttggctcgtgggtcaggaattcgaattagaaaaaatggagtccatatgccaggctcgagcaaaggagcttgaagactccttgcagcagctactgagactccaggatgaccatagaaacctgaggaagtggttgactaatcaagaagagaaatggaaaggaacggaagaaccaggggagaaaactgagctgttctgccaagctttagctagaaagagggaacagtttgaatctgtggcccaattgaacaactctttgaaggaatatgggtttactgaagaagaagaaataataatggaagcaacatgtttgatggatagataccagacattactgagacaactaagtgaaatcgaggaagaggataagttactacccacagaggaccagagctttaatgatcttgcacatgatgtaattcattggataaaagagattaaagagtcccttatggttttgaattcatccgaaggcaaaatgccacttgaggaaagaatccaaaaaatcaaggaaatcattttgctgaagcctgaaggggatgccagaatagagaccatcatgaagcaggctgagagcagcgaggccccgctggttcagaagaccctcactgacatcagcaaccagtgggacaacacactccatttagctagcacctacctaagccatcaagaaaagcttctactagaaggagagaaatatttacaaagtaaggaggatctgagattaatgctcatagaattaaagaagaaacaggaagcaggctttgctctacaacatggtctgcaggagaagaaagctcagttaaagatttataagaaattcctcaagaaagcccaagatttgacatccttgctaaaggagttaaaatctcagggaaactacctcttggagtgcactaaaaatcccagcttcagtgaagagccttggctggaaataaagcatctacacgaaagtcttcttcaacaactgcaggattctgtgcaaaacttggacggtcacgttcgagaacatgattcataccaggtttgcgtcacagacctgaatactacattggacaatttctccaaggaatttgtcagtttttctgataagcctgtggatcaaatagtggttgaggaaaaattgcagaaactgcaggaactagagaatagactcagtttacaagatggcacattaaagaagattttagctttagcaaaatccgtcaagcaaaatacatcttcagtggggcagaagattattaaagatgatataaaatcacttcagtgtaaacaaaaagatttggaaaacaggcttgcatctgctaagcaggagatggaatgttgtctcaacaacattctcaaatcaaaacgctcaacagaaaagaaaggaaagtttactctgccaggcagagagaagcaggccacttctgatgtgcaggagtctactcaggaatcagctacagtggaaaagttggaggaagactgggaaataaacaaggattcagctgtggaaatggctatgtcaaaacaactttctcttaatgctcaagaaagcatgaaaaacactgaagatgagcggaaagtcaatgagctgcaaaatcaacctttagaattagatactatgttaagaaatgaacaattagaagagatagagaaattatatacccagttggaagcaaagaaagcagccattaagccactggaacaaacagaatgtcttaacaaaacagaaactggggccttggttctccacaatataggatattcggcacagcatttggacaatttgcttcaggcacttattactttgaagaaaaacaaagaaagccaatattgtgtcctcagagattttcaggaataccttgctgcagttgaatcttcaatgaaagccttgttgacagacaaggaaagtcttaaagtaggaccactggacagtgtaacgtatctggacaaaattaaaaaattcatagcatccatagaaaaagagaaagattctttaggcaacttgaaaatcaaatgggagaatttatcaaaccacgtgactgacatggataagaaattgttggaaagccagattaagcaacttgaacatggttgggaacaagtggaacagcagattcaaaagaagtattctcagcaggtagtggaatatgatgaatttacaaccctcatgaataaggtacaggacactgagatttctctgcaacagcagcagcaacatctacagttaaggctgaagtctccagaagaacgggcagggaaccaaagcatgattgccttgaccactgacctccaggctaccaagcatggattttctgttttaaaggggcaagctgaacttcagatgaagaggatttggggagaaaaagaaaagaagaatttggaggatggaataaataacttgaagaaacaatgggaaacattggagccattacacttagaagcagaaaatcagattaagaagtgtgacataaggaacaagatgaaagagactatcttatgggccaagaatttgttgggtgaacttaatccctccattccccttctcccagatgacattctttcacagatcagaaagtgcaaagtgacacatgatggcattctagctaggcagcagtctgtggaatcgttggctgaagaggtcaaagataaggttcctagccttacaacctatgagggcggtgatttaaataataccctagaggacttacggaatcaataccaaatgctggttttaaaatcaactcaaagatcacagcaattagaatttaagttggaagaaagaagcaatttttttgctataataaggaagtttcaacttatggttcaagaaagtgaaacactgataattcccagggtggagacagctgccacggaagctgaactaaaacatcaccatgttactttggaggcatctcagaaggaattgcaagaaattgacagtggaatctcaacacatcttcaggagctaacaaacatctatgaggagctgaatgtgtttgaaagattatttctggaagatcagttgaaaaatcttaagattaggaccaacagaatacaaagattcattcagaatacatgtaatgaagtggaacacaaggtaaagttttgcagacaattccatgaaaaaacatcagcgcttcaggaggaggctgacagtatacagcgcaatgaactattacttaatcaagaagtaaataaaggtgttaaagaggagatctataatcttaaagacagactcaccgctattaagtgttgcatcttacaggtattgaaacttaaaaaagtgtttgactatattggactaaactgggatttttcacaacttgaccaattacaaacccaagtatttgaaaaagaaaaggaacttgaagaaaaaattaagcagttggacacatttgaggaagaacatggcaaatatcaggcattattaagtaaaatgagagctattgatttgcaaattaagaaaatgactgaagtagtactaaaagctcctgatagctctccggaaagcagacggctcaatgcccaaattttaagtcagagaattgagaaagccaagtgtttatgtgatgagataataaagaaattaaatgaaaataagacctttgatgactcatccaaggagaaagaaatactacaaataaagctgaatgcagaagaaaatgataagttatacaaagttctccaaaacatggtattagaactctcaccaaaagaattggatgaaaagaattgtcaggacaaactagaaacttccttacatgttttaaatcagataaaatctcaattacagcagccattacttataaatttggaaattaaacatattcaaaatgaaaaggacaattgtggagcatttcaggagcaagtttgggcagaaatgtgtagtattaaagctgtgactgctattgagaaacaaagagaagaaaactcttctgaagcgagtgatgtggagacaaaactacgtgagtttgaagatcttcagatgcagcttaacacaagcattgatttgcgcacaaatgtcttgaatcatgcttatgaaaatctaacacgctataaagaagcagtcaccagggcagtggagagcatcacttccctcgaagccatcattataccctacagagtagatgttggtaatccagaagaatctttagagatgcctcttcgaaaacaagaggaattggaatccacagtagcacgcatccaggacctcactgagaaactgggaatgatatccagccccgaagccaaactacaacttcagtatactttacaggaactagtttctaagaactcagcaatgaaggaagctttcaaagcacaggaaactgaggcagaaaggtatcttgagaattacaaatgctatagaaaaatggaagaggatatttacactaacctcagcaaaatggagacagttcttggacagtccatgtcctcgttgccactgtcttacagagaagctttagagcgcttggaacagagcaaggccttggtgtcaaatcttatatcaaccaaagaagagttaatgaaactacgacagatccttagactcttgagactcaggtgcacagaaaatgatggcatatgtttgctcaagattgtgtcggctctgtgggagaaatggctgagtttgctggaagctgctaaagagtgggagatgtggtgcgaagaactgaagcaggaatggaaatttgtcagtgaagaaattgaacgagaggcaattattttagataatcttcaggaagaactccctgaaatttccaaaacaaaagaggcagccaccacagaggaactctctgagctgctagactgtttatgccaatatggagagaacgtggagaagcaacagctgttactgactctacttcttcagcgcatcagaagtatccagaatgttcctgaaagctcaggggctgtggaaactgttccagcatttcaagaaattacttctatgaaagaacgatgcaacaagcttcttcagaaagttcagaaaaataaagaattggtgcagactgaaatccaagaaagacattccttcacaaaagagataattgctttgaagaatttctttcaacagaccacaacttcattccaaaatatggcattccaggatcacccagaaaagtcagaacaatttgaggagcttcaaagcatccttaagaaagggaaactaacttttgagaatattatggaaaaactgcgaatcaagtattccgaaatgtacaccatagtccctgcagagattgaatcccaggtggaagaatgcagaaaagctttagaagacatagatgagaagattagcaatgaagtcttaaaaagctcaccatcatatgcaatgaggagaaaaatagaagaaattaacaatgggcttcataatgttgaaaagatgttgcagcagaaaagcaaaaatattgagaaagctcaagaaattcaaaagaaaatgtgggacgagttagatctatggcattccaaactaaatgagctggattctgaagttcaggacattgttgaacaggacccaggacaggctcaagaatggatggataacttgatgattcctttccagcagtatcagcaagtatcacagagagcagagtgtagaacctcacagttgaataaggccacagttaagatggaggaatatagtgaccttctgaagagcactgaggcttggatagaaaataccagtcatttgctggccaatcctgctgactatgactctttgaggacactgagtcaccatgctagcactgtgcagatggctttggaagattcagaacagaagcacaatcttttacattcaatctttatggatctagaagacctgtcaataatttttgaaacagatgaattaacccaatccatacaagagttaagtaatcaagtaacagctttacaacaaaaaataatggaaagccttccacagattcagcgaatggctgatgatgtggttgctattgaatctgaagtaaaatcaatggaaaaaagagtttcaaaaatcaaaactatcctattatcaaaagaaatatttgatttttcacctgaagaacatctcaaacatggggaggtcatacttgaaaatatacgtcccatgaagaaaaccattgctgagatagtgtcttaccaagtggaactgaggttgccccaaacaggaatgaaacctctgcctgtgtttcagcggacaaatcagcttttacaagatataaaactattggaaaatgtgactcaagaacaaaatgagttattaaaggtagtcataaaacagaccaatgaatgggatgaagaaatagaaaatttgaaacagatcttaaataattattcagctcagttctcccttgaacatatgtcaccagaccaagctgacaagctgccacaactacagggagaaatcgaacgtatggagaaacagattctgagtttgaaccagagaaaagaagacctgttggtggacttgaaggccaccgtactaaaccttcaccagcatttgaagcaagaacaagaaggagtagaaagagataggctgccagctgtaacatcagaggaaggtggagtggcagagagggatgcttctgagcggaagttgaacagaagaggctccatgtcttacctggcagcagtcgaggaagaggtggaagaaagttccgtgaagagcgataatggagatgagaaggcagagccatcgcctcagtcttggtcttcactttggaagcatgacaaggacatggaagaagacagagcttcctcatcctctggaacaattgttcaggaagcatatgggaaaataagcacctctgataattccatggcacaaatcctcacaccagactcactaaacactgagcaaggcccagaatgttccctaaggcccaaccaaacagaagagggcaccacacctcctattgaggctgacactctggactcttctgacgcgcaaggaggtttggagcccagggtggagaaaactaggccggagcccacagaagtcctgcatgcctgcaagacccaggtggccgagctggagctgtggctgcaacaagccaacgtggcagttgagccggaaacattaaacgcagacatgcagcaggtgctggaacagcagctggtagggtgccaggctatgctaacagagattgagcacaaggttgcctttctgttagagacttgcaaagatcagggcctgggagataatggagccactcaacatgaggctgaagcgctttccctgaaactgaaaacagtgaagtgcaatttagaaaaagtccagatgatgcttcaggagaagcacagtgaagatcagcatcctaccattctaaagaaatcctcagagccagagcatcaagaagctctccaaccagttaacctttctgaattggaatccattgtaactgaaaggccacaattcagcagacaaaaagatttccagcagcaacaggttctggagttaaaaccaatggaacagaaagatttcatcaaattcatagaatttaatgctaagaaaatgtggccccagtattgccaacatgataacgatacaactcaggaatcatctgcaagcaaccaggcatccagccctgaaaatgacgttccagactcgatcttgtcaccccagggccaaaatggagataagtggcaatatctgcatcatgaactctcatcaaaaataaagctcccactccctcagcttgtggagcctcaggtttccacaaatatgggtattctacccagcgtgactatgtataactttagatacccaacaactgaagaactgaaaacctataccacccaacttgaagacctgcgccaagaagcaagtaaccttcagacacaggaaaatatgacagaagaagcatatatcaatttggataaaaaattgtttgaactattcctgaccctcagtcagtgcctcagcagtgtggaggagatgctggagatgcccagactttacagggaggatggttctggccagcaggtgcactacgagacgctggctcttgagttgaagaaactttatttagcgctaagtgacaagaagggtgatcttttgaaagccatgacttggcctggcgagaacaccaacttgctccttgaatgttttgacaaccttcaagtctgcctggagcacactcaggctgcagctgtctgtagaagcaagtccctgaaagctggcctcgattacaaccgcagttaccagaatgaaataaagagattatatcatcagctcattaagagtaagacatctttacaacagtctttgaatgaaatcagtgggcagagtgttgctgaacagcttcagaaagcagatgcatatacagtggagctggagaacgccgagagccgagtggccaaactaagagatgaaggggagaggcttcatttaccttatgctttactccaggaggtttacaaattaggggatgtacttgacagtatgtggggaatgctaagagccaggtacacagaactcagcagccctttcgtcactgagagccagcaagatgctttgttgcaaggcatggtggaactggtgaagattgggaaggaaaagcttgctcatggccacttaaaacaaaccaaaagtaaagtggcgttacaggctcaaatagaaaatcacaaggtttttttccagaagcttgttgctgacatgttgttgatccaagcatactctgccaaaatacttccttctttattgcaaaacagagagacattttgggcagaacaagtaacagaagttaaaatactagaagaaaagtcacgccaatgtggtatgaagctgcagagtttgttgcagaaatgggaagaatttgatgaaaactatgcatctcttgaaaaggacctggaaattcttatatctacattgccctctgtgagtttggtggaagaaacagaggaaagattagtggaaaggatttcattttaccagcaaataaaaagaaacattggtggaaaacacgcccggctttaccaaactctgaacgaaggcaaacagttggtggcgtctgtgagctgtcctgaattagagggccagatcgcaaaactggaagagcagtggttgtccctgaacaagaaaattgaccatgagctccacaggctgcaagctcttctcaagcatctgctcagttataacagagattcggatcagttaaccaagtggttggaatcttcccagcatactctgaattactggaaagaacagtccctcaatgtgtctcaggacttggatacaatcagaagcaacatcaacaatttttttgagttttcaaaagaagttgatgaaaaatcctccttgaagactgccgttatcagtatcgggaaccagcttcttcacctgaaagaaactgatacagctacactgagagcttctttagcacagtttgaacaaaaatggacaatgctcataactcaacttccagatattcaagaaaaacttcaccagcttcaaatggagaaattgccgtctcgtaaagcaatcacagaaatgattagctggatgaacaatgtggagcatcaaacttcagatgaagactccgtgcattcaccaagttctgcatctcaagttaaacatcttcttcagaagcacaaggagtttagaatggaaatggactataaacagtggatagttgacttcgttaaccagtcattacttcagctaagcacctgtgatgtagaaagcaagcgctatgaaagaacggagtttgcagagcacctgggggagatgaaccgccagtggcaccgtgtacatggaatgctgaatagaaagatacaacatttagaacaacttctagaaagtatcactgagagtgaaaataaaatacagatcttgaacaactggatggaagcacaagaagagagactgaaaactttacaaaaacctgaaagtgtgatctcagtgcagaagctgctcctggactgtcaggatatagaaaatcaacttgcaattaaatccaaagcactagatgagttgaaacaaagttatctgactttggagagtggggcagtgccattgttagaagatacagcatcccgaattgatgagttatttcaaaagagaagcagtgttctcactcaggtcaatcagctcaaaacctccatgcagtcagttttacaggagtggaagatttatgatcaactctatgatgaagtgaatatgatgacaatccgattctggtactgcatggaacacagcaagcctgtggtgttatcattggagaccttgagatgccaggtggagaaccttcagtctctgcaagatgaagctgagagcagtgaagggagttgggagaaactccaggaggttatcggcaaactcaaaggtctctgcccctctgttgctgaaataatcgaagagaaatgccaaaatactcataaaaggtggactcaggtgaaccaagccattgcagaccagttgcagaaggcccagagtctgctccagctctggaaggcctatagcaatgctcatggtgaagctgccgcaaggctgaagcagcaggaagcaaagtttcaacagctcgcaaacatcagcatgtctggaaacaacctggcagagatcctgcccccagccctgcaggacataaaggagctgcagcatgatgtgcagaaaacaaaagaagcctttctccaaaattccagtgtcctggatcgactcccacaacccgcagagtccagcacccacatgctcctcccgggccccctgcactctctccagagggctgcttatttggaaaagatgctgcttgtgaaagcaaatgaatttgagtttgttctctcacagtttaaggattttggagtccggctggaatctttaaaaggtcttattatgcatgaagaagagaatttggatagacttcaccaacaggaaaaagaaaatcctgactcattcctgaatcatgtgctggcactgacagcccaatcacctgatattgaacatttgaatgaagtgagcctcaagctcccacttagtgacgtagctgtgaagacgttacaaaatatgaaccggcaatggattcgggccacggccacggcactggagcgctgcagtgagcttcagggaattggattgaatgaaaagtttctttattgctgtgaaaagtggatccaacttttggagaagatagaagaagcactcaaagtggatgtggctaacagccttcctgagctcctggagcagcagaaaacctataagatgttagaagctgaagtttctataaaccagacaattgctgattcctatgtcacccagtccttacaactcctggacacaacagaaatagagaacagaccagaatttattacagaattctcaaagctgacggatcggtggcagaatgctgtccagggtgttcggcagaggaagggtgacgttgatgggctggtgaggcagtggcaagatttcactacttctgtggagaacttgtttcgcttcctcactgacaccagccacctgctatctgcagtgaagggccaggagcgcttcagcctctaccaaaccagaagtctgatccatgagctgaagaataaagaaattcattttcaaaggaggcgaactacctgtgccctaaccttggaagctggagaaaagttactgctcacaactgacctgaaaactaaagagtctgtgggtaggagaatcagtcaacttcaggacagctggaaagacatggagccccagctggcagagatgattaagcagttccagagcactgtagagacctgggaccagtgtgaaaagaaaatcaaggagttgaaaagcaggctgcaagttttaaaggcacaaagtgaagatcctcttccagagcttcacgaggacctccataacgaaaaagagctgattaaggaactagaacagtctttggctagctggactcagaacttgaaagaacttcaaactatgaaggcggacttaacccggcacgttctcgtggaagatgtgatggttttgaaggagcaaatagagcatttgcacagacaatgggaggacctctgcttaagggtggccatacgtaaacaggagattgaagacagactcaatacatgggttgtattcaatgaaaaaaataaagagttgtgtgcctggctggtgcagatggaaaacaaagttctacagacagcggacattagtattgaagaaatgattgaaaagttacagaaggactgcatggaagaaataaacttgtttagtgaaaacaagttacagttaaagcagatgggtgaccagttgatcaaggccagcaacaaatcaagagcagctgagatcgatgacaagctcaacaaaattaacgatcgttggcaacatctttttgatgtcatcggatcaagggtgaagaagctgaaggagacctttgcttttattcagcagttggacaaaaacatgagcaaccttcgcacctggttggctcgaattgagtctgagctttccaagcctgttgtttatgatgtctgcgatgatcaagagatccagaagaggctcgctgagcagcaggatctacagcgagatattgaacaacacagcgcaggggtggagtccgtgtttaacatctgtgacgtcctactgcacgactccgatgcctgtgcaaatgagaccgagtgtgactcgatccagcagaccaccaggagcctggacagacgctggaggaacatttgtgccatgtccatggagcggcgcatgaaaatcgaggagacgtggcgcctgtggcagaagtttttagacgactattctcgctttgaggactggctcaagtcagctgagaggacggcagcctgcccaaattcctcagaggtgttgtacacgagtgccaaagaggaactgaagaggtttgaggcctttcagcggcagattcatgagcggctcactcagctggagctcatcaacaagcagtaccggcggctggcccgggagaaccgcacagacacggccagcaggctgaagcagatggtccacgagggcaaccagcgctgggacaaccttcagaggcgggtcacagccgtcctgcggagactcaggcatttcaccaaccagagggaagaatttgagggcaccagggagagcattctggtgtggctcacagagatggacctgcagctgaccaacgtggagcacttctcagagagtgacgccgatgacaagatgcgccaactgaatggcttccaacaggaaattacattaaataccaacaagattgatcagctcattgtgtttggggagcagctgattcagaagagcgagcccctggatgctgtgctgattgaggatgagctggaggaactccaccgctactgccaggaggtgtttggaagggtctcccggttccaccggcggctcacctcctgcactccgggcttggaagatgaaaaggaggcctctgagaatgaaacagacatggaagaccccagagaaatccagactgattcttggcgtaaacggggagagagcgaggaaccgtcatctcctcagtccctgtgtcatctagtggccccagggcacgagcggtctggctgcgagacccctgtcagcgtggactccatccccctggagtgggaccacacaggcgacgtggggggctcctcctctcacgaagaggacgaggagggcccatactacagcgcactgtcaggtaaatccatttcggatggccactcgtggcatgttcccgacagcccttcctgtcccgagcatcactacaagcaaatggaaggtgacaggaatgttccacctgttccccctgcgtccagcaccccttataaaccaccctatggaaagctactattacctccaggcacggatggtggcaaagaaggcccgcgagtcctgaatggcaacccacagcaggaagacgggggactggccggtatcacagagcagcagtcaggtgccttcgacagatgggagatgattcaagcacaggagcttcacaataagctcaaaataaaacaaaatttgcaacagctgaactctgatatcagcgccatcactacttggctgaaaaaaactgaagcagagctggaaatgttaaagatggcaaagcctccctctgatatccaggaaatagaactgagagtgaagagactgcaggagatactgaaagcctttgacacttacaaggcattagtggtctctgtcaacgtgagcagcaaggaatttctgcaaaccgagagccccgaatccacagagctccaaagtagactccgccagctgagcctgctctgggaagcagcacagggcgcagtggacagctggagagggggcttacgacagtcgctcatgcagtgccaggacttccaccagttgagtcaaaatctgctgctgtggttagcgagtgccaagaaccggaggcagaaggctcatgtcaccgatccaaaggcagacccccgggctctcctagagtgtcggagggaactaatgcaactggaaaaggagctggtagaacgtcaacctcaagtggacatgttacaggagatttcaaacagccttctcattaagggacatggagaagactgtattgaagctgaagaaaaggtgcatgttattgagaagaaactcaaacagttacgggagcaagtgtcccaagatttaatggccttgcagggaacccagaacccagcctcacccctgcccagcttcgacgaggtagactcgggggaccagcctcctgcaacatccgtgccagctccccgagcaaagcagttcagagcagtgagaactacagaaggcgaggaggagacagagagcagggtccccggcagcacacggccacagcgctccttcctctcaagggtggtccgggcagccctacccctgcagctgctcctcctgctgctgctgctcctggcctgcctgctgccctcctccgaagaagactacagctgcactcaggccaacaactttgcccggtccttttaccccatgctgaggtacaccaatgggccaccccccacatagagggcatagctggccacagtgctacaccacctgcctgattgccaagggtgcccagcacgtggccccagaccaatctgagtgacttagtgttggcaaggtcccgggacctgtgcagacttcttctgggcttacccagcacgggctccctggagcccagggcagctttcagattgtgttcctccccaggagcagggaacctgtgtggcaggtgccccgggtactttggcagaactagttgattagtttagggatctctggaaatgtcagtttcctgaagagccaagcactttgtgaattctggtttgtttgtaaaacagcattattataatgtaggtatggtcaatgagcagtggtgtccatcacatatattatagaagcaagcgagcacattccaccctagaaatggttcagaaactcataggcacccttagctgatggaaacaatcaatcatatttaatacgcttagaatcagttttactccaatcagctggcaattttgagctgccggttatacaccaaaatgttctgttcagtacctagctctgctcttttatattgctttaaatttttaaagaaattatattgcatggatgtggttatttgtgcatattttttaacaatgcccaatctgtatgaataatgtaaacttcgatttttttttaaaaaaattagattttagctggagcttttgactaatgtaaagtaaatgccaaactaccgacttgatagggatgtttttgtaagttaattttctaagactttttcacatccaaagtgatgctttgctttgggttttaactgtttggccacggcgggggtgggggcggggggttggtacagaaacttgaagctgtttgtgatatgtacaactcagatgtttctcattaaaaaacaaaattagccagaaaaaaaaaaaaaaaaaa

SEQ ID NO: 292 - protein, 2000 aa, Homo sapien
MASSPELPTEDEQGSWGIDDLHISLQAEQEDTQKKAFTCWINSQLARHTSPSVISDLFTDIKKGHVLLDLLEVLSGQQLPRDKGSNTFQCRINIEHALTFLRNRSIKLINIHVTDIIDGNPSIILGLIWTIILHFHIEKLAQTLSCNYNQPSLDDVSVVDSSPASSPPAKKCSKVQARWQMSARKALLLWAQEQCATYESVNVTDFKSSWRNGMAFLAIIHALRPDLIDMKSVKHRSNKDNLREAFRIAEQELKIPRLLEPEDVDVVDPDEKSIMTYVAQFLQYSKDAPGTGEEAQGKVKDAMGWLTLQKEKLQKLLKDSENDTYFKKYNSLLSFMESFNEEKKSFLDVLSIKRDLDELDKDHLQLREAWDGLDHQINAWKIKLNYALPPPLHQTEAWLQEVEELMDEDLSASQDHSQAVTLIQEKMTLFKSLMDRFEHHSNILLTFENKDENHLPLVPPNKLEEMKRRINNILEKKFILLLEFHYYKCLVLGLVDEVKSKLDIWNIKYGSRESVELLLEDWHKFIEEKEFLARLDTSFQKCGEIYKNLAGECQNINKQYMMVKSDVCMYRKNIYNVKSTLQKVLACWATYVENLRLLRACFEETKKEEIKEVPFETLAQWNLEHATLNEAGNFLVEVSNDVVGSSISKELRRLNKRWRKLVSKTQLEMNLPLMIKKQDQPTFDNSGNILSKEEKATVEFSTDMSVELPENYNQNIKAGEKHEKENEEFTGQLKVAKDVEKLIGQVEIWEAEAKSVLDQDDVDTSMEESLKHLIAKGSMFDELMARSEDMLQMDIQNISSQESFQHVLTTGLQAKIQEAKEKVQINVVKLIAALKNLTDVSPDLDIRLKMEESQKELESYMMRAQQLLGQRESPGELISKHKEALIISNTKSLAKYLKAVEELKNNVTEDIKMSLEEKSRDVCAKWESLHHELSLYVQQLKIDIEKGKLSDNILKLEKQINKEKKLIRRGRTKGLIKEHEACFSEEGCLYQLNHHMEVLRELCEELPSQKSQQEVKRLLKDYEQKIERLLKCASEIHMTLQPTAGGTSKNEGTITTSENRGGDPHSEAPFAKSDNQPSTEKAMEPTMKFSLASVLRPLQEESIMEKDYSASINSLLERYDTYRDILEHHLQNNKFRITSDFSSEEDRSSSCLQAKLTDLQVIKNETDARWKEFEIISLKLENHVNDIKKPFVIKERDTLKERERELQMTLNTRMESLETALRLVLPVEKASLLLCGSDLPLHKMAIQGFHLIDADRIYQHLRNIQDSIAKQIEICNRLEEPGNFVLKELHPFDLHAMQNIILKYKTQFEGMNHRVQRSEDTLKALEDFLASLRTAKLSAEPVTDLSASDTQVAQENTLTVKNKEGEIHLMKDKAKHLDKCLKMLDMSFKDAERGDDTSCENLLDAFSIKLSETHGYGVQEEFTEENKLLEACIFKNNELLKNIQDVQSQISKIGLKDPTVPAVKHRKKSLIRLDKVLDEYEEEKRHLQEMANSLPHFKDGREKTVNQQCQNTVVLWENTKALVTECLEQCGRVLELLKQYQNFKSILTTLIQKEESVISLQASYMGKENLKKRIAEIEIVKEEFNEHLEVVDKINQVCKNLQFYLNKMKTFEEPPFEKEANIIVDRWLDINEKTEDYYENLGRALALWDKLFNLKNVIDEWTEKALQKMELHQLTEEDRERLKEELQVHEQKTSEFSRRVAEIQFLLQSSEIPLELQVMESSILNKMEHVQKCLTGESNCHALSGSTAELREDLDQAKTQIGMTESLLKALSPSDSLEIFTKLEEIQQQILQQKHSMILLENQIGCLTPELSELKKQYESVSDLFNTKKSVLQDHFSKLLNDQCKNFNDWFSNIKVNLKECFESSETKKSVEQKLQKLSDFLTLEGRNSKIKQVDSVLKHVKKHLPKAHVKELISWLVGQEFELEKMESICQARAKELEDSLQQLLRLQDDHRNLRKWLTNQEEKWKGTEEPGEKTELFCQALARKREQFESVAQLNNSL

SEQ ID NO: 293 - DNA, 2509 bp, Homo sapien
ggcacgaggctgcggccgccagctcccgcgaccgcctctcctgcccctcgccggtacctcagcaaggtgccactagaagcgccaggctggggccgcctctgagcgccccgcgggggccatggatggtgaaacagcagaggagcaggggggccctgtgcccccgccagttgcacccggcggacccggcttgggcggtgctccgggggggcggcgggagcccaagaagtacgcagtgaccgacgactaccagttgtccaagcaggtgctgggcctgggtgtgaacggcaaagtgctggagtgcttccatcggcgcactggacagaagtgtgccctgaagctcctgtatgacagccccaaggcccggcaggaggtagaccatcactggcaggcttctggcggcccccatattgtctgcatcctggatgtgtatgagaacatgcaccatggcaagcgctgtctcctcatcatcatggaatgcatggaaggtggtgagttgttcagcaggattcaggagcgtggcgaccaggctttcactgagagagaagctgcagagataatgcgggatattggcactgccatccagtttctgcacagccataacattgcccaccgagatgtcaagcctgaaaacctactctacacatctaaggagaaagacgcagtgcttaagctcaccgattttggctttgctaaggagaccacccaaaatgccctgcagacaccctgctatactccctattatgtggcccctgaggtcctgggtccagagaagtatgacaagtcatgtgacatgtggtccctgggtgtcatcatgtacatcctcctttgtggcttcccacccttctactccaacacgggccaggccatctccccggggatgaagaggaggattcgcctgggccagtacggcttccccaatcctgagtggtcagaagtctctgaggatgccaagcagctgatccgcctcctgttgaagacagaccccacagagaggctgaccatcactcagttcatgaaccacccctggatcaaccaatcgatggtagtgccacagaccccactccacacggcccgagtgctgcaggaggacaaagaccactgggacgaagtcaaggaggagatgaccagtgccttggccactatgcgggtagactacgaccaggtgaagatcaaggacctgaagacctctaacaaccggctcctcaacaagaggagaaaaaagcaggcaggcagctcctctgcctcacagggctgcaacaaccagtagctcatggggccttggaggagcctggcctctcagcctgcataacagactgaaatgtgctcaggccctggccaggagggcccagggtcattcttttaacaaaaggattattttgttgtgttttaatttgtcactcggaacttcaggatggaggaccctgaccctaagcctccttcagatctctggcccaggctcaagccctagagatgggcagggcctaggggctgggagctgcctgctgccatagcagcacctttagctaggttggcccgagtgaggcctctgtgctgtcctgccctggtgcatggccttagctttctaggccactgggagttgtggctgggcttcccatcttccacagagacatctccctgtgggatgggcagatgggcctggccttgagaaaggcattggccattggttgccatggtgaccagggaccacgttgctgcctgtgaatgctgagtgagcgagtaagggaggaggggcgattgagggttcacctctgccttggggaggctgatttctcacacactggctggccctctcattctcactcctccttgggccctgaggctgctggatccggtctgcctgcctccctgtgcagtccagccctgccttgctgcagccccagcccagatggcactcagcgctctcccctgagggagtccctgggcctagccatcccctcactattcccgacccaaagggtgacttttcatctgaacttaaggtgggagatatttttaacttttttccactttggaaaatgtcactgtgacaaaagccagcatactttccctgcacccatctgctcaccagatctcaggcaggaaagcccctctctgttgaagtcaggggctatcttttggtatacttgtgtgaaagtggctggttgggagcagagctaagtggcttcccattaacctgaggtctctttctttactctgggtcagacctgaggttggggaaggcgactgagccatgctcagaatgtctggtcctggcttgggcctgagtagggcagagagggcctttcatggctgatcagagcttaccagccccaccccaccatggtagccttagggtgctgagtgcctgatactgcctgacaagtgcctgacacgcagcctagttccttcctggcccctctctcactggctgggaaaccctagaccatgtcagataggacaacactgctgggttttacatccagatagtaataaacaccatttcatcatt

SEQ ID NO: 294 - protein, 382 aa, Homo sapien
MDGETAEEQGGPVPPPVAPGGPGLGGAPGGRREPKKYAVTDDYQLSKQVLGLGVNGKVLECFHRRTGQKCALKLLYDSPKARQEVDHHWQASGGPHIVCILDVYENMHHGKRCLLIIMECMEGGELFSRIQERGDQAFTEREAAEIMRDIGTAIQFLHSHNIAHRDVKPENLLYTSKEKDAVLKLTDFGFAKETTQNALQTPCYTPYYVAPEVLGPEKYDKSCDMWSLGVIMYILLCGFPPFYSNTGQAISPGMKRRIRLGQYGFPNPEWSEVSEDAKQLIRLLLKTDPTERLTITQFMNHPWINQSMVVPQTPLHTARVLQEDKDHWDEVKEEMTSALATMRVDYDQVKIKDLKTSNNRLLNKRRKKQAGSSSASQGCNNQ

SEQ ID NO: 295 - DNA, 5780 bp, Homo sapien
ccaggcggcgttgcggccccggccccggctccctgcgccgccgccgccgccgccgccgccgccgccgccgccgccgccagcgctagcgccagcagccgggcccgatcacccgccgcccggtgcccgccgccgcccgcgccagcaaccgggcccgatcacccgccgcccggtgcccgccgccgcccgcgccaccggcatggcgctccggggcttctgcagcgccgatggctccgacccgctctgggactggaatgtcacgtggaataccagcaaccccgacttcaccaagtgctttcagaacacggtcctcgtgtgggtgccttgtttttacctctgggcctgtttccccttctacttcctctatctctcccgacatgaccgaggctacattcagatgacacctctcaacaaaaccaaaactgccttgggatttttgctgtggatcgtctgctgggcagacctcttctactctttctgggaaagaagtcggggcatattcctggccccagtgtttctggtcagcccaactctcttgggcatcaccacgctgcttgctacctttttaattcagctggagaggaggaagggagttcagtcttcagggatcatgctcactttctggctggtagccctagtgtgtgccctagccatcctgagatccaaaattatgacagccttaaaagaggatgcccaggtggacctgtttcgtgacatcactttctacgtctacttttccctcttactcattcagctcgtcttgtcctgtttctcagatcgctcacccctgttctcggaaaccatccacgaccctaatccctgcccagagtccagcgcttccttcctgtcgaggatcaccttctggtggatcacagggttgattgtccggggctaccgccagcccctggagggcagtgacctctggtccttaaacaaggaggacacgtcggaacaagtcgtgcctgttttggtaaagaactggaagaaggaatgcgccaagactaggaagcagccggtgaaggttgtgtactcctccaaggatcctgcccagccgaaagagagttccaaggtggatgcgaatgaggaggtggaggctttgatcgtcaagtccccacagaaggagtggaacccctctctgtttaaggtgttatacaagacctttgggccctacttcctcatgagcttcttcttcaaggccatccacgacctgatgatgttttccgggccgcagatcttaaagttgctcatcaagttcgtgaatgacacgaaggccccagactggcagggctacttctacaccgtgctgctgtttgtcactgcctgcctgcagaccctcgtgctgcaccagtacttccacatctgcttcgtcagtggcatgaggatcaagaccgctgtcattggggctgtctatcggaaggccctggtgatcaccaattcagccagaaaatcctccacggtcggggagattgtcaacctcatgtctgtggacgctcagaggttcatggacttggccacgtacattaacatgatctggtcagcccccctgcaagtcatccttgctctctacctcctgtggctgaatctgggcccttccgtcctggctggagtggcggtgatggtcctcatggtgcccgtcaatgctgtgatggcgatgaagaccaagacgtatcaggtggcccacatgaagagcaaagacaatcggatcaagctgatgaacgaaattctcaatgggatcaaagtgctaaagctttatgcctgggagctggcattcaaggacaaggtgctggccatcaggcaggaggagctgaaggtgctgaagaagtctgcctacctgtcagccgtgggcaccttcacctgggtctgcacgccctttctggcgagtgtctccctcaaacgcctgaggatctttctctcccatgaggagctggaacctgacagcatcgagcgacggcctgtcaaagacggcgggggcacgaacagcatcaccgtgaggaatgccacattcacctgggccaggagcgaccctcccacactgaatggcatcaccttctccatccccgaaggtgctttggtggccgtggtgggccaggtgggctgcggaaagtcgtccctgctctcagccctcttggctgagatggacaaagtggaggggcacgtggctatcaagggctccgtggcctatgtgccacagcaggcctggattcagaatgattctctccgagaaaacatcctttttggatgtcagctggaggaaccatattacaggtccgtgatacaggcctgtgccctcctcccagacctggaaatcctgcccagtggggatcggacagagattggcgagaagggcgtgaacctgtctgggggccagaagcagcgcgtgagcctggcccgggccgtgtactccaacgctgacatttacctcttcgatgatcccctctcagcagtggatgcccatgtgggaaaacacatctttgaaaatgtgattggccccaaggggatgctgaagaacaagacgcggatcttggtcacgcacagcatgagctacttgccgcaggtggacgtcatcatcgtcatgagtggcggcaagatctctgagatgggctcctaccaggagctgctggctcgagacggcgccttcgctgagttcctgcgtacctatgccagcacagagcaggagcaggatgcagaggagaacggggtcacgggcgtcagcggtccagggaaggaagcaaagcaaatggagaatggcatgctggtgacggacagtgcagggaagcaactgcagagacagctcagcagctcctcctcctatagtggggacatcagcaggcaccacaacagcaccgcagaactgcagaaagctgaggccaagaaggaggagacctggaagctgatggaggctgacaaggcgcagacagggcaggtcaagctttccgtgtactgggactacatgaaggccatcggactcttcatctccttcctcagcatcttccttttcatgtgtaaccatgtgtccgcgctggcttccaactattggctcagcctctggactgatgaccccatcgtcaacgggactcaggagcacacgaaagtccggctgagcgtctatggagccctgggcatttcacaagggatcgccgtgtttggctactccatggccgtgtccatcggggggatcttggcttcccgctgtctgcacgtggacctgctgcacagcatcctgcggtcacccatgagcttctttgagcggacccccagtgggaacctggtgaaccgcttctccaaggagctggacacagtggactccatgatcccggaggtcatcaagatgttcatgggctccctgttcaacgtcattggtgcctgcatcgttatcctgctggccacgcccatcgccgccatcatcatcccgccccttggcctcatctacttcttcgtccagaggttctacgtggcttcctcccggcagctgaagcgcctcgagtcggtcagccgctccccggtctattcccatttcaacgagaccttgctgggggtcagcgtcattcgagccttcgaggagcaggagcgcttcatccaccagagtgacctgaaggtggacgagaaccagaaggcctattaccccagcatcgtggccaacaggtggctggccgtgcggctggagtgtgtgggcaactgcatcgttctgtttgctgccctgtttgcggtgatctccaggcacagcctcagtgctggcttggtgggcctctcagtgtcttactcattgcaggtcaccacgtacttgaactggctggttcggatgtcatctgaaatggaaaccaacatcgtggccgtggagaggctcaaggagtattcagagactgagaaggaggcgccctggcaaatccaggagacagctccgcccagcagctggccccaggtgggccgagtggaattccggaactactgcctgcgctaccgagaggacctggacttcgttctcaggcacatcaatgtcacgatcaatgggggagaaaaggtcggcatcgtggggcggacgggagctgggaagtcgtccctgaccctgggcttatttcggatcaacgagtctgccgaaggagagatcatcatcgatggcatcaacatcgccaagatcggcctgcacgacctccgcttcaagatcaccatcatcccccaggaccctgttttgttttcgggttccctccgaatgaacctggacccattcagccagtactcggatgaagaagtctggacgtccctggagctggcccacctgaaggacttcgtgtcagcccttcctgacaagctagaccatgaatgtgcagaaggcggggagaacctcagtgtcgggcagcgccagcttgtgtgcctagcccgggccctgctgaggaagacgaagatccttgtgttggatgaggccacggcagccgtggacctggaaacggacgacctcatccagtccaccatccggacacagttcgaggactgcaccgtcctcaccatcgcccaccggctcaacaccatcatggactacacaagggtgatcgtcttggacaaaggagaaatccaggagtacggcgccccatcggacctcctgcagcagagaggtcttttctacagcatggccaaagacgccggcttggtgtgagccccagagctggcatatctggtcagaactgcagggcctatatgccagcgcccagggaggagtcagtacccctggtaaaccaagcctcccacactgaaaccaaaacataaaaaccaaacccagacaaccaaaacatattcaaagcagcagccaccgccatccggtcccctgcctggaactggctgtgaagacccaggagagacagagatgcgaaccacccaaaacacgcacaccctgcccctggtgccctgagacagacacacagcctcacgcccccaggaatgcaagtggtttcctggtgcttcccacggaggagttttggcagccagacttctggaggaattggttgtatagaagatcctagtgaccaaattcagcctactgcctcggatctctccagccgaagtctgtggactgcaagtctttgagatgcttctggctcccatcacctctaacatccttgtctgggtctaccaggaacgcttcatttccttggggctgcagttttgtggttgaggggcctggagaaaatcattttctccccttggcagtgtcccagggccctggatggtcctcttaccaacatctggtcttccaggcactcaaaagctgggaaccagcatctcagcgccagctctaccagttctcgttttgggccagaggcagcctctgcactcccacgcctgtcctcctggaagggacctggttggactaacggctaacctggacctggaactgtagggccaggggattgtctcagggccgacgttccacctggggcttccctccccacccaccccgactccaggctttcccttttttcttttgttcaacattgtaagaacaatcaatgctgttattactgatcccaccatgattgatgtggggtaaatattaaggagatggcctcatgggaatttgaccttgactagaaatagagactgagagtgagcaaccagctggaaggtactatgccagtcctagcagaaaaatgtgttaggggcctggcccaaagcagtgttggttgcttacagtgttgattgattttgttcttttttcttaccacctcttttctttccctctcatggtacctgctcatggttatgaagctttcaaagtaaagaacacgaaatac

SEQ ID NO: 296 - protein, 1482 aa, Homo sapien
MALRGFCSADGSDPLWDWNVTWNTSNPDFTKCFQNTVLVWVPCFYLWACFPFYFLYLSRHDRGYIQMTPLNKTKTALGFLLWIVCWADLFYSFWERSRGIFLAPVFLVSPTLLGITTLLATFLIQLERRKGVQSSGIMLTFWLVALVCALAILRSKIMTALKEDAQVDLFRDITFYVYFSLLLIQLVLSCFSDRSPLFSETIHDPNPCPESSASFLSRITFWWITGLIVRGYRQPLEGSDLWSLNKEDTSEQVVPVLVKNWKKECAKTRKQPVKVVYSSKDPAQPKESSKVDANEEVEALIVKSPQKEWNPSLFKVLYKTFGPYFLMSFFFKAIHDLMMFSGPQILKLLIKFVNDTKAPDWQGYFYTVLLFVTACLQTLVLHQYFHICFVSGMRIKTAVIGAVYRKALVITNSARKSSTVGEIVNLMSVDAQRFMDLATYINMIWSAPLQVILALYLLWLNLGPSVLAGVAVMVLMVPVNAVMAMKTKTYQVAHMKSKDNRIKLMNEILNGIKVLKLYAWELAFKDKVLAIRQEELKVLKKSAYLSAVGTFTWVCTPFLASVSLKRLRIFLSHEELEPDSIERRPVKDGGGTNSITVRNATFTWARSDPPTLNGITFSIPEGALVAVVGQVGCGKSSLLSALLAEMDKVEGHVAIKGSVAYVPQQAWIQNDSLRENILFGCQLEEPYYRSVIQACALLPDLEILPSGDRTEIGEKGVNLSGGQKQRVSLARAVYSNADIYLFDDPLSAVDAHVGKHIFENVIGPKGMLKNKTRILVTHSMSYLPQVDVIIVMSGGKISEMGSYQELLARDGAFAEFLRTYASTEQEQDAEENGVTGVSGPGKEAKQMENGMLVTDSAGKQLQRQLSSSSSYSGDISRHHNSTAELQKAEAKKEETWKLMEADKAQTGQVKLSVYWDYMKAIGLFISFLSIFLFMCNHVSALASNYWLSLWTDDPIVNGTQEHTKVRLSVYGALGISQGIAVFGYSMAVSIGGILASRCLHVDLLHSILRSPMSFFERTPSGNLVNRFSKELDTVDSMIPEVIKMFMGSLFNVIGACIVILLATPIAAIIIPPLGLIYFFVQRFYVASSRQLKRLESVSRSPVYSHFNETLLGVSVIRAFEEQERFIHQSDLKVDENQKAYYPSIVANRWLAVRLECVGNCIVLFAALFAVISRHSLSAGLVGLSVSYSLQVTTYLNWLVRMSSEMETNIVAVERLKEYSETEKEAPWQIQETAPPSSWPQVGRVEFRNYCLRYREDLDFVLRHINVTINGGEKVGIVGRTGAGKSSLTLGLFRINESAEGEIIIDGINIAKIGLHDLRFKITIIPQDPVLFSGSLRMNLDPFSQYSDEEVWTSLELAHLKDFVSALPDKLDHECAEGGENLSVGQRQLVCLARALLRKTKILVLDEATAAVDLETDDLIQSTIRTQFEDCTVLTIAHRLNTIMDYTRVIVLDKGEIQEYGAPSDLLQQRGLFYSMAKDAGLV

SEQ ID NO: 297 - DNA, 2919 bp, Homo sapien
tggatgggcggcaacatgtctgtggctttcgcggccccgaggcagcgaggcaagggggagatcactcccgctgcgattcagaagatgttggatgacaataaccatcttattcagtgtataatggactctcagaataaaggaaagacctcagagtgttctcagtatcagcagatgttgcacacaaacttggtataccttgctacaatagcagattctaatcaaaatatgcagtctcttttaccagcaccacccacacagaatatgcctatgggtcctggagggatgaatcagagcggccctcccccacctccacgctctcacaacatgccttcagatggaatggtaggtgggggtcctcctgcaccgcacatgcagaaccagatgaacggccagatgcctgggcctaaccatatgcctatgcagggacctggacccaatcaactcaatatgacaaacagttccatgaatatgccttcaagtagccatggatccatgggaggttacaaccattctgtgccatcatcacagagcatgccagtacagaatcagatgacaatgagtcagggacaaccaatgggaaactatggtcccagaccaaatatgagtatgcagccaaaccaaggtccaatgatgcatcagcagcctccttctcagcaatacaatatgccacagggaggcggacagcattaccaaggacagcagccacctatgggaatgatgggtcaagttaaccaaggcaatcatatgatgggtcagagacagattcctccctatagacctcctcaacagggcccaccacagcagtactcaggccaggaagactattacggggaccaatacagtcatggtggacaaggtcctccagaaggcatgaaccagcaatattaccctgatggaaattcacagtatggccaacagcaagatgcataccagggaccacctccacaacagggatatccaccccagcagcagcagtacccagggcagcaaggttacccaggacagcagcagggctacggtccttcacagggtggtccaggtcctcagtatcctaactacccacagggacaaggtcagcagtatggaggatatagaccaacacagcctggaccaccacagccaccccagcagaggccttatggatatgaccagggacagtatggaaattaccagcagtgaaaaagtacttacattccagtagccagtatctattagcagccatattgtcacctcagcactgtggacacctccctgtgaagagatccttccattccatctagtttttggaaaaaccttgtggataagtggctgtttcatcagtaagcagcctttgtggtttagttataaaaggctttagtagctcaaaaatactcttgatttcacatttctactctagatggcaacattggacagaaaatgcaatgacataaccaatttgtaatgattttggaactgtgtttcaaatggactgttacagactgaaaggtgtgaacagctttgtatgtttatgaagggtaagggaatttaatacttttccacagatttttttgtaaggggaagagggaaatgtacactttttacagcagcaatattttgtatattatgtttatttcatgtggtgaatatgcaaggcggtacactacgcactggacagcatcagaaatcctctgttaatgtggactggagcatggtagatgcttgattgttttggtctcaaaatggtgtgctataaagataaaggtgaggggaagacaaagcacaccatatgtccactgttctgttctcatagaggaaattcaaatcccttttatctattagataatcaagggcactgtgatacagttttgagtaaaaagacattttttaaaagccttccagttttgtggattaaacctttttataaagatcatttataatactgttttaaaatgtgaggcaataagaattactttgtgttggatctgaggaggctttggtaaaacagtttcatctaaatgaaagtggtaatcctcttctaaaatagcaataactgaaaatgaaagtgttaattttaccttgtttgagttatcagggaacttagtaagtaatatcaaagcattttataaatgatatcaaagaagagtcaacattgatccagtcattttattttgtaatattgagggataattggttattaaactgaatagttcaggagactttacaaacctttgtttcaactttcttatctggaaataatatcatttataaagggacacttttatgtttttcccttttttatgttggttgatataacacaaagagatatttaggaaaatgcttattgatgaggtttattctatctgtttttaaagcaccgaggttgcattctagataaccttgtttattagcatggcatattttaatcattatttgagactgtcctgtgcctgattattttagctaaattcagggagattgcgtggggcaggaaagcatgcattgaaaaatttctaaccacggttatttaagcataatctgaaaacatctagcccaaaggtaagttgctattttcatcacagttgcctatgcccagggaataagatgtattctttataattgaattggtttttcccacgtctaactggaaacaaaacagaaggggcgtcataaatttgaataagcagaacatactgttctcaacatactgtaatcaaaaggaggaatttcagtgggtctctgtgtgtgtatgagagagagagtgtgtgtttgtgtgtttcaaggtcagaacaggtttttttgtttttgttttttgttctttgtttttttttttgagatggagtcttgctcttgtcgcccaggctggagtgcagtggcgcaatctcagctcactgcaacctccgcctcccaggttcaagcagttctcctgcctcagcctcctga

SEQ ID NO: 298 - protein, 391 aa, Homo sapien
MGGNMSVAFAAPRQRGKGEITPAAIQKMLDDNNHLIQCIMDSQNKGKTSECSQYQQMLHTNLVYLATIADSNQNMQSLLPAPPTQNMPMGPGGMNQSGPPPPPRSHNMPSDGMVGGGPPAPHMQNQMNGQMPGPNHMPMQGPGPNQLNMTNSSMNMPSSSHGSMGGYNHSVPSSQSMPVQNQMTMSQGQPMGNYGPRPNMSMQPNQGPMMHQQPPSQQYNMPQGGGQHYQGQQPPMGMMGQVNQGNHMMGQRQIPPYRPPQQGPPQQYSGQEDYYGDQYSHGGQGPPEGMNQQYYPDGNSQYGQQQDAYQGPPPQQGYPPQQQQYPGQQGYPGQQQGYGPSQGGPGPQYPNYPQGQGQQYGGYRPTQPGPPQPPQQRPYGYDQGQYGNYQQ

SEQ ID NO: 299 - DNA, 1590 bp, Homo sapien
gaggcagttctgttgccactctctctcctgtcaatgatggatctcagaaataccccagccaaatctctggacaagttcattgaagactatctcttgccagacacgtgtttccgcatgcaaatcgaccatgccattgacatcatctgtgggttcctgaaggaaaggtgcttccgaggtagctcctaccctgtgtgtgtgtccaaggtggtaaagggtggctcctcaggcaagggcaccaccctcagaggccgatctgacgctgacctggttgtcttcctcagtcctctcaccacttttcaggatcagttaaatcgccggggagagttcatccaggaaattaggagacagctggaagcctgtcaaagagagagagcactttccgtgaagtttgaggtccaggctccacgctggggcaacccccgtgcgctcagcttcgtactgagttcgctccagctcggggagggggtggagttcgatgtgctgcctgcctttgatgccctgggtcagttgactggcagctataaacctaacccccaaatctatgtcaagctcatcgaggagtgcaccgacctgcagaaagagggcgagttctccacctgcttcacagaactacagagagacttcctgaagcagcgccccaccaagctcaagagcctcatccgcctagtcaagcactggtaccaaaattgtaagaagaagcttgggaagctgccacctcagtatgccctggagctcctgacggtctatgcttgggagcgagggagcatgaaaacacatttcaacacagcccaaggatttcggacggtcttggaattagtcataaactaccagcaactctgcatctactggacaaagtattatgactttaaaaaccccattattgaaaagtacctgagaaggcagctcacgaaacccaggcctgtgatcctggacccggcggaccctacaggaaacttgggtggtggagacccaaagggttggaggcagctggcacaagaggctgaggcctggctgaattacccatgctttaagaattgggatgggtccccagtgagctcctggattctgctggctgaaagcaacagtacagacgatgagaccgacgatcccaggacgtatcagaaatatggttacattggaacacatgagtaccctcatttctctcatagacccagcacgctccaggcagcatccaccccacaggcagaagaggactggacctgcaccatcctctgaatgccagtgcatcttgggggaaagggctccagtgttatctggaccagttccttcattttcaggtgggactcttgatccagagaagacaaagctcctcagtgagctggtgtataatccaagacagaacccaagtctcctgactcctggccttctatgccctctatcctatcatagataacattctccacagcctcacttcattccacctattctctgaaaatattccctgagagagaacagagagatttagataagagaatgaaattccagccttgactttcttctgtgcacctgatgggagggtaatgtctaatgtattatcaataacaataaaaataaagcaaataccaaaaa

SEQ ID NO: 300 - protein, 400 aa, Homo sapien
MMDLRNTPAKSLDKFIEDYLLPDTCFRMQIDHAIDIICGFLKERCFRGSSYPVCVSKVVKGGSSGKGTTLRGRSDADLVVFLSPLTTFQDQLNRRGEFIQEIRRQLEACQRERALSVKFEVQAPRWGNPRALSFVLSSLQLGEGVEFDVLPAFDALGQLTGSYKPNPQIYVKLIEECTDLQKEGEFSTCFTELQRDFLKQRPTKLKSLIRLVKHWYQNCKKKLGKLPPQYALELLTVYAWERGSMKTHFNTAQGFRTVLELVINYQQLCIYWTKYYDFKNPIIEKYLRRQLTKPRPVILDPADPTGNLGGGDPKGWRQLAQEAEAWLNYPCFKNWDGSPVSSWILLAESNSTDDETDDPRTYQKYGYIGTHEYPHFSHRPSTLQAASTPQAEEDWTCTIL

SEQ ID NO: 301 - DNA, 1686 bp, Homo sapien
ccacgcgtccgggcgtaagccaggcgtgttaaagccggtcggaactgctccggagggcacgggctccgtaggcaccaactgcaaggacccctccccctgcgggcgctcccatggcacagttcgcgttcgagagtgacctgcactcgctgcttcagctggatgcacccatccccaatgcaccccctgcgcgctggcagcgcaaagccaaggaagccgcaggcccggccccctcacccatgcgggccgccaaccgatcccacagcgccggcaggactccgggccgaactcctggcaaatccagttccaaggttcagaccactcctagcaaacctggcggtgaccgctatatcccccatcgcagtgctgcccagatggaggtggccagcttcctcctgagcaaggagaaccagtctgaaaacagccagacgcccaccaagaaggaacatcagaaagcctgggctttgaacctgaacggttttgatgtagaggaagccaagatccttcggctcagtggaaaaccacaaaatgcgccagagggttatcagaacagactgaaagtactctacagccaaaaggccactcctggctccagccggaagacctgccgttacattccttccctgccagaccgtatcctggatgcgcctgaaatccgaaatgactattacctgaaccttgtggattggagttctgggaatgtactggccgtggcactggacaacagtgtgtacctgtggagtgcaagctctggtgacatcctgcagcttttgcaaatggagcagcctggggaatatatatcctctgtggcctggatcaaagagggcaactacttggctgtgggcaccagcagtgctgaggtgcagctatgggatgtgcagcagcagaaacggcttcgaaatatgaccagtcactctgcccgagtgggctccctaagctggaacagctatatcctgtccagtggttcacgttctggccacatccaccaccatgatgttcgggtagcagaacaccatgtggccacactgagtggccacagccaggaagtgtgtgggctgcgctgggccccagatggacgacatttggccagtggtggtaatgataacttggtcaatgtgtggcctagtgctcctggagagggtggctgggttcctctgcagacattcacccagcatcaaggggctgtcaaggccgtagcatggtgtccctggcagtccaatgtcctggcaacaggagggggcaccagtgatcgacacattcgcatctggaatgtgtgctctggggcctgtctgagtgccgtggatgcccattcccaggtgtgctccatcctctggtctccccattacaaggagctcatctcaggccatggctttgcacagaaccagctagttatttggaagtacccaaccatggccaaggtggctgaactcaaaggtcacacatcccgggtcctgagtctgaccatgagcccagatggggccacagtggcatccgcagcagcagatgagaccctgaggctatggcgctgttttgagttggaccctgcgcggcggcgggagcgggagaaggccagtgcagccaaaagcagcctcatccaccaaggcatccgctgaagaccaacccatcacctcagttgttttttatttttctaataaagtcatgtctcccttcatgtttttttttttaaaa

SEQ ID NO: 302 - protein, 499 aa, Homo sapien
MAQFAFESDLHSLLQLDAPIPNAPPARWQRKAKEAAGPAPSPMRAANRSHSAGRTPGRTPGKSSSKVQTTPSKPGGDRYIPHRSAAQMEVASFLLSKENQSENSQTPTKKEHQKAWALNLNGFDVEEAKILRLSGKPQNAPEGYQNRLKVLYSQKATPGSSRKTCRYIPSLPDRILDAPEIRNDYYLNLVDWSSGNVLAVALDNSVYLWSASSGDILQLLQMEQPGEYISSVAWIKEGNYLAVGTSSAEVQLWDVQQQKRLRNMTSHSARVGSLSWNSYILSSGSRSGHIHHHDVRVAEHHVATLSGHSQEVCGLRWAPDGRHLASGGNDNLVNVWPSAPGEGGWVPLQTFTQHQGAVKAVAWCPWQSNVLATGGGTSDRHIRIWNVCSGACLSAVDAHSQVCSILWSPHYKELISGHGFAQNQLVIWKYPTMAKVAELKGHTSRVLSLTMSPDGATVASAAADETLRLWRCFELDPARRREREKASAAKSSLIHQGIR

SEQ ID NO: 303 - DNA, 428 bp, Homo sapien
atgtctcttgtcagctgtctttcagaagacctggtggggcaagtccgtgggcatcatgttgaccgagctggagaaagccttgaactctatcatcgacgtctaccacaagtactccctgataaaggggaatttccatgccgtctacagggatgacctgaagaaattgctagagaccgagtgtcctcagtatatcaggaaaaagggtgcagacgtctggttcaaagagttggatatcaacactgatggtgcagttaacttccaggagttcctcattctggtgataaagatgggcgtggcagcccacaaaaaaagccatgaagaaagccacaaagagtagctgagttactgggcccagaggctgggcccctggacatgtacctgcagaataataaagtcatcaatacctcaaaaaaaaaaaaaaaaaaaaa

SEQ ID NO: 304 - protein, 93 aa, Homo sapien
MLTELEKALNSIIDVYHKYSLIKGNFHAVYRDDLKKLLETECPQYIRKKGADVWFKELDINTDGAVNFQEFLILVIKMGVAAHKKSHEESHKE

SEQ ID NO: 305 - DNA, 2686 bp, Homo sapien
tggggctggcactatggtcatggcggaggggacggcagtgctgaggcggaacaggccgggcaccaaggcgcaggatttctataattggcctgatgaatcctttgatgaaatggacagtacactagctgttcaacagtatattcaacagaacataagagcagattgctccaatattgacaaaattcttgaaccacctgaaggccaagatgaaggtgtgtggaagtatgaacatttaaggcagttctgccttgagctaaatggacttgctgtcaaacttcagagtgaatgccatccagatacttgcactcaaatgacagcaactgaacaatggatttttctttgtgcagctcataaaactccaaaagagtgtcctgctatagactatactagacacacacttgatggtgctgcatgtcctctgaatagcaataaatattttcccagcagggttagcataaaggaatcatctgtagcgaaactaggatcagtatgccgtaggatttacagaatatttcacatgcttattttcatcatcggcagatatttgatgaatatgaaaacgaaacatttttgtgtcatcggtttactaagtttgtgatgaaatacaatttgatgtccaaggataacctgattgtaccaattttagaagaggaagtacagaattcagtttctggggaaagtgaagcatgaagggaatcataggaaaaatgtactgatcatataattaacattatgtactgtatatatcattttagacacatcaatcatgtatccatattatagcttctttgtttagtataggtttttgtatgctgggtttgccttttaaaatgggaaatactttttaagttattcataagctgtatattcaccagtgtggcactcatggtttttaaataagattagtattatctgtttataatgcctgttaataaaagaatttacagtttggtaaaattgctgctaaacaatcattggatcacaatcctcatcagacaaacccatctgtaaaaaaaatgagggagagcttgaggtttcacacaagccatttactaaagaggtagaaatgttttctattggttttaccttgagtttagatatcctaaaaaattctgtagtacgtagttttgtcttacctgttaactttccccaattgagataaaagtgttttaaaattctgtttatagtttttgatatgcatatataattatgtgtatatctaaatacaaatgcaaatgaagcattagtaatacttaaataattttactgtgctacataaagtataacatacttggaaaggatttaccgttctgcaacaacggactggtacatacaggatgatcacaatggtaaggcacataaattattttcccactggaaacctgccctgtccaccccttctcatttcccttaaccttatcttcaaactactttagctgagaagcttttcaccagactgagttagtggtggcttatacctatttatatttgtattaattgcttacagattatacctcatattagcaattacattacactacaagaaaatgtatttgcataggctcttgcttatctttgttttgcaaaattgttctacttagaaaacagtccttaaaatagtttgactcttcctgttagtaatatattaatctttcatttaaccagctaggcagcattaaatagaattgaagaaataccatagtatttattttacaccccctctcccacgaagtttatgtttggattacatgcacgtgtgagattatttgcaataattcataggttccaagggtgttgatgaatagtcatacatttttttggactttgttataattcattgtggtaagaatgattgaaatgcagatttaacaatcttataatctattgaatgccatttttgataaagcactggaggtcttattgccaaactgattgtaatgaggcagtaagggtgaaaacattgtacatgttgtgaagaaagtatttaaatccaacttttgaacagatttaacaaacatgaggaacttttttatttagaaggataattttgaaatgaagatgaaaatgtattcatcttaattgttttttcaaatttaagggaataatttataccatcttttcagacaagaatgtacagcaaaaataaggggaacagtagtatactgagagtgtgtgtatgtataatgtatgcctttccaagcttgccagtctttttggctttgaacactgcccatcagctacagtcattactgttccccaacccacaactatcttttaagaagtcttagttcacagtgaaaggaatgatgattttgaaattatggatttatattaatggcactataaaccaatggtaatggtaatttttaaacttgctaaatattgagaaactaaactactaagttaataaattatatatagcagtgtagctgttctctctagatggtgtctcacaatggatttctgttgcttgactattttcttagtgaatatttatactaaggtagtgactgagatttggtgatctggctgagtattttgaaacacattttgaataatatggcttagtgttaacggggacttaaatatgatttttttttcttactcatttcaccttccctgtactgtatgtttggaattgatcataaaacatctccaaaagaaaataaaaaaaaaaaaaaaaaaa

SEQ ID NO: 306 - protein, 194 aa, Homo sapien
MVMAEGTAVLRRNRPGTKAQDFYNWPDESFDEMDSTLAVQQYIQQNIRADCSNIDKILEPPEGQDEGVWKYEHLRQFCLELNGLAVKLQSECHPDTCTQMTATEQWIFLCAAHKTPKECPAIDYTRHTLDGAACPLNSNKYFPSRVSIKESSVAKLGSVCRRIYRIFHMLIFIIGRYLMNMKTKHFCVIGLLSL

SEQ ID NO: 307 - DNA, 2244 bp, Homo sapien
acaccatcctcttagttgctcagactgaaaagctagcagccatcctggatttctctcacactgcctattcaacgtgtgaatgcatgagtggaaagctgagttcgcactcgtgactggccggggtcgactctgacattcactcccactttggcgcgctgatttgcctctgagcggatgaaggttgagccatggcgggcggggccggggaggcgggcttggagcgagggggcggggcaggcgccacaaaaacgcgctcgcgccggcgccgaaccgcaactcccggcgacccccgcgctcccgggtggcaagatggtggcgcgcaggaggaagtgcgcgcgcgggacccggagaccgtatcccgagcccactgcgtacgcagctattccaatcaagttctctgaaaagcaacaggcttctcactacctctatgtgagagcacacggcgttcgacaaggcaccaagtccacctggcctcagaagaggactctttttgtcctcaatgtgcccccatactgcacagaggagagcctgtcccgcctcctgtccacctgtggcctcgtccagtctgtagagttgcaggagaagccggacctggctgagagcccaaaggagtcaaggtcgaagttttttcatcccaagccagttccgggtttccaggtagcctatgtggtgttccagaagccaagtggggtgtcagcggccttggccctgaagggccccctgctggtgtccacagagagccaccctgtgaagagtggcattcacaagtggatcagtgactacgcagactctgtgcccgaccctgaggccctgagggtggaagtggacacgttcatggaggcatatgaccagaagatcgctgaggaagaagctaaggccaagggggaggagggggtccctgacgaggagggctgggtgaaggtgacccgccggggccggcgcctgtgctcccccggactgaggcagccagcttgcgggtgctggagagggagagacggaagcgcagcgaaaagagctgctcaacttctacgcctggcagcatcgagagagcaagatggagcatctagcgcagctcgcaagaagttcgaggaggacaagcagaggatcgagctgctgcgggcccagcgcaaattccgaccgtactgagctgtgagagccgcagtgaatggctggaggtgcagggccaggaggaggcgaggcagggcctgcagcggtctctgagaggccgagctctggccaacgggccccaggttgaaggccaccgcgtccaacagccccatcagagtccacacaggccaggagggaaggaccaggccacccctcgggtcttgtgcttcagcagtcctggggacccaggcgtgccgagaggaggacttgtccttcctgcttcttgcctccacaccctcctctccaggaccctggatgaatccgttctgtgcttccttttccctcaatgcaaaagcccttgctggcaacgaaaaagcctcaaaagcagtgagaatacaagaaccttttattttccatccagttgggcagcagggaaaggctaggtgggcccagcctgcccttccttcctccagctggctggatatttattattagccaggagaaagcagccctggaacccagactctgtctccctcttgaggtcacagatgttgaagttggaatctcgctccttcccctgactaccatcctaggctgggctcaagactagtgaggcctgtccccaccatccctggccttgttgtggggctcaggaactcagagtcccagtgttgagtctgggagcactaggtcttcatagttccaggcccagagctacagctgggctgggagcatgtgtgtgcactgtaagaaggagctgatgatactggccacgtgctggggttcgctcatgtggacacagtgattgcctgggacttccacaaactggaactgctctttgagggtggatttcatcgtgtctatcatgaacgacagggactccttctcagagtaattctgtcttgaatcaaaatatccgtggactgctttgatcaacaggacatggcctgcagcttcctgatggaatgcgcacacagctccctgctgatgaagtcaatgctgttctctgcccaggcgagcctctggtctctgttcagaaccagacctgtgggcaccttcgtggttcctctttgcaggagaactccccgcactcctcactcaagtggctattgctcttcagtaacctctgcagcagct

SEQ ID NO: 308 - protein, 323 aa, Homo sapien
MKVEPWRAGPGRRAWSEGAGQAPQKRARAGAEPQLPATPALPGGKMVARRRKCARGTRRPYPEPTAYAAIPIKFSEKQQASHYLYVRAHGVRQGTKSTWPQKRTLFVLNVPPYCTEESLSRLLSTCGLVQSVELQEKPDLAESPKESRSKFFHPKPVPGFQVAYVVFQKPSGVSAALALKGPLLVSTESHPVKSGIHKWISDYADSVPDPEALRVEVDTFMEAYDQKIAEEEAKAKGEEGVPDEEGWVKVTRRGRRLCSPGLRQPACGCWRGRDGSAAKRAAQLLRLAASREQDGASSAARKKFEEDKQRIELLRAQRKFRPY

SEQ ID NO: 309 - DNA, 4099 bp, Homo sapien
cagctgccagccgaggaggcgcggcggagaggggactgcggtcagctgcgtccacttggggctgtgcggcggtcccgcgcccggcgatgttcccgggcactccctgagtagcggcagcttatcccccgcccgctagcccgccctggtccccggctcgctcgctggctggcgcggccccggccccgctctgcgtcggccccgccgcggtggaggcgcgcgagggggacgcggccggggatgagcggattgcgggtgaactcgccgcccgggggccccgcgaagccgtgagccgctgcttttctccgagtcgccgccctgcccttggatttgagatcatgtccatccacatcgtggcgctggggaacgagggggacacattccaccaggacaaccggccgtcggggcttatccgcacttacctggggagaagccctctggtctccggggacgagagcagcttgttgctgaacgcggccagcacggtcgcgcgtccggtgttcaccgagtatcaggccagtgcgtttgggaatgtcaagctggtggtccacgactgtcccgtctgggacatatttgacagtgattggtacacttctcgaaatctaattgggggcgctgacatcattgtgatcaaatacaacgttaatgacaagttttcattccatgaagtaaaggataattatattccagtgataaaaagagcattaaattcagttccagtaattattgctgctgttggtaccagacaaaatgaagagttaccttgtacatgcccactatgtacctcagacagagggagctgtgttagtacaactgaagggatccaacttgcaaaagaactaggagcaacctatcttgaactccacagccttgatgacttctacataggaaagtattttggaggagtgttggagtattttatgattcaagccttaaatcagaagacaagtgaaaaaatgaagaaaagaaaaatgagcaactcctttcatggaattagaccacctcaacttgaacaaccagaaaaaatgcctgtcttaaaggctgaagcgtcacattataactctgacttaaataacttgctgttctgctgccagtgtgtggacgtggtattttataaccccgatttaaagaaagttgtagaggcccacaagatcgttctctgcgctgtaagccatgttttcatgctgcttttcaatgtgaagagtcccactgacattcaggattccagtatcatccgaactacccaggatctttttgctataaacagagatactgcatttccaggtgctagccatgaatcttcaggcaacccaccattacgagtcattgttaaagacgccctcttctgttcttgtttatcagacatccttcgcttcatttattcaggtgcttttcagtgggaagaattggaagaagatatcaggaagaagttgaaagattctggggatgtttcaaatgtaatcgagaaagttaaatgcattttaaaaacaccaggaaagattaattgcctaaggaattgcaaaacctatcaagccagaaaacctttgtggttttataacacttccctcaagtttttccttaataagccgatgcttgccgatgttgtcttcgaaattcaaggtacgacagtgccagcccacagggccatcctggtggcccgttgtgaagtgatggcagccatgtttaatggtaattacatggaagcaaagagtgtcctgattcccgtttatggtgtttccaaagagactttcttgtcatttttagaatacctgtacacagactcctgctgcccagctggcatattccaggccatgtgtctcctgatctgtgccgagatgtaccaagtgtccagactgcagcacatctgtgagctgttcatcattacccagctgcagagcatgccaagcagggaactggcatccatgaaccttgatatagttgacctgcttaaaaaggccaagtttcaccactctgattgcctttcaacctggctacttcatttcattgctactaactacctcatcttcagtcaaaagcctgaatttcaggatctttcagtggaagaacgcagttttgttgaaaagcacagatggccgtcgaatatgtacttgaagcagcttgcggaatacaggaagtatattcactcccggaaatgtcgttgcttagtaatgtaacctggagcttttatacactacatttcttttttattattatgaagaatgggatacctccaggttccagtaaaattcttctgaccgaaaccaatgtgggtgttagaaaaattaccatatagcttaatatgtttattagttctctttggaaaaaaactaccactgtggtcttaaaagggaacaaaatataccataggctaaaactaaggctttcactctagaatgcaaagctgttttgcagctgttttcccttaaagatgtcctgttgctttagtgatatttagacccctctcagttaagaaatgcttagattaaaaaaaaaaaattacgtaggattaatacagaaatttaatcatgtctgattaattgctctattaaaataaggggcatttaaagacccagcataaccatttgtataatgagaaatctaggggaaaaccaatcagtccaacatgagattttaggaatagaaatttgccggccatttggaaagtgaaatgccacttagttctcaattgatgacagtgtttgaatcatcataaaaaaaatacctgcttttcatctggacaacccaattgagccactttatctccttttggcaatctgagtaggcggggaacctaggcagggctggctttcttagcgtgtaacttgtgtagcagcacagggcccacacttagaaggaccccacacttggttcaaggctctgctatagcggaaattcttaataatgtttgaagaagggccccatgatttcattttgtgctgagccctcaaaattatgtctgtttcgtggtgggaaatatcctatgttttcttgctcaaacacctttctctctgaaagcagaaaaaggcactgatataaagggaagagaaggaggctcaccggagggaagagaacatagtgaagattcccgcctttggggaggtctggaccacccagggcctccactgccaccttggctggcaagggagaaatgtgttgtgttgtcttagctttaaaacagtcacagttcttgctctatcatagatgaacaaatactttcttgatcattctgtaagaccaggaggttggtaagagtgactaaccagcctaactttaatacacatgtataaagatgttcacagagaaagatgctctgtagagaatttgctaccgaagttggctcaagaatttgtttttagtgttatttaccaagattaggacgtcagtggcttaaattctttgaattcttttcaaggactgcaagattatttgataaagagtagcatgaatcttgtgctctaatattacacagtaagttcaaagaaaggatgtaagtcaaagacttgttacatagagggaaaatggactgggatagaggacagactgatagtttctttctttcatatcacatgtatagagaaataattatatcagaaactcacaaacctagacatggaaaaacagattactgtctattgtcagcatcattttcatctgtaagtcactactggaatatatttttcttttaatttccagtgactttagaatacacacagtttttccgacttttcaaaaatttgattaaatggttttatagtataatattgggaccccataccgttagcccttgtatgtataccaacactgccaaagtaaaacattaggtcaggcatggtggctcaggcctgtaatcccagcattttgggaggctgaggcaagtggataacttgaggtcatgagttcgaaaccagcctggccaaaacagtgaaaccccgtctctactaaaaatacaaaattagccagatgtggtggcgcacacctgtaatcccagctactcaggaagctgaggcaggaaaatcgcttgaacctgggaggtggaagttgcagtgagccgagatcgcaccactgcactccagcctgggtgacaagagcgaaactccatctc

SEQ ID NO: 310 - protein, 611 aa, Homo sapien [sequence omitted]

SEQ ID NO: 311 - DNA, 1785 bp, Homo sapien
ggcacgagggtagctttccaacataaagtggaggtttcaacacaggagactttaagcaagttccagtgtgtctatatttggtctggctgatcggctggactctggccttccccgctcacgttagcagacagctctgccctagtgggcgcttagcctgcgacggcagcccgagaggatgtctaacaagcttctttctccccacccccattcagttgttctcaggtctgaattcaaaatggcctcatctcctgctgtccttcgagcgtcccggctgtaccaatggagcctgaagagttcggcgcagttcctggggtctccacagctgaggcaggttggtcagatcattagggttcctgctcggatggcggcgacgctgatcctggagcctgcgggccgctgctgctgggacgaaccggtgcgaatcgccgtgcgcggcctagccccggagcagccggtcacgctgcgcgcgtccctgcgcgacgagaagggcgcgcttttccaggcccacgcgcgctaccgcgccgacactcttggcgagctggacctggagcgcgcgcccgcgctgggcggcagcttcgcggggcttgagcccatggggctgctctgggccttggagcccgagaaacctttggtgcggctggtgaagcgcgacgtgcgaacgcccttggccgtggagctggaggtgctggatggccacgaccccgaccccgggcggctgctgtgccagacgcggcacgagcgctacttcctcccgcccggggtgcggcgcgagccggtgcgcgtgggccgggtgcgaggcacgctcttcctgccgccagaacctgggccctttcctgggattgtggacatgttcggaactggaggtggcctgctggagtatcgggctagtctgctggctgggaagggttttgctgtgatggctctggcttattataactatgaagacctccccaagaccatggagacgctccatctggagtactttgaagaagccatgaactacttgctcagtcatcccgaggtaaaaggtccaggagttgggctgcttggaatttccaaagggggtgagctctgcctttccatggcctctttcctgaagggcatcacggctgctgtcgtcatcaacggctctgtggccaatgttgggggaaccttacgctacaagggcgagaccctgccccctgtgggcgtcaacagaaatcgcatcaaggtgaccaaagatggctatgcagacattgtggatgtcctgaacagccctttggaaggacctgaccagaagagcttcattcctgtggaaagggcagagagcaccttcctgttcctggtaggtcaggatgaccacaactggaagagtgagttctatgctaatgaggcctgtaaacgcttgcaggcccatgggaggagaaagccccagatcatctgttacccagagacagggcactatattgagcctccttacttccccctgtgtcgggcttccctgcatgccttggtgggcagtcctattatctggggaggggagcccagggctcatgtcatggctcaggtggatgcttggaaacaactccagactttcttccacaaacacttgggtggccacgaggggacaatcccatcaaaagtgtaaattttatttgatcatgtggcctctctgttgctaatctctcctggaaacatctgccacatttagtgtgtgtatgtgtattcattcttttgtttttaataactaaagttttttcccctcattattaaaatgaatttaccagtaaaaaaaaaaaaaaaaaa

SEQ ID NO: 312 - protein, 483 aa, Homo sapien
MSNKLLSPHPHSVVLRSEFKMASSPAVLRASRLYQWSLKSSAQFLGSPQLRQVGQIIRVPARMAATLILEPAGRCCWDEPVRIAVRGLAPEQPVTLRASLRDEKGALFQAHARYRADTLGELDLERAPALGGSFAGLEPMGLLWALEPEKPLVRLVKRDVRTPLAVELEVLDGHDPDPGRLLCQTRHERYFLPPGVRREPVRVGRVRGTLFLPPEPGPFPGIVDMFGTGGGLLEYRASLLAGKGFAVMALAYYNYEDLPKTMETLHLEYFEEAMNYLLSHPEVKGPGVGLLGISKGGELCLSMASFLKGITAAVVINGSVANVGGTLRYKGETLPPVGVNRNRIKVTKDGYADIVDVLNSPLEGPDQKSFIPVERAESTFLFLVGQDDHNWKSEFYANEACKRLQAHGRRKPQIICYPETGHYIEPPYFPLCRASLHALVGSPIIWGGEPRAHVMAQVDAWKQLQTFFHKHLGGHEGTIPSKV

SEQ ID NO: 313 - DNA, 3890 bp, Homo sapien
atgaaggtgataagcttattcattttggtgggatttataggagagttccaaagtttttcaagtgcctcctctccagtcaactgccagtgggacttctatgccccttggtcagaatgcaatggctgtaccaagactcagactcgcaggcggtcagttgctgtgtatgggcagtatggaggccagccttgtgttggaaatgcttttgaaacacagtcctgtgaacctacaagaggatgtccaacagaggagggatgtggagagcgtttcaggtgcttttcaggtcagtgcatcagcaaatcattggtttgcaatggggattctgactgtgatgaagacagtgctgatgaagacagatgtgaggactcagaaaggagaccttcctgtgatatcgataaacctcctcctaacatagaacttactggaaatggttacaatgaactcactggccagtttaggaacagagtcatcaataccaaaagttttggtggtcaatgtagaaaggtgtttagtggggatggaaaagatttctacaggctgagtggaaatgtcctgtcctatacattccaggtgaaaataaataatgattttaattatgaattttacaatagtacttggtcttatgtaaaacatacgtcgacagaacacacatcatctagtcggaagcgctccttttttagatcttcatcatcttcttcacgcagttatacttcacataccaatgaaatccataaaggaaagagttaccaactgctggttgttgagaacactgttgaagtggctcagttcattaataacaatccagaatttttacaacttgctgagccattctggaaggagctttcccacctcccctctctgtatgactacagtgcctaccgaagattaatcgaccagtacgggacacattatctgcaatctgggtcgttaggaggagaatacagagttctattttatgtggactcagaaaaattaaaacaaaatgattttaattcagtcgaagaaaagaaatgtaaatcctcaggttggcattttgtcgttaaattttcaagtcatggatgcaaggaactggaaaacgctttaaaagctgcttcaggaacccagaacaatgtattgcgaggagaaccgttcatcagagggggaggtgcaggcttcatatctggccttagttacctagagctggacaatcctgctggaaacaaaaggcgatattctgcctgggcagaatctgtgactaatcttcctcaagtcataaaacaaaagctgacacctttatatgagctggtaaaggaagtaccttgtgcctctgtgaaaaaactatacctgaaatgggctcttgaagagtatctggatgaatttgacccctgtcattgccggccttgtcaaaatggtggtttggctactgttgaggggacccattgtctgtgccattgcaaaccgtacacatttggtgcggcgtgtgagcaaggagtcctcgtagggaatcaagcaggaggggttgatggaggttggagttgctggtcctcttggagcccctgtgtccaagggaagaaaacaagaagccgtgaatgcaataacccacctcccagtgggggtgggagatcctgcgttggagaaacgacagaaagcacacaatgcgaagatgaggagctggagcacttgaggttgcttgaaccacattgctttcctttgtctttggttccaacagaattctgtccatcacctcctgccttgaaagatggatttgttcaagatgaaggtccaatgtttcctgtggggaaaaatgtagtgtacacttgcaatgaaggatactctcttattggaaacccagtggccagatgtggagaagatttacggtggcttgttggggaaatgcattgtcagaaaattgcctgtgttctacctgtactgatggatggcatacagagtcacccccaaaaacctttctacacagttggtgagaaggtgactgtttcctgttcaggtggcatgtccttagaaggtccttcagcatttctctgtggctccagccttaagtggagtcctgagatgaagaatgcccgctgtgtacaaaaagaaaatccgttaacacaggcagtgcctaaatgtcagcgctgggagaaactgcagaattcaagatgtgtttgtaaaatgccctacgaatgtggaccttccttggatgtatgtgctcaagatgagagaagcaaaaggatactgcctctgacagtttgcaagatgcatgttctccactgtcagggtagaaattacacccttactggtagggacagctgtactctgcctgcctcagctgagaaagcttgtggtgcctgcccactgtggggaaaatgtgatgctgagagcagcaaatgtgtctgccgagaagcatcggagtgcgaggaagaagggtttagcatttgtgtggaagtgaacggcaaggagcagacgatgtctgagtgtgaggcgggcgctctgagatgcagagggcagagcatctctgtcaccagcataaggccttgtgctgcggaaacccagtaggctcctggaggccatggtcagcttgcttggaatccagcaggcagctggggctgagtgaaaacatctgcacaactgggcactggacagcttttccttcttctccagtgtctaccttcctcctcaactcccagccatctgtataaacacaatcctttgttctcccaaatctgaatcgaattactcttttgcctcctttttaatgtcagtaaggatatgagcctttgcacaggctggctgcgtgttcttgaaataggtgttaccttctctgggccttggttttttaaaatctgtaaaattagaggattgcactagagaaacttgaatgctccattcaggcctatcattttattaagtatgattgacacagcccatgggccagaacacactctacaaaatgactaggataacagaaagaacgtgatctcctgattagagagggtggttttcctcaatggaaccaaatataaagaggacttgaacaaaaatgacagatacaaactatttctatcctgagtagtaatctcacacttcatcctatagagtcaaccaccacagataggaattccttattctttttttaatttttttaagacagagtctcactttgttgcccaggctggagcgcagtggggtgatctcatctccctgcaacctccgcctcctgggttgaagcgattcttgtgcctcagcttcccaagcagctgggattacaggtgcccgccaccacgcccagctaatttttgcatttttagtagagatgggtttcaccatgttggccatgctcgtctccaactcctgacctcaggtaatccgtctgccttggcctcccaaatgctgggattacagacatgaaccaccacgcctggctggaatacttactcttgtcgggagattgaaccactaaaatgttagagcagaattcattatgctgtggtcacaggggtgtcttgtctgagaacaaatacaattcagtcttctctttggggttttagtatgtgtcaaacataggactggaagtttgcccctgttcttttttcttttgaaagaacatcagttcatgcctgaggcatgagtgactgtgcatttgagatagttttccctattctgtggatacagtcccagagttttcagggagtacacaggtagattagtttgaagcattgaccttttatttattccttatttctctttcatcaaaacaaaacagcagctgtgggaggagaaatgagagggcttaaatgaaatttaaaataagctatattatacaaatactatctctgtattgttctgaccctggtaaatatatttcaaaacttcagatgacaaggattagaacactcattaagatgctattcttc

SEQ ID NO: 314 - protein, 843 aa, Homo sapien
MKVISLFILVGFIGEFQSFSSASSPVNCQWDFYAPWSECNGCTKTQTRRRSVAVYGQYGGQPCVGNAFETQSCEPTRGCPTEEGCGERFRCFSGQCISKSLVCNGDSDCDEDSADEDRCEDSERRPSCDIDKPPPNIELTGNGYNELTGQFRNRVINTKSFGGQCRKVFSGDGKDFYRLSGNVLSYTFQVKINNDFNYEFYNSTWSYVKHTSTEHTSSSRKRSFFRSSSSSSRSYTSHTNEIHKGKSYQLLVVENTVEVAQFINNNPEFLQLAEPFWKELSHLPSLYDYSAYRRLIDQYGTHYLQSGSLGGEYRVLFYVDSEKLKQNDFNSVEEKKCKSSGWHFVVKFSSHGCKELENALKAASGTQNNVLRGEPFIRGGGAGFISGLSYLELDNPAGNKRRYSAWAESVTNLPQVIKQKLTPLYELVKEVPCASVKKLYLKWALEEYLDEFDPCHCRPCQNGGLATVEGTHCLCHCKPYTFGAACEQGVLVGNQAGGVDGGWSCWSSWSPCVQGKKTRSRECNNPPPSGGGRSCVGETTESTQCEDEELEHLRLLEPHCFPLSLVPTEFCPSPPALKDGFVQDEGPMFPVGKNVVYTCNEGYSLIGNPVARCGEDLRWLVGEMHCQKIACVLPVLMDGIQSHPQKPFYTVGEKVTVSCSGGMSLEGPSAFLCGSSLKWSPEMKNARCVQKENPLTQAVPKCQRWEKLQNSRCVCKMPYECGPSLDVCAQDERSKRILPLTVCKMHVLHCQGRNYTLTGRDSCTLPASAEKACGACPLWGKCDAESSKCVCREASECEEEGFSICVEVNGKEQTMSECEAGALRCRGQSISVTSIRPCAAETQ

SEQ ID NO: 315 - DNA, 2810 bp, Homo sapien
cccgccgcccatggagcgcgccgcgccgtcgcgccgggtcccgcttccgctgctgctgctcggcggccttgcgctgctggcggccggagtggacgcggatgtcctcctggaggcctgctgtgcggacggacaccggatggccactcatcagaaggactgctcgctgccatatgctacggaatccaaagaatgcaggatggtgcaggagcagtgctgccacagccagctggaggagctgcactgtgccacgggcatcagcctggccaacgagcaggaccgctgtgccacgccccacggtgacaacgccagcctggaggccacatttgtgaagaggtgctgccattgctgtctgctggggagggcggcccaggcccagggccagagctgcgagtacagcctcatggttggctaccagtgtggacaggtcttccgggcatgctgtgtcaagagccaggagaccggagatttggatgtcgggggcctccaagaaacggataagatcattgaggttgaggaggaacaagaggacccatatctgaatgaccgctgccgaggaggcgggccctgcaagcagcagtgccgagacacgggtgacgaggtggtctgctcctgcttcgtgggctaccagctgctgtctgatggtgtctcctgtgaagatgtcaatgaatgcatcacgggcagccacagctgccggcttggagaatcctgcatcaacacagtgggctctttccgctgccagcgggacagcagctgcgggactggctatgagctcacagaggacaatagctgcaaagatattgacgagtgtgagagtggtattcataactgcctccccgattttatctgtcagaatactctgggatccttccgctgccgacccaagctacagtgcaagagtggctttatacaagatgctctaggcaactgtattgatatcaatgagtgtttgagtatcagtgccccgtgccctattgggcatacatgcatcaacacagagggctcctacacgtgccagaagaacgtgcccaactgtggccgtggctaccatctcaacgaggagggaacgcgctgtgttgatgtggacgagtgcgcgccacctgctgagccctgtgggaagggacatcgctgcgtgaactctcccggcagtttccgctgcgaatgcaagacgggttactattttgacggcatcagcaggatgtgtgtcgatgtcaacgagtgccagcgctaccccgggcgcctgtgtggccacaagtgcgagaacacgctgggctcctacctctgcagctgttccgtgggcttccggctctctgtggatggcaggtcatgtgaagacatcaatgagtgcagcagcagcccctgtagccaggagtgtgccaacgtctacggctcctaccagtgttactgccggcgaggctaccagctcagcgatgtggatggagtcacctgtgaagacatcgacgagtgcgccctgcccaccgggggccacatctgctcctaccgctgcatcaacatccctggaagcttccagtgcagctgcccctcgtctggctacaggctggcccccaatggccgcaactgccaagacattgatgagtgtgtgactggcatccacaactgctccatcaacgagacctgcttcaacatccagggcgcgttccgctgcctggccttcgagtgccctgagaactaccgccgctccgcagccacgctccagcaggagaagacagacacggtccgctgcatcaagtcctgccgccccaacgatgtcacatgcgtgttcgaccccgtgcacaccatctcccacaccgtcatctcgctgcctaccttccgcgagttcacccgccctgaagagatcatcttcctccgggccatcacgccaccgcatcctgccagccaggctaacatcatcttcgacatcacggaagggaacctgcgggactcttttgacatcatcaagcgttacatggacggcatgaccgtgggtgtcgtgcgccaggtgcggcccatcgtgggcccatttcatgccgtcctgaagctggagatgaactatgtggtcgggggcgtggtttcccaccgaaatgttgtcaacgtccgcatcttcgtctctgagtactggttctgagggctggtctgccgcacagccgcaggtgcacctccaggccaaatcattgctgccagtgactgtggtctgtacttgtttataccctcagacttttttaatgttaggtatttgtagcataaggccaacatgtatcaagctgagccagatgaataagtccatctgatgtattttcggtgtttaaaaaatgagcccagttgctcaactgtttggttgaaaaccttgctcattttttaatgcgaaggctaagtgtcaccccctttctctgcctctggctgggccttgctaagggccaaggaaagaaagacattttttagggggcagccagtccaaatgccaaaagaagaccagttcttgccctgattgtatgaaatttgacattttggcacttttttttttttttttggccaatcagattttctatgttctaaggacatggctgctgtagaatagcacagacgtggatgataaattatccccagaagcagcatgacagaatgcctcggggagcacttggaagggaaattgcagttctgttgaaatagaggaaaatcccttggtaaagacacagcctgttaggctcgtgtgggcctccagtatgttcaccaggggaatggctgggatttctcggcactctgcatcatccatcttttcttataggtgggaaaataaacaactttgtgatcctcct

SEQ ID NO: 316 - protein, 703 aa, Homo sapien
MERAAPSRRVPLPLLLLGGLALLAAGVDADVLLEACCADGHRMATHQKDCSLPYATESKECRMVQEQCCHSQLEELHCATGISLANEQDRCATPHGDNASLEATFVKRCCHCCLLGRAAQAQGQSCEYSLMVGYQCGQVFRACCVKSQETGDLDVGGLQETDKIIEVEEEQEDPYLNDRCRGGGPCKQQCRDTGDEVVCSCFVGYQLLSDGVSCEDVNECITGSHSCRLGESCINTVGSFRCQRDSSCGTGYELTEDNSCKDIDECESGIHNCLPDFICQNTLGSFRCRPKLQCKSGFIQDALGNCIDINECLSISAPCPIGHTCINTEGSYTCQKNVPNCGRGYHLNEEGTRCVDVDECAPPAEPCGKGHRCVNSPGSFRCECKTGYYFDGISRMCVDVNECQRYPGRLCGHKCENTLGSYLCSCSVGFRLSVDGRSCEDINECSSSPCSQECANVYGSYQCYCRRGYQLSDVDGVTCEDIDECALPTGGHICSYRCINIPGSFQCSCPSSGYRLAPNGRNCQDIDECVTGIHNCSINETCFNIQGAFRCLAFECPENYRRSAATLQQEKTDTVRCIKSCRPNDVTCVFDPVHTISHTVISLPTFREFTRPEEIIFLRAITPPHPASQANIIFDITEGNLRDSFDIIKRYMDGMTVGVVRQVRPIVGPFHAVLKLEMNYVVGGVVSHRNVVNVRIFVSEYWF

SEQ ID NO: 317 - DNA, 2640 bp, Homo sapien
gggcggccaacgtgggctcgctcttcgacgacccagaaaacctgcagaagaactggcttcgggaattttaccaggtcgtgcacacacacaagccgcacttcatggccttgcactgtcaggagtttggagggaagaactacgaggcctccatgtcccacgtggacaagttcgtcaaagaactattgtcgagtgatgcgatgaaagaatataacagggctcgagtctacctggatgaaaactacaaatcccaggagcacttcacggcactaggaagcttttattttcttcatgagtccttaaaaaacatctaccagtttgactttaaagctaagaagtatagaaaggtcgctggcaaagagatctactcggataccttagagagcacgcccatgctggagaaggagaagtttcgcagactacttccccgagtgcaaatggtcaagaaaaggcttcatccggacgaggtggtgattgcagactgtgcctttgacttggtgaatatccatcttttccatgatgcttccaatctggtcgcctgggaaacaagcccttccgtgtactcgggaatccggcacaaggcactgggctacgtgctggacagaatcattgatcagcgattcgagaaggtttcctactttgtatttggtgatttcaacttccggctggattccaagtctgtcgtggagacgctctcagcaaaaccaccgatgcagacggtccgggccgccgacaccaatgaagtggtgaagctcatatttcgtgagtcggacaacgaccggaaggttatgctccagttagaaaagaaactcttcgactacttcaaccaggaggttttccgagacaacaacggcaccgcgctcttggagtttgacaaggagttgtctgtctttaaggacagactgtatgaactggacatctcgttccctcccagctacccgtacagtgaggacgcccgccagggtgagcagtacatgaacacccggtgcccagcctggtgtgaccgcatcctcatgtccccgtctgccaaggagctggtgctgcggtcggagagcgaggagaaggttgtcacctatgaccacattgggcccaacgtctgcatgggagaccacaagcccgtgttcctggccttccgaatcatgcccggggcaggtaaacctcatgcccatgtgcacaagtgttgtgtcgtgcagtgacgtggtgggaagagatgccagcgccacgagaggacacttcgtgagcctccctgtagccgtggaccgaatacgcactcttgaaagctgcatcgagaacccgcccaagcgccacctgctagacggccagccccacacttcgcttcagcctccggaccattccggagcagccccacatacctcactgtctcgtctgtctatgtgacattaagtagaaatattggtttttttttttttttaaataagtcacagtcctgttgtcaaaactctaatagacagcaaagagggtctgtaccgtagacttcacagttttcagtttttaatgattgccagtggaggggcttcttcagcacagagaccccccactgtgtccagggaccccctctgccaggtggaggtgtgtccaggggctggggaagccgagacgggcactccctctgccggccggcagcgtggccctgagcatggcaagggggtctgtctctgccgatgctccttccgcggcactgactctgcgccgtgtcacatggtttttgaatcacactgcagctgctttccatttttatatatatataaatatatataaatatatactttttaaaaataatttataaatcttaccaaaacttatgctaaatatactttccagtatgaacgcacaggagagtcccatcagcaggcggcattggagtctaggagctcagctgtgtgtccatcaacacacaaattcgtaaaaaacacacatggcctcgccatcgtgggtaaaatcggccccacagcacgtctgcaccagcgggccgttactcccatgccgttcttctgtgtaatattaagaactgaatgtgaagtttatagctagcctgggtgtaccttttaagaattttgtaaaccgtttgtctgtcttttgttactgttttatggtgccaagtatcctacgttacaacaataatatcatgggagaaatagaaatagcctagtttgcttccaatagaaactgcttttaacatgggctgtatataaaaatattaaagagaaacaaaactgtacatttcctcattgctccgctacagacaacccatgtcataaccttgttgcaaatatttttctcctatagcagtaagtacagcattagaaggtgattagagagtctgttgatgaaacacaaatgtatgtttttattgatttttactttagaacactacagagttcctgggaccggggtgaaggcattagctgggtgtttgtgtgggataaatactaccactgcaagtgactgctgtccgctgcggaatctgttcttggtggaagcacaggtccgtgtcgctgctgtggttgccgctgtccgcggttcaacacggagtccgccccgcgggtttcagctgttggtcgttctgaggggcctttggaagtgaccggtctggttcctaagcaataaaattgaccgtggtga

SEQ ID NO: 318 - protein, 363 aa, Homo sapien
MALHCQEFGGKNYEASMSHVDKFVKELLSSDAMKEYNRARVYLDENYKSQEHFTALGSFYFLHESLKNIYQFDFKAKKYRKVAGKEIYSDTLESTPMLEKEKFRRLLPRVQMVKKRLHPDEVVIADCAFDLVNIHLFHDASNLVAWETSPSVYSGIRHKALGYVLDRIIDQRFEKVSYFVFGDFNFRLDSKSVVETLSAKPPMQTVRAADTNEVVKLIFRESDNDRKVMLQLEKKLFDYFNQEVFRDNNGTALLEFDKELSVFKDRLYELDISFPPSYPYSEDARQGEQYMNTRCPAWCDRILMSPSAKELVLRSESEEKVVTYDHIGPNVCMGDHKPVFLAFRIMPGAGKPHAHVHKCCVVQ

SEQ ID NO: 319 - DNA, 598 bp, Homo sapien
cagagtcactcctgccttcaccatgaagtccagcggcctcttccccttcctggtgctgcttgccctgggaactctggcaccttgggctgtggaaggctctggaaagtccttcaaagctggagtctgtcctcctaagaaatctgcccagtgccttagatacaagaaacctgagtgccagagtgactggcagtgtccagggaagaagagatgttgtcctgacacttgtggcatcaaatgcctggatcctgttgacaccccaaacccaacaaggaggaagcctgggaagtgcccagtgacttatggccaatgtttgatgcttaacccccccaatttctgtgagatggatggccagtgcaagcgtgacttgaagtgttgcatgggcatgtgtgggaaatcctgcgtttcccctgtgaaagcttgattcctgccatatggaggaggctctggagtcctgctctgtgtggtccaggtcctttccaccctgagacttggctccaccactgatatcctcctttggggaaaggcttggcacacagcaggctttcaagaagtgccagttgatcaatgaataaataaacgagcctatttctctttgcac

SEQ ID NO: 320 - protein, 132 aa, Homo sapien
MKSSGLFPFLVLLALGTLAPWAVEGSGKSFKAGVCPPKKSAQCLRYKKPECQSDWQCPGKKRCCPDTCGIKCLDPVDTPNPTRRKPGKCPVTYGQCLMLNPPNFCEMDGQCKRDLKCCMGMCGKSCVSPVKA

SEQ ID NO: 321 - DNA, 1791 bp, Homo sapien
cccagaaattctacccaagctccctcagcaccatgtaccgagcacttcggctcctcgcgcgctcgcgtcccctcgtgcgggctccagccgcagccttagcttcggctcccggcttgggtggcgcggccgtgccctcgttttggcctccgaacgcggctcgaatggcaagccaaaattccttccggatagaatatgatacctttggtgaactaaaggtgccaaatgataagtattatggcgcccagaccgtgagatctacgatgaactttaagattggaggtgtgacagaacgcatgccaaccccagttattaaagcttttggcatcttgaagcgagcggccgctgaagtaaaccaggattatggtcttgatccaaagattgctaatgcaataatgaaggcagcagatgaggtagctgaaggtaaattaaatgatcattttcctctcgtggtatggcagactggatcaggaactcagacaaatatgaatgtaaatgaagtcattagcaatagagcaattgaaatgttaggaggtgaacttggcagcaagatacctgtgcatcccaacgatcatgttaataaaagccagagctcaaatgatacttttcccacagcaatgcacattgctgctgcaatagaagttcatgaagtactgttaccaggactacagaagttacatgatgctcttgatgcaaaatccaaagagtttgcacagatcatcaagattggacgtactcatactcaggatgctgttccacttactcttgggcaggaatttagtggttatgttcaacaagtaaaatatgcaatgacaagaataaaagctgccatgccaagaatctatgagctcgcagctggaggcactgctgttggtacaggtttaaatactagaattggctttgcagaaaaggttgctgcaaaagtggctgcacttacaggcttgccttttgtcactgctccgaataaatttgaagctctggctgctcatgacgctctggttgagctcagtggagccatgaacactactgcctgcagtctgatgaagatagcaaatgatattcgatttttgggttctggtcctcggtcaggtctgggagaattgatcttgcctgaaaatgaaccaggaagcagtatcatgccaggcaaggtgaaccctactcagtgtgaagcaatgaccatggttgcagcccaagtcatggggaaccatgttgctgtcactgtcggaggcagcaatggacattttgagttgaatgttttcaagccaatgatgattaaaaatgtgttacactcagccaggctgctgggggatgcttcagtttcctttacagaaaactgcgtggtgggaatccaggccaatacagaaaggatcaacaagctgatgaatgagtctctaatgttggtgacagctctcaatcctcatatagggtatgacaaggcagcaaagattgctaagacagcacacaaaaatggatcaaccttaaaggaaactgctatcgaacttggctatctcacagcagagcagtttgacgaatgggtaaaacctaaggacatgctgggtccaaagtgatttacataaatttataatgaaaataaacatgtataaaatttaaaaaaacagactcccatttcttaaaaacggataagtttgaaaggaaactgctattgaacttaagcatctctagcagagcaatttgatcagtatataaaaccctaggatgtgctaggtctaagatggattaaacaagtataaaataaaatacatttataaaataaaaaggaaaacagacttaaaa

SEQ ID NO: 322 - protein, 510 aa, Homo sapien
MYRALRLLARSRPLVRAPAAALASAPGLGGAAVPSFWPPNAARMASQNSFRIEYDTFGELKVPNDKYYGAQTVRSTMNFKIGGVTERMPTPVIKAFGILKRAAAEVNQDYGLDPKIANAIMKAADEVAEGKLNDHFPLVVWQTGSGTQTNMNVNEVISNRAIEMLGGELGSKIPVHPNDHVNKSQSSNDTFPTAMHIAAAIEVHEVLLPGLQKLHDALDAKSKEFAQIIKIGRTHTQDAVPLTLGQEFSGYVQQVKYAMTRIKAAMPRIYELAAGGTAVGTGLNTRIGFAEKVAAKVAALTGLPFVTAPNKFEALAAHDALVELSGAMNTTACSLMKIANDIRFLGSGPRSGLGELILPENEPGSSIMPGKVNPTQCEAMTMVAAQVMGNHVAVTVGGSNGHFELNVFKPMMIKNVLHSARLLGDASVSFTENCVVGIQANTERINKLMNESLMLVTALNPHIGYDKAAKIAKTAHKNGSTLKETAIELGYLTAEQFDEWVKPKDMLGPK

SEQ ID NO: 323 - DNA, 6814 bp, Homo sapien
ccttggccgagaccggtcctctgcggagagggccccgccctctgtgaaggcccgcccgggaattggcggcggcgctgcagccatttccggtttcggggaggtgggtggggtgcggagcgggacttggagcagccgccgccgctgccaccgcctacagagcctgccttgcgcctggtgctgccaggaagatgcggccggagcccggaggctgctgctgccgccgcacggtgcgggcgaatggctgcgtggcgaacggggaagtacggaacgggtacgtgaggagcagcgctgcagccgcagccgcagccgccgccggccagatccatcatgttacacaaaatggaggactatataaaagaccgtttaatgaagcttttgaagaaacaccaatgctggttgctgtgctcacgtatgtggggtatggcgtactcaccctctttggatatcttcgagatttcttgaggtattggagaattgaaaagtgtcaccatgcaacagaaagagaagaacaaaaggactttgtgtcattgtatcaagattttgaaaacttttatacaaggaatctgtacatgaggataagagacaactggaatcggccaatctgtagtgtgcctggagccagggtggacatcatggagagacagtctcatgattataactggtccttcaagtatacagggaatataataaagggtgttataaacatgggttcctacaactatcttggatttgcacggaatactggatcatgtcaagaagcagccgccaaagtccttgaggagtatggagctggagtgtgcagtactcggcaggaaattggaaacctggacaagcatgaagaactagaggagcttgtagcaaggttcttaggagtagaagctgctatggcgtatggcatgggatttgcaacgaattcaatgaacattcctgctcttgttggcaaaggttgcctgattctgagtgatgaactgaaccatgcatcactggttctgggagccagactgtcaggagcaaccattagaatcttcaaacacaacaatatgcaaagcctagagaagctattgaaagatgccattgtttatggtcagcctcggacacgaaggccctggaagaaaattctcatccttgtggaaggaatatatagcatggagggatctattgttcgtcttcctgaagtgattgccctcaagaagaaatacaaggcatacttgtatctggatgaggctcacagcattggcgccctgggccccacaggccggggtgtggtggagtactttggcctggatcccgaggatgtggatgttatgatgggaacgttcacaaagagttttggtgcttctggaggatatattggaggcaagaaggagctgatagactacctgcgaacacattctcatagtgcagtgtatgccacgtcattgtcacctcctgtagtggagcagatcatcacctccatgaagtgcatcatggggcaggatggcaccagccttggtaaagagtgtgtacaacagttagctgaaaacaccaggtatttcaggagacgcctgaaagagatgggcttcatcatctatggaaatgaagactctccagtagtgcctttgatgctctacatgcctgccaaaattggcgcctttggacgggagatgctgaagcggaacatcggtgtcgttgtggttggatttcctgccaccccaattattgagtccagagccaggttttgcctgtcagcagctcataccaaagaaatacttgatactgctttaaaggagatagatgaagttggggacctattgcagctgaagtattcccgtcatcggttggtacctctactggacaggccctttgacgagacgacgtatgaagaaacagaagactgagcctttttggtgctccctcagaggaactctccctcacccaggacagcctgtggcctttgtgagccagttccaggaaccacacttctgtggccatctcacgtgaaagacattgcctcagctactgaaggtggccacctccactctaaatgacattttgtaaatagtaaaaaactgcttctaatccttcctttgctaaatctcacctttaaaaacgaaggtgactcactttgctttttcagtccattaaaaaaacattttattttgcaaccattctacttgtgaaatcacgctgaccctagcctgtctctggctaaccacacaggccattcccctctcccagcaccttgcagacttgggcccatcaagagctactgctggccctggctccgcagcctggatacttacctggccctcctccctagggagcaagtgccttccacttacttcccatccaggtctcagaggtctcaaggccaaccttggaatccttatttaaccattcaagtaatcaacggaagttttcaccctttaatcttaagtttagccttttaagaaaaacagtaagcgatgactgctgaaaggctcattgtgtaatctcccaagggtttggtcttattccattttcttctggtcaccagatgatttcttcctttaccatcaaatacttcttcataatggtcacagtctgaggatgtgcgcaaattctggttcttcccaagctctaaccgtaacacgtcccaccccctttttaaagcacttactgttttcagagcacccatatcccaccctggtgagaaggccactctcacatctgagtgttgggtacaaagctgctccgtagagtgatgtgcactcctggtgggtgaggggcaggggcagtggcagtgtgcaaagaattgattactccttgcagagcctgtggcttgcatttcctactgctttctacgtttgaaaattatgacagtctctggctaggtctgggtccagattaggatttaaactgataaaggaaactgttggtaaatcctctgctcagaaagcatttatcatgttcctatttaaggattaggtttattaatttaggcctcttagaagctaacccacttaaatattactcttctgaatgctagttctcttttattcttgatgtcctaagtcaattgaatctggcatctggggctagggtctgcctgtctacatattttttatttttttctgagaaattctgaacacatagatctctttcctaaactgacattttctattttgactgttttcatactataaccaggtaaagggacttctttcagagagctttatactgcctgaccaaagaacaaatctgaaaatcaccattttaaagttattttttcagttgaaccaaagtttaagtgaagaggacttttggcatattatacccaggatcagtttgtctttttgtatccatcaagtattacaggagaaggattgggaacagaatggaaaaacagtgtatgaaagtcatgttacaggccgagtgcggtggctcacacctgtaatcctagcactttgggaggctgaggcaggtggctcacttgaggtcaggaattcaagaccagcctggccaacatggtgaaaccccgtctctactaaaaagacaaaaaattagctgggcgtggtggcgggcacctataatcccacctacttggtaggctgaggcaggagaatcgcttgaacccaggaggcggaggttgcagtgagacgagattgtgccactgcactctagcctgggtgacagagcaaaactgtgtctcaaaaaaaaaaaagtcatgttacacatttaagtttttgaaattgctccttttatcggtaaagattctcaatccaaattctcctgggtgtgttgtcatcagctgtgatatgtttgtgcacattacgtatagcagaggatgtaagcaatattattgtttgtgaagttttgtttttaatgtcttgagtatgagttatgtttagtcactgtcagcatctgagaactttaataagcccttgagatattccaaagttttattttacttttttaaagaacagaaaaagatgaatgaaagaaccaaggagagatgcagagactatatttagcatgtataggttaaagtaagaaggaggttgtggtaactaaataggagtcctataaaatcaaatacattgtcaaccttttctgcacatctagtttcctaccatagaatcccactggaataccacatagcttttgcactgcagttactatttactaatgtaaacgtagggtttgtaaaagtcacaaacttataagcaatgaacttacctgctagtctttttattttggcttgcatgaagtcactgcaaattcaaatgtcagtaccggcatttaaaatatatctatatcactttgttggtacaaagttatttcaagataagtgtaattttgttacaagtttattttgaagagacaaatctcctgtgatctatgcaggacctctgtactttctaaagaacaaaatgttatgtagacattatacatggttggttgtctcttcttgaaactgtaatgtaaatctagggtccagtcatatcctaggtatcatcatttatccaagtacttggaggaatacaagtatatataaatacagtcattgagaataagtcgatttgaggcatacaagagtagtttcttacacagtttaacacagcctgattcaagactctgataggattcaaacagataccggttaaccatgactaccaaaactgatcatctgagtcgattgatagaggtgtgactagtccttagcactttttctcattcctctttttattcagcattgctgttacctatttcaggtttataagacctctttcagcagatcacatcagaagccaggaaatgcatagctaggagatgtcaaaagcccatatgaggagtggaccaagcagcagtggcggtttctcctcgcatctttttttttttaagctttaacttagcaggggcatggactttatagcactttttcaactttttgctttgctttggataagaaatccttacctttaaaaaaagcttctagtctccataacccccaaagtactgcttatttgtttgaagaatccagccatcgtagtgctttagtcactatcgtaaacattcatgatagggcaaggattttaaaacaggattcttgcttctgtagtcatcaaggtgaacagaagcatcctacacaaccactaagggctctatgtttgtgtcatgcctcttcaaacaccaaggagttgaacatgcttccagtgatttgtctccgtaatgccttcttcctttatttggcctttctttctttctgtaccttcaagttcttgatttttaaaattccaactctagagaaaaccaatatatggtggtgctgggctttgaagatagcatatcagacgccttggttctgtttgtacacttagccttacatttcaggaggaggcttttcattaggggcttaagctagctcctttggcttttaaaaaaaattttttttcaaatttcttcattacctaagggagcctgcatctaaatttctcaactagttcagcctagctgaattttctagtgtgtaatacactttgcttccttcttattggtgaaaaccagggggatgagtggcttccatggagagatttcctgatttctcagggaggaaaaaagtgatgacatttaccactacttttatgtttttcccctttttccaaattgataaggatttctggttcctagtgatccgggattgggcaacagtgcagaactgccagtcatgccgtaggccgtgaagaaagaatgtgagtaactgttgttttgcaaggatttgtagggttatgggcagttgttgtttgaagcattgctatgacctaattcccaaggtatctttcctctcttggtgttctaggtaagccaatgagctttaatctctacttgctataaccgtgtgcttagaaaaagaggtgagagtagtggttttccttcaaactgtccacattcatgaagattatgaattgttaggacagccagggcaagatagaccctgtctctacaaaaatttttttctaaattaaccgggcatggtggtgcctgcctgtagtcccacctgtgtgggagaatcacttgagcctgggaggtcaaggctgcagtgagccatgattgcacccctgcactccagcctgggtgacagagtgagaccctggctcaataagagggggaaaaaaaattgttaggagctgggtgcggatgcagcctgcaatcccagctacttgagaggctgaggccggaggattgcttaaacccaagaatttgagcgtagcctgggcaacacagcaagaccccatctaagaaaaaaatgttttttaaatcagcttagcccaaaggggttgtgaatggggaggtataaaaagcaaagattattttttggctactaagccaagaacttacagggattttttttttcagtcccagaacctacagataccctgctacttgcttcacgtggatgctcagtgcccagcagccatcttaatacattaaaccagtttaaaaaataccttccatgtggagaaaaacatgtctttttctcgcctcaactttatccacatgaaatgtgtgcccatggctgggcgcagtggctcacctgtaatcccaacactttgggaggctgaagcaggcagattgcttgaggccaggagttcgagaacagtctggccaacatggcgaaacctcatctctactaaaattacaaaaattagccgggcatggtggcacatgcctgtaatcccagctacgtcaggaggctgaggcacaggaattgcttgaacccaagaggcagaggatgcaatgagccaagatcacaccactgcactccagccttggcgacagagggagactctgtctc

SEQ ID NO: 324 - protein, 562 aa, Homo sapien
MRPEPGGCCCRRTVRANGCVANGEVRNGYVRSSAAAAAAAAAGQIHHVTQNGGLYKRPFNEAFEETPMLVAVLTYVGYGVLTLFGYLRDFLRYWRIEKCHHATEREEQKDFVSLYQDFENFYTRNLYMRIRDNWNRPICSVPGARVDIMERQSHDYNWSFKYTGNIIKGVINMGSYNYLGFARNTGSCQEAAAKVLEEYGAGVCSTRQEIGNLDKHEELEELVARFLGVEAAMAYGMGFATNSMNIPALVGKGCLILSDELNHASLVLGARLSGATIRIFKHNNMQSLEKLLKDAIVYGQPRTRRPWKKILILVEGIYSMEGSIVRLPEVIALKKKYKAYLYLDEAHSIGALGPTGRGVVEYFGLDPEDVDVMMGTFTKSFGASGGYIGGKKELIDYLRTHSHSAVYATSLSPPVVEQIITSMKCIMGQDGTSLGKECVQQLAENTRYFRRRLKEMGFIIYGNEDSPVVPLMLYMPAKIGAFGREMLKRNIGVVVVGFPATPIIESRARFCLSAAHTKEILDTALKEIDEVGDLLQLKYSRHRLVPLLDRPFDETTYEETED

SEQ ID NO: 325 - DNA, 3693 bp, Homo sapien
gtggagatgaatggcgggcgcggcgaccgggagccggacccctgggaggtcggagcttgtcgagggatgcggctggcgctgcccggagcatggcgaccgcgtggctgagctcttctgtcgccgctgccgccgctgcgtgtgcgcgctttgcccggtgctgggcgcgcaccgtggccaccctgtgggcctggcgctggaggcagcggtgcacgtgcagaaactcagccaagaatgtttaaagcagctggcaatcaagaagcagcagcacattgacaacataacccagatagaagatgccaccgagaagctcaaggctaatgcagagtcaagtaaaacctggctgaaggggaaattcactgaactcagattactacttgacgaagaggaagcgctggccaagaaattcattgataaaaacacgcagcttaccctccaggtgtacagggaacaagctgactcttgcagagagcaacttgacatcatgaatgatctctccaacagggtctggagtatcagccaggagcccgatcctgtccagaggcttcaggcatacacggccaccgagcaggagatgcagcagcagatgagcctcggggagctgtgccatcccgtgcccctctcttttgagcccgtcaagagcttctttaagggcctcgtggaagccgtggagagtacattacagacgccattggacattcgcctttccccgaccaatcacgcctacagtgctttgaaggtttcctctcctaggctagtttcaaacaggccctaaacaagtctgctgctgccctctcatcagacctccgcaccctcaccccaccatcacttaaactactttaatccagttccttcaaagtgatacccccacaggtaagccctcagcatcctgaatacatcatccgcagcctgggaaccttctccctcgtacagcacaggaacctgacacatagtaggcacacagtaaacgtttgtgaatgaatgggagtcatccagtcctgactcttctgtctcttgaggtcccttgaatcttccgcttcctccccaccgatttcagcgtgtccacatcacagctccctccagaagctgcaagagcttcttagcagttcctggtctgaaccctctcccagtcctcatcttccaccctaaaactagagtgatcttcctaaaacttcacttaacccctcagctatgaaaaggcttccaggagtttccatgaaataacaaaaaaaaatacaagcgcctcaccttagcattcaaggcttgtctagtctgcccaaaattacttatcctcacctagctcctaccactcttcttagagactctccagtcagaaatgtgtcgcatagttccacctccacacctctctgctgccagcacattcatgcagaaaagtcttttcacctgtctcagtcttccgcaggcttacctgcgccaggaagtctaaccaaggaacaagaatctcactatcagagccacaaatctgggacctgtctttccaactaaattggaggctttggaagggcagctttgtcctatactctctccaccctgaaaagttcccagaaagccccttccctcccaagcagtgaattaataaccagcaggtgcctatcactgagtaacagaagagctgagttaggcgggcctcacaggtcacccagccagatctcatctggggagtctgaggtcctgaaagaaagcagagctgcgtaaagttaccccggggtgatataggggggccagacgtgtgccccgttcacccacccccaggcaagcatctgacctgtcccctggcccagcccttaggcccagctttcaacctgcttactcatttctcaggggattttgggaaggaatcagcaggtgacagttgctaagcaaccaaagggcgtggtgtttcccaactgtcttgggacaaaaagggtaagagcacccttagatccagatgttgccaaggaaacccagagtgcccagctgtctggaatgaagtgacagaggtagaaaacagtaggccctcacaggaggccaccttcgctagcagggagtgggaggcttctttccagggatttgtgtctccgttctgaaggttctgcgtcctgttttgtcaattccctagacggttttgaagttatattctgttaaagcatcttcataggtgcttggtgggaggccaaggtcgccgaatcctcgtggtttaaatagactttcagtgcattagtttgaaccatataaaactgacaattttcaatagtttttgagttaaaaatggcacttttgatatgagacaatgtagcagaataccaggcagacagaaccttgcaaacaccttaacttctaaccaaagactttaaaactctggctggacagagttttaagcactatgctgcaggaatcctgagaaaaaggggaaattaattctattaggaatggcccaaactgaattgtgacaggcagagggtgttcctgacagagggaagatgaatacacttgaccccaacatttctgcccatccctgatgaccaagacctcttcccagacccacagctgcaggggccaagtaataacagctcttaatagtttataatgcactgttttaatgctttacgactaaactcatctgatcctttcatcagccctagagggtagaaagttttcccaattctacacatggcaaaatggagacccagagtcacttgcccaaggtcgcacagctagtggtggagctggagtctgggcccaggctgtgagttccaggtctgtgctcatggccaccaggccatactgctcagggtgaatgcagctggtctctggccagtgcctggtgctctggcccctctcgtggagctactgcccatgatgctttcctagtgcctggttactctgcgagacttgagtctacctttggactgccttccttgggggtctgagatgaggccttatggcccagaggggaacttgattcaaaaatttgggattcatgtagcagagacagagctagactgtaaaggtcacaaactagctgtgtcaaggcccgtgatagccagaaagcggcagtttcagtccatatcaattgtgtgaccagggctagtcactttttacttctcagtgccatctataaaatggggataatagcactacctaccaagtgctgtgaggctcaaatgagccaaaggttataaacttgccttaaaactatagtcctatacaaaaattagctgggcgtggtggtgcatgcctgtaatcccagctactagggaggctgaggcaagagagttgcttgaacccaggaggcggagattgcagtgagctgagattgcaccactgcactccagcctggggacagagcaagactcttgtctcaaaaaaaacaaaaaaaacatatatactgctgtatcatgccaggatttatcagcattcccaagggagcttgcacggtactgaccgagtgctgagactactggtattcccagctgccatgtggcagcagcaggagctactagaatattctcagcacaggaatgaggcttccttggtttccatgtctgtaagggttactgatcacttaccttcttctctttcagacttgaatctgtagacatttctttattgatatggcaaattgcttgcagatatttttaaatgacagcaattttctaatatttggtttaataaaatgtgaataatgtccctttt

SEQ ID NO: 326 - protein, 253 aa, Homo sapien
MAGAATGSRTPGRSELVEGCGWRCPEHGDRVAELFCRRCRRCVCALCPVLGAHRGHPVGLALEAAVHVQKLSQECLKQLAIKKQQHIDNITQIEDATEKLKANAESSKTWLKGKFTELRLLLDEEEALAKKFIDKNTQLTLQVYREQADSCREQLDIMNDLSNRVWSISQEPDPVQRLQAYTATEQEMQQQMSLGELCHPVPLSFEPVKSFFKGLVEAVESTLQTPLDIRLSPTNHAYSALKVSSPRLVSNRP

SEQ ID NO: 327 - DNA, 1642 bp, Homo sapien
ccagatctcagaggagcctggctaagcaaaaccctgcagaacggctgcctaatttacagcaaccatgagtacaaatggtgatgatcatcaggtcaaggatagtctggagcaattgagatgtcactttacatgggagttatccattgatgacgatgaaatgcctgatttagaaaacagagtcttggatcagattgaattcctagacaccaaatacagtgtgggaatacacaacctactagcctatgtgaaacacctgaaaggccagaatgaggaagccctgaagagcttaaaagaagctgaaaacttaatgcaggaagaacatgacaaccaagcaaatgtgaggagtctggtgacctggggcaactttgcctggatgtattaccacatgggcagactggcagaagcccagacttacctggacaaggtggagaacatttgcaagaagctttcaaatcccttccgctatagaatggagtgtccagaaatagactgtgaggaaggatgggccttgctgaagtgtggaggaaagaattatgaacgggccaaggcctgctttgaaaaggtgcttgaagtggaccctgaaaaccctgaatccagcgctgggtatgcgatctctgcctatcgcctggatggctttaaattagccacaaaaaatcacaagccattttctttgcttcccctaaggcaggctgtccgcttaaatccagacaatggatatattaaggttctccttgccctgaagcttcaggatgaaggacaggaagctgaaggagaaaagtacattgaagaagctctagccaacatgtcctcacagacctatgtctttcgatatgcagccaagttttaccgaagaaaaggctctgtggataaagctcttgagttattaaaaaaggccttgcaggaaacacccacttctgtcttactgcatcaccagatagggctttgctacaaggcacaaatgatccaaatcaaggaggctacaaaagggcagcctagagggcagaacagagaaaagctagacaaaatgataagatcagccatatttcattttgaatctgcagtggaaaaaaagcccacatttgaggtggctcatctagacctggcaagaatgtatatagaagcaggcaatcacagaaaagctgaagagaattttcaaaaattgttatgcatgaaaccagtggtagaagaaacaatgcaagacatacatttctactatggtcggtttcaggaatttcaaaagaaatctgacgtcaatgcaattatccattatttaaaagctataaaaatagaacaggcatcattaacaagggataaaagtatcaattctttgaagaaattggttttaaggaaacttcggagaaaggcattagatctggaaagcttgagcctccttgggttcgtctataaattggaaggaaatatgaatgaagccctggagtactatgagcgggccctgagactggctgctgactttgagaactctgtgagacaaggtccttaggcacccagatatcagccactttcacatttcatttcattttatgctaacatttactaatcatcttttctgcttactgttttcagaaacattataattcactgtaatgatgtaattcttgaataataaatctgacaaaatatt

SEQ ID NO: 328 - protein, 478 aa, Homo sapien
MSTNGDDHQVKDSLEQLRCHFTWELSIDDDEMPDLENRVLDQIEFLDTKYSVGIHNLLAYVKHLKGQNEEALKSLKEAENLMQEEHDNQANVRSLVTWGNFAWMYYHMGRLAEAQTYLDKVENICKKLSNPFRYRMECPEIDCEEGWALLKCGGKNYERAKACFEKVLEVDPENPESSAGYAISAYRLDGFKLATKNHKPFSLLPLRQAVRLNPDNGYIKVLLALKLQDEGQEAEGEKYIEEALANMSSQTYVFRYAAKFYRRKGSVDKALELLKKALQETPTSVLLHHQIGLCYKAQMIQIKEATKGQPRGQNREKLDKMIRSAIFHFESAVEKKPTFEVAHLDLARMYIEAGNHRKAEENFQKLLCMKPVVEETMQDIHFYYGRFQEFQKKSDVNAIIHYLKAIKIEQASLTRDKSINSLKKLVLRKLRRKALDLESLSLLGFVYKLEGNMNEALEYYERALRLAADFENSVRQGP

SEQ ID NO: 329 - DNA, 3442 bp, Homo sapien
agccggtgcgccgcagactagggcgcctcgggccagggagcgcggaggagccatggccaccgctaacggggccgtggaaaacgggcagccggacgggaagccgccggccctgccgcgccccatccgcaacctggaggtcaagttcaccaagatatttatcaacaatgaatggcacgaatccaagagtgggaaaaagtttgctacatgtaacccttcaactcgggagcaaatatgtgaagtggaagaaggagataagcccgacgtggacaaggctgtggaggctgcacaggttgccttccagaggggctcgccatggcgccggctggatgccctgagtcgtgggcggctgctgcaccagctggctgacctggtggagagggaccgcgccaccttggccgccctggagacgatggatacagggaagccatttcttcatgcttttttcatcgacctggagggctgtattagaaccctcagatactttgcagggtgggcagacaaaatccagggcaagaccatccccacagatgacaacgtcgtatgcttcaccaggcatgagcccattggtgtctgtggggccatcactccatggaacttccccctgctgatgctggtgtggaagctggcacccgccctctgctgtgggaacaccatggtcctgaagcctgcggagcagacacctctcaccgccctttatctcggctctctgatcaaagaggccgggttccctccaggagtggtgaacattgtgccaggattcgggcccacagtgggagcagcaatttcttctcaccctcagatcaacaagatcgccttcaccggctccacagaggttggaaaactggttaaagaagctgcgtcccggagcaatctgaagcgggtgacgctggagctgggggggaagaacccctgcatcgtgtgtgcggacgctgacttggacttggcagtggagtgtgcccatcagggagtgttcttcaaccaaggccagtgttgcacggcagcctccagggtgttcgtggaggagcaggtctactctgagtttgtcaggcggagcgtggagtatgccaagaaacggcccgtgggagaccccttcgatgtcaaaacagaacaggggcctcagattgatcaaaagcagttcgacaaaatcttagagctgatcgagagtgggaagaaggaaggggccaagctggaatgcgggggctcagccatggaagacaaggggctcttcatcaaacccactgtcttctcagaagtcacagacaacatgcggattgccaaagaggagattttcgggccagtgcaaccaatactgaagttcaaaagtatcgaagaagtgataaaaagagcgaatagcaccgactatggactcacagcagccgtgttcacaaaaaatctcgacaaagccctgaagttggcttctgccttagagtctggaacggtctggatcaactgctacaacgccctctatgcacaggctccatttggtggctttaaaatgtcaggaaatggcagagaactaggtgaatacgctttggccgaatacacagaagtgaaaactgtcaccatcaaacttggcgacaagaacccctgaaggaaaggcggggctccttcctcaaacatcggacggcggaatgtggcagatgaaatgtgctggaggaaaaaaatgacatttctgaccttcccgggacacattcttctggaggctttacatctactggagttgaatgattgctgttttcctctcactctcctgtttattcaccagactggggatgcctataggttgtctgtgaaatcgcagtcctgcctggggagggagctgttggccatttctgtgtttccctttaaaccagatcctggagacagtgagatactcagggcgttgttaacagggagtggtatttgaagtgtccagcagttgcttgaaatgctttgccgaatctgactccagtaagaatgtgggaaaaccccctgtgtgttctgcaagcagggctcttgcaccagcggtctcctcagggtggacctgcttacagagcaagccacgcctctttccgaggtgaaggtgggaccattccttgggaaaggattcacagtaaggttttttggtttttgttttttgttttcttgtttttaaaaaaaggatttcacagtgagaaagttttggttagtgcataccgtggaagggcgccagggtctttgtggattgcatgttgacattgaccgtgagattcggcttcaaaccaatactgcctttggaatatgacagaatcaatagcccagagagcttagtcaaagacgatatcacggtctaccttaaccaaggcactttcttaagcagaaaatattgttgaggttacctttgctgctaaagatccaatcttctaacgccacaacagcatagcaaatcctaggataattcacctcctcatttgacaaatcagagctgtaattcactttaacaaattacgcatttctatcacgttcactaacagcttatgataagtctgtgtagtcttccttttctccagttctgttacccaatttagattagtaaagcgtacacaactggaaagactgctgtaataacacagccttgttatttttaagtcctattttgatattaatttctgattagttagtaaataacacctggattctatggaggacctcggtcttcatccaagtggcctgagtatttcactggcaggttgtgaatttttcttttcctctttgggaatccaaatgatgatgtgcaatttcatgttttaacttgggaaactgaaagtgttcccatatagcttcaaaaacaaaaacaaatgtgttatccgacggatacttttatggttactaactagtactttcctaattgggaaagtagtgcttaagtttgcaaattaagttggggagggcaataataaaatgagggcccgtaacagaaccagtgtgtgtataacgaaaaccatgtataaaatgggcctatcacccttgtcagagatataaattaccacatttggcttcccttcatcagctaacacttatcacttatactaccaataacttgttaaatcaggatttggcttcatacactgaattttcagtattttatctcaagtagatatagacactaaccttgatagtgatacgttagagggttcctattcttccattgtacgataatgtctttaatatgaaatgctacattatttataattggtagagttattgtatctttttatagttgtaagtacacagaggtggtatatttaaacttctgtaatatactgtatttagaaatggaaatatatatagtgttaggtttcacttcttttaaggtttacccctgtggtgtggtttaaaaatctataggcctgggaattccgatcctagctgcagatcgcatcccacaatgcgagaatgataaaataaaattggatatttgaga

SEQ ID NO: 330 - protein, 512 aa, Homo sapien
MATANGAVENGQPDGKPPALPRPIRNLEVKFTKIFINNEWHESKSGKKFATCNPSTREQICEVEEGDKPDVDKAVEAAQVAFQRGSPWRRLDALSRGRLLHQLADLVERDRATLAALETMDTGKPFLHAFFIDLEGCIRTLRYFAGWADKIQGKTIPTDDNVVCFTRHEPIGVCGAITPWNFPLLMLVWKLAPALCCGNTMVLKPAEQTPLTALYLGSLIKEAGFPPGVVNIVPGFGPTVGAAISSHPQINKIAFTGSTEVGKLVKEAASRSNLKRVTLELGGKNPCIVCADADLDLAVECAHQGVFFNQGQCCTAASRVFVEEQVYSEFVRRSVEYAKKRPVGDPFDVKTEQGPQIDQKQFDKILELIESGKKEGAKLECGGSAMEDKGLFIKPTVFSEVTDNMRIAKEEIFGPVQPILKFKSIEEVIKRANSTDYGLTAAVFTKNLDKALKLASALESGTVWINCYNALYAQAPFGGFKMSGNGRELGEYALAEYTEVKTVTIKLGDKNP

SEQ ID NO: 331 - DNA, 1894 bp, Homo sapien
tcgcacttggcttcaaagctggctcttggaaattgagcggagagcgacgcggttgttgtagctgccgctgcggccgccgcggaataataagccgggatctaccatacccattgactaactatggaagattataccaaaatagagaaaattggagaaggtacctatggagttgtgtataagggtagacacaaaactacaggtcaagtggtagccatgaaaaaaatcagactagaaagtgaagaggaaggggttcctagtactgcaattcgggaaatttctctattaaaggaacttcgtcatccaaatatagtcagtcttcaggatgtgcttatgcaggattccaggttatatctcatctttgagtttctttccatggatctgaagaaatacttggattctatccctcctggtcagtacatggattcttcacttgttaagagttatttataccaaatcctacaggggattgtgttttgtcactctagaagagttcttcacagagacttaaaacctcaaaatctcttgattgatgacaaaggaacaattaaactggctgattttggccttgccagagcttttggaatacctatcagagtatatacacatgaggtagtaacactctggtacagatctccagaagtattgctggggtcagctcgttactcaactccagttgacatttggagtataggcaccatatttgctgaactagcaactaagaaaccacttttccatggggattcagaaattgatcaactcttcaggattttcagagctttgggcactcccaataatgaagtgtggccagaagtggaatctttacaggactataagaatacatttcccaaatggaaaccaggaagcctagcatcccatgtcaaaaacttggatgaaaatggcttggatttgctctcgaaaatgttaatctatgatccagccaaacgaatttctggcaaaatggcactgaatcatccatattttaatgatttggacaatcagattaagaagatgtagctttctgacaaaaagtttccatatgttatgtcaacagatagttgtgtttttattgttaactcttgtctatttttgtcttatatatatttctttgttatcaaacttcagctgtacttcgtcttctaatttcaaaaatataacttaaaaatgtaaatattctatatgaatttaaatataattctgtaaatgtgtgtaggtctcactgtaacaactatttgttactataataaaactataatattgatgtcaggaatcaggaaaaaatttgagttggcttaaatcatctcagtccttatggcagttttattttcctgtagttggaactactaaaatttaggaaaatgctaagttcaagtttcgtaatgctttgaagtatttttatgctctgaatgtttaaatgttctcatcagtttcttgccatgttgttaactatacaacctggctaaagatgaatatttttctactggtattttaatttttgacctaaatgtttaagcattcggaatgagaaaactatacagatttgagaaatgatgctaaatttataggagttttcagtaacttaaaaagctaacatgagagcatgccaaaatttgctaagtcttacaaagatcaagggctgtccgcaacagggaagaacagttttgaaaatttatgaactatcttatttttaggtaggttttgaaagctttttgtctaagtgaattcttatgccttggtcagagtaataactgaaggaggtgcttatcttggctttcgagtctgagtttaaaactacacattttgacatagtgtttattagcagccatctaaaaaggctctaatgtatatttaactaaaattactagctttgggaattaaactgtttaacaaattagga

SEQ ID NO: 332 - protein, 337 aa, Homo sapien
ALGFKAGSWKLSGERRGCCSCRCGRRGIISRDLPYPLTNYGRLYQNREKIGEGTYGVVYKGRHKTTGQVVAMKKIRLESEEEGVPSTAIREISLLKELRHPNIVSLQDVLMQDSRLYLIFEFLSMDLKKYLDSIPPGQYMDSSLVKSYLYQILQGIVFCHSRRVLHRDLKPQNLLIDDKGTIKLADFGLARAFGIPIRVYTHEVVTLWYRSPEVLLGSARYSTPVDIWSIGTIFAELATKKPLFHGDSEIDQLFRIFRALGTPNNEVWPEVESLQDYKNTFPKWKPGSLASHVKNLDENGLDLLSKMLIYDPAKRISGKMALNHPYFNDLDNQIKKM

SEQ ID NO: 333 - DNA, 1235 bp, Homo sapien
ggggggggggggcacttggcttcaaagctggctcttggaaattgagcggagagcgacgcggttgttgtagctgccgctgcggccgccgcggaataataagccgggatctaccatacccattgactaactatggaagattataccaaaatagagaaaattggagaaggtacctatggagttgtgtataagggtagacacaaaactacaggtcaagtggtagccatgaaaaaaatcagactagaaagtgaagaggaaggggttcctagtactgcaattcgggaaatttctctattaaaggaacttcgtcatccaaatatagtcagtcttcaggatgtgcttatgcaggattccaggttatatctcatctttgagtttctttccatggatctgaagaaatacttggattctatccctcctggtcagtacatggattcttcacttgttaagagttatttataccaaatcctacaggggattgtgttttgtcactctagaagagttcttcacagagacttaaaacctcaaaatctcttgattgatgacaaaggaacaattaaactggctgattttggccttgccagagcttttggaatacctatcagagtatatacacatgaggtagtaacactctggtacagatctccagaagtattgctggggtcagctcgttactcaactccagttgacatttggagtataggcaccatatttgctgaactagcaactaagaaaccacttttccatggggattcagaaattgatcaactcttcaggattttcagagctttgggcactcccaataatgaagtgtggccagaagtggaatctttacaggactataagaatacatttcccaaatggaaaccaggaagcctagcatcccatgtcaaaaacttggatgaaaatggcttggatttgctctcgaaaatgttaatctatgatccagccaaacgaatttctggcaaaatggcactgaatcatccatattttaatgatttggacaatcagattaagaagatgtagctttctgacaaaaagtttccatatgttatgtcaacagatagttgtgtttttattgttaactcttgtctatttttgtcttatatatatttctttgttatcaaacttcagctgtacttcgtcttctaatttcaaaaatataacttaaaaatgtaaatattctatatgaatttaaatataattctgtaaatgtgaaaaaaaaaaaaaaaaaaaaa

SEQ ID NO: 334 - protein, 240 aa, Homo sapien
MEDYTKIEKIGEGTYGVVYKGRHKTTGQVVAMKKIRLESEEEGVPSTAIREISLLKELRHPNIVSLQDVLMQDSRLYLIFEFLSMDLKKYLDSIPPGQYMDSSLVKVVTLWYRSPEVLLGSARYSTPVDIWSIGTIFAELATKKPLFHGDSEIDQLFRIFRALGTPNNEVWPEVESLQDYKNTFPKWKPGSLASHVKNLDENGLDLLSKMLIYDPAKRISGKMALNHPYFNDLDNQIKKM

SEQ ID NO: 335 - DNA, 3597 bp, Homo sapien
ggcgaatggagcaggggcgcgcagataattaaagatttacacacagctggaagaaatcatagagaagccgggcgtggtggctcatgcctataatcccagcacttttggaggctgaggcgggcagatcacttgagatcaggagttcgagaccagcctggtgccttggcatctcccaatggggtggctttgctctgggctcctgttccctgtgagctgcctggtcctgctgcaggtggcaagctctgggaacatgaaggtcttgcaggagcccacctgcgtctccgactacatgagcatctctacttgcgagtggaagatgaatggtcccaccaattgcagcaccgagctccgcctgttgtaccagctggtttttctgctctccgaagcccacacgtgtatccctgagaacaacggaggcgcggggtgcgtgtgccacctgctcatggatgacgtggtcagtgcggataactatacactggacctgtgggctgggcagcagctgctgtggaagggctccttcaagcccagcgagcatgtgaaacccagggccccaggaaacctgacagttcacaccaatgtctccgacactctgctgctgacctggagcaacccgtatccccctgacaattacctgtataatcatctcacctatgcagtcaacatttggagtgaaaacgacccggcagatttcagaatctataacgtgacctacctagaaccctccctccgcatcgcagccagcaccctgaagtctgggatttcctacagggcacgggtgagggcctgggctcagtgctataacaccacctggagtgagtggagccccagcaccaagtggcacaactcctacagggagcccttcgagcagcacctcctgctgggcgtcagcgtttcctgcattgtcatcctggccgtctgcctgttgtgctatgtcagcatcaccaagattaagaaagaatggtgggatcagattcccaacccagcccgcagccgcctcgtggctataataatccaggatgctcaggggtcacagtgggagaagcggtcccgaggccaggaaccagccaagtgcccacactggaagaattgtcttaccaagctcttgccctgttttctggagcacaacatgaaaagggatgaagatcctcacaaggctgccaaagagatgcctttccagggctctggaaaatcagcatggtgcccagtggagatcagcaagacagtcctctggccagagagcatcagcgtggtgcgatgtgtggagttgtttgaggccccggtggagtgtgaggaggaggaggaggtagaggaagaaaaagggagcttctgtgcatcgcctgagagcagcagggatgacttccaggagggaagggagggcattgtggcccggctaacagagagcctgttcctggacctgctcggagaggagaatgggggcttttgccagcaggacatgggggagtcatgccttcttccaccttcgggaagtacgagtgctcacatgccctgggatgagttcccaagtgcagggcccaaggaggcacctccctggggcaaggagcagcctctccacctggagccaagtcctcctgccagcccgacccagagtccagacaacctgacttgcacagagacgcccctcgtcatcgcaggcaaccctgcttaccgcagcttcagcaactccctgagccagtcaccgtgtcccagagagctgggtccagacccactgctggccagacacctggaggaagtagaacccgagatgccctgtgtcccccagctctctgagccaaccactgtgccccaacctgagccagaaacctgggagcagatcctccgccgaaatgtcctccagcatggggcagctgcagcccccgtctcggcccccaccagtggctatcaggagtttgtacatgcggtggagcagggtggcacccaggccagtgcggtggtgggcttgggtcccccaggagaggctggttacaaggccttctcaagcctgcttgccagcagtgctgtgtccccagagaaatgtgggtttggggctagcagtggggaagaggggtataagcctttccaagacctcattcctggctgccctggggaccctgccccagtccctgtccccttgttcacctttggactggacagggagccacctcgcagtccgcagagctcacatctcccaagcagctccccagagcacctgggtctggagccgggggaaaaggtagaggacatgccaaagcccccacttccccaggagcaggccacagacccccttgtggacagcctgggcagtggcattgtctactcagcccttacctgccacctgtgcggccacctgaaacagtgtcatggccaggaggatggtggccagacccctgtcatggccagtccttgctgtggctgctgctgtggagacaggtcctcgccccctacaacccccctgagggccccagacccctctccaggtggggttccactggaggccagtctgtgtccggcctccctggcaccctcgggcatctcagagaagagtaaatcctcatcatccttccatcctgcccctggcaatgctcagagctcaagccagacccccaaaatcgtgaactttgtctccgtgggacccacatacatgagggtctcttaggtgcatgtcctcttgttgctgagtctgcagatgaggactagggcttatccatgcctgggaaatgccacctcctggaaggcagccaggctggcagatttccaaaagacttgaagaaccatggtatgaaggtgattggccccactgacgttggcctaacactgggctgcagagactggaccccgcccagcattgggctgggctcgccacatcccatgagagtagagggcactgggtcgccgtgccccacggcaggcccctgcaggaaaactgaggcccttgggcacctcgacttgtgaacgagttgttggctgctccctccacagcttctgcagcagactgtccctgttgtaactgcccaaggcatgttttgcccaccagatcatggcccacgtggaggcccacctgcctctgtctcactgaactagaagccgagcctagaaactaacacagccatcaagggaatgacttgggcggccttgggaaatcgatgagaaattgaacttcagggagggtggtcattgcctagaggtgctcattcatttaacagagcttccttaggttgatgctggaggcagaatcccggctgtcaaggggtgttcagttaaggggagcaacagaggacatgaaaaattgctatgactaaagcagggacaatttgctgccaaacacccatgcccagctgtatggctgggggctcctcgtatgcatggaacccccagaataaatatgctcagccaccctgtgggccgggcaatccagacagcaggcataaggcaccagttaccctgcatgttggcccagacctcaggtgctagggaaggcgggaaccttgggttgagtaatgctcgtctgtgtgttttagtttcatcacctgttatctgtgtttgctgaggagagtggaacagaaggggtggagttttgtataaataaagtttctttgtctc

SEQ ID NO: 336 - protein, 825 aa, Homo sapien
MGWLCSGLLFPVSCLVLLQVASSGNMKVLQEPTCVSDYMSISTCEWKMNGPTNCSTELRLLYQLVFLLSEAHTCIPENNGGAGCVCHLLMDDVVSADNYTLDLWAGQQLLWKGSFKPSEHVKPRAPGNLTVHTNVSDTLLLTWSNPYPPDNYLYNHLTYAVNIWSENDPADFRIYNVTYLEPSLRIAASTLKSGISYRARVRAWAQCYNTTWSEWSPSTKWHNSYREPFEQHLLLGVSVSCIVILAVCLLCYVSITKIKKEWWDQIPNPARSRLVAIIIQDAQGSQWEKRSRGQEPAKCPHWKNCLTKLLPCFLEHNMKRDEDPHKAAKEMPFQGSGKSAWCPVEISKTVLWPESISVVRCVELFEAPVECEEEEEVEEEKGSFCASPESSRDDFQEGREGIVARLTESLFLDLLGEENGGFCQQDMGESCLLPPSGSTSAHMPWDEFPSAGPKEAPPWGKEQPLHLEPSPPASPTQSPDNLTCTETPLVIAGNPAYRSFSNSLSQSPCPRELGPDPLLARHLEEVEPEMPCVPQLSEPTTVPQPEPETWEQILRRNVLQHGAAAAPVSAPTSGYQEFVHAVEQGGTQASAVVGLGPPGEAGYKAFSSLLASSAVSPEKCGFGASSGEEGYKPFQDLIPGCPGDPAPVPVPLFTFGLDREPPRSPQSSHLPSSSPEHLGLEPGEKVEDMPKPPLPQEQATDPLVDSLGSGIVYSALTCHLCGHLKQCHGQEDGGQTPVMASPCCGCCCGDRSSPPTTPLRAPDPSPGGVPLEASLCPASLAPSGISEKSKSSSSFHPAPGNAQSSSQTPKIVNFVSVGPTYMRVS

SEQ ID NO: 337 - DNA, 1349 bp, Homo sapien
attcgagtgctccggagaacagacccgcgccccgccgtccgcgagcctcccgagagccgtcccttcgtccggccctggagcattgcgtttgtcgccggtgtcgcagtgcgaggatggcgccgcgggtgtagcggctctctgcgcaggccgagtgggcccagagaagcgaggaactccccagatcgccgacacgtctcgtctcctgtcccaattcagggcttggtgaggtgactcgcggtcgcgggtgactcgccggcaggacactgcctggaacgcctggagcgcctcccactgcagacgtctgtccgcctccagccgctctcctctgacgggtcctgcctcagttggcggaatggcggccacgggagccaatgcagagaaagctgaaagtcacaatgattgccccgtcagacttttaaatccaaacatagcaaaaatgaaagaagatattctctatcatttcaatctcaccactagcagacacaatttcccagccttgtttggagatgtgaagtttgtgtgtgttggtggaagcccctcccggatgaaagccttcatcaggtgcgttggtgcagagctgggccttgactgcccaggtagagactatcccaacatctgtgcgggaactgaccgctatgccatgtataaagtaggaccggtgctgtctgtcagtcatggtatgggcattccttctatctcaatcatgttgcatgagctcataaagctgctgtactatgcccggtgctccaacgtcactatcatccgcattggcacttctggtgggataggtctggagcccggcactgtggtcataacagagcaggcagtggatacctgcttcaaggcagagtttgagcagattgtcctggggaagcgggtcatccggaaaacggaccttaacaagaagctggtgcaggagctgttgctgtgttctgcagagctgagcgagttcaccacagtggtggggaacaccatgtgcaccttggacttctatgaagggcaaggccgtctggatggggctctctgctcctacacggagaaggacaagcaggcgtatctggaggcagcctatgcagccggcgtccgcaatatcgagatggagtcctcggtgtttgccgccatgtgcagcgcctgcggcctccaagcggccgtggtgtgtgtcaccctcctgaaccgcctggaaggggaccagatcagcagccctcgcaatgtgctcagcgagtaccagcagaggccgcagcggctggtgagctacttcatcaagaagaaactgagcaaggcctgagcgctgccctgcacctccgcagacctgctgtgatgacttgccattaaaagcattgtccaaaccc

SEQ ID NO: 338 - protein, 310 aa, Homo sapien
MAATGANAEKAESHNDCPVRLLNPNIAKMKEDILYHFNLTTSRHNFPALFGDVKFVCVGGSPSRMKAFIRCVGAELGLDCPGRDYPNICAGTDRYAMYKVGPVLSVSHGMGIPSISIMLHELIKLLYYARCSNVTIIRIGTSGGIGLEPGTVVITEQAVDTCFKAEFEQIVLGKRVIRKTDLNKKLVQELLLCSAELSEFTTVVGNTMCTLDFYEGQGRLDGALCSYTEKDKQAYLEAAYAAGVRNIEMESSVFAAMCSACGLQAAVVCVTLLNRLEGDQISSPRNVLSEYQQRPQRLVSYFIKKKLSKA

SEQ ID NO: 339 - DNA, 16382 bp, Homo sapien
ctgcagccatgggtgccctatggagctggtggatactctgggctggagcaaccctcctgtggggattgacccaggaggcttcagtggacctcaagaacactggcagagaggaattcctcacagccttcctgcagaactatcagctggcctacagcaaggcctacccccgcctccttatctccagtctgtcagagagccccgcttcagtctccatcctcagccaggcagacaacacctcaaagaaggtcacagtgaggcccggggagtcggtcatggtcaacatcagtgccaaggctgagatgataggcagcaagatcttccagcatgcggtggtgatccattctgactatgccatctctgtgcaggcactaaatgccaagcctgacacagcggagctgacactgctgcggcccatccaggccctaggcaccgagtattttgtgctcacaccccccggcacctcagccaggaatgtcaaggagtttgccgtggtggccggtgccgcaggtgcctcggtcagtgtcacgctgaaggggtcagtgacattcaatggcaagttctatccagcaggcgatgtcctaagagtgactctacagccctacaatgtggcccagctacagagctcagtggatctctcggggtcaaaggtcacagctagtagccccgtggctgtcctctctggccacagctgtgcgcagaaacatacgacctgcaaccatgtggttgagcagctgctacccacgtctgcctggggcacccactatgtagtacccacgctggcctcccaatctcgctatgatttggccttcgttgtggccagccaggccacaaagctgacctacaaccatgggggtatcactggctcccgtgggctccaggcaggtgatgtggtagagtttgaggtccggccatcctggccactctacctgtctgcaaatgtgggcatccaggtcctgttgtttggcacaggtgccataaggaatgaagtgacttatgacccctacctggtcctgatcccagatgtggcggcctactgcccagcctatgtggtcaagagtgtaccaggctgtgagggcgtggccctggtagtggcacagacgaaggctatcagcgggctgaccatagatgggcatgcagtgggggccaagctcacctgggaggctgtgccaggcagtgagttctcgtatgctgaagtggagctcggcacagctgacatgatccacacggccgaggccaccaccaacttgggactgctcaccttcgggctggccaaggctataggctacgcaacagctgctgattgcggccggactgtactgtccccagtggagccctcctgcgaaggcatgcagtgcgcagccgggcagcgctgccaggtggtaggcgggaaggccgggtgtgtggcggagtccaccgctgtctgccgcgcccagggcgacccccattacaccaccttcgacggccgtcgctacgacatgatgggcacctgttcgtacacgatggtggagctgtgcagcgaggacgacaccctgcccgccttcagcgtggaggccaagaacgagcaccggggcagccgccgcgtctcctacgtgggcctcgtcactgtgcgcgcctacagccactctgtgtcgctgacccgcggtgaagttggcttcgtcctggttgacaaccagcgctcgcgcctgccagtctccctgagtgagggtcgcctgcgtgtgtaccagagcggaccacgggccgtggtggagctggtctttgggctggtggtcacttatgactgggactgccagctggcactcagcctgcctgcacgcttccaagaccaggtgtgcgggctgtgtggcaactataatggtgacccagcagacgacttcctcacgcctgacggggctctggctcctgacgctgtggagttcgcaagtagctggaagctggatgatggggactacctgtgtgaggatggctgccagaacaactgtcccgcctgcaccccaggccaggcccaacactatgagggcgaccgactctgtggcatgctgaccaagctcgatggccccttcgctgtctgccatgacaccctggaccccaggcccttcctggagcagtgtgtatatgacctgtgtgtggtcggtggggagcggctcagcctgtgccgtggcctcagcgcctatgcccaggcctgtctggagcttggcatctcggttggggactggagatcaccagccaactgccccctgtcctgccctgccaacagccgctatgagctctgcggccctgcttgcccgacctcctgcaacggggctgcggcgccgtccaactgctccgggcgcccctgcgtggagggctgcgtgtgcctcccaggcttcgtggccagcggcggcgcctgcgtgccggcctcgtcgtgtggctgcaccttccagggtctccagctcgctccgggccaggaagtgtgggcggacgagttgtgccaaaggcgctgcacctgcaacggcgccacccatcaggtcacctgccgcgacaagcagagctgcccggcgggtgagcgctgcagcgtccagaacggcctcctgggctgctaccccgatcgcttcgggacctgccaggggtccggggacccacactatgtgagcttcgacggccggcgcttcgacttcatgggcacctgcacgtacctgctggtcggctcatgcggccagaacgcagcgctgcctgccttccgggtgctggtggaaaacgagcatcggggcagccagactgtgagctacacgcgcgccgtgcgggtggaggcccgcggggtgaaggtggccgtgcgccgggagtaccccgggcaagtgctggtggatgacgtccttcagtatctgcccttccaagcagcagatgggcaggtgcaggtgttccgacagggcagggatgccgtcgtgcgcacggactttggcctgactgtcacttatgactggaatgcacgagtgactgccaaggtgcccagcagctatgctgaggccctgtgtggactctgtgggaacttcaacggggacccagctgatgacctggctctgcggggtgggggtcaagctgccaatgcactggcctttgggaacagctggcaagaagagacgaggcccggctgtggagcaactgaaccgggtgactgtcccaagctggactccctggtggcccagcagctgcagagcaagaatgagtgtggaatccttgccgaccccaaggggcccttccgggagtgccatagcaagctggacccccagggtgccgtgcgcgactgtgtctatgaccgctgcctgctgccaggccagtctgggccactgtgtgacgcactggccacctatgctgctgcatgccaggctgctggagccacagtgcacccctggaggagtgaagaactttgcccactgagctgcccaccccacagccactatgaggcgtgttcctacggctgcccgctgtcctgtggagacctcccagtgcccgggggctgtggctcagaatgccatgagggctgcgtgtgcgatgagggctttgcgctcagtggtgagtcctgcctgcccctggcctcctgtggctgcgtacaccagggcacctaccacccaccaggccagaccttctaccctggccccggatgtgattccctttgccactgccaggagggcggcctggtgtcctgtgagtcctccagctgcggaccgcacgaggcctgccagccatccggtggcagcttgggctgtgtggccgtgggctctagcacctgccaggcgtcaggagacccccactacaccaccttcgatggccgccgcttcgacttcatgggcacctgcgtgtatgtgctggctcagacctgcggcacccggcctggcctgcatcggtttgccgtcctgcaggagaacgtggcctggggtaatgggcgagtcagtgtgaccagggtgatcacggtccaggtggcaaacttcaccctgcggctggagcagagacagtggaaggtcacggtgaacggtgtggacatgaagctgcccgtggtgctggccaacggccagatccgtgcctcccagcatggttcagatgttgtgattgagaccgacttcggcctgcgtgtggcctacgaccttgtgtactatgtgcgggtcaccgtccccggaaactactaccagcagatgtgtggcctgtgtgggaactacaacggcgaccccaaggatgacttccagaagcccaatggctcacaggcaggcaacgccaatgagttcggcaactcctgggaggaggtggtgcccgactctccctgcctgccgcccaccccttgcccgccggggagcgaggactgtatccccagccacaagtgtcctcccgagctggagaagaagtatcagaaggaggagttctgtgggctcctctccagccccacagggccactgtcctcctgccacaagctggtggatccccagggtcccttgaaagattgcatctttgatctctgcctgggtggtgggaacctgagcattctctgcagcaacatccatgcctacgtgagtgcttgccaggcggctggaggccacgtggagccctggaggactgaaactttctgtcccatggagtgccctccgaacagtcactacgagctctgtgcggacacctgctccctgggctgctcagctctcagtgcccctccacagtgccaggatgggtgtgctgagggctgccagtgtgactccggcttcctctacaatggccaagcctgcgtgcccatccagcaatgcggctgctaccacaatggtgtctactatgagccggagcagacagtcctcattgacaactgtcggcagcagtgcacgtgccatgcgggtaaaggcatggtgtgccaggaacacagctgcaagccggggcaggtgtgccagccctccggaggcatcctgagctgcgtcaccaaagacccgtgccacggcgtgacatgccggccacaggagacatgcaaggagcagggtggccagggcgtgtgcctgcccaactatgaggccacgtgctggctgtggggcgacccacactaccactccttcgatggccggaagtttgacttccagggcacctgtaactatgtgctggcaacaactggctgcccgggggtcagcacccagggcctgacacccttcaccgtcaccaccaagaaccagaaccggggcaaccctgctgtgtcctacgtgagagtcgtcaccgtggctgccctcggcaccaacatctccatccacaaggacgagatcggcaaagtccgggtgaacggtgtgctcacagccttgcctgtctctgtggccgacgggcggatttcagtgacccagggtgcatcgaaggcactgctggtggctgactttggactgcaagtcagctatgactggaactggcgggtagacgtgacgctgcccagcagctatcatggcgcagtgtgcgggctctgcggtaacatggaccgcaaccccaacaatgaccaggtcttccctaatggcacactggctccctccatacccatctggggcggcagctggcgagccccaggctgggacccactgtgttgggacgaatgtcgggggtcctgcccaacgtgccctgaggaccggttggagcagtacgagggccctggcttctgcggacccctggcccccggcacagggggccctttcaccacctgccatgctcatgtgccacctgagagcttcttcaagggctgtgttctggacgtctgcatgggtggtggggaccgtgacattctttgcaaggctctggcttcctatgtggccgcctgccaggctgctggggttgtcatcgaagactggcgggcacaggttggctgtgagatcacctgcccagaaaacagccactatgaggtctgtggcccaccctgcccggccagctgtccgtcccctgcaccccttacgacgccagccgtatgtgagggcccctgtgtggagggctgccagtgcgacgcgggtttcgtgttaagtgctgaccgctgtgttcccctcaacaacggctgcggctgctgggccaatggcacctaccacgaggcgggcagtgagttttgggctgatggcacctgctcccagtggtgtcgctgcgggcctgggggtggctcgctggtctgcacacctgccagctgtgggctgggtgaagtgtgtggcctcctgccatccggccagcacggctgccagcccgtcagcacagctgagtgccaggcgtggggtgacccccattacgtcactctggatgggcaccgattcaatttccaaggcacctgcgagtacctgctgagtgcaccctgccacggaccacccttgggggctgagaacttcactgtcactgtagccaatgagcaccggggcagccaggctgtcagctacacccgcagtgtcaccctgcaaatctacaaccacagcctgacactgagtgcccgctggccccggaagctacaggtggacggcgtgttcgtcactctgcccttccagctggactcgctcctgcacgcacacctgagcggcgccgacgtggtggtgaccacaacctcagggctctcgctggctttcgacggggacagcttcgtgcgcctgcgcgtgccggcggcgtacgcgggctctctctgtggcttatgcgggaactacaaccaggaccccgcagacgacctgaaggcggtgggcgggaagcccgccggatggcaggtgggcggcgcccagggctgcggggaatgtgtgtccaagccatgcccgtcgccgtgcaccccagagcagcaagagtccttcggcggcccggacgcctgcggcgtgatctccgccaccgacggcccgctggcgccctgccacggccttgtgccgcccgcgcagtacttccagggctgcttgctggacgcctgccaagttcagggccatcctggaggcctctgtcctgcagtggccacctacgtggcagcctgtcaggccgctggggcccagctccgcgagtggaggcggccggacttctgtcccttccagtgccctgcccacagccactacgagctctgcggtgactcctgtcctgggagctgcccgagcctgtcggcacccgagggctgtgagtcggcctgccgtgaaggctgtgtctgcgatgctggcttcgtgctcagtggtgacacgtgtgtacctgtgggccagtgtggctgcctccacgatgaccgctactacccactgggccagaccttctaccctggccctgggtgtgattccctttgccgctgccgggagggcggtgaggtgtcctgtgagccctccagctgcggcccgcatgagacctgccggccatccggtggcagcttgggctgcgtggccgtgggctctaccacctgccaggcgtcgggagatccccactacaccaccttcgatggccgccgcttcgacttcatgggcacctgcgtgtatgtgctggctcagacctgcggcacccggcctggcctacatcggtttgccgtcctgcaggagaacgtggcctggggtaatgggcgagtcagtgtgaccagggtgatcacggtccaggtggcaaacttcaccctgcggctggagcagagacagtggaaggtcacggtgaacggtgtggacatgaagctgcccgtggtgctggccaacggccagatccgtgcctcccagcatggttcagatgttgtgattgagaccgacttcggcctgcgtgtggcctacgaccttgtgtactatgtgcgggtcaccgtccctggaaactactaccagctgatgtgtggcctgtgtgggaactacaacggcgaccccaaggatgacttccagaagcccaatggctcgcaggcaggcaacgccaatgagttcggcaactcctgggaggaggtggtgcccgactctccctgcctgccgccgcccacctgcccgccggggagcgagggctgtatccccagcgaggagtgtcctcccgagctggagaagaagtatcagaaggaggagttctgtgggctcctctccagccccacagggccactgtcctcctgccacaagctggtggatccccagggtcccttgaaagattgcatctttgatctctgcctgggtggtgggaacctgagcattctctgcagcaacatccatgcctacgtgagtgcttgccaggcggctggaggccacgtggagccctggaggaatgaaactttctgtcccatggaatgccctcagaacagtcactacgagctctgtgcggacacctgctccctgggctgctcggctctcagtgcccctctgcagtgcccagatgggtgtgctgagggctgccagtgtgactccggcttcctctacaacggccaagcctgcgtgcccatccagcaatgtggctgctaccacaatggtgcctactatgagccggagcagacagtcctcattgacaactgtcggcagcagtgcacgtgccatgcgggtaaagtcgtggtgtgccaggaacacagctgcaagccggggcaggtgtgccagccctccggaggcatcctgagctgcgtcaccaaagacccgtgccacggcgtgacatgccggccacaggagacatgcaaggagcagggtggccagggtgtgtgcctgcccaactatgaggccacgtgctggctgtggggcgacccacactaccactccttcgatggccggaagtttgacttccagggcacctgtaactatgtgctggcaacaactggctgcccgggggtcagcacccagggcctgacacccttcaccgtcaccaccaagaaccagaaccggggcaaccctgctgtatcctacgtgagagtcgtcaccgtggctgccctcggcaccaacatctccatccacaaggacgagatcggcaaagtccgggtgaacggtgtgctcacagccttgcctgtctccgtggccgacgggcggatttcagtggcccagggtgcatcgaaggcactgctggtggctgactttggactgcaagtcagctatgactggaactggcgggtagacgtgacgctccccagcagctatcatggcgcagtgtgcgggctctgcggtaacatggaccgcaaccccaacaatgaccaggtcttccctaatggcacactggctccctccatacccatctggggcggcagctggcgagccccaggctgggacccactgtgttgggacgaatgtcgggggtcctgcccaacgtgccctgaggaccggttggagcagtacgagggccctggcttctgcggacccctggcccccggcacagggggccctttcaccacctgccatgctcatgtgccacctgagagcttcttcaagggctgtgttctggacgtctgcatgggtggtggggaccatgacattctttgcaaggctctggcttcctacgtggccgcctgccaggccgctggggttgtcatcgaagactggcgggcacaggttggctgtgagatcacctgcccagaaaacagccactatgaggtctgtggcccaccctgcccggccagctgtccgtcccctgcaccccttacgacgccagccgtatgtgagggcccctgtgtggagggctgccagtgcgacgcgggtttcgtgttaagtgctgaccgctgtgttcccctcaacaacggctgcggctgctgggccaatggcacctaccacgaggcgggcagtgagttttgggctgatggcacctgctcccagtggtgtcgctgcgggcctgggggtggctcgctggtctgcacacctgccagctgtgggctgggtgaagtgtgtggcctcctgccatccggccagcacggctgccagcccgtcagcacagctgagtgccaggcgtggggtgacccccattacgtcactctggatgggcaccgattcgatttccaaggcacctgcgagtacctgctgagtgcaccctgccacggaccacccttgggggctgagaacttcactgtcactgtagccaatgagcaccggggcagccaggctgtcagctacacccgcagtgtcaccctgcaaatctacaaccacagcctgacactgagtgcccgctggccccggaagctacaggtggacggcgtgttcgtcactctgcccttccagctggactcgctcctgcacgcacacctgagcggcgccgacgtggtggtgaccacaacctcagggctctcgctggctttcgacggggacagcttcgtgcgcctgcgcgtgccggcggcgtacgcgggctctctctgtggcttatgcgggaactacaaccaggaccccgcagacgacctgaaggcggtgggcgggaagcccgccggatggcaggtgggcggcgcccagggctgcggggaatgtgtgtccaagccatgcccgtcgccgtgcaccccagagcagcaagagtccttcggcggcccggacgcctgcggcgtgatctccgccaccgacggcccgctggcgccctgccacggccttgtgccgcccgcgcagtacttccagggctgcttgctggacgcctgccaagttcagggccatcctggaggcctctgtcctgcagtggccacctacgtggcagcctgtcaggccgctggggcccagctccgcgagtggaggcggccggacttctgtcccttccagtgccctgcccacagccactacgagctctgcggtgactcctgtcctgggagctgcccgagcctgtcggcacccgagggctgtgagtcggcctgccgtgaaggctgtgtctgcgatgctggcttcgtgctcagtggtgacacgtgtgtacctgtgggccagtgtggctgcctccacgatgaccgctactacccactgggccagaccttctaccctggccctgggtgtgattccctttgccgctgccgggagggcggtgaggtgtcctgtgagccctccagctgcggcccgcatgagacctgccggccatccggtggcagcttgggctgcgtggccgtgggctctaccacctgccaggcgtcgggagatccccactacaccaccttcgatggccgccgcttcgacttcatgggcacctgcgtgtatgtgctggctcagacctgcggcacccggcctggcctacatcggtttgccgtcctgcaggagaacgtggcctggggtaatgggcgagtcagtgtgaccagggtgatcacggtccaggtggcaaacttcaccctgcggctggagcagagacagtggaaggtcacggtgaacggtgtggacatgaagctgcccgtggtgctggccaacggccagatccgtgcctcccagcatggttcagatgttgtgattgagaccgacttcggcctgcgtgtggcctacgaccttgtgtactatgtgcgggtcaccgtccctggaaactactaccagctgatgtgtggcctgtgtgggaactacaacggcgaccccaaggatgacttccagaagcccaatggctcgcaggcaggcaacgccaatgagttcggcaactcctgggaggaggtggtgcccgactctccctgcctgccgccgcccacctgcccgccggggagcgagggctgtatccccagcgaggagtgtcctcccgagctggagaagaagtatcagaaggaggagttctgtgggctcctctccagccccacagggccactgtcctcctgccacaagctggtggatccccagggtcccttgaaagattgcatctttgatctctgcctgggtggtgggaacctgagcattctctgcagcaacatccatgcctacgtgagtgcttgccaggcggctggaggccacgtggagccctggaggaatgaaactttctgtcccatggaatgccctcagaacagtcactacgagctctgtgcggacacctgctccctgggctgctcggctctcagtgcccctctgcagtgcccagatgggtgtgctgagggctgccagtgtgactccggcttcctctacaacggccaagcctgcgtgcccatccagcaatgtggctgctaccacaatggtgtctactatgagccggagcagacagtcctcattgacaactgtcggcagcagtgcacgtgccatgtgggtaaagtcgtggtgtgccaggaacacagctgcaagccggggcaggtgtgccagccctccggaggcatcctgagctgcgtcaacaaagacccgtgccacggcgtgacatgccggccacaggagacatgcaaggagcagggtggccagggtgtgtgcctgcccaactatgaggccacgtgctggctgtggggcgacccacactaccactccttcgatggccggaagtttgacttccagggcacctgtaactatgtgctggcaacaactggctgcccgggggtcagcacccagggcctgacacccttcaccgtcaccaccaagaaccagaaccggggcaaccctgctgtatcctacgtgagagtcgtcaccgtggctgccctcggcaccaacatctccatccacaaggacgagatcggcaaagtccgggtgaacggtgtgctcacagccttgcctgtctccgtggccgacgggcggatttcagtggcccagggtgcatcgaaggcactgctggtggctgactttggactgcaagtcagctatgactggaactggcgggtagacgtgacgctccccagcagctatcatggcgcagtgtgcgggctctgcggtaacatggaccgcaaccccaacaatgaccaggtcttccctaatggcacactggctccctccatacccatctggggcggcagctggcgagccccaggctgggacccactgtgttgggacgaatgtcgggggtcctgcccaacgtgccctgaggaccggttggagcagtacgaggggcctggcttctgcggacccctggcatctggcacagggggccccttcaccacctgccatgctcatgtgccacctgagagcttcttcaagggctgtgttctggacgtctgcatgggtggtggggaccatgacattctttgcaaggctctggcttcctacgtggccgcctgccaggccgctggggttgtcatcgaagactggcgggcacaggttggctgtgagatcacctgcccagaaaacagccactatgaggtctgtggcccaccctgcccggccagctgtccgtcccctgcaccccttacgacgccagccgtatgtgagggcccctgtgtggagggctgccagtgcgacgcgggtttcgtgttaagtgctgaccgctgtgttcccctcaacaacggctgcggctgctgggccaatggcacctaccacgaggcgggcagtgagttttgggctgatggcacctgctcccagtggtgtcgctgcgggcctgggggtggctcgctggtctgcacacctgccagctgtgggctgggtgaagtgtgtggcctcctgccatccggccagcacagctgccagcccgtcagcacagctgagtgccaggcgtggggtgacccccattacgtcactctggatgggcaccgattcgatttccaaggcacctgcgagtacctgctgagtgcaccctgccacggaccacccttgggggctgagaacttcactgtcactgtagccaatgagcaccggggcagccaggctgtcagctacacccgcagtgtcaccctgcaaatctacaaccacagcctgacactgagtgcccgctggccccggaagctacaggtcgacggcgtgttcgtggctctgcctttccagctggactcgctcctgcacgcacacctgagcggcgccgacgtggtggtgaccacaacctcagggctctcgctggctttcgatggggacagcttcgtgcgcctgcgcgtgccggcggcgtacgcggcctctctctgtggcttatgcgggaactacaaccaggaccccgcagacgacctgaaggctgtgggcgggaagcccgctggatggcaggtgggcggggcccagggctgcggggaatgtgtgtccaagccatgcccgtcgccgtgcaccccagagcagcaggagtccttcggcggcccggacgcctgcggcgtgatctccgccaccgacggcccgctggcaccctgccacggccttgtgccgcccgcgcagtacttccagggctgcttgctggacgcctgccaagttcagggccatcctggaggcctctgtcctgcagtggctacctacgtggcagcctgtcaggccgctggggcccagctcggcgagtggaggcggccggacttctgtcccttgcagtgccctgcccacagccactatgagctctgcggtgactcctgccctgtgagctgcccgagcctctcagcacccgagggctgtgagtcggcctgccgtgaaggctgtgtctgcgatgctggcttcgtactcagtggtgacacctgcgtacccgtgggccagtgtggctgcctccatgatggccgctactacccactgggcgaggtcttctacccgggccctgagtgtgagcgacgctgtgagtgtgggccaggtggccatgtcacctgccaggagggcgcagcctgtgggccccatgaggagtgccggttagaggatggtgtccaggcctgtcatgccacaggctgtggccgctgcctggccaacgggggcatccactacatcacccttgatggccgtgtctacgacctgcatggctcctgctcctatgtcttggcccaagtctgccacccaaagcctggggacgaggacttttccatcgtgcttgagaagaatgcagctggacatctccaacgcctcctggttactgtggctggccaggttgtgagcctagctcaggggcagcaggtcaccgtggacggcgaggctgtggccctgcctgtggctgtgggccgcgtgcgggtgaccgccgagggccgaaacatggttctgcagacgaccaaggggctgcggcttctctttgatggcgatgcccacctcctcatgtccatccccagccccttccgtggacggctctgtggcctctgtgggaacttcaatggcaactggagtgacgactttgtcctgcccaatggctcagcagcgtccagtgtggagaccttcggggctgcatggcgggtgcccggctcctccaagggctgtggcgagggctgcgggccccaaggctgcccagtgtgcttggcagaggagactgcaccctatgagagcaacgaggcctgcgggcagctccggaacccccagggccccttcgcgacctgccaggcggtgctgagtccctctgagtacttccgccaatgcgtatacgacctgtgcgcgcaaaagggtgacaaagccttcctgtgccgcagcctggcagcctacacggcggcctgtcaggcagctggcgtggccgtgaagccctggaggacagacagcttctgcccgctccattgccccgcccacagccactactccatctgcactcgcacctgccagggatcctgtgcggctctctccggcctcacgggctgcaccacccgctgttttgagggctgtgagtgcgacgaccgcttcctgctttcccagggtgtctgcatccctgtccaagattgtggctgcacccataatggccgatacttgccggtaaactcctccctgctgacctcagactgcagcgagcgctgttcctgttcctcaagctctggcctgacatgccaggccgctggctgcccaccaggccgtgtatgtgaggtcaaggctgaagcccggaactgctgggccacccgtggtctctgtgtcctgtctgtgggtgccaacctcaccacctttgatggggcccgtggtgccaccacctctcctggtgtctatgagctctcttcccgctgcccaggactacagaataccatcccctggtaccgtgtagttgccgaagtccagatctgccatggcaaaacggaggctgtgggccaggtccacatcttcttccaggatgggatggtgacgttgactccaaacaagggtgtgtgggtgaatggtctccgagtggatctcccagctgagaagttagcatctgtgtccgtgagtcgtacacctgatggctccctgctagtccgccagaaggcaggggtccaggtgtggcttggagccaatgggaaggtggctgtgattgtcagcaatgaccatgctgggaaactgtgtggggcctgtggaaactttgacggggaccagaccaatgattggcatgactcccaggagaagccagcgatggagaaatggagagcgcaggacttctccccatgttatggctgatcagtcatccaccaggaacgaagatttcctgaagaagacctggtccctctggaggttgcggtggctgaaggatgcatcatgtgctcctaccctgctctaccgcttttctgggtcacagaggccaaatgtgagagcattgaataaatatcttaagct

SEQ ID NO: 340 - protein, 2000 aa, Homo sapien
MGALWSWWILWAGATLLWGLTQEASVDLKNTGREEFLTAFLQNYQLAYSKAYPRLLISSLSESPASVSILSQADNTSKKVTVRPGESVMVNISAKAEMIGSKIFQHAVVIHSDYAISVQALNAKPDTAELTLLRPIQALGTEYFVLTPPGTSARNVKEFAVVAGAAGASVSVTLKGSVTFNGKFYPAGDVLRVTLQPYNVAQLQSSVDLSGSKVTASSPVAVLSGHSCAQKHTTCNHVVEQLLPTSAWGTHYVVPTLASQSRYDLAFVVASQATKLTYNHGGITGSRGLQAGDVVEFEVRPSWPLYLSANVGIQVLLFGTGAIRNEVTYDPYLVLIPDVAAYCPAYVVKSVPGCEGVALVVAQTKAISGLTIDGHAVGAKLTWEAVPGSEFSYAEVELGTADMIHTAEATTNLGLLTFGLAKAIGYATAADCGRTVLSPVEPSCEGMQCAAGQRCQVVGGKAGCVAESTAVCRAQGDPHYTTFDGRRYDMMGTCSYTMVELCSEDDTLPAFSVEAKNEHRGSRRVSYVGLVTVRAYSHSVSLTRGEVGFVLVDNQRSRLPVSLSEGRLRVYQSGPRAVVELVFGLVVTYDWDCQLALSLPARFQDQVCGLCGNYNGDPADDFLTPDGALAPDAVEFASSWKLDDGDYLCEDGCQNNCPACTPGQAQHYEGDRLCGMLTKLDGPFAVCHDTLDPRPFLEQCVYDLCVVGGERLSLCRGLSAYAQACLELGISVGDWRSPANCPLSCPANSRYELCGPACPTSCNGAAAPSNCSGRPCVEGCVCLPGFVASGGACVPASSCGCTFQGLQLAPGQEVWADELCQRRCTCNGATHQVTCRDKQSCPAGERCSVQNGLLGCYPDRFGTCQGSGDPHYVSFDGRRFDFMGTCTYLLVGSCGQNAALPAFRVLVENEHRGSQTVSYTRAVRVEARGVKVAVRREYPGQVLVDDVLQYLPFQAADGQVQVFRQGRDAVVRTDFGLTVTYDWNARVTAKVPSSYAEALCGLCGNFNGDPADDLALRGGGQAANALAFGNSWQEETRPGCGATEPGDCPKLDSLVAQQLQSKNECGILADPKGPFRECHSKLDPQGAVRDCVYDRCLLPGQSGPLCDALATYAAACQAAGATVHPWRSEELCPLSCPPHSHYEACSYGCPLSCGDLPVPGGCGSECHEGCVCDEGFALSGESCLPLASCGCVHQGTYHPPGQTFYPGPGCDSLCHCQEGGLVSCESSSCGPHEACQPSGGSLGCVAVGSSTCQASGDPHYTTFDGRRFDFMGTCVYVLAQTCGTRPGLHRFAVLQENVAWGNGRVSVTRVITVQVANFTLRLEQRQWKVTVNGVDMKLPVVLANGQIRASQHGSDVVIETDFGLRVAYDLVYYVRVTVPGNYYQQMCGLCGNYNGDPKDDFQKPNGSQAGNANEFGNSWEEVVPDSPCLPPTPCPPGSEDCIPSHKCPPELEKKYQKEEFCGLLSSPTGPLSSCHKLVDPQGPLKDCIFDLCLGGGNLSILCSNIHAYVSACQAAGGHVEPWRTETFCPMECPPNSHYELCADTCSLGCSALSAPPQCQDGCAEGCQCDSGFLYNGQACVPIQQCGCYHNGVYYEPEQTVLIDNCRQQCTCHAGKGMVCQEHSCKPGQVCQPSGGILSCVTKDPCHGVTCRPQETCKEQGGQGVCLPNYEATCWLWGDPHYHSFDGRKFDFQGTCNYVLATTGCPGVSTQGLTPFTVTTKNQNRGNPAVSYVRVVTVAALGTNISIHKDEIGKVRVNGVLTALPVSVADGRISVTQGASKALLVADFGLQVSYDWNWRVDVTLPSSYHGAVCGLCGNMDRNPNNDQVFPNGTLAPSIPIWGGSWRAPGWDPLCWDECRGSCPTCPEDRLEQYEGPGFCGPLAPGTGGPFTTCHAHVPPESFFKGCVLDVCMGGGDRDILCKALASYVAACQAAGVVIEDWRAQVGCEITCPENSHYEVCGPPCPASCPSPAPLTTPAVCEGPCVEGCQCDAGFVLSADRC

SEQ ID NO: 341 - DNA, 3205 bp, Homo sapien
aaaggggcaagagctgagcggaacaccggcccgccgtcgcggcagctgcttcacccctctctctgcagccatggggctccctcgtggacctctcgcgtctctcctccttctccaggtttgctggctgcagtgcgcggcctccgagccgtgccgggcggtcttcagggaggctgaagtgaccttggaggcgggaggcgcggagcaggagcccggccaggcgctggggaaagtattcatgggctgccctgggcaagagccagctctgtttagcactgataatgatgacttcactgtgcggaatggcgagacagtccaggaaagaaggtcactgaaggaaaggaatccattgaagatcttcccatccaaacgtatcttacgaagacacaagagagattgggtggttgctccaatatctgtccctgaaaatggcaagggtcccttcccccagagactgaatcagctcaagtctaataaagatagagacaccaagattttctacagcatcacggggccgggggcagacagcccccctgagggtgtcttcgctgtagagaaggagacaggctggttgttgttgaataagccactggaccgggaggagattgccaagtatgagctctttggccacgctgtgtcagagaatggtgcctcagtggaggaccccatgaacatctccatcatcgtgaccgaccagaatgaccacaagcccaagtttacccaggacaccttccgagggagtgtcttagagggagtcctaccaggtacttctgtgatgcaggtgacagccacggatgaggatgatgccatctacacctacaatggggtggttgcttactccatccatagccaagaaccaaaggacccacacgacctcatgttcaccattcaccggagcacaggcaccatcagcgtcatctccagtggcctggaccgggaaaaagtccctgagtacacactgaccatccaggccacagacatggatggggacggctccaccaccacggcagtggcagtagtggagatccttgatgccaatgacaatgctcccatgtttgacccccagaagtacgaggcccatgtgcctgagaatgcagtgggccatgaggtgcagaggctgacggtcactgatctggacgcccccaactcaccagcgtggcgtgccacctaccttatcatgggcggtgacgacggggaccattttaccatcaccacccaccctgagagcaaccagggcatcctgacaaccaggaagggtttggattttgaggccaaaaaccagcacaccctgtacgttgaagtgaccaacgaggccccttttgtgctgaagctcccaacctccacagccaccatagtggtccacgtggaggatgtgaatgaggcacctgtgtttgtcccaccctccaaagtcgttgaggtccaggagggcatccccactggggagcctgtgtgtgtctacactgcagaagaccctgacaaggagaatcaaaagatcagctaccgcatcctgagagacccagcagggtggctagccatggacccagacagtgggcaggtcacagctgtgggcaccctcgaccgtgaggatgagcagtttgtgaggaacaacatctatgaagtcatggtcttggccatggacaatggaagccctcccaccactggcacgggaacccttctgctaacactgattgatgtcaatgaccatggcccagtccctgagccccgtcagatcaccatctgcaaccaaagccctgtgcgccaggtgctgaacatcacggacaaggacctgtctccccacacctcccctttccaggcccagctcacagatgactcagacatctactggacggcagaggtcaacgaggaaggtgacacagtggtcttgtccctgaagaagttcctgaagcaggatacatatgacgtgcacctttctctgtctgaccatggcaacaaagagcagctgacggtgatcagggccactgtgtgcgactgccatggccatgtcgaaacctgccctggaccctggaagggaggtttcatcctccctgtgctgggggctgtcctggctctgctgttcctcctgctggtgctgcttttgttggtgagaaagaagcggaagatcaaggagcccctcctactcccagaagatgacacccgtgacaacgtcttctactatggcgaagaggggggtggcgaagaggaccaggactatgacatcacccagctccaccgaggtctggaggccaggccggaggtggttctccgcaatgacgtggcaccaaccatcatcccgacacccatgtaccgtcctcggccagccaacccagatgaaatcggcaactttataattgagaacctgaaggcggctaacacagaccccacagccccgccctacgacaccctcttggtgttcgactatgagggcagcggctccgacgccgcgtccctgagctccctcacctcctccgcctccgaccaagaccaagattacgattatctgaacgagtggggcagccgcttcaagaagctggcagacatgtacggtggcggggaggacgactaggcggcctgcctgcagggctggggaccaaacgtcaggccacagagcatctccaaggggtctcagttcccccttcagctgaggacttcggagcttgtcaggaagtggccgtagcaacttggcggagacaggctatgagtctgacgttagagtggttgcttccttagcctttcaggatggaggaatgtgggcagtttgacttcagcactgaaaacctctccacctgggccagggttgcctcagaggccaagtttccagaagcctcttacctgccgtaaaatgctcaaccctgtgtcctgggcctgggcctgctgtgactgacctacagtggactttctctctggaatggaaccttcttaggcctcctggtgcaacttaatttttttttttaatgctatcttcaaaacgttagagaaagttcttcaaaagtgcagcccagagctgctgggcccactggccgtcctgcatttctggtttccagaccccaatgcctcccattcggatggatctctgcgtttttatactgagtgtgcctaggttgccccttattttttattttccctgttgcgttgctatagatgaagggtgaggacaatcgtgtatatgtactagaacttttttattaaagaaacttttcccagaaaaaaa

SEQ ID NO: 342 - protein, 829 aa, Homo sapien
MGLPRGPLASLLLLQVCWLQCAASEPCRAVFREAEVTLEAGGAEQEPGQALGKVFMGCPGQEPALFSTDNDDFTVRNGETVQERRSLKERNPLKIFPSKRILRRHKRDWVVAPISVPENGKGPFPQRLNQLKSNKDRDTKIFYSITGPGADSPPEGVFAVEKETGWLLLNKPLDREEIAKYELFGHAVSENGASVEDPMNISIIVTDQNDHKPKFTQDTFRGSVLEGVLPGTSVMQVTATDEDDAIYTYNGVVAYSIHSQEPKDPHDLMFTIHRSTGTISVISSGLDREKVPEYTLTIQATDMDGDGSTTTAVAVVEILDANDNAPMFDPQKYEAHVPENAVGHEVQRLTVTDLDAPNSPAWRATYLIMGGDDGDHFTITTHPESNQGILTTRKGLDFEAKNQHTLYVEVTNEAPFVLKLPTSTATIVVHVEDVNEAPVFVPPSKVVEVQEGIPTGEPVCVYTAEDPDKENQKISYRILRDPAGWLAMDPDSGQVTAVGTLDREDEQFVRNNIYEVMVLAMDNGSPPTTGTGTLLLTLIDVNDHGPVPEPRQITICNQSPVRQVLNITDKDLSPHTSPFQAQLTDDSDIYWTAEVNEEGDTVVLSLKKFLKQDTYDVHLSLSDHGNKEQLTVIRATVCDCHGHVETCPGPWKGGFILPVLGAVLALLFLLLVLLLLVRKKRKIKEPLLLPEDDTRDNVFYYGEEGGGEEDQDYDITQLHRGLEARPEVVLRNDVAPTIIPTPMYRPRPANPDEIGNFIIENLKAANTDPTAPPYDTLLVFDYEGSGSDAASLSSLTSSASDQDQDYDYLNEWGSRFKKLADMYGGGEDD

SEQ ID NO: 343 - DNA, 1806 bp, Homo sapien
ggccggagggagcccgcgctcggggcggcggctggaggcagcgcaccgagttcccgcgaggatccatgacctgacggggccccggagccgcgctgcctctcgggtgtcctgggtcggtggggagcccagtgctcgcaggccggcgggcgggccggagggctgcagtctccctcgcggtgagaggaaggcggaggagcgggaaccgcggcggcgctcgcgcggcgcctgcggggggaagggcagttccgggccgggccgcgcctcagcagggcggcggctcccagcgcagtctcagggcccgggtggcggcggcgactggagaaatcaagttgtgcggtcggtgatgcccgagtgagcggggggcctgggcctctgcccttaggaggcaactcccacgcaggccgcaaagggctctcgcggccgagaggcttcgtttcggtttcgcggcggcggcggcgttgttggctgaggggacccgggacacctgaatgcccccggccccggctcctccgacgcgatggggaaggtgctatccaaaatcttcgggaacaaggaaatgcggatcctcatgttgggcctggacgcggccggcaagacaacaatcctgtacaagttgaagctgggccagtcggtgaccaccattcccactgtgggtttcaacgtggagacggtgacttacaaaaatgtcaagttcaacgtatgggatgtgggcggccaggacaagatccggccgctctggcggcattactacactgggacccaaggtctcatcttcgtagtggactgcgccgaccgcgaccgcatcgatgaggctcgccaggagctgcaccgcattatcaatgaccgggagatgagggacgccataatcctcatcttcgccaacaagcaggacctgcccgatgccatgaaaccccacgagatccaggagaaactgggcctgacccggattcgggacaggaactggtatgtgcagccctcctgtgccacctcaggggacggactctatgaggggctcacatggttaacctctaactacaaatcttaatgagcattctccacccatcccctggaaggagagaaatcaaaaacccattcataggattatcgccaccatcacctctttcaattgccactttctcttcttttgaatttgaactctggagttactgttctacagtttggcggggacggggcttgggggttttctcttttgtttgtttccctttctttttcctttttttttttttttttttgttggctttgcgttaggatggctctgatctgacatttgacatgaacacaaagttgccaagatgctccttgttgacttccagcagaatgggaatgggggaaacacagcagttcttgggtaaaagtccctttgtaataataggtttgggatttttttatttcgagagaatctttcattttcctatgtatgcttttttccttttttgcccagtttccttatcacttgctgtagatggcttattttgcattcatgcagactatgttgcaagtctgtttcatctagtaaactgaaaattattgcttaatcaaactgccgtttgtcttttatatttaaggccttccccccccttccttatgagttctaacttagtaatttcaaatgtgaccttttatatctaagaccagtatagtaaacttagcccacagtggcaaataatgagtaatattgtaatatgttccagttgcacctcagtatgttaaacaggtaatgtaagaagttctctgaaatgtcagcaagtaagttctgaaacacatcatgcatgagtaggaataaac

SEQ ID NO: 344 - protein, 175 aa, Homo sapien
MGKVLSKIFGNKEMRILMLGLDAAGKTTILYKLKLGQSVTTIPTVGFNVETVTYKNVKFNVWDVGGQDKIRPLWRHYYTGTQGLIFVVDCADRDRIDEARQELHRIINDREMRDAIILIFANKQDLPDAMKPHEIQEKLGLTRIRDRNWYVQPSCATSGDGLYEGLTWLTSNYKS

SEQ ID NO: 345 - DNA, 1577 bp, Homo sapien
gcccgctgcggtaaatggggcagaggccgggaggggtgggggttccccgcgccgcagccatggagcagcttcgcgccgccgcccgtctgcagattgttctgggccacctcggccgcccctcggccggggctgtcgtagctcatcccacttcagggactatttcctctgccagtttccatcctcaacaattccagtatactctggataataatgttctaaccctggaacagagaaaattttatgaagaaaatgggtttctagtaatcaaaaatcttgtacctgatgccgatattcaacgctttcggaatgagtttgaaaaaatctgcagaaaggaggtgaaaccattaggattaacagtaatgagagatgtgaccatttcgaaatccgaatatgctccaagtgagaagatgatcacgaaggtccaggatttccaggaagataaggagctcttcagatactgcactctccccgagattctgaaatatgtggagtgcttcactggacctaatattatggccatgcacacaatgttgataaacaaacctccagattctggcaagaagacgtcccgtcaccccctgcaccaggacctgcactatttccccttcaggcccagcgatctcatcgtttgcgcctggacggcgatggagcacatcagccggaacaacggctgtctggttgtgctcccaggcacacacaagggctccctgaagccccacgattaccccaagtgggaggggggagttaacaaaatgttccacgggatccaggactacgaggaaaacaaggcccgggtgcacctggtgatggagaagggcgacactgttttcttccatcctttgctcatccacggatctggtcagaataaaacccagggattccggaaggcaatttcctgccatttcgccagtgccgattgccactacattgacgtgaagggcaccagtcaagaaaacatcgagaaggaagttgtaggaatagcacataaattctttggagctgaaaatagcgtgaacttgaaggatatttggatgtttcgagctcgacttgtgaaaggagaaagaaccaatctttgaaatagccatctgctataactctttcaacagaaaaccaaaaccaaacgaaatgtctaaggaaaatgttttcttaatgagatgatgtaaccttttctatcacttgttaaaagcagaaaacatgtatcaggtacttaattgcatagagttagttttgcagcacaatggtgttgctttaatggaaaaaaaaaacagtaaaagtgaaatattactgttttaaggaaaactaatttagggtggcagccaataaaggtggttggtgtctaatttaagtgttaaatcaatttctttcattcagttagctctttacccaagaagaagtgaatgatttggagcttagggtatgttttgtatcccctttctgataaacccattccctaccaattttatgtcataagagatttttttcccccaaatctagaacaatgtataatacattcacatctagtcaagggcataggaacggtgtcatggagtccaaataaagtggatattcctgctcgg

SEQ ID NO: 346 - protein, 338 aa, Homo sapien
MEQLRAAARLQIVLGHLGRPSAGAVVAHPTSGTISSASFHPQQFQYTLDNNVLTLEQRKFYEENGFLVIKNLVPDADIQRFRNEFEKICRKEVKPLGLTVMRDVTISKSEYAPSEKMITKVQDFQEDKELFRYCTLPEILKYVECFTGPNIMAMHTMLINKPPDSGKKTSRHPLHQDLHYFPFRPSDLIVCAWTAMEHISRNNGCLVVLPGTHKGSLKPHDYPKWEGGVNKMFHGIQDYEENKARVHLVMEKGDTVFFHPLLIHGSGQNKTQGFRKAISCHFASADCHYIDVKGTSQENIEKEVVGIAHKFFGAENSVNLKDIWMFRARLVKGERTNL

SEQ ID NO: 347 - DNA, 1390 bp, Homo sapien
gggaagtgctgttggagccgctgtggttgctgtccgcggagtggaagcgcgtgcttttgtttgtgtccctggccatggcgctgcagctctcccgggagcagggaatcaccctgcgcgggagcgccgaaatcgtggccgagttcttctcattcggcatcaacagcattttatatcagcgtggcatatatccatctgaaacctttactcgagtgcagaaatacggactcaccttgcttgtaactactgatcttgagctcataaaatacctaaataatgtggtggaacaactgaaagattggttatacaagtgttcagttcagaaactggttgtagttatctcaaatattgaaagtggtgaggtcctggaaagatggcagtttgatattgagtgtgacaagactgcaaaagatgacagtgcacccagagaaaagtctcagaaagctatccaggatgaaatccgttcagtgatcagacagatcacagctacggtgacatttctgccactgttggaagtttcttgttcatttgatctgctgatttatacagacaaagatttggttgtacctgaaaaatgggaagagtcgggaccacagtttattaccaattctgaggaagtccgccttcgttcatttactactacaatccacaaagtaaatagcatggtggcctacaaaattcctgtcaatgactgaggatgacatgaggaaaataatgtaattgtaattttgaaatgtggttttcctgaaatcaggtcatctatagttgatatgttttatttcattggttaatttttacatggagaaaaccaaaatgatacttactgaactgtgtgtaattgttcctttatttttttggtacctatttgacttaccatggagttaacatcatgaatttattgcacattgttcaaaaggaaccaggaggtttttttgtcaacattgtgatgtatattcctttgaagatagtaactgtagatggaaaaacttgtgctataaagctagatgctttcctaaatcagatgttttggtcaagtagtttgactcagtataggtagggagatatttaagtataaaatacaacaaaggaagtctaaatattcagaatctttgttaaggtcctgaaagtaactcataatctataaacaatgaaatattgctgtatagctccttttgaccttcatttcatgtatagttttccctattgaatcagtttccaattatttgactttaatttatgtaacttgaacctatgaagcaatggatatttgtactgtttaatgttctgtgatacagaactcttaaaaatgttttttcatgtgttttataaaatcaagttttaagtgaaagtgaggaaataaagttaagtttgttttaaaaaaaaaaaaaaaaaa

SEQ ID NO: 348 - protein, 205 aa, Homo sapien
MALQLSREQGITLRGSAEIVAEFFSFGINSILYQRGIYPSETFTRVQKYGLTLLVTTDLELIKYLNNVVEQLKDWLYKCSVQKLVVVISNIESGEVLERWQFDIECDKTAKDDSAPREKSQKAIQDEIRSVIRQITATVTFLPLLEVSCSFDLLIYTDKDLVVPEKWEESGPQFITNSEEVRLRSFTTTIHKVNSMVAYKIPVND

SEQ ID NO: 349 - DNA, 1156 bp, Homo sapien
cgcagcggaggtgaaggacgtccttccccaggagccgactggccaatcacaggcaggaagatgaaggttctgtgggctgcgttgctggtcacattcctggcaggatgccaggccaaggtggagcaagcggtggagacagagccggagcccgagctgcgccagcagaccgagtggcagagcggccagcgctgggaactggcactgggtcgcttttgggattacctgcgctgggtgcagacactgtctgagcaggtgcaggaggagctgctcagctcccaggtcacccaggaactgagggcgctgatggacgagaccatgaaggagttgaaggcctacaaatcggaactggaggaacaactgaccccggtggcggaggagacgcgggcacggctgtccaaggagctgcaggcggcgcaggcccggctgggcgcggacatggaggacgtgtgcggccgcctggtgcagtaccgcggcgaggtgcaggccatgctcggccagagcaccgaggagctgcgggtgcgcctcgcctcccacctgcgcaagctgcgtaagcggctcctccgcgatgccgatgacctgcagaagcgcctggcagtgtaccaggccggggcccgcgagggcgccgagcgcggcctcagcgccatccgcgagcgcctggggcccctggtggaacagggccgcgtgcgggccgccactgtgggctccctggccggccagccgctacaggagcgggcccaggcctggggcgagcggctgcgcgcgcggatggaggagatgggcagccggacccgcgaccgcctggacgaggtgaaggagcaggtggcggaggtgcgcgccaagctggaggagcaggcccagcagatacgcctgcaggccgaggccttccaggcccgcctcaagagctggttcgagcccctggtggaagacatgcagcgccagtgggccgggctggtggagaaggtgcaggctgccgtgggcaccagcgccgcccctgtgcccagcgacaatcactgaacgccgaagcctgcagccatgcgaccccacgccaccccgtgcctcctgcctccgcgcagcctgcagcgggagaccctgtccccgccccagccgtcctcctggggtggaccctagtttaataaagattcaccaagtttcacgc

SEQ ID NO: 350 - protein, 317 aa, Homo sapien [sequence omitted]

SEQ ID NO: 351 - DNA, 1682 bp, Homo sapien
cggcagccagcctattctttggccgggtcggtgcgagtggtcggctgggcagagtgcacgctgcttggcgccgcaggctgatcccgccgtccactcccgggagcagtgatgttgggcaactctgcgccggggcctgcgacccgcgaggcgggctcggcgctgctagcattgcagcagacggcgctccaagaggaccaggagaatatcaacccggaaaaggcagcgcccgtccaacaaccgcggacccgggccgcgctggcggtactgaagtccgggaacccgcggggtctagcgcagcagcagaggccgaagacgagacgggttgcaccccttaaggatcttcctgtaaatgatgagcatgtcaccgttcctccttggaaagcaaacagtaaacagcctgcgttcaccattcatgtggatgaagcagaaaaagaagctcagaagaagccagctgaatctcaaaaaatagagcgtgaagatgccctggcttttaattcagccattagtttacctggacccagaaaaccattggtccctcttgattatccaatggatggtagttttgagtcaccacatactatggacatgtcaattgtattagaagatgaaaagccagtgagtgttaatgaagtaccagactaccatgaggatattcacacataccttagggaaatggaggttaaatgtaaacctaaagtgggttacatgaagaaacagccagacatcactaacagtatgagagctatcctcgtggactggttagttgaagtaggagaagaatataaactacagaatgagaccctgcatttggctgtgaactacattgataggttcctgtcttccatgtcagtgctgagaggaaaacttcagcttgtgggcactgctgctatgctgttagcctcaaagtttgaagaaatataccccccagaagtagcagagtttgtgtacattacagatgatacctacaccaagaaacaagttctgagaatggagcatctagttttgaaagtccttacttttgacttagctgctccaacagtaaatcagtttcttacccaatactttctgcatcagcagcctgcaaactgcaaagttgaaagtttagcaatgtttttgggagaattaagtttgatagatgctgacccatacctcaagtatttgccatcagttattgctggagctgcctttcatttagcactctacacagtcacgggacaaagctggcctgaatcattaatacgaaagactggatataccctggaaagtcttaagccttgtctcatggaccttcaccagacctacctcaaagcaccacagcatgcacaacagtcaataagagaaaagtacaaaaattcaaagtatcatggtgtttctctcctcaacccaccagagacactaaatctgtaacaatgaaagactgcctttgttttctaagatgtaaatcactcaaagtatatggtgtacagtttttaacttaggttttaattttacaatcatttctgaatacagaagttgtggccaagtacaaattatggtatctattactttttaaatggttttaatttgtatatcttttgtatatgtatctgtcttagatatttggctaattttaagtggttttgttaaagtattaatgatgccagctgtcaggataataaattgatttggaaaacttaaaaaaa

SEQ ID NO: 352 - protein, 432 aa, Homo sapien
MLGNSAPGPATREAGSALLALQQTALQEDQENINPEKAAPVQQPRTRAALAVLKSGNPRGLAQQQRPKTRRVAPLKDLPVNDEHVTVPPWKANSKQPAFTIHVDEAEKEAQKKPAESQKIEREDALAFNSAISLPGPRKPLVPLDYPMDGSFESPHTMDMSIVLEDEKPVSVNEVPDYHEDIHTYLREMEVKCKPKVGYMKKQPDITNSMRAILVDWLVEVGEEYKLQNETLHLAVNYIDRFLSSMSVLRGKLQLVGTAAMLLASKFEEIYPPEVAEFVYITDDTYTKKQVLRMEHLVLKVLTFDLAAPTVNQFLTQYFLHQQPANCKVESLAMFLGELSLIDADPYLKYLPSVIAGAAFHLALYTVTGQSWPESLIRKTGYTLESLKPCLMDLHQTYLKAPQHAQQSIREKYKNSKYHGVSLLNPPETLNL

SEQ ID NO: 353 - DNA, 502 bp, Homo sapien
ctgtcgccctgcacggtgacccgcgtgtgcgaggccttcatggccaggatccgggtggagaggcgctgctgacaccgccgccacaccgccgccacaccgccgctgcctcagtcatgccgaagcacgagttctctgtggacatgacctgtggaggctgtgctgaagctgtctctcgggtcctcaataagcttggaggagttaagtatgacattgacctgcccaacaagaaggtctgcattgaatctgagcacagcatggacactctgcttgcaaccctgaagaaaacaggaaagactgtttcctaccttggccttgagtagcaggggcctggtccccacagcccacaggatggaccaaagggggcaggatgctgatcctcccgctggcttccagacagacctgggacttggcagtcatgccgggtgatcgtgttcctgcggagaccctcagttgtcctattccttcctagcttccctgcaataaatcaagctgcttttgttgg

SEQ ID NO: 354 - protein, 68 aa, Homo sapien
MPKHEFSVDMTCGGCAEAVSRVLNKLGGVKYDIDLPNKKVCIESEHSMDTLLATLKKTGKTVSYLGLE

SEQ ID NO: 355 - DNA, 2053 bp, Homo sapien
ccggctcgcgccctccgggcccagcctcccgagccttcggagcgggcgccgtcccagcccagctccggggaaacgcgagccgcgatgcctggggggtgctcccggggccccgccgccggggacgggcgtctgcggctggcgcgactagcgctggtactcctgggctgggtctcctcgtcttctcccacctcctcggcatcctccttctcctcctcggcgccgttcctggcttccgccgtgtccgcccagcccccgctgccggaccagtgccccgcgctgtgcgagtgctccgaggcagcgcgcacagtcaagtgcgttaaccgcaatctgaccgaggtgcccacggacctgcccgcctacgtgcgcaacctcttccttaccggcaaccagctggccgtgctccctgccggcgccttcgcccgccggccgccgctggcggagctggccgcgctcaacctcagcggcagccgcctggacgaggtgcgcgcgggcgccttcgagcatctgcccagcctgcgccagctcgacctcagccacaacccactggccgacctcagtcccttcgctttctcgggcagcaatgccagcgtctcggcccccagtccccttgtggaactgatcctgaaccacatcgtgccccctgaagatgagcggcagaaccggagcttcgagggcatggtggtggcggccctgctggcgggccgtgcactgcaggggctccgccgcttggagctggccagcaaccacttcctttacctgccgcgggatgtgctggcccaactgcccagcctcaggcacctggacttaagtaataattcgctggtgagcctgacctacgtgtccttccgcaacctgacacatctagaaagcctccacctggaggacaatgccctcaaggtccttcacaatggcaccctggctgagttgcaaggtctaccccacattagggttttcctggacaacaatccctgggtctgcgactgccacatggcagacatggtgacctggctcaaggaaacagaggtagtgcagggcaaagaccggctcacctgtgcatatccggaaaaaatgaggaatcgggtcctcttggaactcaacagtgctgacctggactgtgacccgattcttcccccatccctgcaaacctcttatgtcttcctgggtattgttttagccctgataggcgctattttcctcctggttttgtatttgaaccgcaaggggataaaaaagtggatgcataacatcagagatgcctgcagggatcacatggaagggtatcattacagatatgaaatcaatgcggaccccagattaacaaacctcagttctaactcggatgtctgagaaatattagaggacagaccaaggacaactctgcatgagatgtagacttaagctttatccctactaggcttgctccactttcatcctccactatagatacaacggactttgactaaaagcagtgaaggggatttgcttccttgttatgtaaagtttctcggtgtgttctgttaatgtaagacgatgaacagttgtgtatagtgttttaccctcttctttttcttggaactcctcaacacgtatggagggatttttcaggtttcagcatgaacatgggcttcttgctgtctgtctctctctcagtacagttcaaggtgtagcaagtgtacccacacagatagcattcaacaaaagctgcctcaactttttcgagaaaaatactttattcataaatatcagttttattctcatgtacctaagttgtggagaaaataattgcatcctataaactgcctgcagacgttagcaggctcttcaaaataactccatggtgcacaggagcacctgcatccaagagcatgcttacattttactgttctgcatattacaaaaaataacttgcaacttcataacttctttgacaaagtaaattacttttttgattgcagtttatatgaaaatgtactgatttttttttaataaactgcatcgagatccaaccgactgaattgttaaaaaaaaaaaaaaataaagattcttaaaagaa

SEQ ID NO: 356 - protein, 420 aa, Homo sapien
MPGGCSRGPAAGDGRLRLARLALVLLGWVSSSSPTSSASSFSSSAPFLASAVSAQPPLPDQCPALCECSEAARTVKCVNRNLTEVPTDLPAYVRNLFLTGNQLAVLPAGAFARRPPLAELAALNLSGSRLDEVRAGAFEHLPSLRQLDLSHNPLADLSPFAFSGSNASVSAPSPLVELILNHIVPPEDERQNRSFEGMVVAALLAGRALQGLRRLELASNHFLYLPRDVLAQLPSLRHLDLSNNSLVSLTYVSFRNLTHLESLHLEDNALKVLHNGTLAELQGLPHIRVFLDNNPWVCDCHMADMVTWLKETEVVQGKDRLTCAYPEKMRNRVLLELNSADLDCDPILPPSLQTSYVFLGIVLALIGAIFLLVLYLNRKGIKKWMHNIRDACRDHMEGYHYRYEINADPRLTNLSSNSDV

SEQ ID NO: 357 - DNA, 3921 bp, Homo sapien
cggaagttgcgcgcaggccggcgggcgggagcggacaccgaggccggcgtgcaggcgtgcgggtgtgcgggagccgggctcggggggatcggaccgagagcgagaagcgcggcatggagctccaggcagcccgcgcctgcttcgccctgctgtggggctgtgcgctggccgcggccgcggcggcgcagggcaaggaagtggtactgctggactttgctgcagctggaggggagctcggctggctcacacacccgtatggcaaagggtgggacctgatgcagaacatcatgaatgacatgccgatctacatgtactccgtgtgcaacgtgatgtctggcgaccaggacaactggctccgcaccaactgggtgtaccgaggagaggctgagcgtaacaactttgagctcaactttactgtacgtgactgcaacagcttccctggtggcgccagctcctgcaaggagactttcaacctctactatgccgagtcggacctggactacggcaccaacttccagaagcgcctgttcaccaagattgacaccattgcgcccgatgagatcaccgtcagcagcgacttcgaggcacgccacgtgaagctgaacgtggaggagcgctccgtggggccgctcacccgcaaaggcttctacctggccttccaggatatcggtgcctgtgtggcgctgctctccgtccgtgtctactacaagaagtgccccgagctgctgcagggcctggcccacttccctgagaccatcgccggctctgatgcaccttccctggccactgtggccggcacctgtgtggaccatgccgtggtgccaccggggggtgaagagccccgtatgcactgtgcagtggatggcgagtggctggtgcccattgggcagtgcctgtgccaggcaggctacgagaaggtggaggatgcctgccaggcctgctcgcctggattttttaagtttgaggcatctgagagcccctgcttggagtgccctgagcacacgctgccatcccctgagggtgccacctcctgcgagtgtgaggaaggcttcttccgggcacctcaggacccagcgtcgatgccttgcacacgacccccttccgccccacactacctcacagccgtgggcatgggtgccaaggtggagctgcgctggacgccccctcaggacagcgggggccgcgaggacattgtctacagcgtcacctgcgaacagtgctggcccgagtctggggaatgcgggccgtgtgaggccagtgtgcgctactcggagcctcctcacggactgacccgcaccagtgtgacagtgagcgacctggagccccacatgaactacaccttcaccgtggaggcccgcaatggcgtctcaggcctggtaaccagccgcagcttccgtactgccagtgtcagcatcaaccagacagagccccccaaggtgaggctggagggccgcagcaccacctcgcttagcgtctcctggagcatccccccgccgcagcagagccgagtgtggaagtacgaggtcacttaccgcaagaagggagactccaacagctacaatgtgcgccgcaccgagggtttctccgtgaccctggacgacctggccccagacaccacctacctggtccaggtgcaggcactgacgcaggagggccagggggccggcagcaaggtgcacgaattccagacgctgtccccggagggatctggcaacttggcggtgattggcggcgtggctgtcggtgtggtcctgcttctggtgctggcaggagttggcttctttatccaccgcaggaggaagaaccagcgtgcccgccagtccccggaggacgtttacttctccaagtcagaacaactgaagcccctgaagacatacgtggacccccacacatatgaggaccccaaccaggctgtgttgaagttcactaccgagatccatccatcctgtgtcactcggcagaaggtgatcggagcaggagagtttggggaggtgtacaagggcatgctgaagacatcctcggggaagaaggaggtgccggtggccatcaagacgctgaaagccggctacacagagaagcagcgagtggacttcctcggcgaggccggcatcatgggccagttcagccaccacaacatcatccgcctagagggcgtcatctccaaatacaagcccatgatgatcatcactgagtacatggagaatggggccctggacaagttccttcgggagaaggatggcgagttcagcgtgctgcagctggtgggcatgctgcggggcatcgcagctggcatgaagtacctggccaacatgaactatgtgcaccgtgacctggctgcccgcaacatcctcgtcaacagcaacctggtctgcaaggtgtctgactttggcctgtcccgcgtgctggaggacgaccccgaggccacctacaccaccagtggcggcaagatccccatccgctggaccgccccggaggccatttcctaccggaagttcacctctgccagcgacgtgtggagctttggcattgtcatgtgggaggtgatgacctatggcgagcggccctactgggagttgtccaaccacgaggtgatgaaagccatcaatgatggcttccggctccccacacccatggactgcccctccgccatctaccagctcatgatgcagtgctggcagcaggagcgtgcccgccgccccaagttcgctgacatcgtcagcatcctggacaagctcattcgtgcccctgactccctcaagaccctggctgactttgacccccgcgtgtctatccggctccccagcacgagcggctcggagggggtgcccttccgcacggtgtccgagtggctggagtccatcaagatgcagcagtatacggagcacttcatggcggccggctacactgccatcgagaaggtggtgcagatgaccaacgacgacatcaagaggattggggtgcggctgcccggccaccagaagcgcatcgcctacagcctgctgggactcaaggaccaggtgaacactgtggggatccccatctgagcctcgacagggcctggagccccatcggccaagaatacttgaagaaacagagtggcctccctgctgtgccatgctgggccactggggactttatttatttctagttctttcctccccctgcaacttccgctgaggggtctcggatgacaccctggcctgaactgaggagatgaccagggatgctgggctgggccctctttccctgcgagacgcacacagctgagcacttagcaggcaccgccacgtcccagcatccctggagcaggagccccgccacagccttcggacagacatataggatattcccaagccgaccttccctccgccttctcccacatgaggccatctcaggagatggagggcttggcccagcgccaagtaaacagggtacctcaagccccatttcctcacactaagagggcagactgtgaacttgactgggtgagacccaaagcggtccctgtccctctagtgccttctttagaccctcgggccccatcctcatccctgactggccaaacccttgctttcctgggcctttgcaagatgcttggttgtgttgaggtttttaaatatatattttgtactttgtggagagaatgtgtgtgtgtggcagggggccccgccagggctggggacagagggtgtcaaacattcgtgagctggggactcagggaccggtgctgcaggagtgtcctgcccatgccccagtcggccccatctctcatccttttggataagtttctattctgtcagtgttaaagattttgttttgttggacatttttttcgaatcttaatttattattttttttatatttattgttagaaaatgacttatttctgctctggaataaagttgcagatgattcaaaccg

SEQ ID NO: 358 - protein, 976 aa, Homo sapien
MELQAARACFALLWGCALAAAAAAQGKEVVLLDFAAAGGELGWLTHPYGKGWDLMQNIMNDMPIYMYSVCNVMSGDQDNWLRTNWVYRGEAERNNFELNFTVRDCNSFPGGASSCKETFNLYYAESDLDYGTNFQKRLFTKIDTIAPDEITVSSDFEARHVKLNVEERSVGPLTRKGFYLAFQDIGACVALLSVRVYYKKCPELLQGLAHFPETIAGSDAPSLATVAGTCVDHAVVPPGGEEPRMHCAVDGEWLVPIGQCLCQAGYEKVEDACQACSPGFFKFEASESPCLECPEHTLPSPEGATSCECEEGFFRAPQDPASMPCTRPPSAPHYLTAVGMGAKVELRWTPPQDSGGREDIVYSVTCEQCWPESGECGPCEASVRYSEPPHGLTRTSVTVSDLEPHMNYTFTVEARNGVSGLVTSRSFRTASVSINQTEPPKVRLEGRSTTSLSVSWSIPPPQQSRVWKYEVTYRKKGDSNSYNVRRTEGFSVTLDDLAPDTTYLVQVQALTQEGQGAGSKVHEFQTLSPEGSGNLAVIGGVAVGVVLLLVLAGVGFFIHRRRKNQRARQSPEDVYFSKSEQLKPLKTYVDPHTYEDPNQAVLKFTTEIHPSCVTRQKVIGAGEFGEVYKGMLKTSSGKKEVPVAIKTLKAGYTEKQRVDFLGEAGIMGQFSHHNIIRLEGVISKYKPMMIITEYMENGALDKFLREKDGEFSVLQLVGMLRGIAAGMKYLANMNYVHRDLAARNILVNSNLVCKVSDFGLSRVLEDDPEATYTTSGGKIPIRWTAPEAISYRKFTSASDVWSFGIVMWEVMTYGERPYWELSNHEVMKAINDGFRLPTPMDCPSAIYQLMMQCWQQERARRPKFADIVSILDKLIRAPDSLKTLADFDPRVSIRLPSTSGSEGVPFRTVSEWLESIKMQQYTEHFMAAGYTAIEKVVQMTNDDIKRIGVRLPGHQKRIAYSLLGLKDQVNTVGIPI

SEQ ID NO: 359 - DNA, 1631 bp, Homo sapien
tttaacacccatagtaggcctaaaagcagccaccaattaagaaagccacagcacgtacacccactccagggatctgccagcaccctgtggggcccagactacaggctgatggcggaggcttcgagtgacccgggtgctgaggagcgggaagagttgctggggcccactgctcagtggagcgtggaggacgaggaggaggccgtccacgagcaatgccagcatgagagagacaggcagcttcaggcccaggacgaggagggaggcggccatgtccccgagcggccgaagcaggagatgctcctcagcctgaagccctcggaggcccctgaactggatgaggacgagggctttggcgactggtcccagaggccagagcagcggcagcagcacgagggggcgcagggcgccttggacagcggagagcccccccagtgcaggagtcctgagggggagcaagaggacaggcccggcctgcatgcctacgaaaaggaggacagtgatgaagtccacctggaggagttgagtctgagcaaggaggggccaggcccagaggacactgtccaggacaacctgggggccgcaggggctgaggaggaacaggaggagcaccagaaatgtcagcagcccaggacacccagccccttggtcttggaggggaccatcgaacagagctcgcctcccctgagccctaccaccaaactcatcgacaggaccgagtccctaaaccgctccatagagaagagtaacagtgtgaagaaatcccagccagacttgcccatctccaagattgatcagtggctggaacaatacacccaggccatcgagaccgctggccggacccccaagctagcccgccaggcctccatagagctgcccagcatggctgtggccagtaccaagagtcggtgggagacgggtgaggtacaggctcagtctgcggccaagactccgtcctgcaaggatattgtggctggagacatgagcaagaaaagcctctgggagcagaagggaggctccaagacctcatcaacaattaagagcaccccatctgggaagaggtataagtttgtggccaccgggcatgggaagtatgagaaggtgcttgtggaagggggcccggctccctaggcgtcccatctcgcttcctgggtctgcaggtccagccggctggcaccctccatgtacccaggggagattccagccagacacccgccccccggccctggctaagaagttgcttcctgttgccagcatgacctaccctcgcctctttgatgccatccgctgccacctccttttgctcctggaccctttagcctctctgcccttccactctctgaccaccgcccccgccctccccacccagctccgcttcttgttacttgggggaggaaagaaactcctgatcattggccaaagggacttacccctggagaggccaagtgccttctaggaagttaggaggttgaggcacagcctgtgcagagagggtgggtcacccccccagatccaaggggaaactgcaggtcaagggctgataacggccatgcaggatgcttgatgctgcgtcccccgctgcttgccgccccccaccccgccattttgtataataaagctccctgtgtattctc

SEQ ID NO: 360 - protein, 339 aa, Homo sapien
MAEASSDPGAEEREELLGPTAQWSVEDEEEAVHEQCQHERDRQLQAQDEEGGGHVPERPKQEMLLSLKPSEAPELDEDEGFGDWSQRPEQRQQHEGAQGALDSGEPPQCRSPEGEQEDRPGLHAYEKEDSDEVHLEELSLSKEGPGPEDTVQDNLGAAGAEEEQEEHQKCQQPRTPSPLVLEGTIEQSSPPLSPTTKLIDRTESLNRSIEKSNSVKKSQPDLPISKIDQWLEQYTQAIETAGRTPKLARQASIELPSMAVASTKSRWETGEVQAQSAAKTPSCKDIVAGDMSKKSLWEQKGGSKTSSTIKSTPSGKRYKFVATGHGKYEKVLVEGGPAP

SEQ ID NO: 361 - DNA, 576 bp, Homo sapien
aaacactctgtgtggctcctcggctttgggacagagtgcaagacgatgacttgcaaaatgtcgcagctggaacgcaacatagagaccatcatcaacaccttccaccaatactctgtgaagctggggcacccagacaccctgaaccagggggaattcaaagagctggtgcgaaaagatctgcaaaattttctcaagaaggagaataagaatgaaaaggtcatagaacacatcatggaggacctggacacaaatgcagacaagcagctgagcttcgaggagttcatcatgctgatggcgaggctaacctgggcctcccacgagaagatgcacgagggtgacgagggccctggccaccaccataagccaggcctcggggagggcaccccctaagaccacagtggccaagatcacagtggccacggccatggccacagtcatggtggccacggccacaggccactaatcaggaggccaggccaccctgcctctacccaaccagggccccggggcctgttatgtcaaactgtcttggctgtggggctaggggctggggccaaataaagtctcttcctccaa

SEQ ID NO: 362 - protein, 114 aa, Homo sapien
MTCKMSQLERNIETIINTFHQYSVKLGHPDTLNQGEFKELVRKDLQNFLKKENKNEKVIEHIMEDLDTNADKQLSFEEFIMLMARLTWASHEKMHEGDEGPGHHHKPGLGEGTP

SEQ ID NO: 363 - DNA, 1280 bp, Homo sapien
tgccgcagcccccgcccgcccgcagagcttttgaaaggcggcgggaggcggcgagcgccatggccagtccgggctgcctgctgtgcgtgctgggcctgctactctgcggggcggcgagcctcgagctgtctagaccccacggcgacaccgccaagaagcccatcatcggaatattaatgcaaaaatgccgtaataaagtcatgaaaaactatggaagatactatattgctgcgtcctatgtaaagtacttggagtctgcaggtgcgagagttgtaccagtaaggctggatcttacagagaaagactatgaaatacttttcaaatctattaatggaatccttttccctggaggaagtgttgacctcagacgctcagattatgctaaagtggccaaaatattttataacttgtccatacagagttttgatgatggagactattttcctgtgtggggcacatgccttggatttgaagagctttcactgctgattagtggagagtgcttattaactgccacagatactgttgacgtggcaatgccgctgaacttcactggaggtcaattgcacagcagaatgttccagaattttcctactgagttgttgctgtcattagcagtagaacctctgactgccaatttccataagtggagcctctccgtgaagaattttacaatgaatgaaaagttaaagaagtttttcaatgtcttaactacaaatacagatggcaagattgagtttatttcaacaatggaaggatataagtatccagtatatggtgtccagtggcatccagagaaagcaccttatgagtggaagaatttggatggcatttcccatgcacctaatgctgtgaaaaccgcattttatttagcagagttttttgttaatgaagctcggaaaaacaaccatcattttaaatctgaatctgaagaggagaaagcattgatttatcagttcagtccaatttatactggaaatatttcttcatttcagcaatgttacatatttgattgaaagtcttcaatttgttaacagagcaaatttgaataattccatgattaaactgttagaataacttgctactcatggcaagattaggaagtcacagattcttttctataatgtgcctggctctgattcttcattatgtatgtgactatttatataacattagataattaaatagtgagacataaatagagtgctttttcatggaaaagccttcttatatctgaagattgaaaaataaatttactgaaatacaaaaaaaaaaaaaaa

SEQ ID NO: 364 - protein, 318 aa, Homo sapien
MASPGCLLCVLGLLLCGAASLELSRPHGDTAKKPIIGILMQKCRNKVMKNYGRYYIAASYVKYLESAGARVVPVRLDLTEKDYEILFKSINGILFPGGSVDLRRSDYAKVAKIFYNLSIQSFDDGDYFPVWGTCLGFEELSLLISGECLLTATDTVDVAMPLNFTGGQLHSRMFQNFPTELLLSLAVEPLTANFHKWSLSVKNFTMNEKLKKFFNVLTTNTDGKIEFISTMEGYKYPVYGVQWHPEKAPYEWKNLDGISHAPNAVKTAFYLAEFFVNEARKNNHHFKSESEEEKALIYQFSPIYTGNISSFQQCYIFD

SEQ ID NO: 365 - DNA, 419 bp, Homo sapien
ctcttgacgactccacagataccccgaagccatggcaagcaagggcttgcaggacctgaagcaacaggtggaggggaccgcccaggaagccgtgtcagcggccggagcggcagctcagcaagtggtggaccaggccacagaggcggggcagaaagccatggaccagctggccaagaccacccaggaaaccatcgacaagactgctaaccaggcctctgacaccttctctgggatcgggaaaaaattcggcctcctgaaatgacagcagggagacttgggtcggcctcctgaaatgatagcagggagacttgggtgaccccccttccaggcgccatctagcacagcctggccctgatctccgggcagccaccacctcctcggtctgccccctcattaaaattcacgttcccaccctgaaa

SEQ ID NO: 366 - protein, 76 aa, Homo sapien
MASKGLQDLKQQVEGTAQEAVSAAGAAAQQVVDQATEAGQKAMDQLAKTTQETIDKTANQASDTFSGIGKKFGLLK

SEQ ID NO: 367 - DNA, 6677 bp, Homo sapien
ttgagaaaggggaatttcatcccaaataaaaggaatgaagtctggctccggaggagggtccccgacctcgctgtgggggctcctgtttctctccgccgcgctctcgctctggccgacgagtggagaaatctgcgggccaggcatcgacatccgcaacgactatcagcagctgaagcgcctggagaactgcacggtgatcgagggctacctccacatcctgctcatctccaaggccgaggactaccgcagctaccgcttccccaagctcacggtcattaccgagtacttgctgctgttccgagtggctggcctcgagagcctcggagacctcttccccaacctcacggtcatccgcggctggaaactcttctacaactacgccctggtcatcttcgagatgaccaatctcaaggatattgggctttacaacctgaggaacattactcggggggccatcaggattgagaaaaatgctgacctctgttacctctccactgtggactggtccctgatcctggatgcggtgtccaataactacattgtggggaataagcccccaaaggaatgtggggacctgtgtccagggaccatggaggagaagccgatgtgtgagaagaccaccatcaacaatgagtacaactaccgctgctggaccacaaaccgctgccagaaaatgtgcccaagcacgtgtgggaagcgggcgtgcaccgagaacaatgagtgctgccaccccgagtgcctgggcagctgcagcgcgcctgacaacgacacggcctgtgtagcttgccgccactactactatgccggtgtctgtgtgcctgcctgcccgcccaacacctacaggtttgagggctggcgctgtgtggaccgtgacttctgcgccaacatcctcagcgccgagagcagcgactccgaggggtttgtgatccacgacggcgagtgcatgcaggagtgcccctcgggcttcatccgcaacggcagccagagcatgtactgcatcccttgtgaaggtccttgcccgaaggtctgtgaggaagaaaagaaaacaaagaccattgattctgttacttctgctcagatgctccaaggatgcaccatcttcaagggcaatttgctcattaacatccgacgggggaataacattgcttcagagctggagaacttcatggggctcatcgaggtggtgacgggctacgtgaagatccgccattctcatgccttggtctccttgtccttcctaaaaaaccttcgcctcatcctaggagaggagcagctagaagggaattactccttctacgtcctcgacaaccagaacttgcagcaactgtgggactgggaccaccgcaacctgaccatcaaagcagggaaaatgtactttgctttcaatcccaaattatgtgtttccgaaatttaccgcatggaggaagtgacggggactaaagggcgccaaagcaaaggggacataaacaccaggaacaacggggagagagcctcctgtgaaagtgacgtcctgcatttcacctccaccaccacgtcgaagaatcgcatcatcataacctggcaccggtaccggccccctgactacagggatctcatcagcttcaccgtttactacaaggaagcaccctttaagaatgtcacagagtatgatgggcaggatgcctgcggctccaacagctggaacatggtggacgtggacctcccgcccaacaaggacgtggagcccggcatcttactacatgggctgaagccctggactcagtacgccgtttacgtcaaggctgtgaccctcaccatggtggagaacgaccatatccgtggggccaagagtgagatcttgtacattcgcaccaatgcttcagttccttccattcccttggacgttctttcagcatcgaactcctcttctcagttaatcgtgaagtggaaccctccctctctgcccaacggcaacctgagttactacattgtgcgctggcagcggcagcctcaggacggctacctttaccggcacaattactgctccaaagacaaaatccccatcaggaagtatgccgacggcaccatcgacattgaggaggtcacagagaaccccaagactgaggtgtgtggtggggagaaagggccttgctgcgcctgccccaaaactgaagccgagaagcaggccgagaaggaggaggctgaataccgcaaagtctttgagaatttcctgcacaactccatcttcgtgcccagacctgaaaggaagcggagagatgtcatgcaagtggccaacaccaccatgtccagccgaagcaggaacaccacggccgcagacacctacaacatcaccgacccggaagagctggagacagagtaccctttctttgagagcagagtggataacaaggagagaactgtcatttctaaccttcggcctttcacattgtaccgcatcgatatccacagctgcaaccacgaggctgagaagctgggctgcagcgcctccaacttcgtctttgcaaggactatgcccgcagaaggagcagatgacattcctgggccagtgacctgggagccaaggcctgaaaactccatctttttaaagtggccggaacctgagaatcccaatggattgattctaatgtatgaaataaaatacggatcacaagttgaggatcagcgagaatgtgtgtccagacaggaatacaggaagtatggaggggccaagctaaaccggctaaacccggggaactacacagcccggattcaggccacatctctctctgggaatgggtcgtggacagatcctgtgttcttctatgtccaggccaaaacaggatatgaaaacttcatccatctgatcatcgctctgcccgtcgctgtcctgttgatcgtgggagggttggtgattatgctgtacgtcttccatagaaagagaaataacagcaggctggggaatggagtgctgtatgcctctgtgaacccggagtacttcagcgctgctgatgtgtacgttcctgatgagtgggaggtggctcgggagaagatcaccatgagccgggaacttgggcaggggtcgtttgggatggtctatgaaggagttgccaagggtgtggtgaaagatgaacctgaaaccagagtggccattaaaacagtgaacgaggccgcaagcatgcgtgagaggattgagtttctcaacgaagcttctgtgatgaaggagttcaattgtcaccatgtggtgcgattgctgggtgtggtgtcccaaggccagccaacactggtcatcatggaactgatgacacggggcgatctcaaaagttatctccggtctctgaggccagaaatggagaataatccagtcctagcacctccaagcctgagcaagatgattcagatggccggagagattgcagacggcatggcatacctcaacgccaataagttcgtccacagagaccttgctgcccggaattgcatggtagccgaagatttcacagtcaaaatcggagattttggtatgacgcgagatatctatgagacagactattaccggaaaggagggaaagggctgctgcccgtgcgctggatgtctcctgagtccctcaaggatggagtcttcaccacttactcggacgtctggtccttcggggtcgtcctctgggagatcgccacactggccgagcagccctaccagggcttgtccaacgagcaagtccttcgcttcgtcatggagggcggccttctggacaagccagacaactgtcctgacatgctgtttgaactgatgcgcatgtgctggcagtataaccccaagatgaggccttccttcctggagatcatcagcagcatcaaagaggagatggagcctggcttccgggaggtctccttctactacagcgaggagaacaagctgcccgagccggaggagctggacctggagccagagaacatggagagcgtccccctggacccctcggcctcctcgtcctccctgccactgcccgacagacactcaggacacaaggccgagaacggccccggccctggggtgctggtcctccgcgccagcttcgacgagagacagccttacgcccacatgaacgggggccgcaagaacgagcgggccttgccgctgccccagtcttcgacctgctgatccttggatcctgaatctgtgcaaacagtaacgtgtgcgcacgcgcagcggggtggggggggagagagagttttaacaatccattcacaagcctcctgtacctcagtggatcttcagaactgcccttgctgcccgcgggagacagcttctctgcagtaaaacacatttgggatgttccttttttcaatatgcaagcagctttttattccctgcccaaacccttaactgacatgggcctttaagaaccttaatgacaacacttaatagcaacagagcacttgagaaccagtctcctcactctgtccctgtccttccctgttctccctttctctctcctctctgcttcataacggaaaaataattgccacaagtccagctgggaagccctttttatcagtttgaggaagtggctgtccctgtggccccatccaaccactgtacacacccgcctgacaccgtgggtcattacaaaaaaacacgtggagatggaaatttttacctttatctttcacctttctagggacatgaaatttacaaagggccatcgttcatccaaggctgttaccattttaacgctgcctaattttgccaaaatcctgaactttctccctcatcggcccggcgctgattcctcgtgtccggaggcatgggtgagcatggcagctggttgctccatttgagagacacgctggcgacacactccgtccatccgactgcccctgctgtgctgctcaaggccacaggcacacaggtctcattgcttctgactagattattatttgggggaactggacacaataggtctttctctcagtgaaggtggggagaagctgaaccggcttccctgccctgcctccccagccccctgcccaacccccaagaatctggtggccatgggccccgaagcagcctggcggacaggcttggagtcaaggggccccatgcctgcttctctcccagccccagctcccccgcccgcccccaaggacacagatgggaaggggtttccagggactcagccccactgttgatgcaggtttgcaaggaaagaaattcaaacaccacaacagcagtaagaagaaaagcagtcaatggattcaagcattctaagctttgttgacattttctctgttcctaggacttcttcatgggtcttacagttctatgttagaccatgaaacatttgcatacacatcgtctttaatgtcacttttataacttttttacggttcagatattcatctatacgtctgtacagaaaaaaaaaagctgctattttttttgttcttgatctttgtggatttaatctatgaaaaccttcaggtccaccctctcccctttctgctcactccaagaaacttcttatgctttgtactagagtgcgtgactttcttcctcttttcccggtaatggatacttctatcacataatttgccatgaactgttggatgcctttttataaatacatcccccatccctgctcccacctgcccctttagttgttttctaacccgtaggctctctgggcacgaggcagaaagcaggccgggcacccatcctgagagggccgcgctcctctccccagcctgccctcacagcattggagcctgttacagtgcaagacatgatacaaactcaggtcagaaaaacaaaggttaaatatttcacacgtctttgttcagtgtttccactcaccgtggttgagaagcctcaccctctctttcccttgcctttgcttaggttgtgacacacatatatatatatttttttaattcttgggtacaacagcagtgttaaccgcagacactaggcatttggattactatttttcttaatggctatttaatccttccatcccacgaaaaacagctgctgagtccaagggagcagcagagcgtggtccggcagggcctgttgtggccctcgccacccccctcaccggaccgactgacctgtctttggaaccagaacatcccaagggaactccttcgcactggcgttgagtgggaccccgggatccaggctggcccagggcggcaccctcagggctgtgcccgctggagtgctaggtggaggcagcacagacgccacggtggcccaagagcccctttgcttcttgctgggggaccagggctgtggtgctggcccactttccctcggccaggaatccaggtccttggggcccaggggtcttgtcttgtttcatttttagcacttctcaccagagagatgacagcacaagagttgcttctgggatagaaatgtttaggagtaagaacaaagctgggatacggtgattgctagttgtgactgaagattcaacacagaaaagaaagtttatacggcttttttgctggtcagcagtttgtcccactgctttctctagtctctatcccatagcgtgttccctttaaaaaaaaaaaaaggtattatatgtaggagttttcttttaatttattttgtgataaattaccagtttcaatcactgtagaaaagccccattatgaatttaaatttcaaggaaagggtgtgtgtggaa

SEQ ID NO: 368 - protein, 1367 aa, Homo sapien
MKSGSGGGSPTSLWGLLFLSAALSLWPTSGEICGPGIDIRNDYQQLKRLENCTVIEGYLHILLISKAEDYRSYRFPKLTVITEYLLLFRVAGLESLGDLFPNLTVIRGWKLFYNYALVIFEMTNLKDIGLYNLRNITRGAIRIEKNADLCYLSTVDWSLILDAVSNNYIVGNKPPKECGDLCPGTMEEKPMCEKTTINNEYNYRCWTTNRCQKMCPSTCGKRACTENNECCHPECLGSCSAPDNDTACVACRHYYYAGVCVPACPPNTYRFEGWRCVDRDFCANILSAESSDSEGFVIHDGECMQECPSGFIRNGSQSMYCIPCEGPCPKVCEEEKKTKTIDSVTSAQMLQGCTIFKGNLLINIRRGNNIASELENFMGLIEVVTGYVKIRHSHALVSLSFLKNLRLILGEEQLEGNYSFYVLDNQNLQQLWDWDHRNLTIKAGKMYFAFNPKLCVSEIYRMEEVTGTKGRQSKGDINTRNNGERASCESDVLHFTSTTTSKNRIIITWHRYRPPDYRDLISFTVYYKEAPFKNVTEYDGQDACGSNSWNMVDVDLPPNKDVEPGILLHGLKPWTQYAVYVKAVTLTMVENDHIRGAKSEILYIRTNASVPSIPLDVLSASNSSSQLIVKWNPPSLPNGNLSYYIVRWQRQPQDGYLYRHNYCSKDKIPIRKYADGTIDIEEVTENPKTEVCGGEKGPCCACPKTEAEKQAEKEEAEYRKVFENFLHNSIFVPRPERKRRDVMQVANTTMSSRSRNTTAADTYNITDPEELETEYPFFESRVDNKERTVISNLRPFTLYRIDIHSCNHEAEKLGCSASNFVFARTMPAEGADDIPGPVTWEPRPENSIFLKWPEPENPNGLILMYEIKYGSQVEDQRECVSRQEYRKYGGAKLNRLNPGNYTARIQATSLSGNGSWTDPVFFYVQAKTGYENFIHLIIALPVAVLLIVGGLVIMLYVFHRKRNNSRLGNGVLYASVNPEYFSAADVYVPDEWEVAREKITMSRELGQGSFGMVYEGVAKGVVKDEPETRVAIKTVNEAASMRERIEFLNEASVMKEFNCHHVVRLLGVVSQGQPTLVIMELMTRGDLKSYLRSLRPEMENNPVLAPPSLSKMIQMAGEIADGMAYLNANKFVHRDLAARNCMVAEDFTVKIGDFGMTRDIYETDYYRKGGKGLLPVRWMSPESLKDGVFTTYSDVWSFGVVLWEIATLAEQPYQGLSNEQVLRFVMEGGLLDKPDNCPDMLFELMRMCWQYNPKMRPSFLEIISSIKEEMEPGFREVSFYYSEENKLPEPEELDLEPENMESVPLDPSASSSSLPLPDRHSGHKAENGPGPGVLVLRASFDERQPYAHMNGGRKNERALPLPQSSTC

SEQ ID NO: 369 - DNA, 4575 bp, Homo sapien
gagcgggcgagggagcgcgcgcggccgccacaaagctcgggcgccgcggggctgcatgcggcgtacctggcccggcgcggcgactgctctccgggctggcgggggccggccgcgagccccgggggccccgaggccgcagcttgcctgcgcgctctgagccttcgcaactcgcgagcaaagtttggtggaggcaacgccaagcctgagtcctttcttcctctcgttccccaaatccgagggcagcccgcgggcgtcatgcccgcgctcctccgcagcctggggtacgcgctgaagcccgggaggcttggcgccggcgaagacccaaggaccactcttctgcgtttggagttgctccccacaaccccgggctcgtcgctttctccatcccgacccagccggggcgcggggacaacacaggtcgcggaggagcgttgccattcaagtgactgcagcagcagcggcagcgcctcggttcctgagcccaccgcaggctgaaggcattgcgcgtagtccatgcccgtagaggaagtgtgcagatgggattaacgtccacatggagatatggaagaggaccggggattggtaccgtaaccatggtcagctggggtcgtttcatctgcctggtcgtggtcaccatggcaaccttgtccctggcccggccctccttcagtttagttgaggataccacattagagccagaagagccaccaaccaaataccaaatctctcaaccagaagtgtacgtggctgcgccaggggagtcgctagaggtgcgctgcctgttgaaagatgccgccgtgatcagttggactaaggatggggtgcacttggggcccaacaataggacagtgcttattggggagtacttgcagataaagggcgccacgcctagagactccggcctctatgcttgtactgccagtaggactgtagacagtgaaacttggtacttcatggtgaatgtcacagatgccatctcatccggagatgatgaggatgacaccgatggtgcggaagattttgtcagtgagaacagtaacaacaagagagcaccatactggaccaacacagaaaagatggaaaagcggctccatgctgtgcctgcggccaacactgtcaagtttcgctgcccagccggggggaacccaatgccaaccatgcggtggctgaaaaacgggaaggagtttaagcaggagcatcgcattggaggctacaaggtacgaaaccagcactggagcctcattatggaaagtgtggtcccatctgacaagggaaattatacctgtgtggtggagaatgaatacgggtccatcaatcacacgtaccacctggatgttgtggagcgatcgcctcaccggcccatcctccaagccggactgccggcaaatgcctccacagtggtcggaggagacgtagagtttgtctgcaaggtttacagtgatgcccagccccacatccagtggatcaagcacgtggaaaagaacggcagtaaatacgggcccgacgggctgccctacctcaaggttctcaaggttctcaaggccgccggtgttaacaccacggacaaagagattgaggttctctatattcggaatgtaacttttgaggacgctggggaatatacgtgcttggcgggtaattctattgggatatcctttcactctgcatggttgacagttctgccagcgcctggaagagaaaaggagattacagcttccccagactacctggagatagccatttactgcataggggtcttcttaatcgcctgtatggtggtaacagtcatcctgtgccgaatgaagaacacgaccaagaagccagacttcagcagccagccggctgtgcacaagctgaccaaacgtatccccctgcggagacaggtttcggctgagtccagctcctccatgaactccaacaccccgctggtgaggataacaacacgcctctcttcaacggcagacacccccatgctggcaggggtctccgagtatgaacttccagaggacccaaaatgggagtttccaagagataagctgacactgggcaagcccctgggagaaggttgctttgggcaagtggtcatggcggaagcagtgggaattgacaaagacaagcccaaggaggcggtcaccgtggccgtgaagatgttgaaagatgatgccacagagaaagacctttctgatctggtgtcagagatggagatgatgaagatgattgggaaacacaagaatatcataaatcttcttggagcctgcacacaggatgggcctctctatgtcatagttgagtatgcctctaaaggcaacctccgagaatacctccgagcccggaggccacccgggatggagtactcctatgacattaaccgtgttcctgaggagcagatgaccttcaaggacttggtgtcatgcacctaccagctggccagaggcatggagtacttggcttcccaaaaatgtattcatcgagatttagcagccagaaatgttttggtaacagaaaacaatgtgatgaaaatagcagactttggactcgccagagatatcaacaatatagactattacaaaaagaccaccaatgggcggcttccagtcaagtggatggctccagaagccctgtttgatagagtatacactcatcagagtgatgtctggtccttcggggtgttaatgtgggagatcttcactttagggggctcgccctacccagggattcccgtggaggaactttttaagctgctgaaggaaggacacagaatggataagccagccaactgcaccaacgaactgtacatgatgatgagggactgttggcatgcagtgccctcccagagaccaacgttcaagcagttggtagaagacttggatcgaattctcactctcacaaccaatgaggaatacttggacctcagccaacctctcgaacagtattcacctagttaccctgacacaagaagttcttgttcttcaggagatgattctgttttttctccagaccccatgccttacgaaccatgccttcctcagtatccacacataaacggcagtgttaaaacatgaatgactgtgtctgcctgtccccaaacaggacagcactgggaacctagctacactgagcagggagaccatgcctcccagagcttgttgtctccacttgtatatatggatcagaggagtaaataattggaaaagtaatcagcatatgtgtaaagatttatacagttgaaaacttgtaatcttccccaggaggagaagaaggtttctggagcagtggactgccacaagccaccatgtaacccctctcacctgccgtgcgtactggctgtggaccagtaggactcaaggtggacgtgcgttctgccttccttgttaattttgtaataattggagaagatttatgtcagcacacacttacagagcacaaatgcagtatataggtgctggatgtatgtaaatatattcaaattatgtataaatatatattatatatttacaaggagttattttttgtattgattttaaatggatgtcccaatgcacctagaaaattggtctctctttttttaatagctatttgctaaatgctgttcttacacataatttcttaattttcaccgagcagaggtggaaaaatacttttgctttcagggaaaatggtataacgttaatttattaataaattggtaatatacaaaacaattaatcatttatagttttttttgtaatttaagtggcatttctatgcaggcagcacagcagactagttaatctattgcttggacttaactagttatcagatcctttgaaaagagaatatttacaatatatgactaatttggggaaaatgaagttttgatttatttgtgtttaaatgctgctgtcagacgattgttcttagacctcctaaatgccccatattaaaagaactcattcataggaaggtgtttcattttggtgtgcaaccctgtcattacgtcaacgcaacgtctaactggacttcccaagataaatggtaccagcgtcctcttaaaagatgccttaatccattccttgaggacagaccttagttgaaatgatagcagaatgtgcttctctctggcagctggccttctgcttctgagttgcacattaatcagattagcctgattctcttcagtgaattttgataatggcttccagactctttgcgttggagacgcctgttaggatcttcaagtcccatcatagaaaattgaaacacagagttgttctgctgatagttttggggatacgtccatctttttaagggattgctttcatctaattctggcaggacctcaccaaaagatccagcctcatacctacatcagacaaaatatcgccgttgttccttctgtactaaagtattgtgttttgctttggaaacacccactcactttgcaatagccgtgcaagatgaatgcagattacactgatcttatgtgttacaaaattggagaaagtatttaataaaacctgttaatttttatactgacaataaaaatgtttctacagatattaatgttaacaagacaaaataaatgtcacgcaactt

SEQ ID NO: 370 - protein, 822 aa, Homo sapien
MVSWGRFICLVVVTMATLSLARPSFSLVEDTTLEPEEPPTKYQISQPEVYVAAPGESLEVRCLLKDAAVISWTKDGVHLGPNNRTVLIGEYLQIKGATPRDSGLYACTASRTVDSETWYFMVNVTDAISSGDDEDDTDGAEDFVSENSNNKRAPYWTNTEKMEKRLHAVPAANTVKFRCPAGGNPMPTMRWLKNGKEFKQEHRIGGYKVRNQHWSLIMESVVPSDKGNYTCVVENEYGSINHTYHLDVVERSPHRPILQAGLPANASTVVGGDVEFVCKVYSDAQPHIQWIKHVEKNGSKYGPDGLPYLKVLKVLKAAGVNTTDKEIEVLYIRNVTFEDAGEYTCLAGNSIGISFHSAWLTVLPAPGREKEITASPDYLEIAIYCIGVFLIACMVVTVILCRMKNTTKKPDFSSQPAVHKLTKRIPLRRQVSAESSSSMNSNTPLVRITTRLSSTADTPMLAGVSEYELPEDPKWEFPRDKLTLGKPLGEGCFGQVVMAEAVGIDKDKPKEAVTVAVKMLKDDATEKDLSDLVSEMEMMKMIGKHKNIINLLGACTQDGPLYVIVEYASKGNLREYLRARRPPGMEYSYDINRVPEEQMTFKDLVSCTYQLARGMEYLASQKCIHRDLAARNVLVTENNVMKIADFGLARDINNIDYYKKTTNGRLPVKWMAPEALFDRVYTHQSDVWSFGVLMWEIFTLGGSPYPGIPVEELFKLLKEGHRMDKPANCTNELYMMMRDCWHAVPSQRPTFKQLVEDLDRILTLTTNEEYLDLSQPLEQYSPSYPDTRSSCSSGDDSVFSPDPMPYEPCLPQYPHINGSVKT

SEQ ID NO: 371 - DNA, 997 bp, Homo sapien
gaaggaaaaagagcaacagatccagggagcattcacctgccctgtctccaaacagccttgtgcctcacctacccccaacctcccagagggagcagctatttaaggggagcaggagtgcagaacaaacaagacggcctggggatacaactctggagtcctctgagagagccaccaaggaggagcaggggagcgacggccggggcagaagttgagaccacccagcagaggagctaggccagtccatctgcatttgtcacccaagaactcttaccatgaagaccctcctactgttggcagtgatcatgatctttggcctactgcaggcccatgggaatttggtgaatttccacagaatgatcaagttgacgacaggaaaggaagccgcactcagttatggcttctacggctgccactgtggcgtgggtggcagaggatcccccaaggatgcaacggatcgctgctgtgtcactcatgactgttgctacaaacgtctggagaaacgtggatgtggcaccaaatttctgagctacaagtttagcaactcggggagcagaatcacctgtgcaaaacaggactcctgcagaagtcaactgtgtgagtgtgataaggctgctgccacctgttttgctagaaacaagacgacctacaataaaaagtaccagtactattccaataaacactgcagagggagcacccctcgttgctgagtcccctcttccctggaaaccttccacccagtgctgaatttccctctctcataccctccctccctaccctaaccaagttccttggccatgcagaaagcatccctcacccatcctagaggccaggcaggagcccttctatacccacccagaatgagacatccagcagatttccagccttctactgctctcctccacctcaactccgtgcttaaccaaagaagctgtactccggggggtctcttctgaataaagcaattagcaaaaaaaaaaaaaaaaaaaaaaaaaaaaaa

SEQ ID NO: 372 - protein, 144 aa, Homo sapien
MKTLLLLAVIMIFGLLQAHGNLVNFHRMIKLTTGKEAALSYGFYGCHCGVGGRGSPKDATDRCCVTHDCCYKRLEKRGCGTKFLSYKFSNSGSRITCAKQDSCRSQLCECDKAAATCFARNKTTYNKKYQYYSNKHCRGSTPRC

SEQ ID NO: 373 - DNA, 6429 bp, Homo sapien
gcctgcagagagaggcactttgcaccacagacagatagcaagaagggaaagacagagagtgagaaaaaagaggagtcagtcgctcctggggaagggagagagtgagactgggagaaagagaagcacagaaagtgtgtgtaaaacggagtaaagaaagaaaaaaaaaaaactacccttaaagcacatttaaaaaaaaaaaactctggcaattcaagaaagaaacaggctacgtttaaagagcatagagacaatgaaaggctaaagaaaattttaaaatctctgccacagtctcataggtgcttggaaatgaaagtagaactgcctgtctttaacggactctgacagagagggtgaaggggaaccagagcgcacaagggaactgactcaggaggcagagaagatgggcatcctcagcgtagacttgctgatcacactgcaaattctgccagtttttttctccaactgcctcttcctggctctctatgactcggtcattctgctcaagcacgtggtgctgctgttgagccgctccaagtccactcgcggagagtggcggcgcatgctgacctcagagggactgcgctgcgtctggaagagcttcctcctcgatgcctacaaacaggtgaaattgggtgaggatgcccccaattccagtgtggtgcatgtctccagtacagaaggaggtgacaacagtggcaatggtacccaggagaagatagctgagggagccacatgccaccttcttgactttgccagccctgagcgcccactagtggtcaactttggctcagccacttgacctcctttcacgagccagctgccagccttccgcaaactggtggaagagttctcctcagtggctgacttcctgctggtctacattgatgaggctcatccatcagatggctgggcgataccgggggactcctctttgtcttttgaggtgaagaagcaccagaaccaggaagatcgatgtgcagcagcccagcagcttctggagcgtttctccttgccgccccagtgccgagttgtggctgaccgcatggacaataacgccaacatagcttacggggtagcctttgaacgtgtgtgcattgtgcagagacagaaaattgcttatctgggaggaaagggccccttctcctacaaccttcaagaagtccggcattggctggagaagaatttcagcaagagatgaaagaaaactagattagctggttaaaggtatgattataagagagcttattgttttaaaaagttatataaaggcaaggaaattaagaactgaatccatatttcaacagagccctattggcttactgaaagacaggagtttatctatcggaagaacatgaatctctaacagctccatacttctttcactactcaaatggcattgggctgagtaagtaaccatatcacctctcttcttagtaaaaagccctatgtgaaaagatcccaagatggagaggaagaaacgctaattcagcatgtgttcattctgcattgagaaggaactgatacatctgatgcatgctttgagaccagaagaaaagacttacctgaataattactacattagggaagctactgtctacgttaagataaagggtattgccttggctctatttggcatggatggagcccagttggaaaattcccaaatattacaacaagtccttgaacccaggccatgtggttagacgttggtgttaaggttagaccttatgttagagtcatttctgatgttccagcttctagccatgtagtgctctcagtcttcataccccagaaattattggtatatttgtagataccgagaatgatccctcagtctgagaggttagaatgatcatctgtaatctgagggttaatttctaggcaggtggagagagtggtaaaaaagaaatgaaattgacaagctaggaaagaggaggcagaaagatttggaaaattcacagagtttcacccttaagctgtagagagtgggtcacatttgttagccacggaaacatagaaacatacacaaggccagaaaaagaagaaggagctcaactaaaagtggcatagagaatacacatataaaaacaatatatttgtcatatgctcctagagaggagaaaggggtgattgaaagaaaaaaaaatacttaaatatttgtaattgtgaggggtttcttttggaaataattacttttgaaccatgtatgtggtatgtatattttcagtgggttaattataccccatgatacctattaaaggaaaaccagtgggtctggtggtgctggtcttttcctccccattcctacaatttctatgtggcccaagtcattcctaatcttggtctctatagcagtgttctctctgaatgctgagctgaagaaattatacgtacatacacacatacatacatacatacaaatatatgtatatatattctcagctgctgcgggaggtaggtaccatggccattcagcacagccttgatttcctcccaaagtaggtgagctatagtgaagaataggtgcaaacaaacaagcttacttccattgcaaaatagaagaagaggaagttagagataattctgatcaatcattttggaggctttgttataaggcaacccccggtatatcatggaatttccattgacatttgaatttggacttggatcttcccttggtcccattagctgaggtttagtaatctaaagtccctatagtatatgattataatgctattttaaaaaatatatatataaaatatttttttctttttaaaatagacactatagttttacccataagtaatatttaaagattatagctcccaaaagaatggaccaaccactttcgtatcataatttctttttggtaaatatgagactattatgaaatcatagtatatgattgtatttaaaggtacaatcaaaggatcttttgtccattccattaataactgaataaaaaataaataaaatggatagaaaaaaactaaagttgaaaatacattcttaaactagttgtctgaaatgagaaaagagtgagaactaggtgtgcaagaaccaaacgtattttattttattttttaaatgggagcaacatatcagtcgtgtcaccagctggtatattgtgtaaatattaaagctccattgggactgatttttcatggcaacatcagctttctaatgttctaaattctataaaaaccacccacaaagaaacaaagcaaatttcattatctaatgagttgctggaaaatcatattgagaataattatttcagattcctcagttgttaacttctacattcaagggcttatctctgcccccattgatttttaacctcaaaatggtgtgagatttactgtggaaccctaaagcagtaaaataaaaaacctggttgcagcacattcacactgttgtccttaaaattccccttttttctctatgtacgataaagtaacagtatgtcagataagccggtggggggatgagattaggctgaggcagtgctagtcaactgggggaaaaggatgatggaaaaatcacccagttgtgctatatttttaaagaaggaggtcgtttatgtgtgcagacaattctccctgaggttagcccaatggagaaatgaagcagaggaaggaaacatagaaagacatgggctatcagggaggaagatgttcaatagaacatgcaagaatttctggaagaaaggctgtggaagggccaatggagaaaatgaatggacaaagctcaggaatccctacgctatgtagaatgttcttggtgttatcagggttaagccctgtaattatgtaacctatttatcgcaacatgaatttttatgatttcttgtgatgtattcttttatgaaattaacaagaactcattattttgaggtagaggaaaatcaatgctttatctgatatgctgagaaattattagattgccaatactcatgtgcgtttcatgtgttttataaggtttgttcctttgaagaattgtagttcttagtcccacagggaaatgtgtatctatttatatatcatagtataaatctatgatatatttatatcatatataaaagtctgagttctctttcttagtccctaatcatgtttctcccataggctgtgtttacatggagctatcggtttagccttttaagcttcattagcttgtctattattgaaatagtttccaagaaattttagatattatcataacatctgggtctactcaaacacttattgtttgaaagacttatgtcttggacctatcaaaaactgactttatttattgcttagtgaaaatactagtgggatcaacaatgattttcttgaatgggcatgaatggagatgcccgcacagtaatgtagaaatgtttcatacagctattaaaatgtaactgacctccttagaggcagattagtaactgttcctactttgtatagctaagtgacagtcacttaacttacatgactttcttttttcacattgggtctctggtcctgtgtcttcacctcatttatagcacgtctccttgatttttggtagtatcaacttcccagtgatctgttcagttaagttcttctcccgttaaccaggaagtgcttattctctcatcacagtgggaagaatagcctattgtctttcattttgcctgagtgtattttactatttgggctctgaaataaaaattatgaaatatggtgaggtcacatgttggtgctgccttgctgcataaaattctaggagggcaggttaggagacagttatgtatggcctttcgggaaaattcaaagggtgggattacaagggtgttcctcaggcatgcccctatgggccctatgtggaagcaagaagaattgactgatttacaggacttctctttatgtcaatcttaagaggatggatgaatctggacatttgttccacccgacctctgactgatggtttggaaaataactttaattaggatcatatgaccattgaaaaaggaaaaatgtagactctgacttccgtcccactgaaggattaatgaaaacctttactagcatttagagcttttcagaacatccccactgtcatgtgtctcagcagtggagactgcaagtaaggcttttaattttaggaggtttttttttttttttttttttcccctaaatggtatggccaaaagtcagagttaaaatatatatagttagattccaacttcctccttcactctaaaaatagaatccaaacccactcttcatatatgcttccagaatggggcttaagtaccaatctctgctttgcaatgggcacaatcttggtcatgtcctgaggctctctaagaaaagagaggatctaggatgggagagctagaaagttgctaactgggaagaacaaggccctgaggggttggtctaccaatctgggaagatttgaaaacaaacttctcgcaactgaaggaaggctgaaggctgctgcaagtcattgagtgactttaggatgagcaaaacattgggccacttcctaatgccctatgtgtatagtaccagaagcaaggtctcagacttaacagacccagctctgttccaaggtgagtctgaaccaatagaaagcaaacatgtgcagatatccaaacaagactgctcatgcaagtcggggctggctacccgtcttaggcagcaacagcagagctccagggagcttattcaatatttactgagacttcgaagacccagcagatgtttaatgaagtcactattttggctcaaaccctccacttctccccctcccctcaaaaagccaacaggtaaacacataaatgaaagaaacccacagaaggggatgggaaataaagaaaattctctcaagacttctccaggcccatgtcactggtcagcgtggtttttatgtgtattaggattgggggatgtgaagaaataagtatccagtactttataaccaaagcaattaaatgatattggggtagggaatgttggccagttttgtttagttttgccatcacattgtcacccagacctcacctagccccaagtaatcgggcgccccgaagagggagacagagatgtgccagagttgacccagtgtgcggatgataactactgacgaaagagtcatcgacctcagttagtggttggatgtagtcacattagtttgcctctccccatctttgtctccctggcaaggagaatatgcgggacatgatgctaagagccctgggtaaatgtggtgagaatgcacgcgtgcatatgctacacatatgtgcttctcagttgcagaaaatgaactgctttgggagattatcagtagaaagagtgttatcatattggtgctgagtgctatgtgtgcttatacaatttgttcttgtattttaataaactttgaataaaagaataaaaaaaaaaaaaaaaaaaaaaa

SEQ ID NO: 374 - protein, 273 aa, Homo sapien
  unsure 133, 266: unknown amino acid
MGILSVDLLITLQILPVFFSNCLFLALYDSVILLKHVVLLLSRSKSTRGEWRRMLTSEGLRCVWKSFLLDAYKQVKLGEDAPNSSVVHVSSTEGGDNSGNGTQEKIAEGATCHLLDFASPERPLVVNFGSATXPPFTSQLPAFRKLVEEFSSVADFLLVYIDEAHPSDGWAIPGDSSLSFEVKKHQNQEDRCAAAQQLLERFSLPPQCRVVADRMDNNANIAYGVAFERVCIVQRQKIAYLGGKGPFSYNLQEVRHWLEKNFSKRXKKTRLAG

SEQ ID NO: 375 - DNA, 3851 bp, Homo sapien
ctctcccaaccgcctcgtcgcactcctcaggctgagagcaccgctgcactcgcggccggcgatgcgggaccccggcgcggccgctccgctttcgtccctgggcctctgtgccctggtgctggcgctgctgggcgcactgtccgcgggcgccggggcgcagccgtaccacggagagaagggcatctccgtgccggaccacggcttctgccagcccatctccatcccgctgtgcacggacatcgcctacaaccagaccatcctgcccaacctgctgggccacacgaaccaagaggacgcgggcctcgaggtgcaccagttctacccgctggtgaaggtgcagtgttctcccgaactccgctttttcttatgctccatgtatgcgcccgtgtgcaccgtgctcgatcaggccatcccgccgtgtcgttctctgtgcgagcgcgcccgccagggctgcgaggcgctcatgaacaagttcggcttccagtggcccgagcggctgcgctgcgagaacttcccggtgcacggtgcgggcgagatctgcgtgggccagaacacgtcggacggctccgggggcccaggcggcggccccactgcctaccctaccgcgccctacctgccggacctgcccttcaccgcgctgcccccgggggcctcagatggcagggggcgtcccgccttccccttctcatgcccccgtcagctcaaggtgcccccgtacctgggctaccgcttcctgggtgagcgcgattgtggcgccccgtgcgaaccgggccgtgccaacggcctgatgtactttaaggaggaggagaggcgcttcgcccgcctctgggtgggcgtgtggtccgtgctgtgctgcgcctcgacgctctttaccgttctcacctacctggtggacatgcggcgcttcagctacccagagcggcccatcatcttcctgtcgggctgctacttcatggtggccgtggcgcacgtggccggcttccttctagaggaccgcgccgtgtgcgtggagcgcttctcggacgatggctaccgcacggtggcgcagggcaccaagaaggagggctgcaccatcctcttcatggtgctctacttcttcggcatggccagctccatctggtgggtcattctgtctctcacttggttcctggcggccggcatgaagtggggccacgaggccatcgaggccaactcgcagtacttccacctggccgcgtgggccgtgcccgccgtcaagaccatcactatcctggccatgggccaggtagacggggacctgctgagcggggtgtgctacgttggcctctccagtgtggacgcgctgcggggcttcgtgctggcgcctctgttcgtctacctcttcataggcacgtccttcttgctggccggcttcgtgtccctcttccgtatccgcaccatcatgaaacacgacggcaccaagaccgagaagctggagaagctcatggtgcgcatcggcgtcttcagcgtgctctacacagtgcccgccaccatcgtcctggcctgctacttctacgagcaggccttccgcgagcactgggagcgcacctggctcctgcagacgtgcaagagctatgccgtgccctgcccgcccggccacttcccgcccatgagccccgacttcaccgtcttcatgatcaagtacctgatgaccatgatcgtcggcatcaccactggcttctggatctggtcgggcaagaccctgcagtcgtggcgccgcttctaccacagacttagccacagcagcaagggggagactgcggtatgagccccggcccctccccacctttcccaccccagccctcttgcaagaggagaggcacggtagggaaaagaactgctgggtgggggcctgtttctgtaactttctccccctctactgagaagtgacctggaagtgagaagttctttgcagatttggggcgaggggtgatttggaaaagaagacctgggtggaaagcggtttggatgaaaagatttcaggcaaagacttgcaggaagatgatgataacggcgatgtgaatcgtcaaaggtacgggccagcttgtgcctaatagaaggttgagaccagcagagactgctgtgagtttctcccggctccgaggctgaacggggactgtgagcgatccccctgctgcagggcgagtggcctgtccagacccctgtgaggccccgggaaaggtacagccctgtctgcggtggctgctttgttggaaagagggagggcctcctgcggtgtgcttgtcaagcagtggtcaaaccataatctcttttcactggggccaaactggagcccagatgggttaatttccagggtcagacattacggtctctcctcccctgccccctcccgcctgtttttcctcccgtactgctttcaggtcttgtaaaataagcatttggaagtcttgggaggcctgcctgctagaatcctaatgtgaggatgcaaaagaaatgatgataacattttgagataaggccaaggagacgtggagtaggtatttttgctactttttcattttctggggaaggcaggaggcagaaagacgggtgttttatttggtctaataccctgaaaagaagtgatgacttgttgcttttcaaaacaggaatgcatttttccccttgtctttgttgtaagagacaaaagaggaaacaaaagtgtctccctgtggaaaggcataactgtgacgaaagcaacttttataggcaaagcagcgcaaatctgaggtttcccgttggttgttaatttggttgagataaacattcctttttaaggaaaagtgaagagcagtgtgctgtcacacaccgttaagccagaggttctgacttcgctaaaggaaatgtaagaggttttgttgtctgttttaaataaatttaattcggaacacatgatccaacagactatgttaaaatattcagggaaatctctcccttcatttactttttcttgctataagcctatatttaggtttcttttctatttttttctcccatttggatcctttgaggtaaaaaaacataatgtcttcagcctcataataaaggaaagttaattaaaaaaaaaaagcaaagagccattttgtcctgttttcttggttccatcaatctgtttattaaacatcatccatatgctgaccctgtctctgtgtggttgggttgggaggcgatcagcagataccatagtgaacgaagaggaaggtttgaaccatgggccccatctttaaagaaagtcattaaaagaaggtaaacttcaaagtgattctggagttctttgaaatgtgctggaagacttaaatttattaatcttaaatcatgtactttttttctgtaatagaactcggattcttttgcatgatggggtaaagcttagcagagaatcatgggagctaacctttatcccacctttgacactaccctccaatcttgcaacactatcctgtttctcagaacagtttttaaatgccaatcatagagggtactgtaaagtgtacaagttactttatatatgtaatgttcacttgagtggaactgctttttacattaaagttaaaatcgatcttgtgtttcttcaaccttcaaaactatctcatctgtcagatttttaaaactccaacacaggttttggcatcttttgtgctgtatcttttaagtgcatgtgaaatttgtaaaatagagataagtacagtatgtatattttgtaaatctcccatttttgtaagaaaatatatattgtatttatacatttttactttggatttttgttttgttggctttaaaggtctaccccactttatcacatgtacagatcacaaataaatttttttaaatac

SEQ ID NO: 376 - protein, 574 aa, Homo sapien
MRDPGAAAPLSSLGLCALVLALLGALSAGAGAQPYHGEKGISVPDHGFCQPISIPLCTDIAYNQTILPNLLGHTNQEDAGLEVHQFYPLVKVQCSPELRFFLCSMYAPVCTVLDQAIPPCRSLCERARQGCEALMNKFGFQWPERLRCENFPVHGAGEICVGQNTSDGSGGPGGGPTAYPTAPYLPDLPFTALPPGASDGRGRPAFPFSCPRQLKVPPYLGYRFLGERDCGAPCEPGRANGLMYFKEEERRFARLWVGVWSVLCCASTLFTVLTYLVDMRRFSYPERPIIFLSGCYFMVAVAHVAGFLLEDRAVCVERFSDDGYRTVAQGTKKEGCTILFMVLYFFGMASSIWWVILSLTWFLAAGMKWGHEAIEANSQYFHLAAWAVPAVKTITILAMGQVDGDLLSGVCYVGLSSVDALRGFVLAPLFVYLFIGTSFLLAGFVSLFRIRTIMKHDGTKTEKLEKLMVRIGVFSVLYTVPATIVLACYFYEQAFREHWERTWLLQTCKSYAVPCPPGHFPPMSPDFTVFMIKYLMTMIVGITTGFWIWSGKTLQSWRRFYHRLSHSSKGETAV

SEQ ID NO: 377 - DNA, 3134 bp, Homo sapien
tccagcgaacagccccgcttctaacccgagatgctgctgccggcgcccgcgctccgccgcgccctgctgtcccgcccctggaccggggccggcctgcggtggaagcacacctcctccctgaaggtggccaacgagcccgtcttagccttcacgcagggcagccctgagcgagatgccctgcaaaaggccttgaaggacctgaagggccggatggaagccatcccatgcgtgatgggggatgaggaggtgtggacgtcggacgtgcagtaccaagtgtcgccttttaaccatggacataaggtggccaagttctgttatgcagacaagagcctgctcaacaaagccattgaggctgccctggctgcccggaaagagtgggacctgaagcctattgcagaccgggcccagatcttcctgaaggcggcagacatgctgagtgggccgcgcagggctgagatcctcgccaagaccatggtgggacagggtaagaccgtgatccaagcggagattgacgctgcagcggaactcatcgacttcttccggttcaatgccaagtatgcggtggagctggaggggcagcagcccatcagcgtgcccccgagcaccaacagcacggtgtaccggggtctggagggcttcgtggcggccatctcgccctttaacttcactgcaatcggcggcaacctggcgggggcaccggccctgatgggcaacgtggtcctatggaagcccagtgacactgccatgctggccagctatgctgtctaccgcatccttcgggaggctggcctgccccccaacatcatccagtttgtgccagctgatgggcccctatttggggacactgtcaccagctcagagcacctctgtggcatcaacttcacaggcagtgtgcccaccttcaaacacctgtggaagcaggtggcccagaacctggaccggttccacaccttcccacgcctggctggagagtgcggcggaaagaacttccacttcgtgcaccgctcggccgacgtggagagcgtggtgagcgggaccctccgctcagccttcgagtacggtggccagaagtgttccgcctgctcgcgtctctacgtgccgcactcgctgtggccgcagatcaaagggcggctgctggaggagcacagtcggatcaaagtgggcgaccctgcagaggattttgggaccttcttctctgcagtgattgatgccaagtcctttgcccgtatcaagaagtggctggagcacgcgcgctcctcgcccagcctcaccatcctggctgggggcaagtgtgatgactccgtgggctactttgtggagccctgcatcgtggagagcaaggaccctcaggagcccatcatgaaggaggagatcttcgggcctgtactgtctgtgtacgtctacccggacgacaagtacaaggagacgctgcagctggttgacagcaccaccagctatggcctcacgggggcagtgttctcccaggataaggacgtcgtgcaggaggccacaaaggtgctgaggaatgctgccggcaacttctacatcaacgacaagtccactggctcgatagtgggccagcagccctttgggggggcccgagcctctggaaccaatgacaagccagggggcccacactacatcctgcgctggacgtcgccgcaggtcatcaaggagacacataagcccctgggggactggagctacgcgtacatgcagtgagcccctctcgggctccaccgtccagctgtctgtccgtccaggtggccgacctcactgcacagaccccactccagcccctccaccccttcttcatgcacagctgcctttctataatccgggcttgactcccttcttaccactgtattctggcctctcccatgcctcaggctctggtttgagatcgtgctggggaggaacatggccactaccccttatcccatcggccatgtgggaggtatgaccctggtgcctggcaggttctccctctgccctccactgggcccagtggctcagggacctggggaaaggagatggagcagctcttgggatcctttggggaaaaggaggccattctgggccccttggcaaacctcaccactcacagaggctcctggccttgatccctgcccctccaggtgtccagggtaaagtgtaactcagactgacctgtggggcacagggggcaccagctggccttgccctctctggtctgggctgtctaccttcctcactgtatctttgcccagacccacctgggccagtaggcctgtccccagccacacaccttagatgctggcatgccttactccaggtgcctgtgtttggccgaggcctgtgtgattcccggtctgcaccacatggcggggttggggggccgctggaggccacctgccaaggcgtgggatgggatggtcctgccggtttaggccgtgattctggaaaaccttggatgggccttcgtcctatgtcagccttccctttgatcctcaggccctacctgtagagacctccactcctagagccagtctcagggtctgggatttccctgcaggagctcagccaccactgtgccatggtgacacaggccaaggcagacattggccctcccttctcccagcccccagaggcctggccttgggttcgtcagcatgggccgaggacgttgcctgtagaatcctcctctgcctgggagtggctctgtgtggaccagtccctcactggcccattctttttttgacgcagccaatctgtgaccacgattcctcccacagatgcctcctgcttggattctgagtggtcagagatctgtaaagcatgactttcaaggatggttcttaggggactgtgtaaagtgttgggtcttcctccaggatgcctgcatgggaccccacccggagctggtgtggccattccccgaagtgccactggcccatggatgggggtgggtgctggtgcacctgggctgggtgtgggttctgtgtccttccaggatctgtgtcatttcccatgaggggccggggcaggtggctgggtgggggcacaggctggagtattcttagttctactggttctacactgtgaggtggcaatgggatttgctcagatgccacccaataaaatgcctgttactt

SEQ ID NO: 378 - protein, 563 aa, Homo sapien [sequence omitted]

SEQ ID NO: 379 - DNA, 1099 bp, Homo sapien
cggccggagtgcggcgctgggcggaagctaccatggcggccgagagaaagacaaagttgtccaagaatctgctgcgcatgaagtttatgcaaaggggactggactcagaaaccaagaaacaactagaagaagaagaaaagaaaatcattagtgaagagcactggtacttggatttgccagagcttaaagagaaagagagtttcataatagaagagcagagtttcttactatgtgaagatcttctctatggaagaatgtcattcagaggatttaatcctgaggttgagaaattgatgcttcagatgaatgctaagcacaaagcagaagaagttgaagatgaaacagtagagcttgatgtgtcagatgaagagatggctagaagatatgagaccttggtggggacaattgggaaaaagtttgccagaaagagagaccatgccaattatgaagaagatgaaaatggagacatcacaccaattaaagcaaagaagatgttcttaaagccccaggattaagatggatgccttaagcgatggcccaggggtgcttggtggaagtcagcagggcatctggagctcatcccaatggtgtctctatagttattaatactgtaacgtttacttgtaaagagattatcattttagaaacatgctgtttttgaaacagatgtgtgatggatgttgtacatcctttgcttcttggtattcattcagagtggatttttagcccctgatctacaaatgtacattgttacagggctgcttcctaaagattttttttacctcaggtttctcttaatatagttctccagtcactgaccttgaattgacttacataaactactgccaatgtttaaattgcccttatgtttatgtttattatgtcaagccaattcgtacatacaatttggaatcaagtgtcataagaatttattatataaatttatcaagaataaaaatgcctctccagccttaagtatttacatgctcccaggtcattgtcagtttatggtattatgttgttttatttaaagcattgaattgatagaaaaatttgctctgtaataaaaatctactttcaaaaaaaaaaaaaaaaaaaa

SEQ ID NO: 380 - protein, 160 aa, Homo sapien
MAAERKTKLSKNLLRMKFMQRGLDSETKKQLEEEEKKIISEEHWYLDLPELKEKESFIIEEQSFLLCEDLLYGRMSFRGFNPEVEKLMLQMNAKHKAEEVEDETVELDVSDEEMARRYETLVGTIGKKFARKRDHANYEEDENGDITPIKAKKMFLKPQD

SEQ ID NO: 381 - DNA, 3881 bp, Homo sapien
gctgaagtgttcgaccagcaggaggttttctcctcagcccactcgctgcatccagatcagctcaccccgcgccctttcctgcccaccaggactctgatagcccctggcagccacagcccattttgccaagatgtctagagtagccaaatatcgccggcagtgagtgaagaccccgacatcgacagcctgctgggaccctgtctcccgaggagatggaggagctggagaaggagctggacgtggtggacccagacgggagtgttcccgtggggctgcggcagagaaaccagacggagaaacagtccacgggtgtgtacaaccgggaggccatgctcaacttctgtgaaaaggagaccaagaaacttatgcagagggagatgtccatggatgaaagcaagcaagtggagaccaagacagatgccaagaatggacaggaaaggggcagagatgccagcaaaaaagccctgggccccagacggaactcagatctggggaaggagccaaagaggggtggtttaaagaaaagcttctctagagacagagatgaagctggtggcaagagtggcgagaagcccaaggaggagaagatcatccggggcattgacaagggccgggtcagggctgcagtggataagaaggaggcagggaaggatgggagaggagaggagagggcagtggccaccaagaaggaagaggagaagaaagggggtgacaggaacacaggcttgagcagggacaaggataaaaagagagaggagatgaaggaggtggccaagaaagaggatgatgagaaggtaaaaggggagcgtaggaacacagacaccagaaaagagggtgagaagatgaaaagagcaggtgggaacacagacatgaaaaaggaggatgagaaggtaaaaagaggaactgggaacacagacaccaaaaaggacgatgaaaaagtcaagaagaatgaacccttacatgaaaaggaagccaaggatgacagcaagaccaaaacacccgagaaacagacgcccagtggccccaccaagccctctgaaggaccggccaaggtggaggaggaggcagctcccagcatatttgatgagcctctggagagagtgaagaacaatgaccccgagatgactgaggtgaacgtcaacaactcagactgcatcacaaatgagatcttggtccggtttactgaggctctggagttcaacactgtggttaagctgttcgccttggccaacacgcgagccgatgaccacgtggcctttgccattgccatcatgctcaaggccaacaagaccatcaccagcctcaacctggactccaaccacatcacaggcaaaggcatcctggccatcttccgggccctcctccagaacaacacgctgaccgagctccgcttccacaaccagcgacacatctgtggaggcaagacggagatggagatcgccaagctgctgaaggagaatacctccctgctcaagctgggctaccattttgagctggccgggccccgaatgactgtcaccaatctgctcagccgcaacatggacaagcagagacaaaagcggctgcaggagcaaaggcaggcacaggaagccaagggagagaagaaggatctgctggaggtacccaaggccggggccgtggctaagggctccccaaaaccttcacctcaaccatctccaaagccctctccaaagaactcacccaaaaaagggggtgctccagctgccccaccaccccctccccctcccttggctccaccccttatcatggagaacctgaagaattcactctcaccagctacccagaggaagatgggagacaaagtcctccctgcccaggagaagaactcccgtgaccagctattggctgccatccgctccagcaacctcaagcagctcaagaaggtggaagtgcccaaactgcttcagtaggaccaggctgccaggcaccatctgccaatgccatgactgctcaggcctcacctcccagggctacacagaccctgcccaccccatccctggctgacctgctgtggatgtccctattctgccatgggagcgtccaggcctgggtcacgctcaaggaaggatgccttatctcttctcactttccttttcttgtctctgaggctctccaaattttgctttagtacatggagctcaggtttctggacaagaagagtccttttagcacatcactgagaagatggcactgtccagggcccatgtagctggcaagctgcaaaaggcctgtgatccaggaaagatgtcccacagggaccacatccaccccagccccactgccctccagggccaggattcaggcctctgaggagcccacggggcaaagctgctgggccagtggcactctgtgtgggaaaatggcagaaagatggagaggcatgggggcccaaaggggagcgtggggaggggctgaggataccccaaagtccaggctaattagaggatgtggcaggggcagtggcctggatgcacagtgcctgatgggagtaggctccagacaggaggagtgggacagacagcagctggacttgaaggtttgatgccaaagcagacattttcctcacacccacctgctgctgtatgaatagctgtgtatctgtttttccataagattttgataatatatacaaacctttagctgtgaatggctgtgccccacctgttgtcctgaactgtgagtcctgatcctaaccctgggctccctggaggactctagaagctcaggttccctgccacactatttgagttggccaagaaataaattcacatcctcagaaagtgcagcatggaggaaaatctgaactctaagcagaagactctccactgacctggttgtccaggtctagaaggccaggcctctactaggtctgctcctgaaccagtcctgctgcctggagtcagtagccagagttgttctcaggggtgctggggcagagtggagcccagggtgctgggatggctatattaggcatgttcagggatgctcattccatgactctgcctaaccatgggctcagggccaggtcctcacagcagtcacaggcccaggaaggcggcaggcagagaagtggagtgactatttggagaatagcacccatatctgtgtgccctagggctcagaggggcctcatcttccccagccctccccacctgctcaccaattccacttcctgccccaactgcaggaatgctgacaatgctgccatgcccaccatcgggtgtaggtgaaaggcatctttctgaatttcattctcttgaaggtgctgccaccccttggcactgtggaactgccaccttgggtctgtgtcacttgtaggtttctctgcctccaggttgcctcaacagcaggaggcacagcagtttcaccatctttgaggtgagggtggggtgccccagctaggaagcaagatcgctgtgctaggtctgaccaaaaccagagggcagtctagtcctgggggtaaagccctcagatcccagggtacactcttctccattccctccacccacttgcctgtcaccccagtcacctaagcaatcactgggcccagaggagaggagacagacacacactggctcctggacctaaagggtatgagctggagctaaggccagctagagcttccactgtcagccctcactgtcagccccactgcacccccctgtgcctgctgggcactgggcactagctagatgctttaggttgcttcagctgatccttcaactctgtgaggtggataccaatattctattttgcagatagaatttggcccagagaggttaactaatatatccatgatcacacagctaataaaagtcagagctcaggaaaaaaaaaaaaaaaaaaaaaaaaaaaaaaaa

SEQ ID NO: 382 - protein, 572 aa, Homo sapien
MEELEKELDVVDPDGSVPVGLRQRNQTEKQSTGVYNREAMLNFCEKETKKLMQREMSMDESKQVETKTDAKNGQERGRDASKKALGPRRNSDLGKEPKRGGLKKSFSRDRDEAGGKSGEKPKEEKIIRGIDKGRVRAAVDKKEAGKDGRGEERAVATKKEEEKKGGDRNTGLSRDKDKKREEMKEVAKKEDDEKVKGERRNTDTRKEGEKMKRAGGNTDMKKEDEKVKRGTGNTDTKKDDEKVKKNEPLHEKEAKDDSKTKTPEKQTPSGPTKPSEGPAKVEEEAAPSIFDEPLERVKNNDPEMTEVNVNNSDCITNEILVRFTEALEFNTVVKLFALANTRADDHVAFAIAIMLKANKTITSLNLDSNHITGKGILAIFRALLQNNTLTELRFHNQRHICGGKTEMEIAKLLKENTSLLKLGYHFELAGPRMTVTNLLSRNMDKQRQKRLQEQRQAQEAKGEKKDLLEVPKAGAVAKGSPKPSPQPSPKPSPKNSPKKGGAPAAPPPPPPPLAPPLIMENLKNSLSPATQRKMGDKVLPAQEKNSRDQLLAAIRSSNLKQLKKVEVPKLLQ

SEQ ID NO: 383 - DNA, 2634 bp, Homo sapien
acaggcacaggtgaggaactcaactcaaactcctctctctgggaaaacgcggtgcttgctcctcccggagtggccttggcagggtgttggagccctcggtctgccccgtccggtctctggggccaaggctgggtttccctcatgtatggcaagagctctactcgtgcggtgcttcttctccttggcatacagctcacagctctttggcctatagcagctgtggaaatttatacctcccgggtgctggaggctgttaatgggacagatgctcggttaaaatgcactttctccagctttgcccctgtgggtgatgctctaacagtgacctggaattttcgtcctctagacgggggacctgagcagtttgtattctactaccacatagatcccttccaacccatgagtgggcggtttaaggaccgggtgtcttgggatgggaatcctgagcggtacgatgcctccatccttctctggaaactgcagttcgacgacaatgggacatacacctgccaggtgaagaacccacctgatgttgatggggtgataggggagatccggctcagcgtcgtgcacactgtacgcttctctgagatccacttcctggctctggccattggctctgcctgtgcactgatgatcataatagtaattgtagtggtcctcttccagcattaccggaaaaagcgatgggccgaaagagctcataaagtggtggagataaaatcaaaagaagaggaaaggctcaaccaagagaaaaaggtctctgtttatttagaagacacagactaacaattttagatggaagctgagatgatttccaagaacaagaaccctagtatttcttgaagttaatggaaacttttctttggcttttccagttgtgacccgttttccaaccagttctgcagcatattagattctagacaagcaacacccctctggagccagcacagtgctcctccatatcaccagtcatacacagcctcattattaaggtcttatttaatttcagagtgtaaattttttcaagtgctcattaggttttataaacaagaagctacatttttgcccttaagacactacttacagtgttatgacttgtatacacatatattggtatcaaaagggataaaagccaatttgtctgttacatttcctttcacgtatttcttttagcagcacttctgctactaaagttaatgtgtttactctctttccttcccacattctcaattaaaaggtgagctaagcctcctcggtgtttctgattaacagtaaatcctaaattcaaactgttaaatgacatttttatttttatgtctctccttaactatgagacacatcttgttttactgaatttctttcaatattccaggtgatagatttttgttgttttgttaattaatccaagatttacaatagcacaacgctaaatcacacagtaactacaaaaggttacatagatatgaaaagattggcagaggccattgcaggatgaatcacttgtcacttttcttctgtgctgggaaaaataatcaacaatgtgggtctttcatgagcagtgacggatagtttagcttactatgtttcccccccaattcaatgatctataacaacagagcaaagtctatgctcatttgcagactggaatcattaagtaatttaataaaaaaattgtgaaacagcatattacaagtttgaaaattcagggctggtgaaaaaaatcaactctaaatgatgataattttgtacagttttatataaaactctgagaactagaagaaattattaactttttttcttttttaattctaattcacttgtttattttgggggaggaagactttggtatggagcaaagaaataccaaaactactttaaatggaataaaaccaactttattctttttttcccccatactggtagataaagcaaactttataagtgggctattgaaagaaaagttacaagcttaagatacagaagcatttgttcaaaggatagaaagcatctaaaagtttaggctcaagatcaatctttacagattgatattttcagtttttaatcgactggactgcagatgttttttcttttaacaaactggaattttcaaacagattatctgtatttaaatgtatagaccttgatatttttccaatactattttttaaaaaattgtatgatttacatatgaacctcagttctgaaattcattacatatctgtctcattctgccttttatactgtctaaaaaagcaaagttttaaagtgcaattttaaaactgtaaattacatctgaaggctatatatcctttaatcacattttatattttttcttcacaattctaacctttgaaaatattataactggatatttcttcaaacagatgtcctggatgatggtccataagaataatgaagaagtagttaaaaatgtatggacagtttttccggcaaaatttgtagcttatgtcttggctaaatagtcaaggggtaatatgggcctgttgtttagtgtctccttcctaaagagcacttttgtattgtaatttattttttattatgctttaaacactatgtaaataaacctttagtaataaagaattatcagttataaaaaaaaaaaaaaaaaaa

SEQ ID NO: 384 - protein, 215 aa, Homo sapien
MYGKSSTRAVLLLLGIQLTALWPIAAVEIYTSRVLEAVNGTDARLKCTFSSFAPVGDALTVTWNFRPLDGGPEQFVFYYHIDPFQPMSGRFKDRVSWDGNPERYDASILLWKLQFDDNGTYTCQVKNPPDVDGVIGEIRLSVVHTVRFSEIHFLALAIGSACALMIIIVIVVVLFQHYRKKRWAERAHKVVEIKSKEEERLNQEKKVSVYLEDTD

SEQ ID NO: 385 - DNA, 2602 bp, Homo sapien
gctcaactcaaactcctctctctgggaaaacgcggtgcttgctcctcccggagtggccttggcagggtgttggagccctcggtctgccccgtccggtctctggggccaaggctgggtttccctcatgtatggcaagagctctactcgtgcggtgcttcttctccttggcatacagctcacagctctttggcctatagcagctgtggaaatttatacctcccgggtgctggaggctgttaatgggacagatgctcggttaaaatgcactttctccagctttgcccctgtgggtgatgctctaacagtgacctggaattttcgtcctctagacgggggacctgagcagtttgtattctactaccacatagatcccttccaacccatgagtgggcggtttaaggaccgggtgtcttgggatgggaatcctgagcggtacgatgcctccatccttctctggaaactgcagttcgacgacaatgggacatacacctgccaggtgaagaacccacctgatgttgatggggtgataggggagatccggctcagcgtcgtgcacactgtacgcttctctgagatccacttcctggctctggccattggctctgcctgtgcactgatgatcataatagtaattgtagtggtcctcttccagcattaccggaaaaagcgatgggccgaaagagctcataaagtggtggagataaaatcaaaagaagaggaaaggctcaaccaagagaaaaaggtctctgtttatttagaagacacagactaacaattttagatggaagctgagatgatttccaagaacaagaaccctagtatttcttgaagttaatggaaacttttctttggcttttccagttgtgacccgttttccaaccagttctgcagcatattagattctagacaagcaacacccctctggagccagcacagtgctcctccatatcaccagtcatacacagcctcattattaaggtcttatttaatttcagagtgtaaattttttcaagtgctcattaggttttataaacaagaagctacatttttgcccttaagatactacttacagtgttatgacttgtatacacatatattggtatcaaaggggataaaagccaatttgtctgttacatttcctttcacgtatttcttttagcagcacttctgctactaaagttaatgtgtttactctctttccttcccacattctcaattaaaaggtgagctaagcctcctcggtgtttctgattaacagtaaatcctaaattcaaactgttaaatgacatttttatttttatgtctctccttaactatgagacacatcttgttttactgaatttctttcaatattccaggtgatagatttttgttgttttgttaattaatccaagatttacaatagcacaacgctaaatcacacagtaactacaaaaggttacatagatatgaaaagattggcagaggccattgcaggatgaatcacttgtcacttttcttctgtgctgggaaaaataatcaacaatgtgggtctttcatgagcagtgacggatagtttagcttactatgtttcccccccaattcaatgatctataacaacagagcaaagtctatgctcatttgcagactggaatcattaagtaatttaataaaaagattgtgaaacagcatattacaagtttgaaaattcagggctggtgaaaaaaatcaactctaaatgatgataattttgtacagttttatataaaactctgagaactagaagaaattattaactttttttcttttttaattctaattcacttgtttattttgggggaggaagactttggtatggagcaaagaaataccaaaactactttaaatggaataaaaccaactttattctttttttcccccatactggtagataaagcaaactttataagtgggctattgaaagaaaagttacaagcttaagatacagaagcatttgttcaaaggatagaaagcatctaaaagtttaggctcaagatcaatctttacagattgatattttcagtttttaatcgactggactgcagatgttttttcttttaacaaactggaattttcaaacagattatctgtatttaaatgtatagaccttgatatttttccaatactattttttaaaaaattgtatgatttacatatgaacctcagttctgaaattcattacatatctgtctcattctgccttttatactgtctaaaaaagcaaagttttaaagtgcaattttaaaactgtaaattacatctgaaggctatatatcctttaatcacattttatattttttcttcacaattctaacctttgaaaatattataactggatatttcttcaaacagatgtcctggatgatggtccataagaataatgaagaagtagttaaaaatgtatggacagtttttccggcaaaatttgtagcttatgtcttggctaaatagtcaaggggtaatatgggcctgttgtttagtgtctccttcctaaagagcacttttgtattgtaatttattttttattatgctttaaacactatgtaaataaacctttagtaataaagaaaaaaaaaaaaaaaaa

SEQ ID NO: 386 - protein, 215 aa, Homo sapien; identical to SEQ ID NO: 384

SEQ ID NO: 387 - DNA, 1559 bp, Homo sapien
agcggctgggcttgcaaggcgcgatccaagagggatttaagcagcccagagctccagagaaaaagagagcgagagagaaccacacacagagacggcttaagcgtttacccgaattaaatatatatttttaaaaagaactgttgagttttatcattttcgttaagtgaccgtgcgcagcgctgtaactgcaggatggggaagcagaatagcaaactggcccctgaagtgatggaggacctggtgaagagcacagagtttaatgagcatgaactcaagcagtggtacaaaggatttctcaaggactgtccaagtgggaggctaaatctcgaggaatttcagcagctctatgtgaagttctttccttatggagacgcctccaagtttgcccagcatgccttccgaaccttcgacaagaatggggacggcaccattgacttccgagagttcatctgcgctctgtccatcacctccaggggcagctttgagcagaagctgaactgggccttcaatatgtatgacctggatggtgatggcaagatcacccgagtggagatgctggagatcatcgaggctatctacaaaatggtaggcactgtgatcatgatgaaaatgaatgaggatggcctgacgcctgagcagcgagtagacaagattttcagcaagatggataagaacaaagatgaccagattacactggatgaattcaaagaagctgcaaagagcgacccttccattgtattacttctgcagtgcgacatccagaaatgagctgatgtcaatgctatggactgcacaaaagtctcaatgttccattcagtctgcagctattcacacacacacacacacacacacacacacacacacacacacacacacacaaatattgcttggactacctataaatggacttgcttcttgtgtttgaaacactcgtgtgcatgagaatgtcatttgctaatgaattttaaaagcatatataaaacaaaacaaacaacctgccacaatgtgatatgtgtaatatcatttcataaaatccctcttcctccaaagcctgggcagaaatgtgctgcaaagagttatatgacttcttgttcatgttttgctaatgctcgtatctccttgattacataatgttagtagcactgagacccccatggtaatgtaacttaattataagctatgtcactaccctcctgtaaaatactattggacagacacagagggacccttggctcctgtgtctggtccacacaccacagaagcttgtattatcagtgaatataaatgtactacatttgcatgccttttgggtttgccttaattcttacctcatttgcatcctatcgatctggaaagagctgttttggatgaatgcagtataaaatgtaaaaaccctgctaaatgacttattgattaagtatatctatctatatatacatatacacaaagatattatttatcgaaagtaaaaaagatggaagtgtattggtttctgtttgaattttcaaaggcttccaatgtggtggcaataaatgtcccaaataaatttataacaattg

SEQ ID NO: 388 - protein, 191 aa, Homo sapien
MGKQNSKLAPEVMEDLVKSTEFNEHELKQWYKGFLKDCPSGRLNLEEFQQLYVKFFPYGDASKFAQHAFRTFDKNGDGTIDFREFICALSITSRGSFEQKLNWAFNMYDLDGDGKITRVEMLEIIEAIYKMVGTVIMMKMNEDGLTPEQRVDKIFSKMDKNKDDQITLDEFKEAAKSDPSIVLLLQCDIQK

SEQ ID NO: 389 - DNA, 1865 bp, Mus musculus
agcggagcggagatttacccgagcgtgttgcggcagcggctgggcttgcaaggcgcgatccaagagggatttaagcagcccagagctccagagaaaaagagagcgagagagaaccacacacagagacggcttaagcgtttacccgaattaaatatatatttttaaaaagaactgttgagttttatcattttcgttaagtgaccgtgcgcagcgctgtaactgcaggatggggaagcagaatagcaaactggcccctgaagtgatggaggacctggtgaagagcacagagtttaatgagcatgaactcaagcagtggtacaaaggatttctcaaggactgtccaagtgggaggctaaatctcgaggaatttcagcagctctatgtgaagttctttccttatggagacgcctccaagtttgcccagcatgccttccgaaccttcgacaagaatggggacggcaccattgacttccgagagttcatctgcgctctgtccatcacctccaggggcagctttgagcagaagctgaactgggccttcaatatgtatgacctggatggtgatggcaagatcacccgagtggagatgctggagatcatcgaggctatctacaaaatggtaggcactgtgatcatgatgaaaatgaatgaggatggcctgacgcctgagcagcgagtagacaagattttcagcaagatggataagaacaaagatgaccagattacactggatgaattcaaagaagctgcaaagagcgacccttccattgtattacttctgcagtgcgacatccagaaatgagctgatgtcaatgctatggactgcacaaaagtctcaatgttccattcagtctgcagctattcacacacacacacacacacacacacacacacacacacacacacacacacaaatattgcttggactacctataaatggacttgcttcttgtgtttgaaacactcgtgtgcatgagaatgtcatttgctaatgaattttaaaagcatatataaaacaaaacaaacaacctgccacaatgtgatatgtgtaatatcatttcataaaaatccctcttcctccaaagcctgggcagaaatgtgctgcaaagagttatatgacttcttgttcatgttttgctaatgctcgtatctccttgattacataatgttagtagcactgagacccccatggtaatgtaacttaattataagctatgtcactaccctcctgtaaaatactattggacagacacagagggacccttggctcctgtgtctggtccacacaccacagaagcttgtattatcagtgaatataaatgtactacatttgcatgccttttgggtttgccttaattcttacctcatttgcatcctatcgatctggaaagagctgttttggatgaatgcagtataaaatgtaaaaaccctgctaaatgacttattgattaagtatatctatctatatatacatatacacaaagatattatttatcgaaagtaaaaaagatggaagtgtattggtttctgtttgaattttcaaaggcttccaatgtggtggcaataaatgtcccaaataaatttataacaattgattttccccctaattcttattttataattttaaaattgcagcagttgctagcaacaacttactaaatctactcttaaatatacaactttggaatttgaagaattaatgacaacaaaagggaaaaaagcaactttccaacttttcatccaggctcccaaaagagggacaacgaacatggcatgtgaaaagtaaaacagatttgttcattccgaaaaaaaaatgttcattctatgacaataaattttatctcagtggaaaaaaaaaaaaaaaa

SEQ ID NO: 390 - protein, 191 aa, Mus musculus; identical to SEQ ID NO: 388

SEQ ID NO: 391 - DNA, 2633 bp, Homo sapien
  Unsure 2519-2568: Unknown base
gggggtagtgaaaatgggaggatctagaaggaggctgtctcctgtgtagtgtatatttatctgtaagtgagccgttggggaaggattgaatacagagacgctgtctgcttgctgccttaagacagctagctgaattgctgattaacttttaaaatacccagcttggtttatttttcttagaatctgttgctaagactggggacgctgttttcttttacaaagggaaatctaagttaatttcaaggcattcgaaatggggaaagactattattgcattttgggaattgagaaaggagcttcagatgaagatattaaaaaggcttaccgaaaacaagccctcaaatttcatccggacaagaacaaatctcctcaggcagaggaaaaatttaaagaggtcgcagaagcttatgaagtattgagtgatcctaaaaagagagaaatatatgatcagtttggggaggaagggttgaaaggaggagcaggaggtactgatggacaaggaggtaccttccggtacacctttcatggcgatcctcatgctacatttgctgcatttttcggagggtccaacccctttgaaattttctttggaagacgaatgggtggtggtagagattctgaagaaatggaaatagatggtgatccttttagtgcctttggtttcagcatgaatggatatccaagagacaggaattctgtggggccatcccgcctcaaacaagatcctccagttattcatgaacttagagtatcacttgaagagatatatagtggttgtaccaaacggatgaagatttctcgaaaaaggctaaacgctgatggaaggagttacagatctgaggacaaaattcttaccattgagattaaaaaagggtggaaagaaggcaccaaaattacttttccaagagaaggagatgaaacaccaaatagtattccagcagacattgtttttatcattaaagacaaagatcatccaaaatttaaaagggatggatcaaatataatttatactgctaaaattagtttacgagaggcattgtgtggctgctcaattaatgtaccaacactggatggaagaaacatacctatgtcagtaaatgatattgtgaaacccggaatgaggagaagaattattggatatgggctgccatttccaaaaaatcctgaccaacgtggtgaccttctaatagaatttgaggtgtccttcccagatactatatcttcttcatccaaagaagtacttaggaaacatcttcctgcctcatagaatgaagaactttgttacacatattttgataaggcactgaaaatataaaaggactggtagtttactgatgtagatgtgaattctgtataaagatgtgtaaattcttttgagggttcattaaattgcatgaatagagacgggtcaaataaataggcaaaagggatttttacagttagagataaaagagaaaaccattcactgtattttatttcatttctcctgattcagatatttttagtaatttgcttatatgtaaaagttgtttttgtggagtcagtggatatatttctaatgaagtgctagactatccaattacttaatttcttatacctttagataatcagtatgaaaagttcccatttataatggaaatgaaaattcttaactaaactatacatgtaatatgtatttctagaagagaataaaaacccaagtcagttattagatttaaatcaccttctgaaatgctgctatagggctggtatctgtaaaagaatatcctgatgcatctgtttcaccattttgatttttaaagtatgctgtagcatttcttaataacatcgttgtgatgttcttaaggcagatctttcttcataaaaaggaaagtaatggcaatttctctcctgtggaaatcccaattgcttgaattactgatattttagaatagactttttaaaatgccatatgtaattttatgcaagttgactatatatcttgtacttaataaattataggctcattttgttctctgctagtttaaagtaattcgtttaataatagatgtgtttttagaggaaatgctgttacttggaattaattttccagttatacagtcttctataacttactaataatattctatatgtactttatgtaatttccctaaaaagaatgaactaccactacactatggtgttaaaccaaaatatagggaaaataaacactaactgctgcttatggataatgttgcaactacttgttatgcatataaatattttactttttcacatgtatagattgcatttcttaggtgttttaattttttaaatatatttatgttttaaaaatttagttttgttttctgttttataactatagtgagaatgatgttttgaagcaaaatttttggttataaaatagttttcaggattatatatatatatactggatcctatcgccttttagtagaatatgaaatattcttttagaaatccaatataaataggttataatagccatattctttattacnnnnnnnnnnnnnnnnnnnnnnnnnnnnnnnnnnnnnnnnnnnnnnnnnnattcagtggtttttagtgatatttacaaagtggtacaatcatcatcactttctaattccagaata

SEQ ID NO: 392 - protein, 337 aa, Homo sapien
  Unsure 2519-2568: Unknown amino acid
MGKDYYCILGIEKGASDEDIKKAYRKQALKFHPDKNKSPQAEEKFKEVAEAYEVLSDPKKREIYDQFGEEGLKGGAGGTDGQGGTFRYTFHGDPHATFAAFFGGSNPFEIFFGRRMGGGRDSEEMEIDGDPFSAFGFSMNGYPRDRNSVGPSRLKQDPPVIHELRVSLEEIYSGCTKRMKISRKRLNADGRSYRSEDKILTIEIKKGWKEGTKITFPREGDETPNSIPADIVFIIKDKDHPKFKRDGSNIIYTAKISLREALCGCSINVPTLDGRNIPMSVNDIVKPGMRRRIIGYGLPFPKNPDQRGDLLIEFEVSFPDTISSSSKEVLRKHLPAS

SEQ ID NO: 393 - DNA, 2360 bp, Homo sapien
gctacgcgggccacgctgctggctggcctgacctaggcgcgcggggtcgggcggccgcgcgggcgggctgagtgagcaagacaagacactcaagaagagcgagctgcgcctgggtcccggccaggcttgcacgcagaggcgggcggcagacggtgcccggcggaatctcctgagctccgccgcccagctctggtgccagcgcccagtggccgccgcttcgaaagtgactggtgcctcgccgcctcctctcggtgcgggaccatgaagctgctgccgtcggtggtgctgaagctctttctggctgcagttctctcggcactggtgactggcgagagcctggagcggcttcggagagggctagctgctggaaccagcaacccggaccctcccactgtatccacggaccagctgctacccctaggaggcggccgggaccggaaagtccgtgacttgcaagaggcagatctggaccttttgagagtcactttatcctccaagccacaagcactggccacaccaaacaaggaggagcacgggaaaagaaagaagaaaggcaaggggctagggaagaagagggacccatgtcttcggaaatacaaggacttctgcatccatggagaatgcaaatatgtgaaggagctccgggctccctcctgcatctgccacccgggttaccatggagagaggtgtcatgggctgagcctcccagtggaaaatcgcttatatacctatgaccacacaaccatcctggccgtggtggctgtggtgctgtcatctgtctgtctgctggtcatcgtggggcttctcatgtttaggtaccataggagaggaggttatgatgtggaaaatgaagagaaagtgaagttgggcatgactaattcccactgagagagacttgtgctcaaggaatcggctggggactgctacctctgagaagacacaaggtgatttcagactgcagaggggaaagacttccatctagtcacaaagactccttcgtccccagttgccgtctaggattgggcctcccataattgctttgccaaaataccagagccttcaagtgccaaacagagtatgtccgatggtatctgggtaagaagaaagcaaaagcaagggaccttcatgcccttctgattcccctccaccaaaccccacttcccctcataagtttgtttaaacacttatcttctggattagaatgccggttaaattccatatgctccaggatctttgactgaaaaaaaaaaagaagaagaagaaggagagcaagaaggaaagatttgtgaactggaagaaagcaacaaagattgagaagccatgtactcaagtaccaccaagggatctgccattgggaccctccagtgctggatttgatgagttaactgtgaaataccacaagcctgagaactgaattttgggacttctacccagatggaaaaataacaactatttttgttgttgttgtttgtaaatgcctcttaaattatatatttattttattctatgtatgttaatttatttagtttttaacaatctaacaataatatttcaagtgcctagactgttactttggcaatttcctggccctccactcctcatccccacaatctggcttagtgccacccacctttgccacaaagctaggatggttctgtgacccatctgtagtaatttattgtctgtctacatttctgcagatcttccgtggtcagagtgccactgcgggagctctgtatggtcaggatgtaggggttaacttggtcagagccactctatgagttggacttcagtcttgcctaggcgattttgtctaccatttgtgttttgaaagcccaaggtgctgatgtcaaagtgtaacagatatcagtgtctccccgtgtcctctccctgccaagtctcagaagaggttgggcttccatgcctgtagctttcctggtccctcacccccatggccccaggccacagcgtgggaactcactttcccttgtgtcaagacatttctctaactcctgccattcttctggtgctactccatgcaggggtcagtgcagcagaggacagtctggagaaggtattagcaaagcaaaaggctgagaaggaacagggaacattggagctgactgttcttggtaactgattacctgccaattgctaccgagaaggttggaggtggggaaggctttgtataatcccacccacctcaccaaaacgatgaaggtatgctgtcatggtcctttctggaagtttctggtgccatttctgaactgttacaacttgtatttccaaacctggttcatatttatactttgcaatccaaataaagataacccttattccataaaaaaaaaaaaaaaaaa

SEQ ID NO: 394 - protein, 208 aa, Homo sapien
MKLLPSVVLKLFLAAVLSALVTGESLERLRRGLAAGTSNPDPPTVSTDQLLPLGGGRDRKVRDLQEADLDLLRVTLSSKPQALATPNKEEHGKRKKKGKGLGKKRDPCLRKYKDFCIHGECKYVKELRAPSCICHPGYHGERCHGLSLPVENRLYTYDHTTILAVVAVVLSSVCLLVIVGLLMFRYHRRGGYDVENEEKVKLGMTNSH

SEQ ID NO: 395 - DNA, 1159 bp, Homo sapien
agtgccccaggagctatgacaagcaaaggaacatacttgcctggagatagcctttgcgatatttaaatgtccgtggatacagaaatctctgcaggcaagttgctccagagcatattgcaggacaagcctgtaacgaatagttaaattcacggcatctggattcctaatccttttccgaaatggcaggtgtgagtgcctgtataaaatattctatgtttaccttcaacttcttgttctggctatgtggtatcttgatcctagcattagcaatatgggtacgagtaagcaatgactctcaagcaatttttggttctgaagatgtaggctctagctcctacgttgctgtggacatattgattgctgtaggtgccatcatcatgattctgggcttcctgggatgctgcggtgctataaaagaaagtcgctgcatgcttctgttgtttttcataggcttgcttctgatcctgctcctgcaggtggcgacaggtatcctaggagctgttttcaaatctaagtctgatcgcattgtgaatgaaactctctatgaaaacacaaagcttttgagcgccacaggggaaagtgaaaaacaattccaggaagccataattgtgtttcaagaagagtttaaatgctgcggtttggtcaatggagctgctgattggggaaataattttcaacactatcctgaattatgtgcctgtctagataagcagagaccatgccaaagctataatggaaaacaagtttacaaagagacctgtatttctttcataaaagacttcttggcaaaaaatttgattatagttattggaatatcatttggactggcagttattgagatactgggtttggtgttttctatggtcctgtattgccagatcgggaacaaatgaatctgtggatgcatcaacctatcgtcagtcaaacccctttaaaatgttgctttggctttgtaaatttaaatatgtaagtgctatataagtcaggagcagctgtctttttaaaatgtctcggctagctagaccacagatatcttctagacatattgaacacatttaagatttgagggatataagggaaaatgatatgaatgtgtatttttactcaaaataaaagtaactgtttacgttaaaaaaaaaaaaaaaaaaaaaaaaaaaaa

SEQ ID NO: 396 - protein, 237 aa, Homo sapien
MAGVSACIKYSMFTFNFLFWLCGILILALAIWVRVSNDSQAIFGSEDVGSSSYVAVDILIAVGAIIMILGFLGCCGAIKESRCMLLLFFIGLLLILLLQVATGILGAVFKSKSDRIVNETLYENTKLLSATGESEKQFQEAIIVFQEEFKCCGLVNGAADWGNNFQHYPELCACLDKQRPCQSYNGKQVYKETCISFIKDFLAKNLIIVIGISFGLAVIEILGLVFSMVLYCQIGNK

SEQ ID NO: 397 - DNA, 14069 bp, Homo sapien
cgttaaatgcaaacgctgctctggctcatgtgtttgctccgaggtataggttttgttcgactgacgtatcagatagtcagagtggttaccacaccgacgttgtagcagctgcataataaatgactgaaagaatcatgttaggcatgcccacctaacctaacttgaatcatgcgaaaggggagctgttggaattcaaatagactttctggttcccagcagtcggcagtaatagaatgctttcaggaagatgacagaatcaggagaaagatgctgttttgcactatcttgatttgttacagcagccaacttattggcatgatggagtgacaggaaaaacagctggcatggaagatgaaagagaagatgttcaaaagaaaacattcacaaaatgggtaaatgcacaattttctaagtttgggaagcagcatattgagaacctcttcagtgacctacaggatgggaggcgcctcctagacctcctcgaaggcctgacagggcaaaaactgccaaaagaaaaaggatccacaagagttcatgccctgaacaatgtcaacaaggcactgcgggttttgcagaacaataatgttgatttagtgaatattggaagtactgacatcgtagatggaaatcataaactgactcttggtttgatttggaatataatcctccactggcaggtcaaaaatgtaatgaaaaatatcatggctggattgcaacaaaccaacagtgaaaagattctcctgagctgggtccgacaatcaactcgtaattatccacaggttaatgtaatcaacttcaccaccagctggtctgatggcctggctttgaatgctctcatccatagtcataggccagacctatttgactggaatagtgtggtttgccagcagtcagccacacaacgactggaacatgcattcaacatcgccagatatcaattaggcatagagaaactactcgatcctgaagatgttgataccacctatccagataagaagtccatcttaatgtacatcacatcactcttccaagttttgcctcaacaagtgagcattgaagccatccaggaagtggaaatgttgccaaggccacctaaagtgactaaagaagaacattttcagttacatcatcaaatgcactattctcaacagatcacggtcagtctagcacagggatatgagagaacttcttcccctaagcctcgattcaagagctatgcctacacacaggctgcttatgtcaccacctctgaccctacacggagcccatttccttcacagcatttggaagctcctgaagacaagtcatttggcagttcattgatggagagtgaagtaaacctggaccgttatcaaacagctttagaagaagtattatcgtggcttctttctgctgaggacacattgcaagcacaaggagagatttctaatgatgtggaagtggtgaaagaccagtttcatactcatgaggggtacatgatggatttgacagcccatcagggccgggttggtaatattctacaattgggaagtaagctgattggaacaggaaaattatcagaagatgaagaaactgaagtacaagagcagatgaatctcctaaattcaagatgggaatgcctcagggtagctagcatggaaaaacaaagcaatttacatagagttttaatggatctccagaatcagaaactgaaagagttgaatgactggctaacaaaaacagaagaaagaacaaggaaaatggaggaagagcctcttggacctgatcttgaagacctaaaacgccaagtacaacaacataaggtgcttcaagaagatctagaacaagaacaagtcagggtcaattctctcactcacatggtggtggtagttgatgaatctagtggagatcacgcaactgctgctttggaagaacaacttaaggtattgggagatcgatgggcaaacatctgtagatggacagaagaccgctgggttcttttacaagacatccttctcaaatggcaacgtcttactgaagaacagtgcctttttagtgcatggctttcagaaaaagaagatgcagtgaacaagattcacacaactggctttaaagatcaaaatgaaatgttatcaagtcttcaaaaactggccgttttaaaagcggatctagaaaagaaaaagcaatccatgggcaaactgtattcactcaaacaagatcttctttcaacactgaagaataagtcagtgacccagaagacggaagcatggctggataactttgcccggtgttgggataatttagtccaaaaacttgaaaagagtacagcacagatttcacaggctgtcaccaccactcagccatcactaacacagacaactgtaatggaaacagtaactacggtgaccacaagggaacagatcctggtaaagcatgctcaagaggaacttccaccaccacctccccaaaagaagaggcagattactgtggattctgaaattaggaaaaggttggatgttgatataactgaacttcacagctggattactcgctcagaagctgtgttgcagagtcctgaatttgcaatctttcggaaggaaggcaacttctcagacttaaaagaaaaagtcaatgccatagagcgagaaaaagctgagaagttcagaaaactgcaagatgccagcagatcagctcaggccctggtggaacagatggtgaatgagggtgttaatgcagatagcatcaaacaagcctcagaacaactgaacagccggtggatcgaattctgccagttgctaagtgagagacttaactggctggagtatcagaacaacatcatcgctttctataatcagctacaacaattggagcagatgacaactactgctgaaaactggttgaaaatccaacccaccaccccatcagagccaacagcaattaaaagtcagttaaaaatttgtaaggatgaagtcaaccggctatcaggtcttcaacctcaaattgaacgattaaaaattcaaagcatagccctgaaagagaaaggacaaggacccatgttcctggatgcagactttgtggcctttacaaatcattttaagcaagtcttttctgatgtgcaggccagagagaaagagctacagacaatttttgacactttgccaccaatgcgctatcaggagaccatgagtgccatcaggacatgggtccagcagtcagaaaccaaactctccatacctcaacttagtgtcaccgactatgaaatcatggagcagagactcggggaattgcaggctttacaaagttctctgcaagagcaacaaagtggcctatactatctcagcaccactgtgaaagagatgtcgaagaaagcgccctctgaaattagccggaaatatcaatcagaatttgaagaaattgagggacgctggaagaagctctcctcccagctggttgagcattgtcaaaagctagaggagcaaatgaataaactccgaaaaattcagaatcacatacaaaccctgaagaaatggatggctgaagttgatgtttttctgaaggaggaatggcctgcccttggggattcagaaattctaaaaaagcagctgaaacagtgcagacttttagtcagtgatattcagacaattcagcccagtctaaacagtgtcaatgaaggtgggcagaagataaagaatgaagcagagccagagtttgcttcgagacttgagacagaactcaaagaacttaacactcagtgggatcacatgtgccaacaggtctatgccagaaaggaggccttgaagggaggtttggagaaaactgtaagcctccagaaagatctatcagagatgcacgaatggatgacacaagctgaagaagagtatcttgagagagattttgaatataaaactccagatgaattacagaaagcagttgaagagatgaagagagctaaagaagaggcccaacaaaaagaagcgaaagtgaaactccttactgagtctgtaaatagtgtcatagctcaagctccacctgtagcacaagaggccttaaaaaaggaacttgaaactctaaccaccaactaccagtggctctgcactaggctgaatgggaaatgcaagactttggaagaagtttgggcatgttggcatgagttattgtcatacttggagaaagcaaacaagtggctaaatgaagtagaatttaaacttaaaaccactgaaaacattcctggcggagctgaggaaatctctgaggtgctagattcacttgaaaatttgatgcgacattcagaggataacccaaatcagattcgcatattggcacagaccctaacagatggcggagtcatggatgagctaatcaatgaggaacttgagacatttaattctcgttggagggaactacatgaagaggctgtaaggaggcaaaagttgcttgaacagagcatccagtctgcccaggagactgaaaaatccttacacttaatccaggagtccctcacattcattgacaagcagttggcagcttatattgcagacaaggtggacgcagctcaaatgcctcaggaagcccagaaaatccaatctgatttgacaagtcatgagatcagtttagaagaaatgaagaaacataatcaggggaaggaggctgcccaaagagtcctgtctcagattgatgttgcacagaaaaaattacaagatgtctccatgaagtttcgattattccagaaaccagccaattttgagcagcgtctacaagaaagtaagatgattttagatgaagtgaagatgcacttgcctgcattggaaacaaagagtgtggaacaggaagtagtacagtcacagctaaatcattgtgtgaacttgtataaaagtctgagtgaagtgaagtctgaagtggaaatggtgataaagactggacgtcagattgtacagaaaaagcagacggaaaatcccaaagaacttgatgaaagagtaacagctttgaaattgcattataatgagctgggagcaaaggtaacagaaagaaagcaacagttggagaaatgcttgaaattgtcccgtaagatgcgaaaggaaatgaatgtcttgacagaatggctggcagctacagatatggaattgacaaagagatcagcagttgaaggaatgcctagtaatttggattctgaagttgcctggggaaaggctactcaaaaagagattgagaaacagaaggtgcacctgaagagtatcacagaggtaggagaggccttgaaaacagttttgggcaagaaggagacgttggtggaagataaactcagtcttctgaatagtaactggatagctgtcacctcccgagcagaagagtggttaaatcttttgttggaataccagaaacacatggaaacttttgaccagaatgtggaccacatcacaaagtggatcattcaggctgacacacttttggatgaatcagagaaaaagaaaccccagcaaaaagaagacgtgcttaagcgtttaaaggcagaactgaatgacatacgcccaaaggtggactctacacgtgaccaagcagcaaacttgatggcaaaccgcggtgaccactgcaggaaattagtagagccccaaatctcagagctcaaccatcgatttgcagccatttcacacagaattaagactggaaaggcctccattcctttgaaggaattggagcagtttaactcagatatacaaaaattgcttgaaccactggaggctgaaattcagcagggggtgaatctgaaagaggaagacttcaataaagatatgaatgaagacaatgagggtactgtaaaagaattgttgcaaagaggagacaacttacaacaaagaatcacagatgagagaaagcgagaggaaataaagataaaacagcagctgttacagacaaaacataatgctctcaaggatttgaggtctcaaagaagaaaaaaggctctagaaatttctcatcagtggtatcagtacaagaggcaggctgatgatctcctgaaatgcttggatgacattgaaaaaaaattagccagcctacctgagcccagagatgaaaggaaaataaaggaaattgatcgggaattgcagaagaagaaagaggagctgaatgcagtgcgtaggcaagctgagggcttgtctgaggatggggccgcaatggcagtggagccaactcagatccagctcagcaagcgctggcgggaaattgagagcaaatttgctcagtttcgaagactcaactttgcacaaattcacactgtccgtgaagaaacgatgatggtgatgactgaagacatgcctttggaaatttcttatgtgccttctacttatttgactgaaatcactcatgtctcacaagccctattagaagtggaacaacttctcaatgctcctgacctctgtgctaaggactttgaagatctctttaagcaagaggagtctctgaagaatataaaagatagtctacaacaaagctcaggtcggattgacattattcatagcaagaagacagcagcattgcaaagtgcaacgcctgtggaaagggtgaagctacaggaagctctctcccagcttgatttccaatgggaaaaagttaacaaaatgtacaaggaccgacaagggcgatttgacagatctgttgagaaatggcggcgttttcattatgatataaagatatttaatcagtggctaacagaagctgaacagtttctcagaaagacacaaattcctgagaattgggaacatgctaaatacaaatggtatcttaaggaactccaggatggcattgggcagcggcaaactgttgtcagaacattgaatgcaactggggaagaaataattcagcaatcctcaaaaacagatgccagtattctacaggaaaaattgggaagcctgaatctgcggtggcaggaggtctgcaaacagctgtcagacagaaaaaagaggctagaagaacaaaagaatatcttgtcagaatttcaaagagatttaaatgaatttgttttatggttggaggaagcagataacattgctagtatcccacttgaacctggaaaagagcagcaactaaaagaaaagcttgagcaagtcaagttactggtggaagagttgcccctgcgccagggaattctcaaacaattaaatgaaactggaggacccgtgcttgtaagtgctcccataagcccagaagagcaagataaacttgaaaataagctcaagcagacaaatctccagtggataaaggtttccagagctttacctgagaaacaaggagaaattgaagctcaaataaaagaccttgggcagcttgaaaaaaagcttgaagaccttgaagagcagttaaatcatctgctgctgtggttatctcctattaggaatcagttggaaatttataaccaaccaaaccaagaaggaccatttgacgttcaggaaactgaaatagcagttcaagctaaacaaccggatgtggaagagattttgtctaaagggcagcatttgtacaaggaaaaaccagccactcagccagtgaagaggaagttagaagatctgagctctgagtggaaggcggtaaaccgtttacttcaagagctgagggcaaagcagcctgacctagctcctggactgaccactattggagcctctcctactcagactgttactctggtgacacaacctgtggttactaaggaaactgccatctccaaactagaaatgccatcttccttgatgttggaggtacctgctctggcagatttcaaccgggcttggacagaacttaccgactggctttctctgcttgatcaagttataaaatcacagagggtgatggtgggtgaccttgaggatatcaacgagatgatcatcaagcagaaggcaacaatgcaggatttggaacagaggcgtccccagttggaagaactcattaccgctgcccaaaatttgaaaaacaagaccagcaatcaagaggctagaacaatcattacggatcgaattgaaagaattcagaatcagtgggatgaagtacaagaacaccttcagaaccggaggcaacagttgaatgaaatgttaaaggattcaacacaatggctggaagctaaggaagaagctgagcaggtcttaggacaggccagagccaagcttgagtcatggaaggagggtccctatacagtagatgcaatccaaaagaaaatcacagaaaccaagcagttggccaaagacctccgccagtggcagacaaatgtagatgtggcaaatgacttggccctgaaacttctccgggattattctgcagatgataccagaaaagtccacatgataacagagaatatcaatgcctcttggagaagcattcataaaagggtgagtgagcgagaggctgctttggaagaaactcatagattactgcaacagttccccctggacctggaaaagtttcttgcctggcttacagaagctgaaacaactgccaatgtcctacaggatgctacccgtaaggaaaggctcctagaagactccaagggagtaaaagagctgatgaaacaatggcaagacctccaaggtgaaattgaagctcacacagatgtttatcacaacctggatgaaaacagccaaaaaatcctgagatccctggaaggttccgatgatgcagtcctgttacaaagacgtttggataacatgaacttcaagtggagtgaacttcggaaaaagtctctcaacattaggtcccatttggaagccagttctgaccagtggaagcgtctgcacctttctctgcaggaacttctggtgtggctacagctgaaagatgatgaattaagccggcaggcacctattggaggcgactttccagcagttcagaagcagaacgatgtacatagggccttcaagagggaattgaaaactaaagaacctgtaatcatgagtactcttgagactgtacgaatatttctgacagagcagcctttggaaggactagagaaactctaccaggagcccagagagctgcctcctgaggagagagcccagaatgtcactcggcttctacgaaagcaggctgaggaggtcaatactgagtgggaaaaattgaacctgcactccgctgactggcagagaaaaatagatgagacccttgaaagactccaggaacttcaagaggccacggatgagctggacctcaagctgcgccaagctgaggtgatcaagggatcctggcagcccgtgggcgatctcctcattgactctctccaagatcacctcgagaaagtcaaggcacttcgaggagaaattgcgcctctgaaagagaacgtgagccacgtcaatgaccttgctcgccagcttaccactttgggcattcagctctcaccgtataacctcagcactctggaagacctgaacaccagatggaagcttctgcaggtggccgtcgaggaccgagtcaggcagctgcatgaagcccacagggactttggtccagcatctcagcactttctttccacgtctgtccagggtccctgggagagagccatctcgccaaacaaagtgccctactatatcaaccacgagactcaaacaacttgctgggaccatcccaaaatgacagagctctaccagtctttagctgacctgaataatgtcagattctcagcttataggactgccatgaaactccgaagactgcagaaggccctttgcttggatctcttgagcctgtcagctgcatgtgatgccttggaccagcacaacctcaagcaaaatgaccagcccatggatatcctgcagattattaattgtttgaccactatttatgaccgcctggagcaagagcacaacaatttggtcaacgtccctctctgcgtggatatgtgtctgaactggctgctgaatgtttatgatacgggacgaacagggaggatccgtgtcctgtcttttaaaactggcatcatttccctgtgtaaagcacatttggaagacaagtacagataccttttcaagcaagtggcaagttcaacaggattttgtgaccagcgcaggctgggcctccttctgcatgattctatccaaattccaagacagttgggtgaagttgcatcctttgggggcagtaacattgagccaagtgtccggagctgcttccaatttgctaataataagccagagatcgaagcggccctcttcctagactggatgagactggaaccccagtccatggtgtggctgcccgtcctgcacagagtggctgctgcagaaactgccaagcatcaggccaaatgtaacatctgcaaagagtgtccaatcattggattcaggtacaggagtctaaagcactttaattatgacatctgccaaagctgctttttttctggtcgagttgcaaaaggccataaaatgcactatcccatggtggaatattgcactccgactacatcaggagaagatgttcgagactttgccaaggtactaaaaaacaaatttcgaaccaaaaggtattttgcgaagcatccccgaatgggctacctgccagtgcagactgtcttagagggggacaacatggaaactcccgttactctgatcaacttctggccagtagattctgcgcctgcctcgtcccctcagctttcacacgatgatactcattcacgcattgaacattatgctagcaggctagcagaaatggaaaacagcaatggatcttatctaaatgatagcatctctcctaatgagagcatagatgatgaacatttgttaatccagcattactgccaaagtttgaaccaggactcccccctgagccagcctcgtagtcctgcccagatcttgatttccttagagagtgaggaaagaggggagctagagagaatcctagcagatcttgaggaagaaaacaggaatctgcaagcagaatatgaccgtctaaagcagcagcacgaacataaaggcctgtccccactgccgtcccctcctgaaatgatgcccacctctccccagagtccccgggatgctgagctcattgctgaggccaagctactgcgtcaacacaaaggccgcctggaagccaggatgcaaatcctggaagaccacaataaacagctggagtcacagttacacaggctaaggcagctgctggagcaaccccaggcagaggccaaagtgaatggcacaacggtgtcctctccttctacctctctacagaggtccgacagcagtcagcctatgctgctccgagtggttggcagtcaaacttcggactccatgggtgaggaagatcttctcagtcctccccaggacacaagcacagggttagaggaggtgatggagcaactcaacaactccttccctagttcaagaggaagaaatacccctggaaagccaatgagagaggacacaatgtaggaagtcttttccacatggcagatgatttgggcagagcgatggagtccttagtatcagtcatgacagatgaagaaggagcagaataaatgttttacaactcctgattcccgcatggtttttataatattcatacaacaaagaggattagacagtaagagtttacaagaaataaatctatatttttgtgaagggtagtggtattatactgtagatttcagtagtttctaagtctgttattgttttgttaacaatggcaggttttacacgtctatgcaattgtacaaaaaagttataagaaaactacatgtaaaatcttgatagctaaataacttgccatttctttatatggaacgcattttgggttgtttaaaaatttataacagttataaagaaagattgtaaactaaagtgtgctttataaaaaaaagttgtttataaaaacccctaaaaacaaaacaaacacacacacacacacatacacacacacacacaaaactttgaggcagcgcattgttttgcatccttttggcgtgatatccatatgaaattcatggctttttctttttttgcatattaaagataagacttcctctaccaccacaccaaatgactactacacactgctcatttgagaactgtcagctgagtggggcaggcttgagttttcatttcatatatctatatgtctataagtatataaatactatagttatatagataaagagatacgaatttctatagactgactttttccattttttaaatgttcatgtcacatcctaatagaaagaaattacttctagtcagtcatccaggcttacctgcttggtctagaatggatttttcccggagccggaagccaggaggaaactacaccacactaaaacattgtctacagctccagatgtttctcattttaaacaactttccactgacaacgaaagtaaagtaaagtattggatttttttaaagggaacatgtgaatgaatacacaggacttattatatcagagtgagtaatcggttggttggttgattgattgattgattgatacattcagcttcctgctgctagcaatgccacgatttagatttaatgatgcttcagtggaaatcaatcagaaggtattctgaccttgtgaacatcagaaggtattttttaactcccaagcagtagcaggacgatgatagggctggagggctatggattcccagcccatccctgtgaaggagtaggccactctttaagtgaaggattggatgattgttcataatacataaagttctctgtaattacaactaaattattatgccctcttctcacagtcaaaaggaactgggtggtttggtttttgttgcttttttagatttattgtcccatgtgggatgagtttttaaatgccacaagacataatttaaaataaataaactttgggaaaaggtgtaagacagtagccccatcacatttgtgatactgacaggtatcaacccagaagcccatgaactgtgtttccatcctttgcatttctctgcgagtagttccacacaggtttgtaagtaagtaagaaagaaggcaaattgattcaaatgttacaaaaaaacccttcttggtggattagacaggttaaatatataaacaaacaaacaaaaattgctcaaaaaagaggagaaaagctcaagaggaaaagctaaggactggtaggaaaaagctttactctttcatgccattttatttctttttgatttttaaatcattcattcaatagataccaccgtgtgacctataattttgcaaatctgttacctctgacatcaagtgtaattagcttttggagagtgggctgacatcaagtgtaattagcttttggagagtgggttttgtccattattaataattaattaattaacatcaaacacggcttctcatgctatttctacctcactttggttttggggtgttcctgataattgtgcacacctgagttcacagcttcaccacttgtccattgcgttattttctttttcctttataattctttctttttccttcataattttcaaaagaaaacccaaagctctaaggtaacaaattaccaaattacatgaagatttggtttttgtcttgcatttttttcctttatgtgacgctggaccttttctttacccaaggatttttaaaactcagatttaaaacaaggggttactttacatcctactaagaagtttaagtaagtaagtttcattctaaaatcagaggtaaatagagtgcataaataattttgttttaatctttttgtttttcttttagacacattagctctggagtgagtctgtcataatatttgaacaaaaattgagagctttattgctgcattttaagcataattaatttggacattatttcgtgttgtgttctttataaccaccgagtattaaactgtaaatcataatgtaactgaagcataaacatcacatggcatgttttgtcattgttttcaggtactgagttcttacttgagtatcataatatattgtgttttaacaccaacactgtaacatttacgaattatttttttaaacttcagttttactgcattttcacaacatatcagacttcaccaaatatatgccttactattgtattatagtactgctttactgtgtatctcaataaagcacgcagttatgttac

SEQ ID NO: 398 - protein, 3685 aa, Homo sapien
MLWWEEVEDCYEREDVQKKTFTKWVNAQFSKFGKQHIENLFSDLQDGRRLLDLLEGLTGQKLPKEKGSTRVHALNNVNKALRVLQNNNVDLVNIGSTDIVDGNHKLTLGLIWNIILHWQVKNVMKNIMAGLQQTNSEKILLSWVRQSTRNYPQVNVINFTTSWSDGLALNALIHSHRPDLFDWNSVVCQQSATQRLEHAFNIARYQLGIEKLLDPEDVDTTYPDKKSILMYITSLFQVLPQQVSIEAIQEVEMLPRPPKVTKEEHFQLHHQMHYSQQITVSLAQGYERTSSPKPRFKSYAYTQAAYVTTSDPTRSPFPSQHLEAPEDKSFGSSLMESEVNLDRYQTALEEVLSWLLSAEDTLQAQGEISNDVEVVKDQFHTHEGYMMDLTAHQGRVGNILQLGSKLIGTGKLSEDEETEVQEQMNLLNSRWECLRVASMEKQSNLHRVLMDLQNQKLKELNDWLTKTEERTRKMEEEPLGPDLEDLKRQVQQHKVLQEDLEQEQVRVNSLTHMVVVVDESSGDHATAALEEQLKVLGDRWANICRWTEDRWVLLQDILLKWQRLTEEQCLFSAWLSEKEDAVNKIHTTGFKDQNEMLSSLQKLAVLKADLEKKKQSMGKLYSLKQDLLSTLKNKSVTQKTEAWLDNFARCWDNLVQKLEKSTAQISQAVTTTQPSLTQTTVMETVTTVTTREQILVKHAQEELPPPPPQKKRQITVDSEIRKRLDVDITELHSWITRSEAVLQSPEFAIFRKEGNFSDLKEKVNAIEREKAEKFRKLQDASRSAQALVEQMVNEGVNADSIKQASEQLNSRWIEFCQLLSERLNWLEYQNNIIAFYNQLQQLEQMTTTAENWLKIQPTTPSEPTAIKSQLKICKDEVNRLSGLQPQIERLKIQSIALKEKGQGPMFLDADFVAFTNHFKQVFSDVQAREKELQTIFDTLPPMRYQETMSAIRTWVQQSETKLSIPQLSVTDYEIMEQRLGELQALQSSLQEQQSGLYYLSTTVKEMSKKAPSEISRKYQSEFEEIEGRWKKLSSQLVEHCQKLEEQMNKLRKIQNHIQTLKKWMAEVDVFLKEEWPALGDSEILKKQLKQCRLLVSDIQTIQPSLNSVNEGGQKIKNEAEPEFASRLETELKELNTQWDHMCQQVYARKEALKGGLEKTVSLQKDLSEMHEWMTQAEEEYLERDFEYKTPDELQKAVEEMKRAKEEAQQKEAKVKLLTESVNSVIAQAPPVAQEALKKELETLTTNYQWLCTRLNGKCKTLEEVWACWHELLSYLEKANKWLNEVEFKLKTTENIPGGAEEISEVLDSLENLMRHSEDNPNQIRILAQTLTDGGVMDELINEELETFNSRWRELHEEAVRRQKLLEQSIQSAQETEKSLHLIQESLTFIDKQLAAYIADKVDAAQMPQEAQKIQSDLTSHEISLEEMKKHNQGKEAAQRVLSQIDVAQKKLQDVSMKFRLFQKPANFEQRLQESKMILDEVKMHLPALETKSVEQEVVQSQLNHCVNLYKSLSEVKSEVEMVIKTGRQIVQKKQTENPKELDERVTALKLHYNELGAKVTERKQQLEKCLKLSRKMRKEMNVLTEWLAATDMELTKRSAVEGMPSNLDSEVAWGKATQKEIEKQKVHLKSITEVGEALKTVLGKKETLVEDKLSLLNSNWIAVTSRAEEWLNLLLEYQKHMETFDQNVDHITKWIIQADTLLDESEKKKPQQKEDVLKRLKAELNDIRPKVDSTRDQAANLMANRGDHCRKLVEPQISELNHRFAAISHRIKTGKASIPLKELEQFNSDIQKLLEPLEAEIQQGVNLKEEDFNKDMNEDNEGTVKELLQRGDNLQQRITDERKREEIKIKQQLLQTKHNALKDLRSQRRKKALEISHQWYQYKRQADDLLKCLDDIEKKLASLPEPRDERKIKEIDRELQKKKEELNAVRRQAEGLSEDGAAMAVEPTQIQLSKRWREIESKFAQFRRLNFAQIHTVREETMMVMTEDMPLEISYVPSTYLTEITHVSQALLEVEQLLNAPDLCAKDFEDLFKQEESLKNIKDSLQQSSGRIDIIHSKKTAALQSATPVERVKLQEALSQLDFQWEKVNKMYKDRQGRFDRSVEKWRRFHYDIKIFNQWLTEAEQFLRKTQIPENWEHAKYKWYLKELQDGIGQRQTVVRTLNATGEEIIQQSSKTDASILQEKLGSLNLRWQEVCKQLSDRKKRLEEQKNILSEFQRDLNEFVLWLEEADNIASIPLEPGKEQQLKEKLEQVKLLVEELPLRQGILKQLNETGGPVLVSAPISPEEQDKLENKLKQTNLQWIKVSRALPEKQGEIEAQIKDLGQLEKKLEDLEEQLNHLLLWLSPIRNQLEIYNQPNQEGPFDVQETEIAVQAKQPDVEEILSKGQHLYKEKPATQPVKRKLEDLSSEWKAVNRLLQELRAKQPDLAPGLTTIGASPTQTVTLVTQPVVTKETAISKLEMPSSLMLEVPALADFNRAWTELTDWLSLLDQVIKSQRVMVGDLEDINEMIIKQKATMQDLEQRRPQLEELITAAQNLKNKTSNQEARTIITDRIERIQNQWDEVQEHLQNRRQQLNEMLKDSTQWLEAKEEAEQVLGQARAKLESWKEGPYTVDAIQKKITETKQLAKDLRQWQTNVDVANDLALKLLRDYSADDTRKVHMITENINASWRSIHKRVSEREAALEETHRLLQQFPLDLEKFLAWLTEAETTANVLQDATRKERLLEDSKGVKELMKQWQDLQGEIEAHTDVYHNLDENSQKILRSLEGSDDAVLLQRRLDNMNFKWSELRKKSLNIRSHLEASSDQWKRLHLSLQELLVWLQLKDDELSRQAPIGGDFPAVQKQNDVHRAFKRELKTKEPVIMSTLETVRIFLTEQPLEGLEKLYQEPRELPPEERAQNVTRLLRKQAEEVNTEWEKLNLHSADWQRKIDETLERLQELQEATDELDLKLRQAEVIKGSWQPVGDLLIDSLQDHLEKVKALRGEIAPLKENVSHVNDLARQLTTLGIQLSPYNLSTLEDLNTRWKLLQVAVEDRVRQLHEAHRDFGPASQHFLSTSVQGPWERAISPNKVPYYINHETQTTCWDHPKMTELYQSLADLNNVRFSAYRTAMKLRRLQKALCLDLLSLSAACDALDQHNLKQNDQPMDILQIINCLTTIYDRLEQEHNNLVNVPLCVDMCLNWLLNVYDTGRTGRIRVLSFKTGIISLCKAHLEDKYRYLFKQVASSTGFCDQRRLGLLLHDSIQIPRQLGEVASFGGSNIEPSVRSCFQFANNKPEIEAALFLDWMRLEPQSMVWLPVLHRVAAAETAKHQAKCNICKECPIIGFRYRSLKHFNYDICQSCFFSGRVAKGHKMHYPMVEYCTPTTSGEDVRDFAKVLKNKFRTKRYFAKHPRMGYLPVQTVLEGDNMETPVTLINFWPVDSAPASSPQLSHDDTHSRIEHYASRLAEMENSNGSYLNDSISPNESIDDEHLLIQHYCQSLNQDSPLSQPRSPAQILISLESEERGELERILADLEEENRNLQAEYDRLKQQHEHKGLSPLPSPPEMMPTSPQSPRDAELIAEAKLLRQHKGRLEARMQILEDHNKQLESQLHRLRQLLEQPQAEAKVNGTTVSSPSTSLQRSDSSQPMLLRVVGSQTSDSMGEEDLLSPPQDTSTGLEEVMEQLNNSFPSSRGRNTPGKPMREDTM

SEQ ID NO: 399 - DNA, 4050 bp, Homo sapien
cttgcaatccaggctttccttggaagtggctgtaacatgtatgaaaagaaagaaaggaggaccaagagatgaaagagggctgcacgcgtgggggcccgagtggtgggcggggacagtcgtcttgttacaggggtgctggccttccctggcgcctgcccctgtcggccccgcccgagaacctccctgcgccagggcagggtttactcatcccggcgaggtgatcccatgcgcgagggcgggcgcaagggcggccagagaacccagcaatccgagtatgcggcatcagcccttcccaccaggcacttccttccttttcccgaacgtccagggagggagggccgggcacttataaactcgagccctggccgatccgcatgtcagaggctgcctcgcaggggctgcgcgcacggcaagaagtgtctgggctgggacggacaggagaggctgtcgccatcggcgtcctgtgcccctctgctccggcacggccctgtcgcagtgcccgcgctttccccggcgcctgcacgcggcgcgcctgggtaacatgcttggggtcctggtccttggcgcgctggccctggccggcctggggttccccgcacccgcagagccgcagccgggtggcagccagtgcgtcgagcacgactgcttcgcgctctacccgggccccgcgaccttcctcaatgccagtcagatctgcgacggactgcggggccacctaatgacagtgcgctcctcggtggctgccgatgtcatttccttgctactgaacggcgacggcggcgttggccgccggcgcctctggatcggcctgcagctgccacccggctgcggcgaccccaagcgcctcgggcccctgcgcggcttccagtgggttacgggagacaacaacaccagctatagcaggtgggcacggctcgacctcaatggggctcccctctgcggcccgttgtgcgtcgctgtctccgctgctgaggccactgtgcccagcgagccgatctgggaggagcagcagtgcgaagtgaaggccgatggcttcctctgcgagttccacttcccagccacctgcaggccactggctgtggagcccggcgccgcggctgccgccgtctcgatcacctacggcaccccgttcgcggcccgcggagcggacttccaggcgctgccggtgggcagctccgccgcggtggctcccctcggcttacagctaatgtgcaccgcgccgcccggagcggtccaggggcactgggccagggaggcgccgggcgcttgggactgcagcgtggagaacggcggctgcgagcacgcgtgcaatgcgatccctggggctccccgctgccagtgcccagccggcgccgccctgcaggcagacgggcgctcctgcaccgcatccgcgacgcagtcctgcaacgacctctgcgagcacttctgcgttcccaaccccgaccagccgggctcctactcgtgcatgtgcgagaccggctaccggctggcggccgaccaacaccggtgcgaggacgtggatgactgcatactggagcccagtccgtgtccgcagcgctgtgtcaacacacagggtggcttcgagtgccactgctaccctaactacgacctggtggacggcgagtgtgtggagcccgtggacccgtgcttcagagccaactgcgagtaccagtgccagcccctgaaccaaactagctacctctgcgtctgcgccgagggcttcgcgcccattccccacgagccgcacaggtgccagatgttttgcaaccagactgcctgtccagccgactgcgaccccaacacccaggctagctgtgagtgccctgaaggctacatcctggacgacggtttcatctgcacggacatcgacgagtgcgaaaacggcggcttctgctccggggtgtgccacaacctccccggtaccttcgagtgcatctgcgggcccgactcggcccttgcccgccacattggcaccgactgtgactccggcaaggtggacggtggcgacagcggctctggcgagcccccgcccagcccgacgcccggctccaccttgactcctccggccgtggggctcgtgcattcgggcttgctcataggcatctccatcgcgagcctgtgcctggtggtggcgcttttggcgctcctctgccacctgcgcaagaagcagggcgccgccagggccaagatggagtacaagtgcgcggccccttccaaggaggtagtgctgcagcacgtgcggaccgagcggacgccgcagagactctgagcggcctccgtccaggagcctggctccgtccaggagctgtgcctcctcacccccagctttgctaccaaagcaccttagctggcattacagctggagaagaccctccccgcaccccccaagctgttttcttctattccatggctaactggcgagggggtgattagagggaggagaatgagcctcggcctcttccgtgacgtcactggaccactgggcaatgatggcaattttgtaacgaagacacagactgcgatttgtcccaggtcctcactaccgggcgcaggagggtgagcgttattggtcggcagccttctgggcagaccttgacctcgtgggctagggatgactaaaatatttattttttttaagtatttaggtttttgtttgtttcctttgttcttacctgtatgtctccagtatccactttgcacagctctccggtctctctctctctacaaactcccacttgtcatgtgacaggtaaactatcttggtgaatttttttttcctagccctctcacatttatgaagcaagccccacttattccccattcttcctagttttctcctcccaggaactgggccaactcacctgagtcaccctacctgtgcctgaccctacttcttttgctcatctagctgtctgctcagacagaacccctacatgaaacagaaacaaaaacactaaaaataaaaatggccatttgctttttcaccagatttgctaatttatcctgaaatttcagattcccagagcaaaataattttaaacaaagggttgagatgtaaaaggtattaaattgatgttgctggactgtcatagaaattacacccaaagaggtatttatctttacttttaaacagtgagcctgaattttgttgctgttttgatttgtactgaaaaatggtaattgttgctaatcttcttatgcaatttccttttttgttattattacttatttttgacagtgttgaaaatgttcagaaggttgctctagattgagagaagagacaaacacctcccaggagacagttcaagaaagcttcaaactgcatgattcatgccaattagcaattgactgtcactgttccttgtcactggtagaccaaaataaaaccagctctactggtcttgtggaattgggagcttgggaatggatcctggaggatgcccaattagggcctagccttaatcaggtcctcagagaatttctaccatttcagagaggccttttggaatgtggcccctgaacaagaattggaagctgccctgcccatgggagctggttagaaatgcagaatcctaggctccaccccatccagttcatgagaatctatatttaacaagatctgcagggggtgtgtctgctcagtaatttgaggacaaccattccagactgcttccaattttctggaatacatgaaatatagatcagttataagtagcaggccaagtcaggcccttattttcaagaaactgaggaattttctttgtgtagctttgctctttggtagaaaaggctaggtacacagctctagacactgccacacagggtctgcaaggtctttggttcagctaagctaggaatgaaatcctgcttcagtgtatggaaataaatgtatcatagaaatgtaacttttgtaagacaaaggttttcctcttctattttgtaaactcaaaatatttgtacatagttatttatttattggagataatctagaacacaggcaaaatccttgcttatgacatcacttgtacaaaataaacaaataacaatgtg

SEQ ID NO: 400 - protein, 575 aa, Homo sapien
MLGVLVLGALALAGLGFPAPAEPQPGGSQCVEHDCFALYPGPATFLNASQICDGLRGHLMTVRSSVAADVISLLLNGDGGVGRRRLWIGLQLPPGCGDPKRLGPLRGFQWVTGDNNTSYSRWARLDLNGAPLCGPLCVAVSAAEATVPSEPIWEEQQCEVKADGFLCEFHFPATCRPLAVEPGAAAAAVSITYGTPFAARGADFQALPVGSSAAVAPLGLQLMCTAPPGAVQGHWAREAPGAWDCSVENGGCEHACNAIPGAPRCQCPAGAALQADGRSCTASATQSCNDLCEHFCVPNPDQPGSYSCMCETGYRLAADQHRCEDVDDCILEPSPCPQRCVNTQGGFECHCYPNYDLVDGECVEPVDPCFRANCEYQCQPLNQTSYLCVCAEGFAPIPHEPHRCQMFCNQTACPADCDPNTQASCECPEGYILDDGFICTDIDECENGGFCSGVCHNLPGTFECICGPDSALARHIGTDCDSGKVDGGDSGSGEPPPSPTPGSTLTPPAVGLVHSGLLIGISIASLCLVVALLALLCHLRKKQGAARAKMEYKCAAPSKEVVLQHVRTERTPQRL

SEQ ID NO: 401 - DNA, 1886 bp, Homo sapien
gcggagctctgccttggagattctcagtgctgcggatcatgtccctaaggggcagcctctcgcgtctcctccagacgcgagtgcattccatcctgaagaaatccgtccactccgtggctgtgataggagccccgttctcacaagggcagaaaagaaaaggagtggagcatggtcccgctgccataagagaagctggcttgatgaaaaggctctccagtttgggctgccacctaaaagactttggagatttgagttttactccagtccccaaagatgatctctacaacaacctgatagtgaatccacgctcagtgggtcttgccaaccaggaactggctgaggtggttagcagagctgtgtcagatggctacagctgtgtcacactgggaggagaccacagcctggcaatcggtaccattagtggccatgcccgacactgcccagacctttgtgttgtctgggttgatgcccatgctgacatcaacacaccccttaccacttcatcaggaaatctccatggacagccagtttcatttctcctcagagaactacaggataaggtaccacaactcccaggattttcctggatcaaaccttgtatctcttctgcaagtattgtgtatattggtctgagagacgtggaccctcctgaacattttattttaaagaactatgatatccagtatttttccatgagagatattgatcgacttggtatccagaaggtcatggaacgaacatttgatctgctgattggcaagagacaaagaccaatccatttgagttttgatattgatgcatttgaccctacactggctccagccacaggaactcctgttgtcgggggactaacctatcgagaaggcatgtatattgctgaggaaatacacaatacagggttgctatcagcactggatcttgttgaagtcaatcctcagttggccacctcagaggaagaggcgaagactacagctaacctggcagtagatgtgattgcttcaagctttggtcagacaagagaaggagggcatattgtctatgaccaacttcctactcccagttcaccagatgaatcagaaaatcaagcacgtgtgagaatttaggagacactgtgcactgacatgtttcacaacaggcattccagaattatgaggcattgaggggatagatgaatactaaatggttgtctgggtcaatactgccttaatgagaacatttacacattctcacaattgtaaagtttcccctctattttggtgaccaatactactgtaaatgtatttggttttttgcagttcacagggtattaatatgctacagtactatgtaaatttaaagaagtcataaacagcatttattaccttggtatatcatactggtcttgttgctgttgttccttcacatttaagtggtttttcatctttcctccctcctcccacagcctggctatacagtgcatccttgaactgtcagcccacagcagcaatatgcttattctatccacatccctaacatcatgcattcacaaggtcaaagttctggtccacaaacccttccctatagaagttcaatggctgcgaaagaatttgtagtaaaccaggcctcccaggatggcgagctccagtaagatgataatggaaagcagcagcttgttggttgtcactctacaaagagaagcaaagtggggagtagtcagaagtttggataaccttccttctaaacatttgggggttagacctgggaccacggctggatactctgaggctgtatgtttgatcacacagccacttagcaggaagtactcataaggttctttagctgtcacttagggataacactgtctacctcacagaaatgttaaactgagacaataaaacccaaagcat

SEQ ID NO: 402 - protein, 354 aa, Homo sapien
MSLRGSLSRLLQTRVHSILKKSVHSVAVIGAPFSQGQKRKGVEHGPAAIREAGLMKRLSSLGCHLKDFGDLSFTPVPKDDLYNNLIVNPRSVGLANQELAEVVSRAVSDGYSCVTLGGDHSLAIGTISGHARHCPDLCVVWVDAHADINTPLTTSSGNLHGQPVSFLLRELQDKVPQLPGFSWIKPCISSASIVYIGLRDVDPPEHFILKNYDIQYFSMRDIDRLGIQKVMERTFDLLIGKRQRPIHLSFDIDAFDPTLAPATGTPVVGGLTYREGMYIAEEIHNTGLLSALDLVEVNPQLATSEEEAKTTANLAVDVIASSFGQTREGGHIVYDQLPTPSSPDESENQARVRI

SEQ ID NO: 403 - DNA, 1605 bp, Homo sapien
agcggggcaggcccctacagccaatggaacggccctggaagagacccgggtcgcctccggagcttcaaaaacatgtgaggagggaagagtgtgcagacggaacttcagccgctgcctctgttctcagcgtcagtgccgccactgcccccgccagagcccaccggccagcatgtcctctgctcacttcaaccgaggccctgcctacgggctgtcagccgaggttaagaacaagctggcccagaagtatgaccaccagcgggagcaggagctgagagagtggatcgagggggtgacaggccgtcgcatcggcaacaacttcatggacggcctcaaagatggcatcattctttgcgaattcatcaataagctgcagccaggctccgtgaagaagatcaatgagtcaacccaaaattggcaccagctggagaacatcggcaacttcatcaaggccatcaccaagtatggggtgaagccccacgacatttttgaggccaacgacctgtttgagaacaccaaccatacacaggtgcagtccaccctcctggctttggccagcatggcgaagacgaaaggaaacaaggtgaacgtgggagtgaagtacgcagagaagcaggagcggaaattcgagccggggaagctaagagaagggcggaacatcattgggctgcagatgggcaccaacaagtttgccagccagcagggcatgacggcctatggcacccggcgccacctctacgaccccaagctgggcacagaccagcctctggaccaggcgaccatcagcctgcagatgggcaccaacaaaggagccagccaggctggcatgactgcgccagggaccaagcggcagatcttcgagccggggctgggcatggagcactgcgacacgctcaatgtcagcctgcagatgggcagcaacaagggcgcctcgcagcggggcatgacggtgtatgggctgccacgccaggtctacgaccccaagtactgtctgactcccgagtacccagagctgggtgagcccgcccacaaccaccacgcacacaactactacaattccgcctagggccacaaggccttccctgttttccccccaagggaggctgctgctgctcttggctggacccagccaggcccagccgaccccctctccctgcatggcatcctccagcccctgtagaactcaacctctacagggttagagtttggagagagcagactggcggggggcccattggggggaaggggaccctccgctctgtagtgctacagggtccaacatagagccgggtgtccccaacagcgcccaaaggacgcactgagcaacgctattccagctgtccccccactccctcacaagtgggtacccccaggaccagaagctcccccagcaaagcccccagagcccaggctcggcctgccccccaccccattcccgcagtgggagcaaactgcatgcccagagacccagcggacacacgcggtttggtttgcagcgactggcatactatgtggatgtgacagtggcgtttgtaatgagagcactttcttttttttctatttcactggagcacaataaatggctgtaaaatctcaaaaaaaaaaaaa

SEQ ID NO: 404 - protein, 297 aa, Homo sapien
MSSAHFNRGPAYGLSAEVKNKLAQKYDHQREQELREWIEGVTGRRIGNNFMDGLKDGIILCEFINKLQPGSVKKINESTQNWHQLENIGNFIKAITKYGVKPHDIFEANDLFENTNHTQVQSTLLALASMAKTKGNKVNVGVKYAEKQERKFEPGKLREGRNIIGLQMGTNKFASQQGMTAYGTRRHLYDPKLGTDQPLDQATISLQMGTNKGASQAGMTAPGTKRQIFEPGLGMEHCDTLNVSLQMGSNKGASQRGMTVYGLPRQVYDPKYCLTPEYPELGEPAHNHHAHNYYNSA

SEQ ID NO: 405 - DNA, 1426 bp, Homo sapien
ggatccgcgtgctaaagaaaaatcgccgttaaagcagttttctttttcactgtctttttcttttcgcggggaacccagctgttcctgcgagggccacctcctcaggaagaccccgcagctctcccgcggcgcttctgcaggaggcagcgacagtttcgagaacccgggccttcccctcccagtgcctccgggggttcgcgtttcaggcgctcgtgttttccgggaagggcaggcgcgctgggccttggggagctgcgctcggcgggcggaccgggggatcatggaagctgataaagatgacacacaacaaattcttaaggagcattcgccagatgaatttataaaagatgaacaaaataagggactaattgatgaaattacaaagaaaaatattcagctaaagaaggagatccaaaagcttgaaacggagttacaagaggctaccaaagaattccagattaaagaggatattcctgaaacaaagatgaaattcttatcagttgaaactcctgagaatgacagccagttgtcaaatatctcctgttcgtttcaagtgagctcgaaagttccttatgagatacaaaaaggacaagcacttatcacctttgaaaaagaagaagttgctcaaaatgtggtaagcatgagtaaacatcatgtacagataaaagatgtaaatctggaggttacggccaagccagttccattaaattcaggagtcagattccaggtttatgtagaagtttctaaaatgaaaatcaatgttactgaaattcctgacacactgcgtgaagatcaaatgagagacaaactagagctgagcttttcaaagttccgaaatggaggcggagaggtggaccgcgtggactatgacagacagtccgggagtgcagtcatcacgtttgtggagattggagtggctgacaagattttgaaaaagaaagaataccctctttatataaatcaaacctgccatagagttactgtttctccatacacagaaatacacttgaaaaagtatcagatattttcaggaacatctaagaggacagtgcttctgacaggaatggaaggcattcaaatggatgaagaaattgtggaggatttaattaacattcactttcaacgggcaaagaatggaggtggagaagtagatgtggtcaagtgttctctaggtcaacctcacatagcatactttgaagaatagacttaacagaatcatgaaaactatagctttttaacccggattactgtaaatgtttgacaagaatgaatatgcttttccttaaaaaatgaaaactttaatttttaccatccatttatgtttagatacaaaacttatttccatgtttctgaatcttctttgtttcaaatggtgctgcatgttttcaactacaataagtgcactgtaataaaaagttttgtttat

SEQ ID NO: 406 - protein, 307 aa, Homo sapien
MEADKDDTQQILKEHSPDEFIKDEQNKGLIDEITKKNIQLKKEIQKLETELQEATKEFQIKEDIPETKMKFLSVETPENDSQLSNISCSFQVSSKVPYEIQKGQALITFEKEEVAQNVVSMSKHHVQIKDVNLEVTAKPVPLNSGVRFQVYVEVSKMKINVTEIPDTLREDQMRDKLELSFSKFRNGGGEVDRVDYDRQSGSAVITFVEIGVADKILKKKEYPLYINQTCHRVTVSPYTEIHLKKYQIFSGTSKRTVLLTGMEGIQMDEEIVEDLINIHFQRAKNGGGEVDVVKCSLGQPHIAYFEE

SEQ ID NO: 407 - DNA, 619 bp, Homo sapien
tgcagcttccttctcaccttgaagaataatcctagaaaactcacaaaatgtgtgatgcttttgtaggtacctggaaacttgtctccagtgaaaactttgatgattatatgaaagaagtaggagtgggctttgccaccaggaaagtggctggcatggccaaacctaacatgatcatcagtgtgaatggggatgtgatcaccattaaatctgaaagtacctttaaaaatactgagatttccttcatactgggccaggaatttgacgaagtcactgcagatgacaggaaagtcaagagcaccataaccttagatgggggtgtcctggtacatgtgcagaaatgggatggaaaatcaaccaccataaagagaaaacgagaggatgataaactggtggtggaatgcgtcatgaaaggcgtcacttccacgagagtttatgagagagcataagccaagggacgttgacctggactgaagttcgcattgaactctacaacattctgtgggatatattgttcaaaaagatattgttgttttccctgatttagcaagcaagtaattttctcccaagctgattttattcaatatggttacgttggttaaataactttttttagatttag

SEQ ID NO: 408 - protein, 132 aa, Homo sapien
MCDAFVGTWKLVSSENFDDYMKEVGVGFATRKVAGMAKPNMIISVNGDVITIKSESTFKNTEISFILGQEFDEVTADDRKVKSTITLDGGVLVHVQKWDGKSTTIKRKREDDKLVVECVMKGVTSTRVYERA

SEQ ID NO: 409 - DNA, 3592 bp, Homo sapien
ggcggggggcgcacagagccagaggggcttgcgagcggcggctgagggaccgcggggagggggcgccgagcggctccagcgcagagactctcactgcacgccggaggccccttcctcgctccgcccgcgcgaccgcgcgccccagtcccgccccgccccgctaaccgccccagacacagcgctcgccgagggtcgcttggaccctgatcttacccgtgggcaccctgcgctctgcctgccgcgaagaccggctccccgacccgcagaagtcaggagagagggtgaagcggagcagcccgaggcggggcagcctcccggagcagcgccgcgcagagcccgggacaatggggccgcggcggctgctgctggtggccgcctgcttcagtctgtgcggcccgctgttgtctgcccgcacccgggcccgcaggccagaatcaaaagcaacaaatgccaccttagatccccggtcatttcttctcaggaaccccaatgataaatatgaaccattttgggaggatgaggagaaaaatgaaagtgggttaactgaatacagattagtctccatcaataaaagcagtcctcttcaaaaacaacttcctgcattcatctcagaagatgcctccggatatttgaccagctcctggctgacactctttgtcccatctgtgtacaccggagtgtttgtagtcagcctcccactaaacatcatggccatcgttgtgttcatcctgaaaatgaaggtcaagaagccggcggtggtgtacatgctgcacctggccacggcagatgtgctgtttgtgtctgtgctcccctttaagatcagctattacttttccggcagtgattggcagtttgggtctgaattgtgtcgcttcgtcactgcagcattttactgtaacatgtacgcctctatcttgctcatgacagtcataagcattgaccggtttctggctgtggtgtatcccatgcagtccctctcctggcgtactctgggaagggcttccttcacttgtctggccatctgggctttggccatcgcaggggtagtgcctctcgtcctcaaggagcaaaccatccaggtgcccgggctcaacatcactacctgtcatgatgtgctcaatgaaaccctgctcgaaggctactatgcctactacttctcagccttctctgctgtcttcttttttgtgccgctgatcatttccacggtctgttatgtgtctatcattcgatgtcttagctcttccgcagttgccaaccgcagcaagaagtcccgggctttgttcctgtcagctgctgttttctgcatcttcatcatttgcttcggacccacaaacgtcctcctgattgcgcattactcattcctttctcacacttccaccacagaggctgcctactttgcctacctcctctgtgtctgtgtcagcagcataagctcgtgcatcgaccccctaatttactattacgcttcctctgagtgccagaggtacgtctacagtatcttatgctgcaaagaaagttccgatcccagcagttataacagcagtgggcagttgatggcaagtaaaatggatacctgctctagtaacctgaataacagcatatacaaaaagctgttaacttaggaaaagggactgctgggaggttaaaaagaaaagtttataaaagtgaataacctgaggattctattagtccccacccaaactttattgattcacctcctaaaacaacagatgtacgacttgcatacctgctttttatgggagctgtcaagcatgtatttttgtcaattaccagaaagataacaggacgagatgacggtgttattccaagggaatattgccaatgctacagtaataaatgaatgtcacttctggatatagctaggtgacatatacatacttacatgtgtgtatatgtagatgtatgcacacacatatattatttgcagtgcagtatagaataggcactttaaaacactctttccccgcaccccagcaattatgaaaataatctctgattccctgatttaatatgcaaagtctaggttggtagagtttagccctgaacatttcatggtgttcatcaacagtgagagactccatagtttgggcttgtaccacttttgcaaataagtgtattttgaaattgtttgacggcaaggtttaagttattaagaggtaagacttagtactatctgtgcgtagaagttctagtgttttcaattttaaacatatccaagtttgaattcctaaaattatggaaacagatgaaaagcctctgttttgatatgggtagtattttttacattttacacactgtacacataagccaaaactgagcataagtcctctagtgaatgtaggctggctttcagagtaggctattcctgagagctgcatgtgtccgcccccgatggaggactccaggcagcagacacatgccagggccatgtcagacacagattggccagaaaccttcctgctgagcctcacagcagtgagactggggccactacatttgctccatcctcctgggattggctgtgaactgatcatgtttatgagaaactggcaaagcagaatgtgatatcctaggaggtaatgaccatgaaagacttctctacccatcttaaaaacaacgaaagaaggcatggacttctggatgcccatccactgggtgtaaacacatctagtagttgttctgaaatgtcagttctgatatggaagcacccattatgcgctgtggccactccaataggtgctgagtgtacagagtggaataagacagagacctgccctcaagagcaaagtagatcatgcatagagtgtgatgtatgtgtaataaatatgtttcacacaaacaaggcctgtcagctaaagaagtttgaacatttgggttactatttcttgtggttataacttaatgaaaacaatgcagtacaggacatatattttttaaaataagtctgatttaattgggcactatttatttacaaatgttttgctcaatagattgctcaaatcaggttttcttttaagaatcaatcatgtcagtctgcttagaaataacagaagaaaatagaattgacattgaaatctaggaaaattattctataatttccatttacttaagacttaatgagactttaaaagcattttttaacctcctaagtatcaagtatagaaaatcttcatggaattcacaaagtaatttggaaattaggttgaaacatatctcttatcttacgaaaaaatggtagcattttaaacaaaatagaaagttgcaaggcaaatgtttatttaaaagagcaggccaggcgcggtggctcacgcctgtaatcccagcactttgggaggctgaggcgggtggatcacgaggtcaggagatcgagaccatcctggctaacacggtgaaacccgtctctactaaaaatgcaaaaaaaattagccgggcgtggtggcaggcacctgtagtcccagctactcgggaggctgaggcaggagactggcgtgaacccaggaggcggaccttgtagtgagccgagatcgcgccactgtgctccagcctgggcaacagagcaagactccatctc

SEQ ID NO: 410 - protein, 425 aa, Homo sapien
MGPRRLLLVAACFSLCGPLLSARTRARRPESKATNATLDPRSFLLRNPNDKYEPFWEDEEKNESGLTEYRLVSINKSSPLQKQLPAFISEDASGYLTSSWLTLFVPSVYTGVFVVSLPLNIMAIVVFILKMKVKKPAVVYMLHLATADVLFVSVLPFKISYYFSGSDWQFGSELCRFVTAAFYCNMYASILLMTVISIDRFLAVVYPMQSLSWRTLGRASFTCLAIWALAIAGVVPLVLKEQTIQVPGLNITTCHDVLNETLLEGYYAYYFSAFSAVFFFVPLIISTVCYVSIIRCLSSSAVANRSKKSRALFLSAAVFCIFIICFGPTNVLLIAHYSFLSHTSTTEAAYFAYLLCVCVSSISSCIDPLIYYYASSECQRYVYSILCCKESSDPSSYNSSGQLMASKMDTCSSNLNNSIYKKLLT

SEQ ID NO: 411 - DNA, 575 bp, Homo sapien
actcttctggtccccacagactcagagagaacccaccatggtgctgtctcctgccgacaagaccaacgtcaaggccgcctggggtaaggtcggcgcgcacgctggcgagtatggtgcggaggccctggagaggatgttcctgtccttccccaccaccaagacctacttcccgcacttcgacctgagccacggctctgcccaggttaagggccacggcaagaaggtggccgacgcgctgaccaacgccgtggcgcacgtggacgacatgcccaacgcgctgtccgccctgagcgacctgcacgcgcacaagcttcgggtggacccggtcaacttcaagctcctaagccactgcctgctggtgaccctggccgcccacctccccgccgagttcacccctgcggtgcacgcctccctggacaagttcctggcttctgtgagcaccgtgctgacctccaaataccgttaagctggagcctcggtagccgttcctcctgcccgctgggcctcccaacgggccctcctcccctccttgcaccggcccttcctggtctttgaataaagtctgagtgggcggc

SEQ ID NO: 412 - protein, 142 aa, Homo sapien
MVLSPADKTNVKAAWGKVGAHAGEYGAEALERMFLSFPTTKTYFPHFDLSHGSAQVKGHGKKVADALTNAVAHVDDMPNALSALSDLHAHKLRVDPVNFKLLSHCLLVTLAAHLPAEFTPAVHASLDKFLASVSTVLTSKYR

SEQ ID NO: 413 - DNA, 1154 bp, Homo sapien
ccacgcctgcatcttgcggaaagcggggtggaggtttagggctggactcttgggtcctttaaaggtgagtggtctgggggcctctgggcttggggccagacccctgggtcctctatgaaagaacgtgctggggaccctgattttgggatgttagaaagttggaactcttttgttctgataggggaaggtagtggggctccggactcccgactcccggggaaagagtgggctggggtttctgcttctggatcttaggaagaggatagggtcagtctggactacttggcctccagtgggtggaagtccggttctgcgccctcacctgggtcccccgttcccagatgttcgagcctgtgagctgcaccttcacgtacctgctgggtgacggagagtcccgggaggccgttctgatcgacccagtcctggaaacagcgcctcgggatgcccagctgatcaaggagctggggctgcggctgctctatgctgtgaatacccactgccacgcggaccacattacaggctcggggctgctccgttccctcctccctggctgccagtctgtcatctcccgccttagtggggcccaggctgacttacacattgaggatggagactccatccgcttcgggcgcttcgcgttggagaccagggccagccctggccacaccccaggctgtgtcaccttcgtcctgaatgaccacagcatggccttcactggagatgccctgttgatccgtgggtgtgggcggacagacttccagcaaggctgtgccaagaccttgtaccactcggtccatgaaaagatcttcacacttccaggagactgtctgatctaccctgctcacgattaccatgggttcacagtgtccaccgtggaggaggagaggactctgaaccctcggctcaccctcagctgtgaggagtttgtcaaaatcatgggcaacctgaacttgcctaaacctcagcagatagactttgctgttccagccaacatgcgctgtggggtgcagacacccactgcctgatctcacttctgtcagatgctcccatccactattaatgcactaggtgggaggagagggcggcaatgacactgcacctctcctttcccaccgcattccctgagctccctaaataaaactttttttaacgtg

SEQ ID NO: 414 - protein, 227 aa, Homo sapien
MFEPVSCTFTYLLGDGESREAVLIDPVLETAPRDAQLIKELGLRLLYAVNTHCHADHITGSGLLRSLLPGCQSVISRLSGAQADLHIEDGDSIRFGRFALETRASPGHTPGCVTFVLNDHSMAFTGDALLIRGCGRTDFQQGCAKTLYHSVHEKIFTLPGDCLIYPAHDYHGFTVSTVEEERTLNPRLTLSCEEFVKIMGNLNLPKPQQIDFAVPANMRCGVQTPTA

SEQ ID NO: 415 - DNA, 3494 bp, Homo sapien
agcggccgccgccgccacagctgcagtcagcaccgtcaccccagcagcatccgcgcgcctgcaccgcgcgtgcggcccgccccggcctgaccccgccgccgaacccggcgccagccatggagcccgaagccccccgtcgccgccacacccatcagcgcggctacctgctgacacggaaccctcacctcaacaaggacttggcctttaccctggaagagagacagcaattgaacattcatggattgttgccaccttccttcaacagtcaggagatccaggttcttagagtagtaaaaaatttcgagcatctgaactctgactttgacaggtatcttctcttaatggatctccaagatagaaatgaaaaactcttttatagagtgctgacatctgacattgagaaattcatgcctattgtttatactcccactgtgggtctggcttgccaacaatatagtttggtgtttcggaaaccaagaggtctctttattactatccacgatcgagggcatattgcttcagttctcaatgcatggccagaagatgtcatcaaggccattgtggtgactgatggagagcgtattcttggcttgggagaccttggctgtaatggaatgggcatccctgtgggtaaattggctctatatacagcttgcggagggatgaatcctcaagaatgtctgcctgtcattctggatgtgggaaccgaaaatgaggagttacttaaagatccactctacattggactacggcagagaagagtaagaggttctgaatatgatgattttttggacgaattcatggaggcagtttcttccaagtatggcatgaattgccttattcagtttgaagattttgccaatgtgaatgcatttcgtctcctgaacaagtatcgaaaccagtattgcacattcaatgatgatattcaaggaacagcatctgttgcagttgcaggtctccttgcagctcttcgaataaccaagaacaaactgtctgatcaaacaatactattccaaggagctggggaggctgccctagggattgcacacctgattgtgatggccttggaaaaagaaggtttaccaaaagagaaagccatcaaaaagatatggctggttgattcaaaaggattaatagttaagggacgtgcttccttaacacaagagaaagagaagtttgcccatgaacatgaagaaatgaagaacctagaagccattgttcaagaaataaaaccaactgccctcataggagttgctgcaattggtggtgcattctcagaacaaattctcaaagatatggctgccttcaatgaacggcctattatttttgctttgagtaatccaactagcaaagcagaatgttctgcagagcagtgctacaaaataaccaagggacgtgcaatttttgccagtggcagtccttttgatccagtcactcttccaaatggacagaccctatatcctggccaaggcaacaattcctatgtgttccctggagttgctcttggtgttgtggcgtgtggattgaggcagatcacagataatattttcctcactactgctgaggttatagctcagcaagtgtcagataaacacttggaagagggtcggctttatcctcctttgaataccattagagatgtttctctgaaaattgcagaaaagattgtgaaagatgcataccaagaaaagacagccacagtttatcctgaaccgcaaaacaaagaagcatttgtccgctcccagatgtatagtactgattatgaccagattctacctgattgttattcttggcctgaagaggtgcagaaaatacagaccaaagttgaccagtaggataatagcaaacatttctaactctattaatgaggtctttaaacctttcataatttttaaaggttggaatcttttataatgattcataagacacttagattaagattttactttaacagtctaaaaattgatagaagaatatcgatataaattgggataaacatcacatgagacaattttgcttcactttgccttctggttatttatggtttctgtctgaattattctgcctacgttctctttaaaagctgttgtacgtactacggagaaactcatcatttttatacaggacactaatgggaagaccaaaattactaataaattgacataaccaacattaaaactcataattattttgttgaccattttgttaaaatctacttttcaaaaaaaaaaaagctagaaatgaatctaggcgtaggtgaacttttgctaagcagaaataacactactttgttgcctagagaaagataacttctcaagtatttttattccagtcctagatcatatatgttcttttgtgcaacggaattctaacagttctaagagaaagatcactgctgtttacagcgccttgtgcagccttagattttaatattcttttgtcattgttacatctcatagagtaaagctcttattaccttgatcctgagtcagaaatcccacctgaaatcaccttttttcccccttgatcaaacatcccatccttcagctaccatactgttgctacagggattttgtggactgtggcccctgtcccgaggttggcaccttcagttcagcacagcctgagcagtgagaaggtctgaaaggagagtatatagttaagatccttgagaaagggctgcctgaggaactgacctcttaaagatctcaggatctttaagacaacaagttaggttcctactggagttacctgccagaatggcctcttaattaactcaggtaatgaagagctaactgtgttataatcatcttgcttttgcctgaatttggagaaagtattataattaagttcccagtatcagaaatgtccttacataagattaaaatatcttgatgactaataccattctatgagaaagagtagttatatgcccagactgtattaatttactttagaaactaatgtttgaagtaatggaaaaaattttaaattataaagctaaggtgcaataacatttgctacttatttatagaattatttgaagaattttgtttttgaagtaatgctttaaggagtataagatattcaagataaattatactataaaatgattttattgaaagttgaaggttacacaaattgttttaggtatgagcagaagaggttaaggtatttctaaaggtaacatatagtcaagagtttcctcaaaatagttatttggagaagaatcagaatgtctgtgtatttcttgtctgtttctatgttgtcttatagctctgactaaatgtgtttacctatgcaaaagatttattaaagcatagaaaaggtgaatgaataacaccctaaaccccccgaagagaaaaagaaatcccgaagagagagagcaaacacacctgagaacatccgctgagtaagtagcccgctaggagaaaagaaaaagggggggcccccccgactaagagggcccctttccgcccccggggaatttattt

SEQ ID NO: 416 - protein, 610 aa, Homo sapien
RPPPPQLQSAPSPQQHPRACTARAARPGLTPPPNPAPAMEPEAPRRRHTHQRGYLLTRNPHLNKDLAFTLEERQQLNIHGLLPPSFNSQEIQVLRVVKNFEHLNSDFDRYLLLMDLQDRNEKLFYRVLTSDIEKFMPIVYTPTVGLACQQYSLVFRKPRGLFITIHDRGHIASVLNAWPEDVIKAIVVTDGERILGLGDLGCNGMGIPVGKLALYTACGGMNPQECLPVILDVGTENEELLKDPLYIGLRQRRVRGSEYDDFLDEFMEAVSSKYGMNCLIQFEDFANVNAFRLLNKYRNQYCTFNDDIQGTASVAVAGLLAALRITKNKLSDQTILFQGAGEAALGIAHLIVMALEKEGLPKEKAIKKIWLVDSKGLIVKGRASLTQEKEKFAHEHEEMKNLEAIVQEIKPTALIGVAAIGGAFSEQILKDMAAFNERPIIFALSNPTSKAECSAEQCYKITKGRAIFASGSPFDPVTLPNGQTLYPGQGNNSYVFPGVALGVVACGLRQITDNIFLTTAEVIAQQVSDKHLEEGRLYPPLNTIRDVSLKIAEKIVKDAYQEKTATVYPEPQNKEAFVRSQMYSTDYDQILPDCYSWPEEVQKIQTKVDQ

SEQ ID NO: 417 - DNA, 1044 bp, Homo sapien
tgctgctctcctcccgctccgtcctcctcgcctgccaccggtgcacccagtccgctcacccagcccagtccgtccggtcctcaccgcctgccggccggcccaccccccaccgcaggccatggacgccatcaagaagaagatgcagatgctgaagctggacaaggagaacgccatcgaccgcgccgagcaggccgaagccgacaagaagcaagctgaggaccgctgcaagcagctggaggaggagcagcaggccctccagaagaagctgaaggggacagaggatgaggtggaaaagtattctgaatccgtgaaggaggcccaggagaaactggagcaggccgagaagaaggccactgatgctgaggcagatgtggcctccctgaaccgccgcattcagctggttgaggaggagctggaccgggcccaggagcgcctggctacagccctgcagaagctggaggaggccgagaaggcggctgatgagagcgagagaggaatgaaggtcatcgaaaaccgggccatgaaggatgaggagaagatggaactgcaggagatgcagctgaaggaggccaagcacatcgctgaggattcagaccgcaaatatgaagaggtggccaggaagctggtgatcctggaaggagagctggagcgctcggaggagagggctgaggtggccgagagccgagccagacagctggaggaggaacttcgaaccatggaccaggccctcaagtccctgatggcctcagaggaggagtattccaccaaagaagataaatatgaagaggagatcaaactgttggaggagaagctgaaggaggctgagacccgagcagagtttgccgagaggtctgtggcaaagttggagaaaaccatcgatgacctagaagagaccttggccagtgccaaggaggagaacgtcgagattcaccagaccttggaccagaccctgctggaactcaacaacctgtgagggccagccccacccccagccaggctatggttgccaccccaacccaataaaactgatgttactagcctctc

SEQ ID NO: 418 - protein, 284 aa, Homo sapien
MDAIKKKMQMLKLDKENAIDRAEQAEADKKQAEDRCKQLEEEQQALQKKLKGTEDEVEKYSESVKEAQEKLEQAEKKATDAEADVASLNRRIQLVEEELDRAQERLATALQKLEEAEKAADESERGMKVIENRAMKDEEKMELQEMQLKEAKHIAEDSDRKYEEVARKLVILEGELERSEERAEVAESRARQLEEELRTMDQALKSLMASEEEYSTKEDKYEEEIKLLEEKLKEAETRAEFAERSVAKLEKTIDDLEETLASAKEENVEIHQTLDQTLLELNNL

SEQ ID NO: 419 - DNA, 627 bp, Homo sapien
agtctccggcgagttgttgcctgggctggacgtggttttgtctgctgcgcccgctcttcgcgctctcgtttcattttctgcagcgcgccacgaggatggcccacaagcagatctactactcggacaagtacttcgacgaacactacgagtaccggcatgttatgttacccagagaactttccaaacaagtacctaaaactcatctgatgtctgaagaggagtggaggagacttggtgtccaacagagtctaggctgggttcattacatgattcatgagccagaaccacatattcttctctttagacgacctcttccaaaagatcaacaaaaatgaagtttatctggggatcgtcaaatctttttcaaatttaatgtatatgtgtatataaggtagtattcagtgaatacttgagaaatgtacaaatctttcatccatacctgtgcatgagctgtattcttcacagcaacagagctcagttaaatgcaactgcaagtaggttactgtaagatgtttaagataaaagttcttccagtcagtttttctcttaagtgcctgtttgagtttactgaaacagtttacttttgttcaataaagtttgtatgttgcatttaaaaaaaaaaaaaaa

SEQ ID NO: 420 - protein, 79 aa, Homo sapien
MAHKQIYYSDKYFDEHYEYRHVMLPRELSKQVPKTHLMSEEEWRRLGVQQSLGWVHYMIHEPEPHILLFRRPLPKDQQK

SEQ ID NO: 421 - DNA, 1001 bp, Homo sapien
gccgcggctgcggaacgggcggaggctgccggtttcgtaaccgtcgctcctcctcgctgactcgcgggctgtgaggcctgggtcggctcgggccgcaccgcgcggggccgctcggagtggaggccgcctgggggcaggcgggctagaggagcaggtacatgtgaagattttttggcagcttagcgtggaaaccattgatcaccctgctctcatttctacctgttctgtgttggcaagggagagtgcccaaatgagcaagatatcgcagcaaaacagcactccaggggtgaacggaattagtgttatccatacccaggcacatgccagcggcttacagcaggttcctcagctggtgcctgctggccctgggggaggaggcaaagctgtggctcccagcaagcagagcaaaaagagttcgcccatggatcgaaacagtgacgagtatcggcaacgccgagagaggaacaacatggctgtgaaaaagagccggttgaaaagcaagcagaaagcacaagacacactgcagagagtcaatcagctcaaagaagagaatgaacggttggaagcaaaaatcaaattgctgaccaaggaattaagtgtactcaaagatttgtttcttgagcatgcacacaaccttgcagacaacgtacagtccattagcactgaaaatacgacagcagatggcgacaatgcaggacagtagacctcaccctttccagactttagagcttgtggcttgaatgttaaaggtgtgaccaccgacaccactcatgtcaatggctgaaagttgtccatttccatgactcaaagacccattggaggctattttctgggatcagcactgaagagttgattagctaaaaatgttagccttgtaattcgaatatctggttttaaatgatagaggtttttgtgggaatcaaaatcccccaaatgttaaggtatatggtaaaaaaagaaatatctgggatcccgatgttcttaataaatcctgacttccc

SEQ ID NO: 422 - protein, 150 aa, Homo sapien
MSKISQQNSTPGVNGISVIHTQAHASGLQQVPQLVPAGPGGGGKAVAPSKQSKKSSPMDRNSDEYRQRRERNNMAVKKSRLKSKQKAQDTLQRVNQLKEENERLEAKIKLLTKELSVLKDLFLEHAHNLADNVQSISTENTTADGDNAGQ

SEQ ID NO: 423 - DNA, 2921 bp, Homo sapien
ccggctcggagtgtgatctaagcaggtcgcgtaccttcctcaggtgactccggccacagcccattgtccgcggccaccggcggagtttagccgcagacctcgaagcgccccggggtccttcccgaacggcagcggctgcggcgggtccatggagaagggccctgtgcgggcaccggcggagaagccgcggggcgccaggtgcagcaatgggttccccgagcgggatccgccgcggcccgggcccagcaggccggcggagaagcccccgcggcccgaggccaagagcgcgcagcccgcggacggctggaagggcgagcggccccgcagcgaggaggataacgagctgaacctccctaacctggcagccgcctactcgtccatcctgagctcgctgggcgagaacccccagcggcaagggctgctcaagacgccctggagggcggcctcggccatgcagttcttcaccaagggctaccaggagaccatctcagatgtcctaaacgatgctatatttgatgaagatcatgatgagatggtgattgtgaaggacatagacatgttttccatgtgtgagcatcacttggttccatttgttggaaaggtccatattggttatcttcctaacaagcaagtccttggcctcagcaaacttgcgaggattgtagaaatctatagtagaagactacaagttcaggagcgccttacaaaacaaattgctgtagcaatcacggaagccttgcggcctgctggagtcggggtagtggttgaagcaacacacatgtgtatggtaatgcgaggtgtacagaaaatgaacagcaaaactgtgaccagcacaatgttgggtgtgttccgggaggatccaaagactcgggaagagttcctgactctcattaggagctgagcttcattcagtgtgtgtgcgttggttgccgatcgtactgccagtagcattgtctgtctgtccggtcttgtttgtacattccattttcaattgttacagatgtgaactttattccttgtcactaattatatttaaaattatttctaggaagtcaaataaatataataaagggttgagcctctactttcttcttgccacctttttgtggcaatattaaagtgaactgctaatagtgtaagtatgtgcacaaaaccactgccagataaccagaggggcctgggaagggagaagaattagtgtatttttttcaaatagtacagtaatttgcctcataagcataggagcattgggaatgagagggaactgtgcccagtatactgttttttttcttcctccaataaaagtggtgtagtgccgaaagtgctaaaatatttagtgcggtattgctctgtgaattcaagttcaacagacttcactttggtcatgtttattaaaccaccagtgacatttaaaaatatatttttagcagtcgtaatgttagtcaccaagggaaggtggtggaatgtctatgtttttgattttactgtgagttaaaaaggcacatttctaccttctattgtttttaaattcaagaatagggaattagttcctggtgttgtttacgagtgtattctcgtgtcaacatacagggatttagacatttaactctctgtgccttgataagaatatcatttagagtgtagatacttttgcctttttaaaaaagccattattttatgagacttagtactcacactgcaaataactagtcagctcagttttaactttataggtttattgagtttcctttgtgtgatccatgtagatgcctcaaaatgtttcttcttcttcttttttttaatcttataagatatttttctaagtatttccagaaacatttgagagtgcccatcattttcaggtctgcagaaccatagcttccacgcacctgaacgagcacagaatgaactgacggtggaagacattatgagctgtgtccaacgttttaaccaaagcgtatcgtaccaacgatctgtgaaaatgcactggaagcttctggtcccggtttcctttgtggtctatgtgggtcttgtcctcattgtaactccgtatagatggtataggtattttaatcctggaagctgttgccttattaatgattatcttaaaatttcctccattggggcagcgtgggccaaattaaaacaaacaaaaccgcaactcctccacagaaacacaaacacagttattccatgaagtttagtatttggttgacatagtgctcttcaaattcatcccattaccctaaaagtaataactttgatgcttgctttaactttagtcccatctctgccactttgatgctatttgggttatgatggggcaagatggcagaggtattgggtttttttgtttttttccattcctctctacttctgtttcctagctttttctttctggagtttaagtacagtgatggttggcttgagtacctttttaaatctagcccagtataaacattagcctgcttaatatttagacatttataggtagaattctgagcactcaactcatgtttggcattttaaagtaaaaacaagtgtgacttcgaggaccaaagaaattgtcagctatacatttatctttatgaactcatttatattcctttttaatgactcgttgttctaacatttcctagaagtgttcttataaaggtctaatgtatccacaggctgttgtcttattagtaaatgcaaagtaatgactttgtctgttttactctagtctttagtacttcaaaattaccttttcatatccatgatcttgagtccatttgggggatttttaagaatttgatgtatttcaatacactgttcaaaattaaattgtttaattttatgtatgagtatgtatgttcctgaagttggtcctatttaaattattaaactattgtaactttaaaaaaaaaaaaaaaaaaaaa

SEQ ID NO: 424 - protein, 250 aa, Homo sapien
MEKGPVRAPAEKPRGARCSNGFPERDPPRPGPSRPAEKPPRPEAKSAQPADGWKGERPRSEEDNELNLPNLAAAYSSILSSLGENPQRQGLLKTPWRAASAMQFFTKGYQETISDVLNDAIFDEDHDEMVIVKDIDMFSMCEHHLVPFVGKVHIGYLPNKQVLGLSKLARIVEIYSRRLQVQERLTKQIAVAITEALRPAGVGVVVEATHMCMVMRGVQKMNSKTVTSTMLGVFREDPKTREEFLTLIRS

SEQ ID NO: 425 - DNA, 428 bp, Homo sapien
ctgggtctgtctctgccacctggtctgccacagatccatgatgtgcagttctctggagcaggcgctggctgtgctggtcactaccttccacaagtactcctgccaagagggcgacaagttcaagctgagtaagggggaaatgaaggaacttctgcacaaggagctgcccagctttgtgggggagaaagtggatgaggaggggctgaagaagctgatgggcagcctggatgagaacagtgaccagcaggtggacttccaggagtatgctgttttcctggcactcatcactgtcatgtgcaatgacttcttccagggctgcccagaccgaccctgaagcagaactcttgacttcctgccatggatctcttgggcccaggactgttgatgcctttgagttttgtattcaataaactttttttgtctgttga

SEQ ID NO: 426 - protein, 97 aa, Homo sapien
MCSSLEQALAVLVTTFHKYSCQEGDKFKLSKGEMKELLHKELPSFVGEKVDEEGLKKLMGSLDENSDQQVDFQEYAVFLALITVMCNDFFQGCPDRP

SEQ ID NO: 427 - DNA, 4114 bp, Homo sapien
tccttttattgtggatgaacaccacgtacatgccgtaaatgctccctaggctggctgcggctacaaggcagacccgggagctgagaatagaggaatacctgcccaagcaactcattctgcacagcagccgacaagatagcgattttcctgtgctggaatgtgcccatccaaagacacttggattggacttaatcttaaacctctggagttcaagaccttttaaaaagggctaaataaacaatctctacatgtaaaaggccactgactcctacttcctctgtatagagcaactgttgaactcagctgcctgtagggcgtgattctcagtcaccagactcagcttggagatcttacaatgatggcaatcaggagacactgaacggagatgctacatattcctctcttgcagcaaaaggttttagaagcgttcgaccaaacctacaagataaaagatcaccaactcagagccagataacagtgaatggaaactcaggaggtgccgtgagtcccatgagttactatcagaggccgttttccccctcggcatattctctcccagcctcactcaactccagcattgtcatgcagcacggcacatccctcgattccacagacacatatccccagcatgcgcagtctctggatggcaccaccagcagctctatccccctgtaccgatcctcagaggaagagaagagagtgacagtcatcaaagccccgcattacccagggatcgggcccgtggatgaatccggaatccccacagcaattagaacgacagtcgaccggcccaaggactggtacaagacgatgtttaagcaaattcacatggtgcacaagccggatgatgacacagacatgtataatactccttatacatacaatgcaggtctgtacaacccaccctacagtgctcagtcacaccctgctgcaaagacccaaacctacagacctctttccaaaagccactccgacaacagccccaatgcctttaaggatgcgtcctccccagtgcctcccccacatgttccacctccagtcccgccgcttcgaccaagagatcggtcttcaacagaaaagcatgactgggatcctccagacagaaaagtggacacaagaaaatttcggtctgagccaaggagtatttttgaatatgaacctggcaagtcatcaattcttcagcatgaaagaccagcctccttgtatcagtcctctatagacagaagcctggaaagacccatgagttctgcaagcatggccagtgacttcaggaagcggaggaagagcgagcctgcagtgggtccaccacggggcttgggagatcaaagtgcgagcaggactagcccaggccgagtggacctcccaggatcaagcaccactcttacaaagtctttcactagctcttctccttcttccccatcaagagcaaaaggtggggatgatagcaaaatatgtccatccctttgcagttactcagggctcaacggcaacccctccagtgagttagattactgtagcacttacagacagcacttggatgtccctcgggactcaccaagagccattagtttcaagaacggctggcaaatggcccggcaaaacgcagaaatctggagcagcacggaagaaaccgtctctcccaaaatcaaatcccggagctgtgacgatctcctaaacgacgactgcgatagcttcccggacccgaaagtcaagtcggaaagcatgggctccctgttatgtgaggaggactccaaggagagctgccccatggcgtgggggtccccctacgtcccggaggttcgcagtaacggcagatcaaggatcagacacaggtcagcccgcaacgccccggggttcctgaagatgtacaagaaaatgcaccgcatcaaccgcaaggacctgatgaactccgaggtgatctgctccgtgaagtccaggattctgcagtacgagagcgagcagcagcacaaggacctgctgcgcgcctggagccagtgctccacggaggaggtgccccgggacatggtgcccacacgcatctccgaattcgaaaagctgatccagaagtccaaatccatgccaaatttaggggatgacatgctgtctcccgtaaccctagaaccaccgcaaaatggcctatgtcccaagaggcggttttccattgagtatttgctggaggaagaaaatcaaagcggcccccccgctcggggccggcgaggctgccagtctaacgccctggtgcccattcacattgaagtcaccagcgatgagcagccccgagcacacgtggagttttccgacagcgaccaggacggggttgtgtccgaccacagtgactacattcacctagaggggtcatccttctgcagtgaaagtgactttgatcacttttccttcacatcctccgaaagcttttacggatccagccaccaccaccaccatcaccaccaccaccaccaccgccacctcatcagctcctgcaaaggcaggtgcccggcctcctacactcgatttaccacaatgttaaaacacgaaagagccagacacgaaaacaccgaggagcccagaaggcaagaaatggaccctggcctttctaaacttgcttttctagtcagtcctgtgcctttccggaggaaaaaaaattcggctcctaagaaacagactgaaaaggcaaaatgtaaagcatctgtgtttgaggctctggactctgcccttaaagacatctgtgaccaaattaaagctgaaaagaaaagggggagcttgccggacaacagcatcctgcaccgcctcatcagtgagctgctgccagatgttcccgagaggaactcatccctgagagcgctgaggaggagccccctgcaccagcctctccacccactgcctcccgatggtgctattcattgtccaccctaccagaatgactgcggaagaatgccccgcagtgcctctttccaagacgtggacacagccaacagcagctgccaccaccaagaccgtggcggtgcactccaagaccgtgagtcccctagaagttactcatccactttgactgacatggggagaagtgcaccaagggaaagaagaggaactccagaaaaagagaaattgcctgcaaaagctgtttatgattttaaggctcagacatctaaggagttgtcatttaagaaaggagatactgtctacatcctcaggaaaattgatcaaaattggtatgagggagaacaccacgggagagtgggcatcttcccgatctcatacgtagagaaactcacacctcctgagaaagcacagcctgcaagaccacctccgccagcccagcccggagaaatcggagaagctatagccaaatacaacttcaacgcagacacaaatgtggagctgtcactgagaaagggagatagagttattcttcttaaaagagttgatcaaaactggtatgaaggtaaaatcccaggaaccaacagacaaggcatcttccctgtttcctatgtggaggtcgtcaagaagaacacaaaaggtgctgaggactaccctgaccctccaataccccacagctattctagtgataggattcacagcttgagctcaaataagccacagcgtcctgtgtttactcatgaaaatattcaaggtgggggggaaccgtttcaggctctgtataactatactcccaggaatgaagatgagctggagctcagagaaagtgatgtcattgatgtcatggaaaagtgtgatgacggctggtttgtggggacctcaagaagaaccaaattctttggtactttccccggaaactacgtcaagaggctgtgaattgcgctccctccttctgtagaggccgcctgccagccatgcacctgcgtcaacgcgcctgaaacaccccgcgggcctcccgttgtcatgccttacggtttccaatgcgccgtcaccatctccacctcccaccaaaccaccagcagagtagccgccgctgctgtgagcctggggacgacatggcaggctggtccccctccgtgaaagtgtggattcctacttcctgctctaagctttgacacgtcaaaatgtgggatcagaaagaaaaaaatcatgatatttaaaaatggtcaaatatttg

SEQ ID NO: 428 - protein, 1100 aa, Homo sapien
MSYYQRPFSPSAYSLPASLNSSIVMQHGTSLDSTDTYPQHAQSLDGTTSSSIPLYRSSEEEKRVTVIKAPHYPGIGPVDESGIPTAIRTTVDRPKDWYKTMFKQIHMVHKPDDDTDMYNTPYTYNAGLYNPPYSAQSHPAAKTQTYRPLSKSHSDNSPNAFKDASSPVPPPHVPPPVPPLRPRDRSSTEKHDWDPPDRKVDTRKFRSEPRSIFEYEPGKSSILQHERPASLYQSSIDRSLERPMSSASMASDFRKRRKSEPAVGPPRGLGDQSASRTSPGRVDLPGSSTTLTKSFTSSSPSSPSRAKGGDDSKICPSLCSYSGLNGNPSSELDYCSTYRQHLDVPRDSPRAISFKNGWQMARQNAEIWSSTEETVSPKIKSRSCDDLLNDDCDSFPDPKVKSESMGSLLCEEDSKESCPMAWGSPYVPEVRSNGRSRIRHRSARNAPGFLKMYKKMHRINRKDLMNSEVICSVKSRILQYESEQQHKDLLRAWSQCSTEEVPRDMVPTRISEFEKLIQKSKSMPNLGDDMLSPVTLEPPQNGLCPKRRFSIEYLLEEENQSGPPARGRRGCQSNALVPIHIEVTSDEQPRAHVEFSDSDQDGVVSDHSDYIHLEGSSFCSESDFDHFSFTSSESFYGSSHHHHHHHHHHHRHLISSCKGRCPASYTRFTTMLKHERARHENTEEPRRQEMDPGLSKLAFLVSPVPFRRKKNSAPKKQTEKAKCKASVFEALDSALKDICDQIKAEKKRGSLPDNSILHRLISELLPDVPERNSSLRALRRSPLHQPLHPLPPDGAIHCPPYQNDCGRMPRSASFQDVDTANSSCHHQDRGGALQDRESPRSYSSTLTDMGRSAPRERRGTPEKEKLPAKAVYDFKAQTSKELSFKKGDTVYILRKIDQNWYEGEHHGRVGIFPISYVEKLTPPEKAQPARPPPPAQPGEIGEAIAKYNFNADTNVELSLRKGDRVILLKRVDQNWYEGKIPGTNRQGIFPVSYVEVVKKNTKGAEDYPDPPIPHSYSSDRIHSLSSNKPQRPVFTHENIQGGGEPFQALYNYTPRNEDELELRESDVIDVMEKCDDGWFVGTSRRTKFFGTFPGNYVKRL

SEQ ID NO: 429 - DNA, 2044 bp, Homo sapien
cctggagttacaatggcggcgcccatgctgcgctggggctgccgtggaagacgttgggctttcgcccgggttgacggtggttcttgccaccgaagaggggctccgactgggtccacatccaaccagattaggggagagagctcagtggctcagcagcccctccacacggcccagaagacgaggaaaggtgaacacaaatgggctgctgtggtaggtttggaaattcatgcccagatttcctccaactctaaactcttctctggatctcaagttcgcttttcagcacctccaaattctttggtttctttttttgatgcatctctacctggaactttgccggttctcaacaggaggtgtgtagaagcggcggtgatgacaggcctggctctgaactgccacataaacaagaagtccttgtttgacaggaagcactacttctatgcagacctccctgcaggctaccaaattacccagcagaggctcccaattgctgtgaatgggagcttgatatatggcgtctgtgcagggaagaagcagagtcaggtgatccccaagacggtgaggatcaagcagatccagttggagcaagacagtggcaaaagcctccacgacaacctgaggtctcagacgctcattgatttgaacagggcaggagtgggccttctggaggtggtcctggagcccgacatgtcctgtggagaagaggcggcaacagctgtcagggagctgcagctgatccttcaagccctggggaccagccaggcgaacatggcagagggccagttgagagtggatgccaatatatccgtgcatcaccctggggagcctttgggcgttcgaacggaagtgaagaatctcaacagcatcaggttcctggccaaagccatagactatgaaattcagaggcaaatcaatgaacttgagaatggaggtgaaattctgaacgaaacacgctcatttcatcacaagctggggtgcaccatgtcaatgagagacaaagaaggaaaacaggactacaggttcatgccagaacccaacctgcctcccctggtgctctacgacgccacatctctgcccgcaggtgcagacccacagcaagtgatcaatattgaccagattcgggagacactcccggagctccccagtgtgacccgagagaagcttgtccaacagtatgggatgctgctggaacacagcttcactttgctgaacgaagtcggcctactggagttcttccaaaatgtgataaaagaaactagggcagagccaaaaaaggtgactagttgggtcctcaacacttttctgggctatttaaagcaacagaacctcgctgtcagtgagagtcctgtcacaccctctgcactcgctgagcttcttgacctgctggacagcagaacaatttcttcatcagcagctaaacaggtgtttgaggaactgtggaagagggaaggcaagactccagggcagattgtttcagaaaagcagcttgaactgatgcaggaccagggggcactggagcagctctgccactctgtgatggaggcccatcctcaagtggtaatggatgtgaagaacagaaaccccagagctataaataaactgattgggttggtccggaaagcgactcaaagccgagcagatccagtcatgataaaggagatcctggagaagaagctgtcattgtgagatgtttgggatccccttgcccaagggacaacaacaaacagtgcagcctgactgggaacaggatcctgtgaaagctgatgcccatgtgccctgagagctgcctctcaatccctgtcccaagccacagctatggcgttaatgtcaccagtgttctcaccctctaggccctgtgcctggaggtgcctccacagccgaccagcagccaccccgcctgcttcatccacatcaggagggtccggtgaggctgcagcagtggttaaggagtaacaccttcttgtattaaggaattttaaactaaataaaatgtatgttggagatactgttaaaaaaaaaaaaaaaaaaaaaaaaaaaaaaaaaa

SEQ ID NO: 430 - protein, 557 aa, Homo sapien
MAAPMLRWGCRGRRWAFARVDGGSCHRRGAPTGSTSNQIRGESSVAQQPLHTAQKTRKGEHKWAAVVGLEIHAQISSNSKLFSGSQVRFSAPPNSLVSFFDASLPGTLPVLNRRCVEAAVMTGLALNCHINKKSLFDRKHYFYADLPAGYQITQQRLPIAVNGSLIYGVCAGKKQSQVIPKTVRIKQIQLEQDSGKSLHDNLRSQTLIDLNRAGVGLLEVVLEPDMSCGEEAATAVRELQLILQALGTSQANMAEGQLRVDANISVHHPGEPLGVRTEVKNLNSIRFLAKAIDYEIQRQINELENGGEILNETRSFHHKLGCTMSMRDKEGKQDYRFMPEPNLPPLVLYDATSLPAGADPQQVINIDQIRETLPELPSVTREKLVQQYGMLLEHSFTLLNEVGLLEFFQNVIKETRAEPKKVTSWVLNTFLGYLKQQNLAVSESPVTPSALAELLDLLDSRTISSSAAKQVFEELWKREGKTPGQIVSEKQLELMQDQGALEQLCHSVMEAHPQVVMDVKNRNPRAINKLIGLVRKATQSRADPVMIKEILEKKLSL

SEQ ID NO: 431 - DNA, 2570 bp, Homo sapien
gctgtcctgagcctgagtactctagctgccttgtcgccatcgcatctggctgccatccagcgccagcacacagtaatgagtggccgagcttcctctgggagggaggaaacagttaaaatcttgcagcagctgcaatcatctaggcgtggttctcttgtctgacttgggctgcacagatcctgggccaagggacagaagaaagacagcctaggagcagagcctcccagatggctgagttggatctaatggctccagggccactgcccagggccactgctcagcccccagcccctctcagcccagactctgggtcacccagcccagattctgggtcagccagcccagtggaagaagaggacgtgggctcctcggagaagcttggcagggagacggaggaacaggacagcgactctgcagagcagggggatcctgctggtgaggggaaagaggtcctgtgtgacttctgccttgatgacaccagaagagtgaaggcagtgaagtcctgtctaacctgcatggtgaattactgtgaagagcacttgcagccgcatcaggtgaacatcaaactgcaaagccacctgctgaccgagccagtgaaggaccacaactggcgatactgccctgcccaccacagcccactgtctgctttctgctgccctgatcagcagtgcatctgccaggactgttgccaggagcacagtggccacaccatagtctccctggatgcagcccgcagggacaaggaggctgaactccagtgcacccagttagacttggagcggaaactcaagttgaatgaaaatgccatctccaggctccaggctaaccaaaagtctgttctggtgtcggtgtcagaggtcaaagcggtggctgaaatgcagtttggggaactccttgctgctgtgaggaaggcccaggccaatgtgatgctcttcttagaggagaaggagcaagctgcgctgagccaggccaacggtatcaaggcccacctggagtacaggagtgccgagatggagaagagcaagcaggagctggagaggatggcggccatcagcaacactgtccagttcttggaggagtactgcaagtttaagaacactgaagacatcaccttccctagtgtttacgtagggctgaaggataaactctcgggcatccgcaaagttatcacggaatccactgtacacttaatccagttgctggagaactataagaaaaagctccaggagttttccaaggaagaggagtatgacatcagaactcaagtgtctgccgttgttcagcgcaaatattggacttccaaacctgagcccagcaccagggaacagttcctccaatatgcgtatgacatcacgtttgacccggacacagcacacaagtatctccggctgcaggaggagaaccgcaaggtcaccaacaccacgccctgggagcatccctacccggacctccccagcaggttcctgcactggcggcaggtgctgtcccagcagagtctgtacctgcacaggtactattttgaggtggagatcttcggggcaggcacctatgttggcctgacctgcaaaggcatcgaccggaaaggggaggagcgcaacagttgcatttccggaaacaacttctcctggagcctccaatggaacgggaaggagttcacggcctggtacagtgacatggagaccccactcaaagctggccctttccggaggctcggggtctatatcgacttcccgggagggatcctttccttctatggcgtagagtatgataccatgactctggttcacaagtttgcctgcaaattttcagaaccagtctatgctgccttctggctttccaagaaggaaaacgccatccggattgtagatctgggagaggaacccgagaagccagcaccgtccttgggggtgactgctccctagactccaggagccatatcccagacctttgccagctacagtgatgggatttgcattttagggtgatttgtgggcagaaataactgctgatggtagctggcttttgaaatcctatggggtctctgaatgaaaacattctccagctgctctcttttgctccatatggtgctgttctctatgtgtttgcagtaattcttttttttttttttgagacggagtctcgcactgttgcccaggctggagagcagtggcgcgatcttggctcactgcaagctccgcctcccgagttcaagcaattctcctgcctcagcctcccgagtagctgggattacaggtgcctgccaccacacccagctaatgttttgtatttttagtagagatggggtttcaccatgttggccaggcagatctcaaactcctgacctcgtgatgcacccacctcggcctcccaaagtgctgggattacatgcgtgagccactgcgccctgcctgtttgtagtaatttttaggcaccaaatctccctcatcttctagtgccattctcctctctgttcaggtaaatgtcacactgtgcccagaatggatgaccaggaaccttaaagagtggctgaaaagattgcagagttatcataataaattgctaacttgcgt

SEQ ID NO: 432 - protein, 564 aa, Homo sapien
MAELDLMAPGPLPRATAQPPAPLSPDSGSPSPDSGSASPVEEEDVGSSEKLGRETEEQDSDSAEQGDPAGEGKEVLCDFCLDDTRRVKAVKSCLTCMVNYCEEHLQPHQVNIKLQSHLLTEPVKDHNWRYCPAHHSPLSAFCCPDQQCICQDCCQEHSGHTIVSLDAARRDKEAELQCTQLDLERKLKLNENAISRLQANQKSVLVSVSEVKAVAEMQFGELLAAVRKAQANVMLFLEEKEQAALSQANGIKAHLEYRSAEMEKSKQELERMAAISNTVQFLEEYCKFKNTEDITFPSVYVGLKDKLSGIRKVITESTVHLIQLLENYKKKLQEFSKEEEYDIRTQVSAVVQRKYWTSKPEPSTREQFLQYAYDITFDPDTAHKYLRLQEENRKVTNTTPWEHPYPDLPSRFLHWRQVLSQQSLYLHRYYFEVEIFGAGTYVGLTCKGIDRKGEERNSCISGNNFSWSLQWNGKEFTAWYSDMETPLKAGPFRRLGVYIDFPGGILSFYGVEYDTMTLVHKFACKFSEPVYAAFWLSKKENAIRIVDLGEEPEKPAPSLGVTAP

SEQ ID NO: 433 - DNA, 439 bp, Homo sapien
ggtgggtctgaatctagcaccatgacggaactagagacagccatgggcatgatcatagacgtcttttcccgatattcgggcagcgagggcagcacgcagaccctgaccaagggggagctcaaggtgctgatggagaaggagctaccaggcttcctgcagagtggaaaagacaaggatgccgtggataaattgctcaaggacctggacgccaatggagatgcccaggtggacttcagtgagttcatcgtgttcgtggctgcaatcacgtctgcctgtcacaagtactttgagaaggcaggactcaaatgatgccctggagatgtcacagattcctgcagagccatggtcccaggcttcccaaaagtgtttgttggcaattattcccctaggctgagcctgctcatgtacctctgattaataaatgcttatgaaaaaaaaa

SEQ ID NO: 434 - protein, 95 aa, Homo sapien
MTELETAMGMIIDVFSRYSGSEGSTQTLTKGELKVLMEKELPGFLQSGKDKDAVDKLLKDLDANGDAQVDFSEFIVFVAAITSACHKYFEKAGLK

SEQ ID NO: 435 - DNA, 2153 bp, Homo sapien
aagactgcgagctccccgcaccccctcgcactccctctggccggcccagggcgccttcagcccaacctccccagccccacgggcgccacggaacccgctcgatctcgccgccaactggtagacatggagacccctgcctggccccgggtcccgcgccccgagaccgccgtcgctcggacgctcctgctcggctgggtcttcgcccaggtggccggcgcttcaggcactacaaatactgtggcagcatataatttaacttggaaatcaactaatttcaagacaattttggagtgggaacccaaacccgtcaatcaagtctacactgttcaaataagcactaagtcaggagattggaaaagcaaatgcttttacacaacagacacagagtgtgacctcaccgacgagattgtgaaggatgtgaagcagacgtacttggcacgggtcttctcctacccggcagggaatgtggagagcaccggttctgctggggagcctctgtatgagaactccccagagttcacaccttacctggagacaaacctcggacagccaacaattcagagttttgaacaggtgggaacaaaagtgaatgtgaccgtagaagatgaacggactttagtcagaaggaacaacactttcctaagcctccgggatgtttttggcaaggacttaatttatacactttattattggaaatcttcaagttcaggaaagaaaacagccaaaacaaacactaatgagtttttgattgatgtggataaaggagaaaactactgtttcagtgttcaagcagtgattccctcccgaacagttaaccggaagagtacagacagcccggtagagtgtatgggccaggagaaaggggaattcagagaaatattctacatcattggagctgtggtatttgtggtcatcatccttgtcatcatcctggctatatctctacacaagtgtagaaaggcaggagtggggcagagctggaaggagaactccccactgaatgtttcataaaggaagcactgttggagctactgcaaatgctatattgcactgtgaccgagaacttttaagaggatagaatacatggaaacgcaaatgagtatttcggagcatgaagaccctggagttcaaaaaactcttgatatgacctgttattaccattagcattctggttttgacatcagcattagtcactttgaaatgtaacgaatggtactacaaccaattccaagttttaatttttaacaccatggcaccttttgcacataacatgctttagattatatattccgcacttaaggattaaccaggtcgtccaagcaaaaacaaatgggaaaatgtcttaaaaaatcctgggtggacttttgaaaagcttttttttttttttttttttgagacggagtcttgctctgttgcccaggctggagtgcagtagcacgatctcggctcacttgcaccctccgtctctcgggttcaagcaattgtctgcctcagcctcccgagtagctgggattacaggtgcgcactaccacgccaagctaatttttgtattttttagtagagatggggtttcaccatcttggccaggctggtcttgaattcctgacctcagtgatccacccaccttggcctcccaaagatgctagtattatgggcgtgaaccaccatgcccagccgaaaagcttttgaggggctgacttcaatccatgtaggaaagtaaaatggaaggaaattgggtgcatttctaggacttttctaacatatgtctataatatagtgtttaggttcttttttttttcaggaatacatttggaaattcaaaacaattgggcaaactttgtattaatgtgttaagtgcaggagacattggtattctgggcagcttcctaatatgctttacaatctgcactttaactgacttaagtggcattaaacatttgagagctaactatatttttataagactactatacaaactacagagtttatgatttaaggtacttaaagcttctatggttgacattgtatatataattttttaaaaaggtttttctatatggggattttctatttatgtaggtaatattgttctatttgtatatattgagataatttatttaatatactttaaataaaggtgactgggaattgtt

SEQ ID NO: 436 - protein, 295 aa, Homo sapien
METPAWPRVPRPETAVARTLLLGWVFAQVAGASGTTNTVAAYNLTWKSTNFKTILEWEPKPVNQVYTVQISTKSGDWKSKCFYTTDTECDLTDEIVKDVKQTYLARVFSYPAGNVESTGSAGEPLYENSPEFTPYLETNLGQPTIQSFEQVGTKVNVTVEDERTLVRRNNTFLSLRDVFGKDLIYTLYYWKSSSSGKKTAKTNTNEFLIDVDKGENYCFSVQAVIPSRTVNRKSTDSPVECMGQEKGEFREIFYIIGAVVFVVIILVIILAISLHKCRKAGVGQSWKENSPLNVS

SEQ ID NO: 437 - DNA, 4076 bp, Homo sapien
tagcaggttgctactgccccgaacccgcgctgcagggaacagcggggcaaacagtgagtggggttcagcgtagactctggaccaggagaggcccgcggtgaccgaggcctgggccccggaaaccaatagagccatggcgactccctctgctgccttcgaggcccttatgaatggtgtgacaagctgggatgtacccgaagatgctgttccatgtgaactgcttcttattggagaggcttcatttcctgtgatggtgaatgacatgggccaggtcctcattgctgcctcctcctatggccgtggccgcctggtggtcgtgtcccatgaggactacttggtggaagcccagctcacgccctttctcctgaacgcagtggggtggctttgctcttcccctggggctcccattggtgtacacccatccctggcacctttggccaaaatcctcgagggctctggagtggatgcaaaggttgagccagaagtgaaagactccctgggggtttactgtattgatgcctacaatgaaaccatgacagaaaagctggtcaagttcatgaaatgtggtggcggcttgctcataggaggacaagcctgggattgggccaaccagggggaggatgaaagggttctgttcacgttccctgggaacctcgtgaccagtgtggctggcatttactttactgacaacaaaggggacacgagtttctttaaagtctccaagaagatgcccaagatcccagtgttggttagttgtgaagatgacctctccgacgacagagaagagcttctgcatgggatttcagagctggacatcagcaactcggattgtttcccatcccagctgctagtgcatggggctttagcctttcctctagggttagattcctaccatggctgtgttatagcggctgcccgctatggccggggccgggtggttgtgactggccataaggtattattcactgttggtaaactgggcccctttctgctcaatgctgtccgctggctggatgggggccgcagaggcaagattgtggtgcagacagagctgagaaccctgagtggcctcctcgcagtggggggcatagacaccagcatcgagcccaatctgaccagtgatgcaagtgtctactgctttgaacccgtgagtgaagtgggggtcaaggaactgcaggagtttgtagcagagggtggcgggctatttgttggagcccaagcctggtggtgggccttcaagaaccccggagtgtcccctttggctcgattcccaggaaacctcctcctcaacccctttggcatcagcattacaagccaaagcctcaatccagggccctttcgtactcctaaagcagggataaggacctatcacttccgctccaccttggccgagttccaggttataatgggcaggaagagaggaaatgtggaaaagggctggttggcaaagctgggaccagatggtgcagctttcctgcagattcccgcagaagagatccctgcctacatgtctgtgcatcgactcctgaggaagctgctaagtcgatatcggcttccagtagcaacccgagagaaccctgttatcaatgactgctgcagaggtgctatgctttccctggccacagggctggcccactctggaagcgacctctctctgttagtcccagaaattgaagatatgtacagcagcccctatctgcgcccctcagaatctcctatcaccgtcgaggtcaactgcaccaatccaggcaccagatattgctggatgagtactgggctctacatacctggaaggcaaattatagaagtctcactgcctgaagctgctgcctctgccgacctgaagatacagattggctgccacacagatgacctgaccagggccagcaagcttttccgaggcccactcgtaattaaccggtgctgcttggacaaacccacaaaatcgatcacgtgcctctggggtggactcctctatataattgtgcctcagaacagcaaactgggttctgtgcctgtcaccgtgaagggggctgtgcatgctccatactacaagctgggggagaccaccctggaggagtggaagaggcgtatccaggagaatccagggccctggggagagctggccacggacaacatcattctgaccgtgccgaccgcaaatcttcgtactctggagaaccctgagccgctgctccgcctctgggatgaggtgatgcaggctgtggcgcgactgggagctgagcccttccctttgcgcctgcctcagaggattgttgccgacgtgcagatctcagtgggctggatgcatgcagggtaccccatcatgtgccatctggagtcagtgcaggagctcatcaacgagaagctcatcagaaccaaggggctgtggggccccgtccatgagctgggccgcaaccagcagcggcaggagtgggagttcccaccacacaccaccgaggccacctgcaacctgtggtgtgtgtatgtgcatgagacggtcttgggcattcctcgaagccgtgccaatattgctctgtggcccccagttcgggagaagagagtcagaatctacctgagcaagggtcccaatgtgaaaaactggaatgcatggaccgcactggaaacgtatttacagctccaggaagcctttggttgggagccattcatccgtctcttcaccgagtacaggaaccagaccaacttgcccacagaaaatgttgacaaaatgaatctgtgggtcaagatgttctcccaccaagtgcagaagaacctggctccgttctttgaggcctgggcctggcccatccagaaggaagtggctaccagcctggcctatctgcctgaatggaaggaaaatattatgaaattgtacctcctcacacagatgccccactgaaattgaagtcaagaaatgcaaaaaggaactgacacatctcagcaaagaaaactgaagggatttggttataagtggagaggatctcagcatatttctggaagatagaaagtggatgaagcatgataatgaaagagtgaagaacctttcagataaaatgtaagctgatctgaacaacataaccccaaagagacttgcgcacctgaaaagcttgtctactgaagaattactccagttgtaagattgagccctctcctactctcccccaactcttatgcacagaacacaggcagtctccactattgataccagttaaaaatttcttgttattgttgctgttgttgtttgtataaaggaattgaacaggctgcttgcagagagataagagttggtgctccagaaaaaaatttctcttctagtggaaataagtgcccctacccccagccggtcagctaattctctactgacagctgagacctcctactcaagtgcctgttgccttcaggtatagaagaggtttcctgaagaaacagacctaactgtacaacagcagaggaaacccatgccaactgttatacaagttaacagttatgttgattcttaaatgggaatggtgagttagaaattcccagacatgggcgatggggagggaagaggaataagaaaagttacgaggtagaattaggggccttgaaaatatgacaaactctgagggaaacaaagacaatgtggaaagaataacttaattttaattccatctccagagagatttgaggtgtatttaagatgaaaaacaggatactacaaagaaacggaaaactcaggagttcaagaccagcctaggcaagatggcaacatcccgtctctacaaaataatttttaaaaattagccaagcatggtggcatgtgcctgtggtcctagctacttgggaggctgaagtgggaagatcacttgagcccaggagttcaaggcttcagtgagccatgatggtgccactgcactccagcctgggggacagagtgagaccctgtctcttaaaaagcaagaaaagaaagagaagactgagaataagaagatctctttgaaaataaaataagactgctaaaagtatttggtatacagtctggaaaataaagttgagggaatctctccagataaagagcaaaaagaaatagatag

SEQ ID NO: 438 - protein, 921 aa, Homo sapien
MATPSAAFEALMNGVTSWDVPEDAVPCELLLIGEASFPVMVNDMGQVLIAASSYGRGRLVVVSHEDYLVEAQLTPFLLNAVGWLCSSPGAPIGVHPSLAPLAKILEGSGVDAKVEPEVKDSLGVYCIDAYNETMTEKLVKFMKCGGGLLIGGQAWDWANQGEDERVLFTFPGNLVTSVAGIYFTDNKGDTSFFKVSKKMPKIPVLVSCEDDLSDDREELLHGISELDISNSDCFPSQLLVHGALAFPLGLDSYHGCVIAAARYGRGRVVVTGHKVLFTVGKLGPFLLNAVRWLDGGRRGKIVVQTELRTLSGLLAVGGIDTSIEPNLTSDASVYCFEPVSEVGVKELQEFVAEGGGLFVGAQAWWWAFKNPGVSPLARFPGNLLLNPFGISITSQSLNPGPFRTPKAGIRTYHFRSTLAEFQVIMGRKRGNVEKGWLAKLGPDGAAFLQIPAEEIPAYMSVHRLLRKLLSRYRLPVATRENPVINDCCRGAMLSLATGLAHSGSDLSLLVPEIEDMYSSPYLRPSESPITVEVNCTNPGTRYCWMSTGLYIPGRQIIEVSLPEAAASADLKIQIGCHTDDLTRASKLFRGPLVINRCCLDKPTKSITCLWGGLLYIIVPQNSKLGSVPVTVKGAVHAPYYKLGETTLEEWKRRIQENPGPWGELATDNIILTVPTANLRTLENPEPLLRLWDEVMQAVARLGAEPFPLRLPQRIVADVQISVGWMHAGYPIMCHLESVQELINEKLIRTKGLWGPVHELGRNQQRQEWEFPPHTTEATCNLWCVYVHETVLGIPRSRANIALWPPVREKRVRIYLSKGPNVKNWNAWTALETYLQLQEAFGWEPFIRLFTEYRNQTNLPTENVDKMNLWVKMFSHQVQKNLAPFFEAWAWPIQKEVATSLAYLPEWKENIMKLYLLTQMPH

SEQ ID NO: 439 - DNA, 841 bp, Homo sapien
gaaccgtttactcgctgctgtgcccatctatcagcaggctccgggctgaagattgcttctcttctctcctccaaggtctagtgacggagcccgcgcgcggcgccaccatgcggcagaaggcggtatcgcttttcttgtgctacctgctgctcttcacttgcagtggggtggaggcaggtgagaatgcgggtaaggatgcaggtaagaaaaagtgctcggagagctcggacagcggctccgggttctggaaggccctgaccttcatggccgtcggaggaggactcgcagtcgccgggctgcccgcgctgggcttcaccggcgccggcatcgcggccaactcggtggctgcctcgctgatgagctggtctgcgatcctgaatgggggcggcgtgcccgccggggggctagtggccacgctgcagagcctcggggctggtggcagcagcgtcgtcataggtaatattggtgccctgatgggctacgccacccacaagtatctcgatagtgaggaggatgaggagtagccagcagctcccagaacctcttcttccttcttggcctaactcttccagttaggatctagaactttgcctttttttttttttttttttttttttgagatgggttctcactatattgtccaggctagagtgcagtggctattcacagatgcgaacatagtacactgcagcctccaactcctagcctcaagtgatcctcctgtctcaacctcccaagtaggattacaagcatgcgccgacgatgcccagaatccagaactttgtctatcactctccccaacaacctagatgtgaaaacagaataaacttcacccagaaaa

SEQ ID NO: 440 - protein, 138 aa, Homo sapien
MRQKAVSLFLCYLLLFTCSGVEAGENAGKDAGKKKCSESSDSGSGFWKALTFMAVGGGLAVAGLPALGFTGAGIAANSVAASLMSWSAILNGGGVPAGGLVATLQSLGAGGSSVVIGNIGALMGYATHKYLDSEEDEE

SEQ ID NO: 441 - DNA, 417 bp, Homo sapien
acctcccaaccaagccctccagcaaggattcaggagtgcccctcgggcctcgccatgaggctcttcctgtcgctcccggtcctggtggtggttctgtcgatcgtcttggaaggcccagccccagcccaggggaccccagacgtctccagtgccttggataagctgaaggagtttggaaacacactggaggacaaggctcgggaactcatcagccgcatcaaacagagtgaactttctgccaagatgcgggagtggttttcagagacatttcagaaagtgaaggagaaactcaagattgactcatgaggacctgaagggtgacatccaggaggggcctctgaaatttcccacaccccagcgcctgtgctgaggactcccgccatgtggccccaggtgccaccaataaaaatcctaccg

SEQ ID NO: 442 - protein, 83 aa, Homo sapien
MRLFLSLPVLVVVLSIVLEGPAPAQGTPDVSSALDKLKEFGNTLEDKARELISRIKQSELSAKMREWFSETFQKVKEKLKIDS

SEQ ID NO: 443 - DNA, 2060 bp, Homo sapien
ctggcttcggcctcagccccaccatggtgacgcttgctgaactgctggtgctcctggccgctctcctggccacggtctcgggctatttcgttagcatcgacgcccatgctgaagagtgcttctttgagcgggtcacctcgggcaccaagatgggcctcatcttcgaggtggcggagggcggcttcctggacatcgacgtggagattacaggaccagataacaaaggaatttacaaaggagacagagaatccagtgggaaatacacatttgctgctcacatggatggaacatacaaattttgttttagtaaccggatgtccaccatgactccaaaaatagtgatgttcaccattgatattggggaggctccaaaaggacaagatatggaaacagaagctcaccagaacaagctagaagaaatgatcaatgagctagcagtggcgatgacagctgtaaagcacgaacaggaatacatggaagtccgggagagaatacacagagccatcaacgacaacacaaacagcagagtggtcctttggtccttctttgaagctcttgttctagttgccatgacattgggacagatctactacctgaagagattttttgaagtccggagagttgtttaaaaagcctcttcctgatgatcccaactcagaattcactgtttaccaaacaccttggtcataataatgtcattagtttctccatttttattttctgaactgtacattcacaacttatgtttctttgagattaatagatattgggggaaaaacgcctttttaggaaaattatagtgaaaatttgacagttgattggcataatttcttgtttgaatgctgcctccattatataggtccttccaggaactcaaacactgtaagtgaaatatgggagtatagtttttattatttcttcttttccttttgttttcataatataatgcagtttgttcaggaaatcagcacaaagcctgatagtactttactaaaatgactgcattctttggattccttcagtctatggttcaagtcactaaagattcatttttgttgagtccttatgagaaacagcagtatgaatcttgacggtttctgcccgtcctaatggcagagctctctgacttgggtgtatgctgccaggctgggtactttcatactttgttttcttgttttgctttaaaactacgactcagcatacattttcccacatacatttttacattgtaccttaggactcagtcatctccacttaaattgatgacacaagcagctaataaccatttctgggtttctgcctaaccccctaattgtctgttaaagccaattctctgggtgtcccagtgagtggtggctttttttctttccacattggcacattcacttctcccactcttggcatgtaagaaataagcatttacataattggaaaaatctggatttctgatgccaaagggttaaagcttcttggatttcatttcattgatatacagccactattttatttttgatcagtggcctttgggccactgttcagggtactgaccatcagtgtcagcattagggttttggtttttgtttcttttgggtatttcttttttggcacatgtgaatcttgttttgtgtaaaatgaaattactttctcttgttctctgatgatgggtttaaaattaaaagagcatccggttttggtatggggatgatccaggattatgttgtgactgatacatattagttacttgtgctttttttttttttttttggatctttgcaagggcaaaactacaagtaacgagttttatataattaatttaaatttgttacaggttttcatgttcaggataaaccatacttccaccttgggtgagaacacttgcaacagtttattaatgaggtgactttcaccttaggacaactgttgcatgccaagttttttgtgtgtgtgaaacacttcaaaactgatttaaaagatgtaaatttaaaattggttgtatctaatatgccccaggttcggtaaataaacaattctttttaaaaaaaaaaaaaaaaaaaaaaaaa

SEQ ID NO: 444 - protein, 201 aa, Homo sapien
MVTLAELLVLLAALLATVSGYFVSIDAHAEECFFERVTSGTKMGLIFEVAEGGFLDIDVEITGPDNKGIYKGDRESSGKYTFAAHMDGTYKFCFSNRMSTMTPKIVMFTIDIGEAPKGQDMETEAHQNKLEEMINELAVAMTAVKHEQEYMEVRERIHRAINDNTNSRVVLWSFFEALVLVAMTLGQIYYLKRFFEVRRVV

SEQ ID NO: 445 - DNA, 2058 bp, Homo sapien
gcacgaggaagccacagatctcttaagaactttctgtctccaaaccgtggctgctcgataaatcagacagaacagttaatcctcaatttaagcctgatctaacccctagaaacagatatagaacaatggaagtgacaacaagattgacatggaatgatgaaaatcatctgcgcaactgcttggaaatgtttctttgagtcttctctataagtctagtgttcatggaggtagcattgaagatatggttgaaagatgcagccgtcagggatgtactataacaatggcttacattgattacaatatgattgtagcctttatgcttggaaattatattaatttacgtgaaagttctacagagccaaatgattccctatggttttcacttcaaaagaaaaatgacaccactgaaatagaaactttactcttaaatacagcaccaaaaattattgatgagcaactggtgtgtcgtttatcgaaaacggatattttcattatatgtcgagataataaaatttatctagataaaatgataacaagaaacttgaaactaaggttttatggccaccgtcagtatttggaatgtgaagtttttcgagttgaaggaattaaggataacctagacgacataaagaggataattaaagccagagagcacagaaataggcttctagcagacatcagagactataggccctatgcagacttggtttcagaaattcgtattcttttggtgggtccagttgggtctggaaagtccagttttttcaattcagtcaagtctatttttcatggccatgtgactggccaagccgtagtggggtctgataccaccagcataaccgagcggtataggatatattctgttaaagatggaaaaaatggaaaatctctgccatttatgttgtgtgacactatggggctagatggggcagaaggagcaggactgtgcatggatgacattccccacatcttaaaaggttgtatgccagacagatatcagtttaattcccgtaaaccaattacacctgagcattctacttttatcacctctccatctctgaaggacaggattcactgtgtggcttatgtcttagacatcaactctattgacaatctctactctaaaatgttggcaaaagtgaagcaagttcacaaagaagtattaaactgtggtatagcatatgtggccttgcttactaaagtggatgattgcagtgaggttcttcaagacaactttttaaacatgagtagatctatgacttctcaaagccgggtcatgaatgtccataaaatgctaggcattcctatttccaatattttgatggttggaaattatgcttcagatttggaactggaccccatgaaggatattctcatcctctctgcactgaggcagatgctgcgggctgcagatgattttttagaagatttgcctcttgaggaaactggtgcaattgagagagcgttacagccctgcatttgagataagttgccttgattctgacatttggcccagcctgtactggtgtgccgcaatgagagtcaatctctattgacagcctgcttcagattttgcttttgttcgttttgccttctgtccttggaacagtcatatctcaagttcaaaggccaaaacctgagaagcggtgggctaagataggtcctactgcaaaccacccctccatatttccgtaccatttacaattcagtttctgtgacatctttttaaaccactggaggaaaaatgagatattctctaatttattcttctataacactctatatagagctatgtgagtactaatcacattgaataatagttataaaattattgtatagacatctgcttcttaaacagattgtgagttctttgagaaacagcgtggattttacttatctgtgtattcacagagcttagcacagtgcctggtaatgagcaagcatacttgccattacttttccttcccactctctccaacatcacattcactttaaatttttctgtatatagaaaggaaaactagcctgggcaacatgatgaaaccccatctccactgc

SEQ ID NO: 446 - protein, 413 aa, Homo sapien
MVERCSRQGCTITMAYIDYNMIVAFMLGNYINLRESSTEPNDSLWFSLQKKNDTTEIETLLLNTAPKIIDEQLVCRLSKTDIFIICRDNKIYLDKMITRNLKLRFYGHRQYLECEVFRVEGIKDNLDDIKRIIKAREHRNRLLADIRDYRPYADLVSEIRILLVGPVGSGKSSFFNSVKSIFHGHVTGQAVVGSDTTSITERYRIYSVKDGKNGKSLPFMLCDTMGLDGAEGAGLCMDDIPHILKGCMPDRYQFNSRKPITPEHSTFITSPSLKDRIHCVAYVLDINSIDNLYSKMLAKVKQVHKEVLNCGIAYVALLTKVDDCSEVLQDNFLNMSRSMTSQSRVMNVHKMLGIPISNILMVGNYASDLELDPMKDILILSALRQMLRAADDFLEDLPLEETGAIERALQPCI

SEQ ID NO: 447 - DNA, 1505 bp, Homo sapien
gaattccgggcgcctggagccacacagggatccggagcctgggggaaaagcggcgcgggagccggcacccaccgctggaggggcggcgacggcggccgtagcgacctcgggaggcaagcggagccgccatggccgagttcccgtcgaaagttagcacgcggaccagcagtcctgcgcagggcgccgaagcctcggtgtcggcgctgcgcccggacctgggcttcgtgcgctcccgcctcggggcgctcatgctgctgcagctggtgctggggctgctggtgtgggcgctgattgcggacaccccgtaccacctgtatccggcctatggctgggtgatgttcgtcgctgtcttcctctggctggtgacaatcgtcctcttcaacctctacctgtttcagctgcacatgaagttgtacatggttccctggccactggtgttaatgatctttaacatcagcgccaccgttctctacatcaccgccttcatcgcctgctctgcggcagttgacctgacatccctgaggggcacccggccttataaccagcgcgcggctgcctcgttctttgcgtgtttggtgatgatcgcctatggagtgagtgccttcttcagctaccaggcctggcgaggagtaggcagcaatgcggccaccagtcagatggctggcggctatgcctaaaccacctgtgccacggccccctctggggctgaagccgccgctgggtcacagagcagggtcaccctgcaagcctgaagctggggagccctgcgtggagtcagcccaacagggactgcatttgctcctctctgcccgtcagacataagctctcacagcgctaaggaagcaggcccaggctggcaggcatctcggcttgcaggaggccaactgctgagacctcttctccatcccccttattcagtggaagatgacgggggatctgaggctgtgtctctgccttgtctttagaggacttcagcgtccaagactggggcccacccttctcaccagcactaaatgcactaacaaggactccagacctgcagccccagacccgccgtagtataagcctaacaagcaacacgtagcaccttagtctttgttccaggagagctgagcaagctggtgaaaccactctccttcctttaaacaccgtttcaaccaacctctccctggagccaacctgtaaaaagtgggttgattgctgacagcatggtcttccctccctgcatttcagacataccagttactgaaagcaaatcagttttaagtgatttctcagtgctgaaaagcctgtccaggtttccttccctttcccaagcctctctctgtaatactccctttgggcgaagctaacatcggtgcctccccgaccttgctgactaggcacatgggacgcaaaggagggagggaagcaaggccttgcctggcgagttgtcatgtggttggtggtgactgttttattttttttaataaaaataaagatgagagaaattaaaaaaaaaccgg

SEQ ID NO: 448 - protein, 182 aa, Homo sapien
MAEFPSKVSTRTSSPAQGAEASVSALRPDLGFVRSRLGALMLLQLVLGLLVWALIADTPYHLYPAYGWVMFVAVFLWLVTIVLFNLYLFQLHMKLYMVPWPLVLMIFNISATVLYITAFIACSAAVDLTSLRGTRPYNQRAAASFFACLVMIAYGVSAFFSYQAWRGVGSNAATSQMAGGYA

SEQ ID NO: 449 - DNA, 6401 bp, Homo sapien
aatacaccccgggcaggtggagcgctcgcggctgctcgcggcgagcccgggagtgatggcgaggcccctgcgggcggccagcgcctgaggcgccccgccccgccccgccccgcgcggccctccccgcccggccctgccctgccctgctccctgccggcggctgcgggcgcttcctagtccgctcgggcggccgcccaggcgaggtgcggcctccgcacaggccggggggcgtaggcgcgcggggcccgccatggctgcgtcggagctctacacaaagtttgccagggtttggatacctgatccagaggaagtctggaagtcagcagagctgctcaaagattataagccaggagataaagtcctcctgcttcacctcgaggaaggaaaggatttggaataccatctagatccaaagaccaaggagctgcctcacttacgaaatcctgacatacttgttggtgaaaatgacctcacagccctcagctatcttcatgagcctgctgtgctccataatctcagagtccgctttattgattccaaacttatttatacgtattgtggtatagtcctagtagctataaatccctatgaacagctgcctatttatggagaagatattattaatgcatacagtggtcagaacatgggtgatatggatccacatatctttgcagtagctgaagaagcttacaagcaaatggccagagatgaacgaaatcagtccatcatcgtaagtggagagtctggggcaggaaaaacagtctcagctaagtatgccatgcgatactttgcaactgtgagtggttctgccagtgaggccaatgtggaggaaaaggtcttgacctccaaccccatcatggagtccattggaaatgctaaaacaaccaggaatgataatagcagccgttttgggaagtatattgagattggttttgataagagatatcgaatcattggtgccaatatgagaacttatcttttagagaaatccagagtggtattccaggcagaagaggagagaaactatcatatcttctatcagctttgtgcctcagcaaagttacctgaatttaaaatgctacgattaggaaatgcagataactttaattacacaaaacaaggaggcagtcctgtgattgaaggagtggatgatgcaaaggagatggcacatactaggcaggcctgcactttgctaggaattagtgaatctcatcaaatgggaattttccgaatacttgctggcatccttcacttaggcaatgttggatttacatcccgagatgcagacagctgcacaatacctcccaagcatgaacctctctgcatcttctgtgacctcatgggtgtggactatgaggagatgtgtcactggctctgccatcggaaactggctactgccacagagacatacatcaagcccatctccaagctgcaggccacgaatgcccgcgatgctttggccaaacacatctatgccaagctctttaactggattgtagataatgtcaatcaggctctccattctgctgtcaaacagcactcttttattggtgtgctagacatttacggatttgaaacatttgagataaatagttttgaacagttttgcataaattatgcaaatgaaaaactacagcaacaattcaatatgcatgtcttcaaattggagcaagaagaatatatgaaggaacaaattccatggacactcatagatttttatgataatcagccttgtattaatcttatagaatcaaaactaggcattctagatttactggatgaggaatgcaagatgcctaaaggcacagatgacacctgggcccaaaaattgtacaacacacatttgaacaaatgtgcactctttgaaaagcctcgtctatcaaacaaagctttcatcatccaacattttgctgacaaagtggaataccagtgtgaaggatttctcgaaaagaataaagacaccgtttttgaagaacaaattaaagttcttaaatcaagcaagtttaagatgctaccagaactatttcaagatgatgagaaggccatcagtccaacttcagccacctcctcagggcgcacacccctcacacgaactcctgcaaagcccaccaaaggcagaccaggccaaatggccaaagagcacaagaaaacagtggggcatcagttcagaaactccctgcacctgcttatggagacactcaatgccactacccctcactatgtgcgctgtatcaagcctaatgacttcaagctcccattcacgtttgatgagaagagggcagtgcagcagctgagagcatgtggtgtcctggaaaccatccgaatcagtgcggccggtttcccctcacggtggacttaccaagaatttttcagccgctaccgtgtcctaatgaagcagaaagatgtgctgagtgacagaaagcaaacatgcaagaatgtgttagagaaactgatactggacaaggacaaataccagtttggtaagacaaagatctttttccgtgccggtcaagtggcctatctagaaaaattgagagctgacaaactgagagctgcctgcatccggatccagaagaccatccgagggtggctgctgagaaagaagtacctacgcatgcggaaggcagccatcaccatgcagagatacgtgcggggctaccaggcccgatgctatgctaagtttctgcgcagaaccaaggcagcaaccatcattcaaaagtactggcgcatgtatgtggtccgcaggaggtacaagattagacgagctgccactattgttcttcagtcttacttgcgaggcttcttggccagaaataggtatcgcaagatactccgtgggcacaaagcagtcatcattcagaagcgagtccggggctggctggcccgcacacactacaagaggagcatgcatgccatcatctaccttcagtgctgcttcaggcggatgatggccaagcgtgagctaaagaagctcaaaatcgaggctcgctcagtggagcgctataagaagctgcgcatcggcatggagaacaagatcatgcagctgcagcgcaaagttgatgagcagaacaaagactacaaatgccttgtggagaaactaaccaatctggaaggaatatacaactctgagactgagaaactacgaagtgacttagaacgtcttcaactaagtgaagaggaagcgaaagttgccactgggcgggtccttagtctgcaggaggaaattgccaagctccggaaagacctggagcaaactcgttcagagaaaaaatgcattgaggaacatgcagatcgatacaaacaagaaacagagcagctggtatcaaatctgaaggaagaaaatactttgctgaagcaagaaaaagaagccctcaatcaccgcatcgtgcagcaggctaaggagatgacagaaactatggagaagaagttagtagaagaaacgaaacaactggaactcgaccttaatgatgaaaggctgagatatcagaaccttctgaatgagttcagtcgcctggaagaaagatatgatgacctcaaggaagagatgacccttatggtgcatgtgcctaagcctggacacaagagaacagactccacccacagcagcaacgagtctgaatatatctttagctctgaaattgcagaaatggaagacattccatcaaggacagaggaaccaagtgagaagaaggtacctctggacatgtcattgttccttaagctccagaagcgggtcacagagctggagcaggagaagcaggtgatgcaggatgagctggaccgcaaggaggagcaggtgctccgcagcaaggccaaggaagaagaaagaccacaaattagaggtgcagaactggaatatgagtcactcaagcgtcaagaactagaatcagaaaacaaaaaactgaagaatgagctaaatgagttgcgcaaggccctcagtgagaaaagtgccccagaggtgaccgccccaggtgcacctgcctaccgtgtcctcatggagcagctgacctctgtgagcgaggagcttgatgtccgcaaggaggaagtcctcatcttaaggtctcaactggtgagccagaaagaggccatccaacccaaggatgacaagaatacaatgacagattccacaatacttttggaagatgtacaaaaaatgaaagataaaggtgaaatagcacaagcatacattggtttgaaagaaacaaatagatcatctgctctggattaccatgagttgaatgaggatggagagctgtggctggtttatgaagggttaaaacaagccaataggctcctggaatcccagctgcagtcacagaagaggagccatgagaatgaggccgaggccctccgtggggagatccagagcctgaaggaggagaacaaccgacagcagcagctgctggcccagaacctgcagctgcccccagaggcccgcattgaggccagcctgcagcacgagatcacccggctgaccaacgaaaacttggatttgatggaacaacttgaaaaacaggataagacggtccgtaaactgaaaaaacaactgaaagtatttgccaaaaaaattggcgaactagaagtgggccagatggagaacatatccccaggacagatcattgatgaacccatccgaccagtcaacattcccaggaaagaaaaggatttccaagggatgctggaatacaagaaggaggatgagcaaaaacttgttaagaacctgattctggaactgaagccacgtggtgtagcagtcaatttgattccaggattaccggcatatatcctgttcatgtgtgttcgacatgctgactacctgaatgatgatcagaaagtaaggtcgttgctaacatcaacaattaacagcatcaaaaaagtattgaagaaaagaggtgatgattttgaaaccgtctccttctggctctctaacacatgccgatttttgcactgcttgaaacagtacagtggagaagagggctttatgaagcacaacacatctcgccagaatgaacactgcctcaccaattttgacctggctgagtatcggcaggtgctgagtgacttggccattcagatctaccagcagctcgtgcgggtgttagagaacatccttcagccaatgattgtctcaggcatgctggaacatgaaacgattcagggcgtgtctggggtgaagcccacagggttgagaaagcgaacctccagtatcgccgatgagggcacctacacactggactccatcctccggcagctcaactccttccactcggtcatgtgtcagcatggcatggaccctgaactgatcaagcaggtggtcaagcagatgttctacatcataggggccatcaccctgaacaaccttctcctgcggaaggacatgtgctcctggagtaaaggcatgcagatcaggtacaatgtcagtcaactggaagaatggctgcgtgacaagaatctgatgaatagtggggctaaagaaaccctggaacctctcattcaggctgctcaacttttgcaagtgaaaaagaaaacagatgatgatgcagaagccatttgttctatgtgcaatgctttaactactgcccagattgtgaaagtgttgaatttgtatactccagttaatgagtttgaagaaagagtctctgtgtcgttcattcgtactatacagatgcgtttacgagacaggaaagactctccccagctgctcatggatgctaaacacatctttcctgtcacctttcctttcaacccatcttccctcgcactagaaaccatccagattccagccagcctcggcctgggctttatttcacgggtctgaaagtgatgtccaggcaaaaattgacaatacatttcttgcccgaaataagaacccattatttccagtgagttactgaaaatacatttttaaagagaaagtactgattatctcccaaatgagaagtcattaactggaaatctccctagaatactttcatcactttggaaacaaagataggctctttcgtgctgtgttatctttatagcaacactcatccttaaccaactaggtaccgtgagtttacatacaggagaatgatggaaggaagggaggaaggaaaggaggagaaaaatgtgtcttcagctggcagcatttattttaaatccttagcactgagtttgaatggtataaaaagtataacttccatagatgagctgttgttaggaaggcaccaaagaacctcctctgcactaaacaggagaatggaaagaaaagtctccattgagtacatatcatgtcagtttagtaatcaattatgttgatattgttaaactggttcaaagaaataaactggcaatatgtaaagtaattcctcatttgtgtcactatgatatagagatattaaaggaatgttggtttgcta

SEQ ID NO: 450 - protein, 1855 aa, Homo sapien
MAASELYTKFARVWIPDPEEVWKSAELLKDYKPGDKVLLLHLEEGKDLEYHLDPKTKELPHLRNPDILVGENDLTALSYLHEPAVLHNLRVRFIDSKLIYTYCGIVLVAINPYEQLPIYGEDIINAYSGQNMGDMDPHIFAVAEEAYKQMARDERNQSIIVSGESGAGKTVSAKYAMRYFATVSGSASEANVEEKVLTSNPIMESIGNAKTTRNDNSSRFGKYIEIGFDKRYRIIGANMRTYLLEKSRVVFQAEEERNYHIFYQLCASAKLPEFKMLRLGNADNFNYTKQGGSPVIEGVDDAKEMAHTRQACTLLGISESHQMGIFRILAGILHLGNVGFTSRDADSCTIPPKHEPLCIFCDLMGVDYEEMCHWLCHRKLATATETYIKPISKLQATNARDALAKHIYAKLFNWIVDNVNQALHSAVKQHSFIGVLDIYGFETFEINSFEQFCINYANEKLQQQFNMHVFKLEQEEYMKEQIPWTLIDFYDNQPCINLIESKLGILDLLDEECKMPKGTDDTWAQKLYNTHLNKCALFEKPRLSNKAFIIQHFADKVEYQCEGFLEKNKDTVFEEQIKVLKSSKFKMLPELFQDDEKAISPTSATSSGRTPLTRTPAKPTKGRPGQMAKEHKKTVGHQFRNSLHLLMETLNATTPHYVRCIKPNDFKLPFTFDEKRAVQQLRACGVLETIRISAAGFPSRWTYQEFFSRYRVLMKQKDVLSDRKQTCKNVLEKLILDKDKYQFGKTKIFFRAGQVAYLEKLRADKLRAACIRIQKTIRGWLLRKKYLRMRKAAITMQRYVRGYQARCYAKFLRRTKAATIIQKYWRMYVVRRRYKIRRAATIVLQSYLRGFLARNRYRKILRGHKAVIIQKRVRGWLARTHYKRSMHAIIYLQCCFRRMMAKRELKKLKIEARSVERYKKLRIGMENKIMQLQRKVDEQNKDYKCLVEKLTNLEGIYNSETEKLRSDLERLQLSEEEAKVATGRVLSLQEEIAKLRKDLEQTRSEKKCIEEHADRYKQETEQLVSNLKEENTLLKQEKEALNHRIVQQAKEMTETMEKKLVEETKQLELDLNDERLRYQNLLNEFSRLEERYDDLKEEMTLMVHVPKPGHKRTDSTHSSNESEYIFSSEIAEMEDIPSRTEEPSEKKVPLDMSLFLKLQKRVTELEQEKQVMQDELDRKEEQVLRSKAKEEERPQIRGAELEYESLKRQELESENKKLKNELNELRKALSEKSAPEVTAPGAPAYRVLMEQLTSVSEELDVRKEEVLILRSQLVSQKEAIQPKDDKNTMTDSTILLEDVQKMKDKGEIAQAYIGLKETNRSSALDYHELNEDGELWLVYEGLKQANRLLESQLQSQKRSHENEAEALRGEIQSLKEENNRQQQLLAQNLQLPPEARIEASLQHEITRLTNENLDLMEQLEKQDKTVRKLKKQLKVFAKKIGELEVGQMENISPGQIIDEPIRPVNIPRKEKDFQGMLEYKKEDEQKLVKNLILELKPRGVAVNLIPGLPAYILFMCVRHADYLNDDQKVRSLLTSTINSIKKVLKKRGDDFETVSFWLSNTCRFLHCLKQYSGEEGFMKHNTSRQNEHCLTNFDLAEYRQVLSDLAIQIYQQLVRVLENILQPMIVSGMLEHETIQGVSGVKPTGLRKRTSSIADEGTYTLDSILRQLNSFHSVMCQHGMDPELIKQVVKQMFYIIGAITLNNLLLRKDMCSWSKGMQIRYNVSQLEEWLRDKNLMNSGAKETLEPLIQAAQLLQVKKKTDDDAEAICSMCNALTTAQIVKVLNLYTPVNEFEERVSVSFIRTIQMRLRDRKDSPQLLMDAKHIFPVTFPFNPSSLALETIQIPASLGLGFISRV

SEQ ID NO: 451 - DNA, 1070 bp, Homo sapien
atgttttgttgcttaggatatgaatggctgagcggaggctgtaaaacctggcactctgcttgggttatcaatactctggctgaccatcgtcatcgtgggactgactttggtggaagtccttggttacttatcattactgtgtttctgagaagttataaatttgccatctccctctgcacaacttacctttgtgtgtctttcctgaagactatcttcccgtctcaaaatggacatgatggatccacggatgtacagcagagagccaggaggtccaaccgccgtagacaggaaggaattaaaattgtcctggaagacatctttactttatggagacaggtggaaaccaaagttcgagctaaaatccgtaagatgaaggtgacaacaaaagtcaaccgtcatgacaaaatcaatggaaagaggaagaccgccaaagaacatctgaggaaactaagcatgaaagaacgtgagcacggagaaaaggagaggcaggtgtcagaggcagaggaaaatgggaaattggatatgaaagaaatacacacctacatggaaatgtttcaacgtgcgcaagcgttgcggcggcgggcagaggactactacagatgcaaaatcaccccttctgcaagaaagcctctttgcaaccgggtcagaatggcggcagtggagcatcgtcattcttcaggattgccctactggccctacctcacagctgaaactttaaaaaacaggatgggccaccagccacctcctccaactcaacaacattctataattgataactccctgagcctcaagacaccttccgagtgtctgctcactccccttccaccctcagctctaccctcagcggatgataatctcaagacacctgcggagtgtctgctctatccccttccaccctcagcggatgataatctcaagacacctcccgagtgtctgctcactccccttccaccctcagctccaccctcagcggatgataatctcaagacacctcccgagtgtgtctgctcactccccttccaccctcagcggatgataatctcaagaaactaaggaagaataaataaata

SEQ ID NO: 452 - protein, 350 aa, Homo sapien
MFCCLGYEWLSGGCKTWHSAWVINTLADHRHRGTDFGGSPWLLIITVFLRSYKFAISLCTTYLCVSFLKTIFPSQNGHDGSTDVQQRARRSNRRRQEGIKIVLEDIFTLWRQVETKVRAKIRKMKVTTKVNRHDKINGKRKTAKEHLRKLSMKEREHGEKERQVSEAEENGKLDMKEIHTYMEMFQRAQALRRRAEDYYRCKITPSARKPLCNRVRMAAVEHRHSSGLPYWPYLTAETLKNRMGHQPPPPTQQHSIIDNSLSLKTPSECLLTPLPPSALPSADDNLKTPAECLLYPLPPSADDNLKTPPECLLTPLPPSAPPSADDNLKTPPECVCSLPFHPQRMIISRN

SEQ ID NO: 453 - DNA, 2930 bp, Homo sapien
gaattccggtttcttcctaaaaaatgtctgatggccgctttctcggtcggcaccgccatgaatgccagcagttactctgcagagatgacggagcccaagtcggtgtgtgtctcggtggatgaggtggtgtccagcaacatggaggccactgagacggacctgctgaatggacatctgaaaaaagtagataataacctcacggaagcccagcgcttctcctccttgcctcggagggcagctgtgaacattgaattcagggacctttcctattcggttcctgaaggaccctggtggaggaagaaaggatacaagaccctcctgaaaggaatttccgggaagttcaatagtggtgagttggtggccattatgggtccttccggggccgggaagtccacgctgatgaacatcctggctggatacagggagacgggcatgaagggggccgtcctcatcaacggcctgccccgggacctgcgctgcttccggaaggtgtcctgctacatcatgcaggatgacatgctgctgccgcatctcactgtgcaggaggccatgatggtgtcggcacatctgaagcttcaggagaaggatgaaggcagaagggaaatggtcaaggagatactgacagcgctgggcttgctgtcttgcgccaacacgcggaccgggagcctgtcaggtggtcagcgcaagcgcctggccatcgcgctggagctggtgaacaaccctccagtcatgttcttcgatgagcccaccagcggcctggacagcgcctcctgcttccaggtggtctcgctgatgaaagggctcgctcaagggggtcgctccatcatttgcaccatccaccagcccagcgccaaactcttcgagctgttcgaccagctttacgtcctgagtcaaggacaatgtgtgtaccggggaaaagtctgcaatcttgtgccatatttgagggatttgggtctgaactgcccaacctaccacaacccagcagattttgtcatggaggttgcatccggcgagtacggtgatcagaacagtcggctggtgagagcggttcgggagggcatgtgtgactcagaccacaagagagacctcgggggtgatgccgaggtgaacccttttctttggcaccgcccctctgaagaggtaaagcagacaaaacgattaaaggggttgagaaaggactcctcgtccatggaaggctgccacagcttctctgccagctgcctcacgcagttctgcatcctcttcaagaggaccttcctcagcatcatgagggactcggtcctgacacacctgcgcatcacctcgcacattgggatcggcctcctcattggcctgctgtacttggggatcgggaacgaaaccaagaaggtcttgagcaactccggcttcctcttcttctccatgctgttcctcatgttcgcggccctcatgcctactgttctgacatttcccctggagatgggagtctttcttcgggaacacctgaactactggtacagcctgaaggcctactacctggccaagaccatggcagacgtgccctttcagatcatgttcccagtggcctactgcagcatcgtgtactggatgacgtcgcagccgtccgacgccgtgcgctttgtgctgtttgccgcgctgggcaccatgacctccctggtggcacagtccctgggcctgctgatcggagccgcctccacgtccctgcaggtggccactttcgtgggcccagtgacagccatcccggtgctcctgttctcggggttcttcgtcagcttcgacaccatccccacgtacctacagtggatgtcctacatctcctatgtcaggtatgggttcgaaggggtcatcctctccatctatggcttagaccgggaagatctgcactgtgacatcgacgagacgtgccacttccagaagtcggaggccatcctgcgggagctggacgtggaaaatgccaagctgtacctggacttcatcgtactcgggattttcttcatctccctccgcctcattgcctatttggtcctcaggtacaaaatccgggcagagaggtaaaacacctgaatgccaggaaacaggaagattagacactgtggccgagggcacgtctagaatcgaggaggcaagcctgtgcccgaccgacgacacagagactcttctgatccaacccctagaaccgcgttgggtttgtgggtgtctcgtgctcagccactctgcccagctgggttggatcttctctccattcccctttctagctttaactaggaagatgtaggcagattggtggttttttttttttttttaacatacagaattttaaataccacaactggggcagaatttaaagctgcaacacagctggtgatgagaggcttcctcagtccagtcgctccttagcaccaggcaccgtgggtcctggatggggaactgcaagcagcctctcagctgatggctgcacagtcagatgtctggtggcagagagtccgagcatggagcgattccattttatgactgttgtttttcacattttcatctttctaaggtgtgtctcttttccaatgagaagtcatttttgcaagccaaaagtcgatcaatcgcattcattttaagaaattatacctttttagtacttgctgaagaatgattcagggtaaatcacatactttgtttagagaggcgaggggtttaacccgagtcacccagctggtctcatacatagacagcacttgtgaaggattgaatgcaggttccaggtggagggaagacgtggacaccatctccactgagccatgcagacatttttaaaagctatacacaaaattgtgagaagacattggccaactctttcaaagtctttctttttccacgtgcttcttattttaagcgaaatatattgtttgtttcttcctaaaaaaaaaaaaaaaaaaaaa

SEQ ID NO: 454 - protein, 674 aa, Homo sapien
MAAFSVGTAMNASSYSAEMTEPKSVCVSVDEVVSSNMEATETDLLNGHLKKVDNNLTEAQRFSSLPRRAAVNIEFRDLSYSVPEGPWWRKKGYKTLLKGISGKFNSGELVAIMGPSGAGKSTLMNILAGYRETGMKGAVLINGLPRDLRCFRKVSCYIMQDDMLLPHLTVQEAMMVSAHLKLQEKDEGRREMVKEILTALGLLSCANTRTGSLSGGQRKRLAIALELVNNPPVMFFDEPTSGLDSASCFQVVSLMKGLAQGGRSIICTIHQPSAKLFELFDQLYVLSQGQCVYRGKVCNLVPYLRDLGLNCPTYHNPADFVMEVASGEYGDQNSRLVRAVREGMCDSDHKRDLGGDAEVNPFLWHRPSEEVKQTKRLKGLRKDSSSMEGCHSFSASCLTQFCILFKRTFLSIMRDSVLTHLRITSHIGIGLLIGLLYLGIGNETKKVLSNSGFLFFSMLFLMFAALMPTVLTFPLEMGVFLREHLNYWYSLKAYYLAKTMADVPFQIMFPVAYCSIVYWMTSQPSDAVRFVLFAALGTMTSLVAQSLGLLIGAASTSLQVATFVGPVTAIPVLLFSGFFVSFDTIPTYLQWMSYISYVRYGFEGVILSIYGLDREDLHCDIDETCHFQKSEAILRELDVENAKLYLDFIVLGIFFISLRLIAYLVLRYKIRAER

SEQ ID NO: 455 - DNA, 7642 bp, Homo sapien
cggaccctgcgcgcccccgtcccggctcccggccggctcgggggagaaggcgcccgaggggaggcgccggacagatcgcgtttcggaggcggcgcaggtgctgtaaactgcaaaccataatcctgtcttaatactgcaaacaaatcatagtggaactaaggggaacttaatttactgtttccaggttaactaaggtctcagctgtaaaccaaaagtgagaggagacattaagattttcattcttaccgggttgtcttcttcctgaagagcaatggagccgcttttacttggaagaggactaatcgtatatctaatgttcctcctgttaaaattctcaaaagcaattgaaataccatcttcagttcaacaggttccaacaatcataaaacagtcaaaagtccaagttgcctttcccttcgatgagtattttcaaattgaatgtgaagctaaaggaaatccagaaccaacattttcgtggactaaggatggcaaccctttttatttcactgaccatcggataattccatcgaacaattcaggaacattcaggatcccaaacgaggggcacatatctcactttcaagggaaataccgctgctttgcttcaaataaactgggaatcgctatgtcagaagaaatagaatttatagttccaagtgttccaaaattcccaaaagaaaaaattgaccctcttgaagtggaggagggagatccaattgtcctcccatgcaatcctcccaaaggcctcccacctttacacatttattggatgaatattgaattagaacacatcgaacaagatgaaagagtatacatgagccaaaagggagatctatacttcgcaaacgtggaagaaaaggacagtcgcaatgactactgttgctttgctgcatttccaagattaaggactattgtacagaaaatgccaatgaaactaacagttaacagtttaaagcatgctaatgactcaagttcatccacagaaattggttccaaggcaaattccatcaagcaaagaaaacccaaactgctgttgcctcccactgagagtggcagtgagtcttcaattaccatcctcaaaggggaaatcttgctgcttgagtgttttgctgaaggcttgccaactccacaggttgattggaacaaaattggtggtgacttaccaaaggggagagaagcaaaagaaaattatggcaagactttgaagatagagaatgtctcctaccaggacaaaggaaattatcgctgcacagccagcaatttcttgggaacagccactcacgattttcacgttatagtagaagagcctcctcgctggacaaagaagcctcagagtgctgtgtatagcaccggaagcaatggcatcttgttatgtgaggctgaaggagaacctcaacccacaatcaagtggagagtcaatggctccccagttgacaatcatccatttgctggtgatgttgtcttccccagggaaatcagttttaccaaccttcaaccaaatcatactgctgtgtaccagtgtgaagcctcaaatgtccatggaactatccttgccaatgccaatattgatgttgtggatgtccgtccattgatacaaaccaaagatggagaaaattacgctacagtggttgggtacagtgctttcttacattgcgagttctttgcttcacctgaggcagtcgtgtcctggcagaaggtggaagaagtgaaacccctggagggcaggcggtatcatatctatgaaaatggcacattgcagatcaacagaaccaccgaagaagatgctgggtcttactcatgttgggtagaaaatgctataggaaaaactgcagtcacagccaatttggatattagaaatgctacaaaacttagagtttctcctaagaatcctcgtatccccaaattgcatatgcttgaattacattgtgaaagcaaatgtgactcacatttgaaacacagtttgaagttgtcctggagtaaagatggagaagcctttgaaattaatggcacagaagatggcaggataattattgatggagctaatttgaccatatctaatgtaactttagaggaccaaggtatttactgctgttcagctcatactgctctagacagtgctgccgatataactcaagtaactgttcttgatgttccggatccaccagaaaaccttcacttgtctgaaagacagaacaggagtgttcggctgacctgggaagctggagctgaccacaacagcaatattagcgagtatattgttgaatttgaaggaaacaaagaagagcctggaaggtgggaggaactgaccagagtccaaggaaagaaaaccacagttatcttacctttggctccatttgtgagataccagttcagggtcatagccgtgaacgaagtagggagaagtcagcctagccagccgtcagaccatcatgaaacaccaccagcagctccagataggaatccacaaaacataagggttcaagcctctcaacccaaggaaatgattataaagtgggagcctttgaaatccatggagcagaatggaccaggcctagagtacagagtgacctggaagccacagggagccccagtggagtgggaagaagaaacagtcacaaaccacacattgcgggtgatgacgcctgctgtctatgccccttatgatgtcaaggtccaggctatcaatcaactaggatctgggcctgaccctcagtcagtgactctctattctggagaagactatcctgatacagctccagtgatccatggggtggacgttataaacagtacattagttaaagttacctggtcaacagttccaaaggacagagtacatggacgtctgaaaggctatcagataaattggtggaaaacaaaaagtctgttggatggaagaacacatcccaaagaagtgaacattctaagattttcaggacaaagaaactctggaatggttccttccttagatgcctttagtgaatttcatttaacagtcttagcctataactctaaaggagctggtcctgaaagtgagccttatatatttcaaacaccagaaggagtacctgaacagccaacttttctaaaggtcatcaaagttgataaagacactgccactttatcttggggactacctaagaaattaaatggaaacttaactggctatcttttgcaatatcagataataaatgacacctacgagattggagaattaaatgatattaacattacaactccatcaaagcccagctggcacctctcaaacctgaatgcaactaccaagtacaaattctacttgagggcttgcacttcacagggctgtggaaaaccgatcacggaggaaagctccaccttaggagaagggagtaaaggtatcgggaagatatcaggagtaaatcttactcaaaagactcacccagtagaggtatttgagccgggagctgaacatatagttcgcctaatgactaagaattggggcgataacgatagcatttttcaagatgtaattgagacaagagggagagaatatgctggtttatatgatgacatctccactcaaggctggtttattggactgatgtgtgcgattgctcttctcacactactattattaactgtttgctttgtgaagaggaatagaggtggaaagtactcagttaaagaaaaggaagatttgcatccagacccagaaattcagtcagtaaaagatgaaacctttggtgaatacagtgacagtgatgaaaagcctctcaaaggaagccttcggtcccttaatagggatatgcagcctactgaaagtgctgacagcttagtcgaatacggagagggagaccatggtctcttcagtgaagatggatcatttattggtgcctacgctggatctaaggagaagggatctgttgaaagcaatggaagttctacagcaacttttccccttcgggcataaacacaacatatgtaagcaacgctactggttcaccccaaccttccatatttatctgttcaaaggagcaagaactttcatataggaatagaaacatgctggccgaagatttcatccagaagtcaacatcctgcaattatgttgaaaagagtagtactttcttcaaaatataaaatgccaagcacttcaggcctatgttttgcttatattgttttcaggtgctcaaaatgcaaaacacaaaacaaatcctgcatttagatacacctcaactaaatccaaagtccccattcagtatattccatatttgcctgattttactattcggtgtgtttgcatagatgttgctacttggtgggtttttctccgtatgcacattggtatacagtctctgagaactggcttggtgactttgcttcactacaggttaaaagaccataagcaaactggttatttaaaatgtaaaaaggaatatgaaagtcttattaaaacacttcattgaaaatatacagtctaaatttattatttaaattttactagcaaaagtcttaggtgaacaatcaactagtatttgttgagctcctatttgcccagagatggtcatatttaaacagaagtatacgtttttcagtttcaacatgaatttttttatttctgtcagttatgacatccacgagcatcactttttgtgtctgtttttttttttttcttggactaaattcaactgcatggaagcggtggtcagaaggttgttttatacgagaacaggcagaaagtgcccattgttcaggattctaatagctacatctacttaatatcttcatttctaaattgactgcttttacctttttctcatgtttatataatggtatgcttgcatatatttcatgaatacattgtacatattatgttaatatttacacaatttaaaatatagatgtgttttattttgaagtgagaaaatgaacattaacaggcatgtttgtacagctagaatatattagtaagatactgtttttcgtcattccagagctacaactaataacacgaggttccaaagctgaagactttgtataaagtatttgggttttgttcttgtattgctttctttcaacagtttcaaaataaaatatcatacaaatattgagggaaatgttttcatatttttcaaaataggtttttattgttgaatgtacatctaccccagcccctcaaaagaaaaactgtttacatagaaattcctacacatacgtttgcgtatatgttattttaaacatctttgtggtgagaattttttccccgatattctccttctgtcaaagtcagaacaaattcagggaatttattttctggcagttgtgctccagtccttttaaaattgtacatgaacatgttttagaaacaatatggaggatgatgcatacatgtcggtcaagttcagcgctcgacattttatggaaagatttttttaaccttaccacgaaatacttaactactgtttaagtgaattgacttatttcactttagtttttgaactgtgattattggtatactgttatatcctcaacttggatttatggtaaccccttttagttcatggagaccaaaatttggggtatttataatagtcagcgcaggaatgcacatggaatatctacttgtccttttgaacctcacgagtcatccagaatgtatagacaggaaaagcatgtcttatttaaaactgtaatttatgggctcaggatctgaccgcagtcccgggagtaagcatttcaaagggggaaggcagtgtggtccctaccctgtgtgaatgtgaggatgtagacatccatcagtgcaactcgagctccatcctcctccgatttctaaggttccagttttctggagggacagtcatcatgttttgatttatctgggagaaaactgtggtgcacagcttgtgaggagggcaaggttgtgacgttcgagcttagttctggtgttattctgtctcctcttctttgtcatcagccaaaacgtggtttttaaagagagtcatgcaggttagaaataatgtcaaaaatatttaggaatttaataacctttaagtcagaaactaaaacaaatactgaaatattagctcttcctacacttcgtgttcccctttagctgcctgaaaatcaagattgctcctactcagatcttctgagtggctaaaacttatggatatgaaaaatgagattgaatgatgactatgctttgctatcattgttacctttcctcaatactatttggcaactactgggactcttcagcacaaaaggaatagatctatgattgaccctgattttaattgtgaaattatatgattcatatattttatgaatcagaataaccttcaaataaaataaatctaagtcggttaaaatggatttcatgattttccctcagaaaatgagtaacggagtcccacggcgtgcaatggtaattataaattggtgatgcttgtttgcaaattgcccactcgtgataagtcaacagccaatatttaaaactttgttcgttactggctttaccctaactttctctagtctactgtcaatatcattttaatgtaattgattgtatatagtctcaagaatggttggtgggcatgagttcctagagaactgtccaagggttgggaaaatccaaattctcttcctggctccagcactgattttgtacataaacattaggcaggttgcttaacctttttatttcaaactctctcaactctaaagtgctaataataatctcagttaccttatctttgtcacagggtgttcttttttatgaagaaaaatttgaaaatgataaaagctaagatgccttctaacttcataagcaaacctttaactaattatgtatctgaaagtcacccccacataccaactcaacttttttcctgtgaacacataaatatatttttatagaaaaacaaatctacataaaataaatctactgtttagtgagcagtatgacttgtacatgccattgaaaattattaatcagaagaaaattaagcagggtctttgctatacaaaagtgttttccactaattttgcatgcgtatttataagaaaaatgtgaatttggtggttttattctatcggtataaaggcatcgatattttagatgcacccgtgtttgtaaaaatgtagagcacaatggaattatgctggaagtctcaaataatatttttttcctattttatactcatggaagagataagctaaagaggggacaataatgagaaatgttggtgtgcttttctaagcatttaaaacataattgccaattgaaaccctaaatatgtttacataccattaagatatgattcatgtaacaatgttaaattaattataatgggattgggtttgttatctgtggtagtatatatcctagtgttcctatagtgaaataagtagggttcagccaaagctttctttgttttgtaccttaaattgttcgattacgtcatcaaaagagatgaaaggtatgtagaacaggttcacgtgattacctttttcttttggcttggattaatattcatagtagaactttataaaacgtgtttgtattgtaggtggtgtttgtattatgcttatgactatgtatggtttgaaaatattttcattatacatgaaattcaactttccaaataaaagttctacttcatgt

SEQ ID NO: 456 - protein, 1224 aa, Homo sapien
MEPLLLGRGLIVYLMFLLLKFSKAIEIPSSVQQVPTIIKQSKVQVAFPFDEYFQIECEAKGNPEPTFSWTKDGNPFYFTDHRIIPSNNSGTFRIPNEGHISHFQGKYRCFASNKLGIAMSEEIEFIVPSVPKFPKEKIDPLEVEEGDPIVLPCNPPKGLPPLHIYWMNIELEHIEQDERVYMSQKGDLYFANVEEKDSRNDYCCFAAFPRLRTIVQKMPMKLTVNSLKHANDSSSSTEIGSKANSIKQRKPKLLLPPTESGSESSITILKGEILLLECFAEGLPTPQVDWNKIGGDLPKGREAKENYGKTLKIENVSYQDKGNYRCTASNFLGTATHDFHVIVEEPPRWTKKPQSAVYSTGSNGILLCEAEGEPQPTIKWRVNGSPVDNHPFAGDVVFPREISFTNLQPNHTAVYQCEASNVHGTILANANIDVVDVRPLIQTKDGENYATVVGYSAFLHCEFFASPEAVVSWQKVEEVKPLEGRRYHIYENGTLQINRTTEEDAGSYSCWVENAIGKTAVTANLDIRNATKLRVSPKNPRIPKLHMLELHCESKCDSHLKHSLKLSWSKDGEAFEINGTEDGRIIIDGANLTISNVTLEDQGIYCCSAHTALDSAADITQVTVLDVPDPPENLHLSERQNRSVRLTWEAGADHNSNISEYIVEFEGNKEEPGRWEELTRVQGKKTTVILPLAPFVRYQFRVIAVNEVGRSQPSQPSDHHETPPAAPDRNPQNIRVQASQPKEMIIKWEPLKSMEQNGPGLEYRVTWKPQGAPVEWEEETVTNHTLRVMTPAVYAPYDVKVQAINQLGSGPDPQSVTLYSGEDYPDTAPVIHGVDVINSTLVKVTWSTVPKDRVHGRLKGYQINWWKTKSLLDGRTHPKEVNILRFSGQRNSGMVPSLDAFSEFHLTVLAYNSKGAGPESEPYIFQTPEGVPEQPTFLKVIKVDKDTATLSWGLPKKLNGNLTGYLLQYQIINDTYEIGELNDINITTPSKPSWHLSNLNATTKYKFYLRACTSQGCGKPITEESSTLGEGSKGIGKISGVNLTQKTHPVEVFEPGAEHIVRLMTKNWGDNDSIFQDVIETRGREYAGLYDDISTQGWFIGLMCAIALLTLLLLTVCFVKRNRGGKYSVKEKEDLHPDPEIQSVKDETFGEYSDSDEKPLKGSLRSLNRDMQPTESADSLVEYGEGDHGLFSEDGSFIGAYAGSKEKGSVESNGSSTATFPLRA

SEQ ID NO: 457 - DNA, 1901 bp, Homo sapien
gggcaggaagacggcgctgcccggaggagcggggcgggcgggcgcgcgggggagcgggcggcgggcgggagccaggcccgggcgggggcgggggcggcggggccagaagaggcggcgggccgcgctccggccggtctgcggcgttggccttggctttggctttggcggcggcggtggagaagatgctgcagtccctggccggcagctcgtgcgtgcgcctggtggagcggcaccgctcggcctggtgcttcggcttcctggtgctgggctacttgctctacctggtcttcggcgcagtggtcttctcctcggtggagctgccctatgaggacctgctgcgccaggagctgcgcaagctgaagcgacgcttcttggaggagcacgagtgcctgtctgagcagcagctggagcagttcctgggccgggtgctggaggccagcaactacggcgtgtcggtgctcagcaacgcctcgggcaactggaactgggacttcacctccgcgctcttcttcgccagcaccgtgctctccaccacaggttatggccacaccgtgcccttgtcagatggaggtaaggccttctgcatcatctactccgtcattggcattcccttcaccctcctgttcctgacggctgtggtccagcgcatcaccgtgcacgtcacccgcaggccggtcctctacttccacatccgctggggcttctccaagcaggtggtggccatcgtccatgccgtgctccttgggtttgtcactgtgtcctgcttcttcttcatcccggccgctgtcttctcagtcctggaggatgactggaacttcctggaatccttttatttttgttttatttccctgagcaccattggcctgggggattatgtgcctggggaaggctacaatcaaaaattcagagagctctataagattgggatcacgtgttacctgctacttggccttattgccatgttggtagttctggaaaccttctgtgaactccatgagctgaaaaaattcagaaaaatgttctatgtgaagaaggacaaggacgaggatcaggtgcacatcatagagcatgaccaactgtccttctcctcgatcacagaccaggcagctggcatgaaagaggaccagaagcaaaatgagccttttgtggccacccagtcatctgcctgcgtggatggccctgcaaaccattgagcgtaggatttgttgcattatgctagagcaccagggtcagggtgcaaggaagaggcttaagtatgttcatttttatcagaatgcaaaagcgaaaattatgtcactttaagaaatagctactgtttgcaatgtcttattaaaaaacaacaaaaaaagacacatggaacaaagaagctgtgaccccagcaggatgtctaatatgtgaggaaatgagatgtccacctaaaattcatatgtgacaaaattatctcgaccttacataggaggagaatacttgaagcagtatgctgctgtggttagaagcagattttatacttttaactggaaactttggggtttgcatttagatcatttagctgatggctaaatagcaaaatttatatttagaagcaaaaaaaaaaagcatagagatgtgttttataaataggtttatgtgtactggtttgcatgtacccacccaaaatgattatttttggagaatctaagtcaaactcactatttataatgcataggtaaccattaactatgtacatataaagtataaatatgtttatattctgtacatatggtttaggtcaccagatcctagtgtagttctgaaactaagactatagatattttgtttcttttgatttctctttatactaaagaatccagagttgctacaataaaataaggggaataataaacttgagagtgaataaccat

SEQ ID NO: 458 - protein, 336 aa, Homo sapien
MLQSLAGSSCVRLVERHRSAWCFGFLVLGYLLYLVFGAVVFSSVELPYEDLLRQELRKLKRRFLEEHECLSEQQLEQFLGRVLEASNYGVSVLSNASGNWNWDFTSALFFASTVLSTTGYGHTVPLSDGGKAFCIIYSVIGIPFTLLFLTAVVQRITVHVTRRPVLYFHIRWGFSKQVVAIVHAVLLGFVTVSCFFFIPAAVFSVLEDDWNFLESFYFCFISLSTIGLGDYVPGEGYNQKFRELYKIGITCYLLLGLIAMLVVLETFCELHELKKFRKMFYVKKDKDEDQVHIIEHDQLSFSSITDQAAGMKEDQKQNEPFVATQSSACVDGPANH

SEQ ID NO: 459 - DNA, 3324 bp, Homo sapien
gcagagcaccgcgccttagccgcgaagttctagttcttgctgccggtcctaacgtcccgcagtcttcgccagccagccgtcccgcatgcgcgtttgggcggcgtggagcctgctgccatgaagtcagcgagagctaagacaccccggaaacctaccgtgaaaaaagggtcccaaacgaaccttaaagacccagttggggtatactgtagggtgcgcccactgggctttcctgatcaagagtgttgcatagaagtgatcaataatacaactgttcagcttcatactcctgagggctacagactcaaccgaaatggagactataaggagactcagtattcatttaaacaagtatttggcactcacaccacccagaaggaactctttgatgttgtggctaatcccttggtcaatgacctcattcatggcaaaaatggtcttctttttacatatggtgtgacgggaagtggaaaaactcacacaatgactggttctccaggggaaggagggctgcttcctcgttgtttggacatgatctttaacagtatagggtcatttcaagctaaacgatatgttttcaaatctaatgataggaatagtatggatatacagtgtgaggttgatgccttattagaacgtcagaaaagagaagctatgcccaatccaaagacttcttctagcaaacgacaagtagatccagagtttgcagatatgataactgtacaagaattctgcaaagcagaagaggttgatgaagatagtgtctatggtgtatttgtctcttatattgaaatatataataattacatatatgatctattggaagaggtgccgtttgatcccataaaacccaaacctccacaatctaaattgcttcgtgaagataagaaccataacatgtatgttgcaggatgtacagaagttgaagtgaaatctactgaggaggcttttgaagttttctggagaggccagaaaaagagacgtattgctaatacccatttgaatcgtgagtccagccgttcccatagcgtgttcaacattaaattagttcaggctcccttggatgcagatggagacaatgtcttacaggaaaaagaacaaatcactataagtcagttgtccttggtagatcttgctggaagtgaaagaactaaccggaccagagcagaagggaacagattacgtgaagctggtaatattaatcagtcactaatgacgctaagaacatgtatggatgtcctaagagagaaccaaatgtatggaactaacaagatggttccatatcgagattcaaagttaacccatctgttcaagaactactttgatggggaaggaaaagtgcggatgatcgtgtgtgtgaaccccaaggctgaagattatgaagaaaacttgcaagtcatgagatttgcggaagtgactcaagaagttgaagtagcaagacctgtagacaaggcaatatgtggtttaacgcctgggaggagatacagaaaccagcctcgaggtccagttggaaatgaaccattggttactgacgtggttttgcagagttttccacctttgccgtcatgcgaaattttggatatcaacgatgagcagacacttccaaggctgattgaagccttagagaaacgacataacttacgacaaatgatgattgatgagtttaacaaacaatctaatgcttttaaagctttgttacaagaatttgacaatgctgttttaagtaaagaaaaccacatgcaagggaaactaaatgaaaaggagaagatgatctcaggacagaaattggaaatagaacgactggaaaagaaaaacaaaactttagaatataagattgagattttagagaaaacaactactatctatgaggaagataaacgcaatttgcaacaggaacttgaaactcagaaccagaaacttcagcgacagttttctgacaaacgcagattagaagccaggttgcaaggcatggtgacagaaacgacaatgaagtgggagaaagaatgtgagcgtagagtggcagccaaacagctggagatgcagaataaactctgggttaaagatgaaaagctgaaacaactgaaggctattgttactgaacctaaaactgagaagccagagagaccctctcgggagcgagatcgagaaaaagttactcaaagatctgtttctccatcacctgtgcctttactctttcaacctgatcagaacgcaccaccaattcgtctccgacacagacgatcacgctctgcaggagacagatgggtagatcataagcccgcctctaacatgcaaactgaaacagtcatgcagccacatgtccctcatgccatcacagtatctgttgcaaatgaaaaggcactagctaagtgtgagaagtacatgctgacccaccaggaactagcctccgatggggagattgaaactaaactaattaagggtgatatttataaaacaaggggtggtggacaatctgttcagtttactgatattgagactttaaagcaagaatcaccaaatggtagtcgaaaacgaagatcttccacagtagcacctgcccaaccagatggtgcagagtctgaatggaccgatgtagaaacaaggtgttctgtggctgtggagatgagagcaggatcccagctgggacctggatatcagcatcacgcacaacccaagcgcaaaaagccatgaactgacagtcccagtactgaaagaacattttcatttgtgtggatgatttctcgaaagccatgccagaagcagtcttccaggtcatcttgtagaactccagctttgttgaaaatcacggacctcagctacatcatacactgacccagagcaaagctttccctatggttccaaagacaactagtattcaacaaaccttgtatagtatatgttttgccatatttaatattaatagcagaggaagactccttttttcatcactgtatgaattttttataatgtttttttaaaatatatttcatgtatacttataaactaattcacacaagtgtttgtcttagatgattaaggaagactatatctagatcatgtctgattttttattgtgacttctccagccctggtctgaatttcttaaggttttataaacaaatgctgctatttattagctgcaagaatgcactttagaactatttgacaattcagactttcaaaataaagatgtaaatgactggccaataataaccattttaggaaggtgttttgaattctgtatgtatatattcactttctgacatttagatatgccaaaagaattaaaatcaaaagcactaagaaataaaaaaaaaaaaaaaaaaa

SEQ ID NO: 460 - protein, 960 aa, Homo sapien
MKSARAKTPRKPTVKKGSQTNLKDPVGVYCRVRPLGFPDQECCIEVINNTTVQLHTPEGYRLNRNGDYKETQYSFKQVFGTHTTQKELFDVVANPLVNDLIHGKNGLLFTYGVTGSGKTHTMTGSPGEGGLLPRCLDMIFNSIGSFQAKRYVFKSNDRNSMDIQCEVDALLERQKREAMPNPKTSSSKRQVDPEFADMITVQEFCKAEEVDEDSVYGVFVSYIEIYNNYIYDLLEEVPFDPIKPKPPQSKLLREDKNHNMYVAGCTEVEVKSTEEAFEVFWRGQKKRRIANTHLNRESSRSHSVFNIKLVQAPLDADGDNVLQEKEQITISQLSLVDLAGSERTNRTRAEGNRLREAGNINQSLMTLRTCMDVLRENQMYGTNKMVPYRDSKLTHLFKNYFDGEGKVRMIVCVNPKAEDYEENLQVMRFAEVTQEVEVARPVDKAICGLTPGRRYRNQPRGPVGNEPLVTDVVLQSFPPLPSCEILDINDEQTLPRLIEALEKRHNLRQMMIDEFNKQSNAFKALLQEFDNAVLSKENHMQGKLNEKEKMISGQKLEIERLEKKNKTLEYKIEILEKTTTIYEEDKRNLQQELETQNQKLQRQFSDKRRLEARLQGMVTETTMKWEKECERRVAAKQLEMQNKLWVKDEKLKQLKAIVTEPKTEKPERPSRERDREKVTQRSVSPSPVPLSSNYIAQISNGQQLMSQPQLHRRSNSCSSISVASCISEWEQKIPTYNTPLKVTSIARRRQQEPGQSKTCIVSDRRRGMYWTEGREVVPTFRNEIEIEEDHCGRLLFQPDQNAPPIRLRHRRSRSAGDRWVDHKPASNMQTETVMQPHVPHAITVSVANEKALAKCEKYMLTHQELASDGEIETKLIKGDIYKTRGGGQSVQFTDIETLKQESPNGSRKRRSSTVAPAQPDGAESEWTDVETRCSVAVEMRAGSQLGPGYQHHAQPKRKKP

SEQ ID NO: 461 - DNA, 2020 bp, Homo sapien
gtctaaacgggaacagccctggctgagggagctgcagcgcagcagagtatctgacggcgccaggttgcgtaggtgcggcacgaggagttttcccggcagcgaggaggtcctgagcagcatggcccggaggagcgccttccctgccgccgcgctctggctctggagcatcctcctgtgcctgctggcactgcgggcggaggccgggccgccgcaggaggagagcctgtacctatggatcgatgctcaccaggcaagagtactcataggatttgaagaagatatcctgattgtttcagaggggaaaatggcaccttttacacatgatttcagaaaagcgcaacagagaatgccagctattcctgtcaatatccattccatgaattttacctggcaagctgcagggcaggcagaatacttctatgaattcctgtccttgcgctccctggataaaggcatcatggcagatccaaccgtcaatgtccctctgctgggaacagtgcctcacaaggcatcagttgttcaagttggtttcccatgtcttggaaaacaggatggggtggcagcatttgaagtggatgtgattgttatgaattctgaaggcaacaccattctccaaacacctcaaaatgctatcttctttaaaacatgtctacaagctgagtgcccaggcgggtgccgaaatggaggcttttgtaatgaaagacgcatctgcgagtgtcctgatgggttccacggacctcactgtgagaaagccctttgtaccccacgatgtatgaatggtggactttgtgtgactcctggtttctgcatctgcccacctggattctatggagtgaactgtgacaaagcaaactgctcaaccacctgctttaatggagggacctgtttctaccctggaaaatgtatttgccctccaggactagagggagagcagtgtgaaatcagcaaatgcccacaaccctgtcgaaatggaggtaaatgcattggtaaaagcaaatgtaagtgttccaaaggttaccagggagacctctgttcaaagcctgtctgcgagcctggctgtggtgcacatggaacctgccatgaacccaacaaatgccaatgtcaagaaggttggcatggaagacactgcaataaaaggtacgaagccagcctcatacatgccctgaggccagcaggcgcccagctcaggcagcacacgccttcacttaaaaaggccgaggagcggcgggatccacctgaatccaattacatctggtgaactccgacatctgaaacgttttaagttacaccaagttcatagcctttgttaacctttcatgtgttgaatgttcaaataatgttcattacacttaagaatactggcctgaattttattagcttcattataaatcactgagctgatatttactcttccttttaagttttctaagtacgtctgtagcatgatggtatagattttcttgtttcagtgctttgggacagattttatattatgtcaattgatcaggttaaaattttcagtgtgtagttggcagatattttcaaaattacaatgcatttatggtgtctgggggcaggggaacatcagaaaggttaaattgggcaaaaatgcgtaagtcacaagaatttggatggtgcagttaatgttgaagttacagcatttcagattttattgtcagatatttagatgtttgttacatttttaaaaattgctcttaatttttaaactctcaatacaatatattttgaccttaccattattccagagattcagtattaaaaaaaaaaaaaattacactgtggtagtggcatttaaacaatataatatattctaaacacaatgaaatagggaatataatgtatgaactttttgcattggcttgaagcaatataatatattgtaaacaaaacacagctcttacctaataaacattttatactgtttgtatgtataaaataaaggtgctgctttagttttcaaaaaaaaaaaaaaaaaaaaaaaaaaaaaaaaaaaaaaaaa

SEQ ID NO: 462 - protein, 379 aa, Homo sapien
MARRSAFPAAALWLWSILLCLLALRAEAGPPQEESLYLWIDAHQARVLIGFEEDILIVSEGKMAPFTHDFRKAQQRMPAIPVNIHSMNFTWQAAGQAEYFYEFLSLRSLDKGIMADPTVNVPLLGTVPHKASVVQVGFPCLGKQDGVAAFEVDVIVMNSEGNTILQTPQNAIFFKTCLQAECPGGCRNGGFCNERRICECPDGFHGPHCEKALCTPRCMNGGLCVTPGFCICPPGFYGVNCDKANCSTTCFNGGTCFYPGKCICPPGLEGEQCEISKCPQPCRNGGKCIGKSKCKCSKGYQGDLCSKPVCEPGCGAHGTCHEPNKCQCQEGWHGRHCNKRYEASLIHALRPAGAQLRQHTPSLKKAEERRDPPESNYIW

SEQ ID NO: 463 - DNA, 2738 bp, Homo sapien
  Unsure 29, 38-39, 47, 55, 59, 66-69, 75, 77, 79, 82, 84-85, 99, 101,104, 115, 117, 2055, 2232: Unknown base
gaattcccgcgcctgggggtgcgcatgancattcgcgnntccctctncggcccgngggnctgggannnncacagncntnctncnnggaacctcacgaancngancttttgggttncngccccgccccgccccgccccgccccgccggcggcggaggcagcgagcgcgagagcccagcggagtcgctgggagcctgaggcaccgagacacaaaggcaggcgggatgcgggagcaggcaaagggaaagcgaaagccgcgcgcccggccggtgactgggtgaaggcgccgcgcagctttcccgacgccggctgtaccgggacctcctggtcgagcctggcgcgccgcagccatggccatcgctcacctggccacggagtacgtgttctcggatttcttgctgaaggagcccacggagcccaagttcaaggggctgcgactggagctggctgtggacaagatggtcacgtgcattgcggtggggctgcccctgctgctcatctcgctggccttcgcgcaggagatctcgattggtacacagataagctgtttctctccaagttctttctcctggcgtcaggctgcctttgtggattcatattgctgggcggctgttcagcagaagaactcactgcagagcgagtctggaaacctcccactgtggctgcataagtttttcccctacatcctgctgctctttgcgatcctcctgtacctgcccccgctgttctggcgtttcgcagctgctcctcatatttgctcagacttgaagtttatcatggaagaacttgacaaagtttacaaccgtgcaattaaggctgcaaagagtgcgcgtgaccttgacatgagagatggagcctgctcagttccaggtgttaccgagaacttagggcaaagtttgtgggaggtatctgaaagccacttcaagtacccaattgtggagcagtacttgaagacaaagaaaaattctaataatttaatcatcaagtacattagctgccgcctgctgacactcatcattatactgttagcgtgtatctacctgggctattacttcagcctctcctcactctcagacgagtttgtgtgcagcatcaaatcagggatcctgagaaacgacagcaccgtgcccgatcagtttcagtgcaaactcattgccgtgggcatcttccagttgctcagtgtcattaaccttgtggtttatgtcctgctggctcccgtggttgtctacacgctgtttgttccattccgacagaagacagatgttctcaaagtgtacgaaatcctccccacttttgatgttctgcatttcaaatctgaagggtacaacgatttgagcctctacaatctcttcttggaggaaaatataagtgaggtcaagtcatacaagtgtcttaaggtactggagaatattaagagcagtggtcaggggatcgacccaatgctactcctgacaaaccttggcatgatcaagatggatgttgttgatggcaaaactcccatgtctgcagagatgagagaggagcaggggaaccagacggcagagctccaagacagtgaaactaaagcaaataatggagagaagaatgcccgacagagacttctggattcttcttgctgatgatttttttccttgagctgtaaatctgtgacttctgcgacatgggatttaatttggctaaagcacccctgttggtttcacagctggtttgcaataaatggttcttggtggagatactgagcatgtcttattgagtccctaatggaaatggtgatcaacaaaaggttatggaagaatggtttatgaacttcccataggaagcacctgagagatagtaaactgcagcaagtaactatgtgtaaagtcctcatcaaatgaaaagcagaaagacaaagaacaattagtcaagagcagtagccctgtcagagcctcggagcaatacctttctgtacccgtggtgagacaagacccagagctactggaaaacaagcactttggaagatttgttttgttttcatggaataataatatgtcaggatataatttaacgtgagtttnttatgtgcccttaaagactgttagacaagaaaagcattcactggctaataatccataggtcgacctatgtcctaagttaggtgtaaggtccgatgccttggcccacactcgagctctctttacattgttagttgtcaaccttggctgatggaaatcccgtaaccactatttgttgcnctgtgccttgaagggcagcaggcccaagtgctgctctgactgaaaactgagttaacaagacgaaatctaaaggatattcacagtgacttcaattcaggaagaatgcttccaaaagagcccagtggggaaatctgacatcacagaagacattaattcagtcactttcaaagagtttgtctacaggcggtttctctgttatcaaaggcatttgaaataggattttacttaaacaataatggaacacaggagtatttaaagtgaagaacactttgcctgaatgtgatcagggcacataagtgacattggcgtgcttcatatggcgtgcttggagccagaaaaacttagcggtttattttgtttatatttaagcacagctttaaaaaattcattatcgtttattcagtgtccgaattgaggccatttgggaagaaaattctagcactggtggagaattatagaataaagattataaatggttggataaaaaaaaaaaaaaaaaaaaaaaa

SEQ ID NO: 464 - protein, 422 aa, Homo sapien
  Unsure 29, 38-39, 47, 55, 59, 66-69, 75, 77, 79, 82, 84-85, 99, 101,104, 115, 117, 2055, 2232: Unknown amino acid
MAIAHLATEYVFSDFLLKEPTEPKFKGLRLELAVDKMVTCIAVGLPLLLISLAFAQEISIGTQISCFSPSSFSWRQAAFVDSYCWAAVQQKNSLQSESGNLPLWLHKFFPYILLLFAILLYLPPLFWRFAAAPHICSDLKFIMEELDKVYNRAIKAAKSARDLDMRDGACSVPGVTENLGQSLWEVSESHFKYPIVEQYLKTKKNSNNLIIKYISCRLLTLIIILLACIYLGYYFSLSSLSDEFVCSIKSGILRNDSTVPDQFQCKLIAVGIFQLLSVINLVVYVLLAPVVVYTLFVPFRQKTDVLKVYEILPTFDVLHFKSEGYNDLSLYNLFLEENISEVKSYKCLKVLENIKSSGQGIDPMLLLTNLGMIKMDVVDGKTPMSAEMREEQGNQTAELQDSETKANNGEKNARQRLLDSSC

SEQ ID NO: 465 - DNA, 5677 bp, Homo sapien
cagaagtcaaatagttaaagcaaattctagatacatggtagagaccaggagaaaatatgaataactttcttctaaacaaggagctcagtggataaaccatacctctagattccttgcttccattttcccagaaacaagatgaggaagagaaagatcagtgtgtgtcaacaaacttgggccttattatgcaagaactttcttaaaaaatggagaatgaaaagagagtccttaatggaatggctgaattcattgctcctactactttgtttgtatatatatcctcatagtcatcaagtaaatgatttttcttcactgcttaccatggacctgggacgggtagatacatttaatgaatccagattttctgttgtatacacacctgtcaccaacacgacccaacagataatgaataaagtagcctctactcccttcctggcaggtaaagaggtcttgggactgccagatgaggaaagtattaaagaattcacagcaaattatcctgaagaaatagtaagagtcacctttactaatacatactcatatcatttgaagttcttgctaggacatggaatgccagcaaagaaggagcacaaggaccatacagctcattgttatgaaacaaatgaagatgtttactgtgaagtttcagtattttggaaggaaggttttgtggctcttcaagctgccattaatgctgctattatagaaatcacaacaaatcactcagtgatggaggagctgatgtcagttactggaaaaaatatgaagatgcattccttcattggtcaatcaggagttataactgatttgtaccttttttcctgcattatttcattttcctcattcatttactatgcatctgttaatgtcacaagagagaggaaaaggatgaaggccttgatgacaatgatgggtcttcgggattcagcgttctggctctcctggggtttgctctatgctggtttcatcttcattatggcccttttcttggcacttgttataagatctacccagtttatcattttgtctggcttcatggtagtcttcagcctctttctcctgtatggattatctttggtagctttggctttcttaatgagcatcttggtaaagaaatctttcctcaccggcctggtcgtgttcctcctcactgtcttttgggggtgtctggggttcacatcactgtacagacaccttcctgcatccttggagtggattttaagcttgcttagtccctttgccttcatgcttggaatggcccagcttttacacttggactatgatttgaattctaatgcatttcctcatccatcggacggctcaaatctcattgtagcaacaaatttcatgttggcatttgacacttgcctctatctggcattggcgatttactttgaaaaaattttgccaaatgaatatggacatcgacgtccacctttgtttttcctgaagtcctcattttggtctcaaacacaaaagactgatcacgtggcccttgaagatgaaatggatgccgatccttcatttcatgactcttttgaacaagcgcctccagaattccaagggaaagaagccatcagaatcagaaatgttacaaaagaatataaaggaaagcctgataaaatagaagccttgaaagatctggtatttgacatttacgaaggccaaatcactgcaatacttggtcacagtggagctggaaagtcaacactgctaaacattcttagtgggttgtctgttcccaccaaaggttcagtcaccatctataacaataagctttcagaaatggctgacctagaaaatctcagcaagctgaccggagtttgtccacaatccaatgtgcaatttgacttcctcactgtaagagaaaacctcagactctttgctaaaataaaagggattctgccacaagaagtggataaagagattttcctgttggatgaaccaactgctggattggatcccttttcaagacaccaagtatggaaccttctgaaagaacgcaaaacagaccgcgtgatcctcttcagtacccagttcatggatgaggccgacatcctggcggacaggaaagtatttctctcccaagggaagctaaagtgcgcgggctcttctttgtttctaaagaagaaatgggggattggatatcacttaagcttgcagttaaatgaaatatgtgttgaggaaaacataacatcacttgttaaacagcacatccctgatgccaaattatcagccaaaagcgaaggaaaacttatttatacattacccttagaaagaacaaataaatttccagaactttacaaggatcttgatagctatcctgacctaggaattgagaattatggtgtttccatgacaactttgaatgaagtattcctgaagctagaaggaaaatctacaattaatgaatcggacattgctattttgggagaagtacaagcggaaaaagctgacgacactgaaaggcttgttgagatggaacaagtcctctcttcacttaacaagatgagaaagacaataggtggtgtggctctctggcgacagcaaatctgcgcaattgcaagggttcgcttgttaaagttaaagcatgaaagaaaagctcttttagcactgctattaattctaatggctggattttgccctcttcttgtggagtataccatggtgaaaatatatcaaaacagttacacctgggaactttctcctcatttgtatttccttgctcctggacaacaaccacatgaccctctcactcaactactgatcatcaataaaacaggggcaagcattgatgactttatacagtctgtggagcaccagaacatagctttagaagtggatgcatttggaactagaaatggcacagatgacccatcttataatggagccatcacagtgtgttgtaatgaaaagaattacagcttttcgttagcatgcaatgccaaaagattgaattgcttcccagttcttatggacattgttagtaatgggctacttggaatggttaaaccatcagtacatatccgaactgaaagaagtacatttttggagaatggacaggacaatccaatcggattcctggcatatatcatgttctggctggttttaacatcgagttgcccaccttacattgccatgagcagcatcgatgattataagaacagagctcggtcccagctacggatttccggactctccccttctgcttactggtttgggcaggcgctggtggatgtttccctgtacttcttggtcttcgtttttatatatttaatgagctacatttcaaacttcgaagacatgctacttacaataattcatattattcaaatcccatgtgctgttggttattccttttccctcatcttcatgacatacgtgatttccttcatctttcgcaaggggagaaaaaatagtggcatttggtcattttgtttctatgttgtcactgtattctctgtggctggatttgcgttcagtatcttcgaaagtgatattccatttatcttcacttttttaataccacctgccacaatgattggctgtttgttcttatcttctcatcttctcttttcttctctcttttctgaagaacgaatggatgtacagccatttctggtattcctaattcctttccttcattttatcatttttctttttactcttcgatgtctggaatggaagtttggaaagaaatcaatgagaaaggatcctttctttagaatttctccaagaagtagtgatgtgtgtcaaaatccagaagaaccagaaggagaggatgaagatgttcagatggaaagagtgagaacagcaaatgccttgaattctactaattttgatgagaagccagtcatcattgccagctgtctacgcaaggagtatgcagggaagaggaaaggctgtttttccaagaggaagaataagatagccacgagaaatgtctccttctgtgttagaaaaggtgaagttttaggattattaggacacaatggagctggtaaaagcacatccattaaggtgataactggagacacaaaaccaactgctggacaagtgctactgaaagggagcggtggaggggatgccctggagttcctggggtactgccctcaggagaacgcgctgtggcccaacctgacagtgaggcagcacctggaggtgtacgccgccgtgaaagggctgaggaaaggggatgctgaggttgccatcacacggttagtggatgcgctcaagctgcaggaccagctgaagtctccggtgaagaccttgtcagagggaataaagagaaagctgtgctttgtcctgagcatactggggaacccgtcagtggtgcttctggatgagccgtcgaccgggatggaccccgaggggcagcagcaaatgtggcaggccatccgggccacctttagaaacacggaaaggggtgccctcctaaccacccactacatggcagaggctgaggccgtgtgtgaccgagtggccatcatggtatctgggaggttgagatgtatcggttccatccaacacctgaaaagcaaatttggcaaagattacctgctggagatgaaggtgaagaacctggcacaagtggagcccctccatgcagagatcctgaggcttttcccccaggctgctcggcaggaaaggtactcctctctgatggtttataagttgccagtggaagatgtgcaacctttagcccaagctttcttcaaattagagaaggttaaacagagctttgacctagaggagtacagcctctcacagtctaccctggagcaggttttcctggagctctccaaggagcaggagctgggtgattttgaggaggattttgatccctcagtgaagtggaagctcctcccccaggaagagccttaaaaccccaaattctgtgttcctgtttaaacccgtggttttttttaaatacatttatttttatagcagcaatgttctatttttagaaactatattataagtacagaaatggttctccgtgtggtgggaggaggaggttcgggtgctgggtaagtgccatgtcagtgtggacagaggcatttgactaagccaacctcctctcacagcctctgtatctctgcaggccatactggttccattgttctgtataatactgaataaataaatttacttttacatgatcgtataagtttctagataagataaacaaattctgtttaaatttttttaataaaaatcttaaaacactttttttctaacctagactgagaaattcatgtttacttttctaggtgtatgatactttgtaaagttgatactttcctaagaatttaacatgtcatatttttgaaatagatttaagtgtgcttcttattgctaaaaatactaaatgtcatgggtcatagtatctgatatcaatatcgttgataacatatccacaggtaacaccatgatgtaggcataaatggaaaacaaaaaccctactatttcaaatatattgtacttttttatttctgtaagccaactgtgtgccattttcactggacttttaaatctagactttagtgatgtctacattgtaaatgatcttttgtggatatttgtcacttggtttcagaaagttcacaaatgtagcaacagctcacatgactgagtaggtagaaaatgtgaaataaatctcatatatatagttttg

SEQ ID NO: 466 - protein, 1581 aa, Homo sapien
MRKRKISVCQQTWALLCKNFLKKWRMKRESLMEWLNSLLLLLCLYIYPHSHQVNDFSSLLTMDLGRVDTFNESRFSVVYTPVTNTTQQIMNKVASTPFLAGKEVLGLPDEESIKEFTANYPEEIVRVTFTNTYSYHLKFLLGHGMPAKKEHKDHTAHCYETNEDVYCEVSVFWKEGFVALQAAINAAIIEITTNHSVMEELMSVTGKNMKMHSFIGQSGVITDLYLFSCIISFSSFIYYASVNVTRERKRMKALMTMMGLRDSAFWLSWGLLYAGFIFIMALFLALVIRSTQFIILSGFMVVFSLFLLYGLSLVALAFLMSILVKKSFLTGLVVFLLTVFWGCLGFTSLYRHLPASLEWILSLLSPFAFMLGMAQLLHLDYDLNSNAFPHPSDGSNLIVATNFMLAFDTCLYLALAIYFEKILPNEYGHRRPPLFFLKSSFWSQTQKTDHVALEDEMDADPSFHDSFEQAPPEFQGKEAIRIRNVTKEYKGKPDKIEALKDLVFDIYEGQITAILGHSGAGKSTLLNILSGLSVPTKGSVTIYNNKLSEMADLENLSKLTGVCPQSNVQFDFLTVRENLRLFAKIKGILPQEVDKEIFLLDEPTAGLDPFSRHQVWNLLKERKTDRVILFSTQFMDEADILADRKVFLSQGKLKCAGSSLFLKKKWGIGYHLSLQLNEICVEENITSLVKQHIPDAKLSAKSEGKLIYTLPLERTNKFPELYKDLDSYPDLGIENYGVSMTTLNEVFLKLEGKSTINESDIAILGEVQAEKADDTERLVEMEQVLSSLNKMRKTIGGVALWRQQICAIARVRLLKLKHERKALLALLLILMAGFCPLLVEYTMVKIYQNSYTWELSPHLYFLAPGQQPHDPLTQLLIINKTGASIDDFIQSVEHQNIALEVDAFGTRNGTDDPSYNGAITVCCNEKNYSFSLACNAKRLNCFPVLMDIVSNGLLGMVKPSVHIRTERSTFLENGQDNPIGFLAYIMFWLVLTSSCPPYIAMSSIDDYKNRARSQLRISGLSPSAYWFGQALVDVSLYFLVFVFIYLMSYISNFEDMLLTIIHIIQIPCAVGYSFSLIFMTYVISFIFRKGRKNSGIWSFCFYVVTVFSVAGFAFSIFESDIPFIFTFLIPPATMIGCLFLSSHLLFSSLFSEERMDVQPFLVFLIPFLHFIIFLFTLRCLEWKFGKKSMRKDPFFRISPRSSDVCQNPEEPEGEDEDVQMERVRTANALNSTNFDEKPVIIASCLRKEYAGKRKGCFSKRKNKIATRNVSFCVRKGEVLGLLGHNGAGKSTSIKVITGDTKPTAGQVLLKGSGGGDALEFLGYCPQENALWPNLTVRQHLEVYAAVKGLRKGDAEVAITRLVDALKLQDQLKSPVKTLSEGIKRKLCFVLSILGNPSVVLLDEPSTGMDPEGQQQMWQAIRATFRNTERGALLTTHYMAEAEAVCDRVAIMVSGRLRCIGSIQHLKSKFGKDYLLEMKVKNLAQVEPLHAEILRLFPQAARQERYSSLMVYKLPVEDVQPLAQAFFKLEKVKQSFDLEEYSLSQSTLEQVFLELSKEQELGDFEEDFDPSVKWKLLPQEEP

SEQ ID NO: 467 - DNA, 1512 bp, Homo sapien
aggcggacaaaacccgattgttcctgggccctttccccatcgcgcctgggcctgctccccagcccggggcaggggcgggggccagtgtggtgacacacgctgtagctgtctccccggctggctggctcgctctctcctggggacacagaggtcggcaggcagcacacagagggacctacgggcagctgttccttcccccgactcaagaatccccggaggcccggaggcctgcagcaggagcggccatgaagaagctgatggtggtgctgagtctgattgctgcagcctgggcagaggagcagaataagttggtgcatggcggaccctgcgacaagacatctcacccctaccaagctgccctctacacctcgggccacttgctctgtggtggggtccttatccatccactgtgggtcctcacagctgcccactgcaaaaaaccgaatcttcaggtcttcctggggaagcataaccttcggcaaagggagagttcccaggagcagagttctgttgtccgggctgtgatccaccctgactatgatgccgccagccatgaccaggacatcatgctgttgcgcctggcacgcccagccaaactctctgaactcatccagccccttcccctggagagggactgctcagccaacaccaccagctgccacatcctgggctggggcaagacagcagatggtgatttccctgacaccatccagtgtgcatacatccacctggtgtcccgtgaggagtgtgagcatgcctaccctggccagatcacccagaacatgttgtgtgctggggatgagaagtacgggaaggattcctgccagggtgattctgggggtccgctggtatgtggagaccacctccgaggccttgtgtcatggggtaacatcccctgtggatcaaaggagaagccaggagtctacaccaacgtctgcagatacacgaactggatccaaaaaaccattcaggccaagtgaccctgacatgtgacatctacctcccgacctaccaccccactggctggttccagaacgtctctcacctagaccttgcctcccctcctctcctgcccagctctgaccctgatgcttaataaacgcagcgacgtgagggtcctgattctccctggttttaccccagctccatccttgcatcactggggaggacgtgatgagtgaggacttgggtcctcggtcttacccccaccactaagagaatacaggaaaatcccttctaggcatctcctctccccaacccttccacacgtttgatttcttcctgcagaggcccagccacgtgtctggaatcccagctccgctgcttactgtcggtgtccccttgggatgtacctttcttcactgcagatttctcacctgtaagatgaagataaggatgatacagtctccataaggcagtggctgttggaaagatttaaggtttcacacctatgacatacatggaatagcacctgggccaccatgcactcaataaagaatgaattttattatg

SEQ ID NO: 468 - protein, 244 aa, Homo sapien
MKKLMVVLSLIAAAWAEEQNKLVHGGPCDKTSHPYQAALYTSGHLLCGGVLIHPLWVLTAAHCKKPNLQVFLGKHNLRQRESSQEQSSVVRAVIHPDYDAASHDQDIMLLRLARPAKLSELIQPLPLERDCSANTTSCHILGWGKTADGDFPDTIQCAYIHLVSREECEHAYPGQITQNMLCAGDEKYGKDSCQGDSGGPLVCGDHLRGLVSWGNIPCGSKEKPGVYTNVCRYTNWIQKTIQAK

SEQ ID NO: 469 - DNA, 1709 bp, Homo sapien
ggtacctcctgccagcacctcttgggtttgctgagaactcacgggctccagctacctggccatgaccaccacatttctgcaaacttcttcctccacctttgggggtggctcaacccgagggggttccctcctggctgggggaggtggctttggtggggggagtctctctgggggaggtggaagccgaagtatctcagcttcttctgctaggtttgtctcttcagggtcaggaggaggatatgggggtggcatgagggtctgtggctttggtggaggggctggtagtgttttcggtggaggctttggagggggcgttggtgggggttttggtggtggctttggtggtggcgatggtggtctcctctctggcaatgagaaaattaccatgcagaacctcaatgaccgcctggcctcctacctggacaaggtacgtgccctggaggaggccaatgctgacctggaggtgaagatccatgactggtaccagaagcagaccccagccagcccagaatgcgactacagccaatacttcaagaccattgaagagctccgggacaagatcatggccaccaccatcgacaactcccgggtcatcctggagatcgacaatgccaggctggctgcggacgacttcaggctcaagtatgagaatgagctggccctgcgccagggcgttgaggctgacatcaacggcttgcgccgagtcctggatgagctgaccctggccaggactgacctggagatgcagatcgagggcctgaatgaggagctagcctacctgaagaagaaccacgaagaggagatgaaggagttcagcagccagctggccggccaggtcaatgtggagatggacgcagcaccgggtgtggacctgacccgtgtgctggcagagatgagggagcagtacgaggccatggcggagaagaaccgccgggatgtcgaggcctggttcttcagcaagactgaggagctgaacaaagaggtggcctccaacacagaaatgatccagaccagcaagacggagatcacagacctgagacgcacgatgcaggagctggagatcgagctgcagtcccagctcagcatgaaagctgggctggagaactcactggccgagacagagtgccgctatgccacgcagctgcagcagatccaggggctcattggtggcctggaggcccagctgagtgagctccgatgcgagatggaggctcagaaccaggagtacaagatgctgcttgacataaagacacggctggagcaggagatcgctacttaccgcagcctgctcgagggccaggatgccaagatggctggcattggcatcagggaagcctcttcaggaggtggtggtagcagcagcaatttccacatcaatgtagaagagtcagtggatggacaggtggtttcttcccacaagagagaaatctaagtgtctattgcaggagaaacgtcccttgccactccccactctcatcaggccaagtggaggactggccagagggcctgcacatgcaaactccagtccctgccttcagagagctgaaaagggtccctcggtcttttatttcagggctttgcatgcgctctattccccctctgcctctccccaccttctttggagcaaggagatgcagctgtattgtgtaacaagctcatttgtacagtgtctgttcatgtaataaagaattacttttccttttgcaaat

SEQ ID NO: 470 - protein, 456 aa, Homo sapien
MTTTFLQTSSSTFGGGSTRGGSLLAGGGGFGGGSLSGGGGSRSISASSARFVSSGSGGGYGGGMRVCGFGGGAGSVFGGGFGGGVGGGFGGGFGGGDGGLLSGNEKITMQNLNDRLASYLDKVRALEEANADLEVKIHDWYQKQTPASPECDYSQYFKTIEELRDKIMATTIDNSRVILEIDNARLAADDFRLKYENELALRQGVEADINGLRRVLDELTLARTDLEMQIEGLNEELAYLKKNHEEEMKEFSSQLAGQVNVEMDAAPGVDLTRVLAEMREQYEAMAEKNRRDVEAWFFSKTEELNKEVASNTEMIQTSKTEITDLRRTMQELEIELQSQLSMKAGLENSLAETECRYATQLQQIQGLIGGLEAQLSELRCEMEAQNQEYKMLLDIKTRLEQEIATYRSLLEGQDAKMAGIGIREASSGGGGSSSNFHINVEESVDGQVVSSHKREI

SEQ ID NO: 471 - DNA, 3454 bp, Homo sapien
cgccaaaggaaaagccccttggatgagaggcaggcgcttcagagaagctaagaaaagcacctctccgcgcgccccacctcctccgcctcgcgctcctcctgagcagcgggcccagactgcgctccggccgcggccctcgccccgcggagccctcctaccccggcccgacgctcggcccgcgacctgccccgagccctctccatggaggcagcccgcccctccggctcctggaacggagccctctgccggctgctcctgctgaccctcgcgatcttaatatttgccagtgatgcctgcaaaaatgtgacattacatgttccctccaaactagatgccgagaaacttgttggtagagttaacctgaaagagtgctttacagctgcaaatctaattcattcaagtgatcctgacttccaaattttggaggatggttcagtctatacaacaaatactattctattgtcctcggagaagagaagttttaccatattactttccaacactgagaaccaagaaaagaagaaaatatttgtctttttggagcatcaaacaaaggtcctaaagaaaagacatactaaagaaaaagttctaaggcgcgccaagagaagatgggctccaattccttgttcgatgctagaaaactccttgggtccttttccacttttccttcaacaggttcaatctgacacggcccaaaactataccatatactattccataagaggtcctggagttgaccaagaacctcggaatttattttatgtggagagagacactggaaacttgtattgtactcgtcctgtagatcgtgagcagtatgaatcttttgagataattgcctttgcaacaactccagatgggtatactccagaacttccactgcccctaataatcaaaatagaggatgaaaatgataactacccaatttttacagaagaaacttatacttttacaatttttgaaaattgcagagtgggcactactgtgggacaagtgtgtgctactgacaaagatgagcctgacacgatgcacacacgcctgaagtactccatcattgggcaggtgccaccatcacccaccctattttctatgcatccaactacaggcgtgatcaccacaacatcatctcagctagacagagagttaattgacaagtaccagttgaaaataaaagtacaagacatggatggtcagtattttggtctacagacaacttcaacttgtatcattaacattgatgatgtaaatgaccacttgccaacatttactcgtacttcttatgtgacatcagtggaagaaaatacagttgatgtggaaatcttacgagttactgttgaggataaggacttagtgaatactgctaactggagagctaattataccattttaaagggcaatgaaaatggcaattttaaaattgtaacagatgccaaaaccaatgaaggagttctttgtgtagttaagcctttgaattatgaagaaaagcaacagatgatcttgcaaattggtgtagttaatgaagctccattttccagagaggctagtccaagatcagccatgagcacagcaacagttactgttaatgtagaagatcaggatgagggccctgagtgtaaccctccaatacagactgttcgcatgaaagaaaatgcagaagtgggaacaacaagcaatggatataaagcatatgacccagaaacaagaagtagcagtggcataaggtataagaaattaactgatccaacagggtgggtcaccattgatgaaaatacaggatcaatcaaagttttcagaagcctggatagagaggcagagaccatcaaaaatggcatatataatattacagtccttgcatcagaccaaggagggagaacatgtacggggacactgggcattatacttcaagacgtgaatgataacagcccattcatacctaaaaagacagtgatcatctgcaaacccaccatgtcatctgcggagattgttgcggttgatcctgatgagcctatccatggcccaccctttgactttagtctggagagttctacttcagaagtacagagaatgtggagactgaaagcaattaatgatacagcagcacgtctttcctatcagaatgatcctccatttggctcatatgtagtacctataacagtgagagatagacttggcatgtctagtgtcacttcattggatgttacactgtgtgactgcattaccgaaaatgactgcacacatcgtgtagatccaaggattggcggtggaggagtacaacttggaaagtgggccatccttgcaatattgttgggcatagcattgctcttttgcatcctgtttacgctggtctgtggggcttctgggacgtctaaacaaccaaaagtaattcctgatgatttagcccagcagaacctaattgtatcaaacacagaagctcctggagatgacaaagtgtattctgcgaatggcttcacaacccaaactgtgggcgcttctgctcagggagtttgtggcaccgtgggatcaggaatcaaaaacggaggtcaggagaccatcgaaatggtgaaaggaggacaccagacctcggaatcctgccggggggctggccaccatcacaccctggactcctgcaggggaggacacacggaggtggacaactgcagatacacttactcggagtggcacagttttactcagccccgtcttggtgaaaaagtgtatctgtgtaatcaagatgaaaatcacaagcatgcccaagactatgtcctgacatataactatgaaggaagaggatcggtggctgggtctgtaggttgttgcagtgaacgacaagaagaagatgggcttgaatttttggataatttggagcccaaatttaggacactagcagaagcatgcatgaagagatgagtgtgttctaataagtctctgaaagccagtggctttatgacttttaaaaaaaattacaaaccaagaattttttaaagcagaagatgctatttgtgggggtttttctctcattatttggatggaatctctttggtcaaatgcacatttacagagagacactataaacaagtacacaaatttttcaatttttacatatttttaaattacttatcttctatccaaggaggtctacagagaaattaaagtctgccttatttgttacatttgggtataatgacaacagccaatttatagtgcaataaaatgtaattaattcaagtccttattatagactatttgaagcacaacctaatggaaaattgtagagaccttgctttaacattatctccagttaattaagtgttcatgtggtgcttggaaactgttgttttcctgaacatctaaagtgtgtagactgcattcttgctattattttattcttgtaatgtgaccttttcactgtgcaaagggagatttctagccaggcattgactattacaatttcatt

SEQ ID NO: 472 - protein, 901 aa, Homo sapien
MEAARPSGSWNGALCRLLLLTLAILIFASDACKNVTLHVPSKLDAEKLVGRVNLKECFTAANLIHSSDPDFQILEDGSVYTTNTILLSSEKRSFTILLSNTENQEKKKIFVFLEHQTKVLKKRHTKEKVLRRAKRRWAPIPCSMLENSLGPFPLFLQQVQSDTAQNYTIYYSIRGPGVDQEPRNLFYVERDTGNLYCTRPVDREQYESFEIIAFATTPDGYTPELPLPLIIKIEDENDNYPIFTEETYTFTIFENCRVGTTVGQVCATDKDEPDTMHTRLKYSIIGQVPPSPTLFSMHPTTGVITTTSSQLDRELIDKYQLKIKVQDMDGQYFGLQTTSTCIINIDDVNDHLPTFTRTSYVTSVEENTVDVEILRVTVEDKDLVNTANWRANYTILKGNENGNFKIVTDAKTNEGVLCVVKPLNYEEKQQMILQIGVVNEAPFSREASPRSAMSTATVTVNVEDQDEGPECNPPIQTVRMKENAEVGTTSNGYKAYDPETRSSSGIRYKKLTDPTGWVTIDENTGSIKVFRSLDREAETIKNGIYNITVLASDQGGRTCTGTLGIILQDVNDNSPFIPKKTVIICKPTMSSAEIVAVDPDEPIHGPPFDFSLESSTSEVQRMWRLKAINDTAARLSYQNDPPFGSYVVPITVRDRLGMSSVTSLDVTLCDCITENDCTHRVDPRIGGGGVQLGKWAILAILLGIALLFCILFTLVCGASGTSKQPKVIPDDLAQQNLIVSNTEAPGDDKVYSANGFTTQTVGASAQGVCGTVGSGIKNGGQETIEMVKGGHQTSESCRGAGHHHTLDSCRGGHTEVDNCRYTYSEWHSFTQPRLGEKVYLCNQDENHKHAQDYVLTYNYEGRGSVAGSVGCCSERQEEDGLEFLDNLEPKFRTLAEACMKR

SEQ ID NO: 473 - DNA, 1572 bp, Homo sapien
attaaaaacatagaaaaatgatgtctttaagtggagaattgtggaaggattgtaacatggaccatccaaatttatggccgtatcaaatggtagctgaaaaaactatatttgagcactggtctctcttggaattagatgtttatatcaaatgagcatctcaaatgttttctgcagaaaaaaataaaaagattctaataaaatgtattctcttgtgtgccaggagaggtttcagaaacctacctcgtcttacaaatttaaacactttggagtctgtacaggtgccttatatgtaggtcattgtcacgatacacacacacgaacactccctctggactggctgcctctccatccagggcagttaactagcaaacaaggcagatctgcttcatggagcgggaggccatggcttgactctgagtgatttgggtcaaccggagtcagacgcatgtctgcacgctgcagctattatgagagtccctttgtcatttttcaccttttcatcctaagcatctttcagagattaattatttggccattaacaatgaatccaaatcatatcatactgacatcatctagacatgatttggaaggaacagcttaggacctcctgatgaggtcacattgttgtttcttttaactagacttggcaaagaaaggcaaaaattgaccagcctatctttctgctggtgctgccttaaggaggtagtttgttgaggggagggctgtagatcattacttctttctcttcaggaagtggccactttgaaccattcaaataccacattaggcaagactgtgataggccttttgtcttcaaatacaacaggcctccactgacccatccctcaaagcagaaggaccctttgaggagagtacagatgggattccacagtggggtgggtggaatggaaacctgtactagaccacccagaggttccttctaacccactggtttggtggggaactcacagtaattccaaatgtacaatcagatgtctagggtctgttttcggaagaagcaagaattatcagtggcaccctccccactgcccccagtgtaaaacaatagacattctgtgaaatgcaaagctattctttggtttttctagtagtttatctcattttaccctattcttcctttaaggaaaactcaatctttatcacagtcaattagagcgatcccaaggcatgggaccaggcctgcttgcctatgtgtgatggcaattggagatctggatttagcactggggtctcagcaccctgcaggtgtctgagactaagtgatctgccctccaggtggcgatcaccttctgctcctaggtacccccactggcaaggccaaggtctcctccacgttttttctgcaattaataatgtcatttaaaaaatgagcaaagccttatccgaatcggatatagcaactaaagtcaatacattttgcaggaggctaagtgtaagagtgtgtgtgtgtgtgtgtgtgtgcgcgtgcatgtgtgtgtgtgtgtatgtgtgtgaataagtcgacataaaaaaaaaaaaaaaaaaaaaaaaaaaaaaaaaaaaaaaaaaaaa

SEQ ID NO: 474 - protein, 30 aa, Homo sapien
MQSYSLVFLVVYLILPYSSFKENSIFITVN

SEQ ID NO: 475 - DNA, 2351 bp, Homo sapien
tgcgggcaggattcacgccgctgtgacccggaggtcctcagggggcgaagccccggcctaggcctcgcggagatgcccagctgcggtgcttgtacttgcggcgcggcggccgtccggctcatcacctcctcactcgcctccgcgcagagaggtatttctggtggtcgcattcatatgtcagttttaggaaggcttgggacatttgaaactcagattctgcaaagagctcctcttagatcctttacagaaacaccagcatactttgcctcaaaagatgggataagtaaagatggttctggagatggaaataagaaatcagcaagtgagggaagtagtaagaaatcaggctctgggaattctgggaaaggtggaaaccagctgcgctgtcctaaatgtggcgacttgtgcacacatgtagagacctttgtatcatccacccgttttgtcaagtgtgaaaagtgtcatcatttttttgttgtgctatctgaagcagactcaaagaaaagcataattaaagaacctgaatcagcagcagaagctgtaaaattggcattccaacagaaaccaccacctccccctaagaagatttataactacctcgacaagtatgttgttggccagtcatttgctaagaaggtgctttcagttgctgtgtacaatcattataagagaatatataataatatcccagctaatctgagacagcaagcagaggttgagaagcagacatcattaacaccaagagagttagaaataagaagacgggaggatgagtacagatttacaaaattgcttcagattgctggaattagcccacatggtaatgctttaggagcatcaatgcagcaacaggtaaatcaacaaatacctcaggaaaaacgaggaggtgaagtattggattcttctcatgatgacataaaacttgaaaaaagtaatattttgctgcttggaccaactgggtcaggtaaaactctgctggcacaaaccctagctaaatgccttgatgtcccttttgctatctgtgactgtacaactttgactcaggctggatatgtaggcgaagatattgaatctgtgattgcaaaactactccaagatgccaattataatgtggaaaaagcacaacaaggaattgtctttctggatgaagtagataagattggcagtgtgccaggcattcatcaattacgggatgtaggtggagaaggcgttcagcaaggcttattaaaactactagaaggcacaatagtcaatgttccagaaaagaattcccgaaagctccgtggagaaacagttcaagttgatacaacaaacatcctgtttgtggcatctggtgctttcaatggtttagacagaatcatcagcaggaggaaaaatgaaaagtatcttggatttggaacaccatctaatctgggaaaaggcagaagggctgcagctgctgcagaccttgctaatcgaagtggggaatcgaatactcaccaagacattgaagaaaaagatcggttattgcgtcatgtggaagccagagatctgattgagtttggcatgattcctgagtttgtgggacggttgcctgtggtggttccattgcatagcctagatgagaaaacacttgtacaaatattaactgagccacgaaatgctgttattcctcagtaccaggccttattcagcatggataagtgtgaactgaatgttactgaggatgctttgaaagctatagccagattggcactagaacgaaaaacaggtgcacgaggccttcggtccataatggaaaagctgttactagaaccaatgtttgaagtccctaattctgatatcgtatgtgtggaggttgacaaagaagtagtagaaggaaaaaaggaaccaggatacatccgggctccaacaaaagaatcctctgaagaggagtatgactctggagttgaagaagaaggatggccccgccaagcagatgctgcaaacagctaaactgtcatattgctgtcttgtatatacagcttttccttcttttgtttaggatcataattgtctctacagtctgatattaaaggcattggatctatcttggatatcatacatggtcagagaagcctttaggagaagaatcagatcatgtatataattgtaacatcacattgattttacggaagatgttatatggactttaatgacacaatgtttagagataaaatgtacattattttggttcagttttttaaaaaaaatatgctttaacaaaattcttaggaattcttttaagcaatgcaggtattgcgataactgtagattttacaataatgttactctacaaatgggaaaataaattctttaaaattgaatattga

SEQ ID NO: 476 - protein, 633 aa, Homo sapien
MPSCGACTCGAAAVRLITSSLASAQRGISGGRIHMSVLGRLGTFETQILQRAPLRSFTETPAYFASKDGISKDGSGDGNKKSASEGSSKKSGSGNSGKGGNQLRCPKCGDLCTHVETFVSSTRFVKCEKCHHFFVVLSEADSKKSIIKEPESAAEAVKLAFQQKPPPPPKKIYNYLDKYVVGQSFAKKVLSVAVYNHYKRIYNNIPANLRQQAEVEKQTSLTPRELEIRRREDEYRFTKLLQIAGISPHGNALGASMQQQVNQQIPQEKRGGEVLDSSHDDIKLEKSNILLLGPTGSGKTLLAQTLAKCLDVPFAICDCTTLTQAGYVGEDIESVIAKLLQDANYNVEKAQQGIVFLDEVDKIGSVPGIHQLRDVGGEGVQQGLLKLLEGTIVNVPEKNSRKLRGETVQVDTTNILFVASGAFNGLDRIISRRKNEKYLGFGTPSNLGKGRRAAAAADLANRSGESNTHQDIEEKDRLLRHVEARDLIEFGMIPEFVGRLPVVVPLHSLDEKTLVQILTEPRNAVIPQYQALFSMDKCELNVTEDALKAIARLALERKTGARGLRSIMEKLLLEPMFEVPNSDIVCVEVDKEVVEGKKEPGYIRAPTKESSEEEYDSGVEEEGWPRQADAANS

SEQ ID NO: 477 - DNA, 1600 bp, Homo sapien
gccccgccgccggcagtggaccgctgtgcgcgaaccctgaaccctacggtcccgacccgcgggcgaggccgggtacctgggctgggatccggagcaagcgggcgagggcagcgccctaagcaggcccggagcgatggcagccttgatgaccccgggaaccggggccccacccgcgcctggtgacttctccggggaagggagccagggacttcccgacccttcgccagagcccaagcagctcccggagctgatccgcatgaagcgagacggaggccgcctgagcgaagcggacatcaggggcttcgtggccgctgtggtgaatgggagcgcgcagggcgcacagatcggggccatgctgatggccatccgacttcggggcatggatctggaggagacctcggtgctgacccaggccctggctcagtcgggacagcagctggagtggccagaggcctggcgccagcagcttgtggacaagcattccacagggggtgtgggtgacaaggtcagcctggtcctcgcacctgccctggcggcatgtggctgcaaggtgccaatgatcagcggacgtggtctggggcacacaggaggcaccttggataagctggagtctattcctggattcaatgtcatccagagcccagagcagatgcaagtgctgctggaccaggcgggctgctgtatcgtgggtcagagtgagcagctggttcctgcggacggaatcctatatgcagccagagatgtgacagccaccgtggacagcctgccactcatcacagcctccattctcagtaagaaactcgtggaggggctgtccgctctggtggtggacgttaagttcggaggggccgccgtcttccccaaccaggagcaggcccgggagctggcaaagacgctggttggcgtgggagccagcctagggcttcgggtcgcggcagcgctgaccgccatggacaagcccctgggtcgctgcgtgggccacgccctggaggtggaggaggcgctgctctgcatggacggcgcaggcccgccagacttaagggacctggtcaccacgctcgggggcgccctgctctggctcagcggacacgcggggactcaggctcagggcgctgcccgggtggccgcggcgctggacgacggctcggcccttggccgcttcgagcggatgctggcggcgcagggcgtggatcccggtctggcccgagccctgtgctcgggaagtcccgcagaacgccggcagctgctgcctcgcgcccgggagcaggaggagctgctggcgcccgcagatggcaccgtggagctggtccgggcgctgccgctggcgctggtgctgcacgagctcggggccgggcgcagccgcgctggggagccgctccgcctgggggtgggcgcagagctgctggtcgacgtgggtcagaggctgcgccgtgggaccccctggctccgcgtgcaccgggacggccccgcgctcagcggcccgcagagccgcgccctgcaggaggcgctcgtactctccgaccgcgcgccattcgccgccccctcgcccttcgcagagctcgttctgccgccgcagcaataaagctcctttgccgcgaaa

SEQ ID NO: 478 - protein, 482 aa, Homo sapien
MAALMTPGTGAPPAPGDFSGEGSQGLPDPSPEPKQLPELIRMKRDGGRLSEADIRGFVAAVVNGSAQGAQIGAMLMAIRLRGMDLEETSVLTQALAQSGQQLEWPEAWRQQLVDKHSTGGVGDKVSLVLAPALAACGCKVPMISGRGLGHTGGTLDKLESIPGFNVIQSPEQMQVLLDQAGCCIVGQSEQLVPADGILYAARDVTATVDSLPLITASILSKKLVEGLSALVVDVKFGGAAVFPNQEQARELAKTLVGVGASLGLRVAAALTAMDKPLGRCVGHALEVEEALLCMDGAGPPDLRDLVTTLGGALLWLSGHAGTQAQGAARVAAALDDGSALGRFERMLAAQGVDPGLARALCSGSPAERRQLLPRAREQEELLAPADGTVELVRALPLALVLHELGAGRSRAGEPLRLGVGAELLVDVGQRLRRGTPWLRVHRDGPALSGPQSRALQEALVLSDRAPFAAPSPFAELVLPPQQ

SEQ ID NO: 479 - DNA, 1637 bp, Homo sapien
gaggcgaaccggagcgcggggccgcggtcgccccgaccagagccgggagaccgcagcacccgcagccgcccgcgagcgcgccgaagacagcgcgcaggcgagagcgcgcgggcgggggcgcgcaggccctgcccgccccttccgtccccacccccctccgccctttcctctccccaccttcctctcgcctcccgcgcccccgcaccgggcgcccaccctgtcctcctcctgcgggagcgttgtccgtgttggcggccgcagcgggccgggccggtccggcgggccgggggatggcgctgctggacctggccttggagggaatggccgtcttcgggttcgtcctcttcttggtgctgtggctgatgcatttcatggctatcatctacacccgattacacctcaacaagaaggcaactgacaaacagccttatagcaagctcccaggtgtctctcttctgaaaccactgaaaggggtagatcctaacttaatcaacaacctggaaacattctttgaattggattatcccaaatatgaagtgctcctttgtgtacaagatcatgatgatccagccattgatgtatgtaagaagcttcttggaaaatatccaaatgttgatgctagattgtttataggtggtaaaaaagttggcattaatcctaaaattaataatttaatgccaggatatgaagttgcaaagtatgatcttatatggatttgtgatagtggaataagagtaattccagatacgcttactgacatggtgaatcaaatgacagaaaaagtaggcttggttcacgggctgccttacgtagcagacagacagggctttgctgccaccttagagcaggtatattttggaacttcacatccaagatactatatctctgccaatgtaactggtttcaaatgtgtgacaggaatgtcttgtttaatgagaaaagatgtgttggatcaagcaggaggacttatagcttttgctcagtacattgccgaagattactttatggccaaagcgatagctgaccgaggttggaggtttgcaatgtccactcaagttgcaatgcaaaactctggctcatattcaatttctcagtttcaatccagaatgatcaggtggaccaaactacgaattaacatgcttcctgctacaataatttgtgagccaatttcagaatgctttgttgccagtttaattattggatgggcagcccaccatgtgttcagatgggatattatggtatttttcatgtgtcattgcctggcatggtttatatttgactacattcaactcaggggtgtccagggtggcacactgtgtttttcaaaacttgattatgcagtcgcctggttcatccgcgaatccatgacaatatacatttttttgtctgcattatgggacccaactataagctggagaactggtcgctacagattacgctgtgggggtacagcagaggaaatcctagatgtataactacagctttgtgactgtatataaaggaaaaaagagaagtattataaattatgtttatataaatgcttttaaaaatctaccttctgtagttttatcacatgtatgttttggtatctgttctttaatttatttttgcatggcacttgcatctgtgaaaaaaaa

SEQ ID NO: 480 - protein, 394 aa, Homo sapien
MALLDLALEGMAVFGFVLFLVLWLMHFMAIIYTRLHLNKKATDKQPYSKLPGVSLLKPLKGVDPNLINNLETFFELDYPKYEVLLCVQDHDDPAIDVCKKLLGKYPNVDARLFIGGKKVGINPKINNLMPGYEVAKYDLIWICDSGIRVIPDTLTDMVNQMTEKVGLVHGLPYVADRQGFAATLEQVYFGTSHPRYYISANVTGFKCVTGMSCLMRKDVLDQAGGLIAFAQYIAEDYFMAKAIADRGWRFAMSTQVAMQNSGSYSISQFQSRMIRWTKLRINMLPATIICEPISECFVASLIIGWAAHHVFRWDIMVFFMCHCLAWFIFDYIQLRGVQGGTLCFSKLDYAVAWFIRESMTIYIFLSALWDPTISWRTGRYRLRCGGTAEEILDV

SEQ ID NO: 481 - DNA, 1635 bp, Homo sapien
cagagtcagaaaactccccagctaaacacccgtaagacttcatacaacacaatactctatactgtgatgatcacagctgccaaggctacctaaaagaagacagttatctcatatttggctgccagctttttatctttctctcgaccacttaaaacttcagacttcctgtcctgctggtatcatggagaaagtccaatacctcactcgctcagctataagaagagcctcaaccattgaaatgcctcaacaagcacgtcaaaagctacagaatctatttatcaatttctgtctcatcttaatatgtctcttgctgatctgtatcatcgtgatgcttctctgaagttctgctacaacctctagatctgcagcttgccacatcagcttaaaatctgtcatcccatgcagacaggaaaacaatattgtataacagaccacttcctgagtagaagagtttctttgtgaaaaggtcaagattaagactaaaacttattgttaccatatgtattcatctgttggatcttgtaaacatgaaaagggctttattttcaaaaattaacttcaaaataagtgtataaaatgcaactgttgatttcctcaacatggctcacaaatttctatcccaaatcttttctgaagatgaagagtttagttttaaaactgcactgccaacaagttcacttcatatataaagcattatttttactcttttgaggtgaatataatttatattacaatgtaaaagcttctttaatactaagtatttttcaggtcttcaccaagtatcaaagtaataacacaaatgaagtgtcattattcaaaatagtccactgactcctcacatctgttatcttattataaagaactatttgtagtaactatcagaatctacattctaaaacagaaattgtattttttctatgccacattaacatcttttaaagttgatgagaatcaagtatggaaaagtaaggccatactcttacataataaaattccttttaagtaattttttcaaagaatcacagaattctagtacatgtaggtaaatcataaatctgttctaagacatatgatcaacagatgagaactggtggttaatatgtgacagtgagattagtcatatcactaatatactaacaacagaatctaatcttcatttaaggcactgtagtgaattatctgagctagagttacctagcttaccatactatatctttggaatcatgaaaccttaagacttcagaatgattttgcaggttgtcttccattccagcctaacatccaatgcaggcaaggaaaataaaagatttccagtgacagaaaaatatattatctcaagtattttttaaaaatatatgaattctctctccaaatattaactaattattagattatattttgaaatgaacttgttggcccatctattacatctacagctgacccttgaacatgggggttaggggagctgacaattcgtgggtccgcaaaatcttaactacctaatagcctactattgaccataaaccttactgataacataaacagtaaattaacacatattttgcgtgttatatgtattatacactatattcctacaataaagtaagctagagaaaatgttatttagaaaatcat

SEQ ID NO: 482 - protein, 52 aa, Homo sapien
MEKVQYLTRSAIRRASTIEMPQQARQKLQNLFINFCLILICLLLICIIVMLL

SEQ ID NO: 483 - DNA, 2617 bp, Homo sapien
cacgagttggtttgggagctgccagtctcctgggaggatcgcagtcagcagagcagggctgaggcctgggggtaggagcagagcctgcgcatctggaggcagcatgtccaagaaagggagtggaggtgcagcgaaggacccaggggcagagcccacgctggggatggaccccttcgaggacacactgcggcggctgcgtgaggccttcaactgagggcgcacgcggccggccgagttccgggctgcgcagctccagggcctgggccacttccttcaagaaaacaagcagcttctgcgcgacgtgctggcccaggacctgcataagccagctttcgaggcagacatatctgagctcatcctttgccagaacgaggttgactacgctctcaagaaccttcaggcctggatgaaggatgaaccacggtccacgaacctgttcatgaagctggactcggtcttcatctggaaggaaccctttggcctggtcctcatcatcgcaccctggaactacccattgaacctgaccctggtgctcctggtgggcaccctccccgcagggaattgcgtggtgctgaagccgtcagaaatcagccagggcacagagaaggtcctggctgaggtgctgccccagtacctggaccagagctgctttgccgtggtgctgggcggaccccaggagacagggcagctgctagagcacaagttggactacatcttcttcacagggagccctcgtgtgggcaagattgtcatgactgctgccaccaagcacctgacgcctgtcaccctggagctggggggcaagaacccctgctacgtggacgacaactgcgacccccagaccgtggccaaccgcgtggcctggttctgctacttcaatgccggccagacctgcgtggcccctgactacgtcctgtgcagccccgagatgcaggagaggctgctgcccgccctgcagagcaccatcacccgtttctatggcgacgacccccagagctccccaaacctgggccgcatcatcaaccagaaacagttccagcggctgcgggcattgctgggctgcggccgcgtggccattgggggccagagcaacgagagcgatcgctacatcgcccccacggtgctggtggacgtgcaggagacggagcctgtgatgcaggaggagatcttcgggcccatcctgcccatcgtgaacgtgcagagcgtggacgaggccatcaagttcatcaaccggcaggagaagcccctggccctgtacgccttctccaacagcagacaggttgtgaaccagatgctggagcggaccagcagcggcagctttggaggcaatgagggcttcacctacatatctctgctgtccgtgccattcgggggagtcggccacagtgggatgggccggtaccacggcaagttcaccttcgacaccttctcccaccaccgcacctgcctgctcgccccctccggcctggagaaattaaaggagatccgctacccaccctataccgactggaaccagcagctgttacgctggggcatgggctcccagagctgcaccctcctgtgagcgtcccacccgcctccaacgggtcacacagagaaacctgagtctagccatgaggggcttatgctcccaactcacattgttcctccagaccgcaggctcccccagcctcaggttgctggagctgtcacatgactgcatcctgcctgccagggctgcaaagcaaggtcttgcttctatctgggggacgctgctcgagagaggccgagaggccgcagaacatgccaggtgtcctcactcaccccaccctccccaattccagccctttgccctctcggtcagggttggccaggcccagtcacaggggcagtgtcaccctggaaaatacagtgccctgccttcttaggggcatcagccctgaacggttgagagcgtggagccctccaggcctttgctctcccctctaggcacacgcgcacttccacctctgccccatcccaactgcaccagcactgcctcccccagggatcctctcacatcccacactggtctctgcaccacccctctggttcacaccgcaccctgcactcacccacagcagctccatccactgggaaaactggggtttgcatcactccactgcacagtgttagtgggacctgggggcaagtcccttgacttctctgagcctcagtttccttatgtgaaagttgctggaaccaaaatggagtcacttatgccaaactctaataaaatggagtcgggggggcacatagaagccctcacacacacatgcccgtaacaggatttatcaccaagacacgcctgcatgtaagaccagacacagggcgtatggaaaagcacgtcctcaaagactgtagtattccagatgagctgcagatgcttacctaccacggccgtctccaccagaaaaccatcgccaactcctgcgatcagcttgtgacttacaaaccttgtttaaaagctgcttacatggacttctgtcctttaaaacgttccccttggctgtggccctctgtgtatgcctgggatccttccaagcactcatagcccagataggaatcctctgctcctcccaaataaattcatctgttc

SEQ ID NO: 484 - protein, 385 aa, Homo sapien
MKDEPRSTNLFMKLDSVFIWKEPFGLVLIIAPWNYPLNLTLVLLVGTLPAGNCVVLKPSEISQGTEKVLAEVLPQYLDQSCFAVVLGGPQETGQLLEHKLDYIFFTGSPRVGKIVMTAATKHLTPVTLELGGKNPCYVDDNCDPQTVANRVAWFCYFNAGQTCVAPDYVLCSPEMQERLLPALQSTITRFYGDDPQSSPNLGRIINQKQFQRLRALLGCGRVAIGGQSNESDRYIAPTVLVDVQETEPVMQEEIFGPILPIVNVQSVDEAIKFINRQEKPLALYAFSNSRQVVNQMLERTSSGSFGGNEGFTYISLLSVPFGGVGHSGMGRYHGKFTFDTFSHHRTCLLAPSGLEKLKEIRYPPYTDWNQQLLRWGMGSQSCTLL

SEQ ID NO: 485 - DNA, 2707 bp, Homo sapien
ggcaggccgagccagccgtgcgccgcgctccagggcccagggcgccgcacacgcacccacccacccacccagcctcgcagcgccatgggcaagaacaagcagccacgcggccagcagaggcaggggggcccgccggccgcggacgccgctgggcccgacgacatggagccgaagaagggcacgggggcccccaaggagtgcggggaggaggagccccggacctgctgcggctgccggttcccgctgctgctcgccctgctgcagctggccctgggcatcgccgtgaccgtggtgggcttcctcatggcgagcatcagctcctccctgctagtcagggacactccattttgggctgggatcattgtctgcttagtggcctatcttggcttgtttatgctttgtgtctcatatcaggttgacgaacggacatgtattcaattttctatgaaactgttatactttctgctgagtgccctgggcctgacggtctgtgtgctggccgtggcctttgccgcccaccactattcgcagctcacacagtttacctgtgagaccacactcgactcttgccagtgcaaactgccctcctcggagccgctcagcaggacctttgtttaccgggatgtgacggactgtaccagcgtcactggcactttcaaactgttcttactcatccagatgattcttaatttggtctgcggccttgtgtgcttgttggcctgctttgtgatgtggaaacataggtaccaggtcttctatgtgggtgtcaggatatgctccctcacggcttccgaaggcccccagcaaaagatctaacattcttgctcaaagttgcgagagaaagtagcacatggagtagctgaggttaaacaaacaaaaaaaaattttaaacaaagaaaggaaaaaaattgacaataaaagtcactcttctaattgaatatttttatatttttatgaaacaaaagagcatttcttcaggtttctattgtattttttttaacattcttgcagagaaagcaagatccaaattgattttgggatattaaaagttaacagaacactgaacaaggaaagaatggcatagatctatctttacagtctggagttaattcctgttaactcattttatccattccttacataatcttctttcctgttagtccagtttgatggtgtgaatggtgaatttcaggcccagttgctaaattttgtggcatcttcctctagtccttcccacctccagtcatcagccccactctgtcttggagacaggcaggaggtgggggaagagctgaatctctttattttccctggtagagacatcttcaaggcatgaaatagcttaaagagcagagtagaaatggaagaggctttgcaaaaggctagataactaacaacacctgggttggggcggcggcctcttctcttcagctcccttagcttggctccgtaagtggatcacttgccaaatgctttagatgattgcctctcaataattgaaaggtggtggtagttgtattctaaatgatgtagaaggtttaaaaataattacattatgcttctattctatcatctaaaacaaatcattaaaactaatttctagctaattgttaattataattatgctcagaagtctatttaatgagctctgactgtacttacgctgcactgtcggtgttaagagaaattactctcacaagagcagaggcctgaagattctttcttctgaaagccaagcaccacaaggaaaaaaaaattattaatagctcaggttaaaaacacccatttaaacaaaaacaagagcatttgtaataggaagtgtttatacaaacagcacatttgtgatatgttgaaaagcatctctcttggcaaccaatctatgtttgaggaagattgggtaatgctgatgtgttccattcatgaaactgtatttgatacataatcctattattaattcgtatgcttagtcaacctaggaaatcaaaataatgttttgaagttcttatttgagcaatatggccttgacttggagggtagttttagttgttttgtttttaagtgactgtggtttaaagcacaaatgccccaaggtggggagacttctctctgtgattattgttgctattaaattctgaactgtatccatattttaaggaaggagctaaaaatggaaattcatgaaacataaatggtatcaagaactttatcagtatgctttgttgaaagcagaaattaagataataattgagttcaattcgcctctccgcattgcctattgatacactttactaatcatgaaattctaacctaaaaggaaaacattttcctgcttgtcttagaagaaagtggaataattccactgattgtgataatggtttcaatttctacacaatataaatatccagtataaaggaaagcgttaagtcggtaagctagaggattgtaaatatcttttatgtcctctagataaaacacccgattaacagatgttaaaccttttaatgttttgatttgctttaaaaatggccttcctacacattagctccagctaaaaagacacattggagagcttagaggataagtctctggagcagaatttatcacacacaaaagttacaccaacagaataccaagcagaatgatgaggacctgtaaaataccttgtgccctattaaaaaaaaaaaaaaaaaaaaaaaaaaaaaaaaaa

SEQ ID NO: 486 - protein, 243 aa, Homo sapien
MGKNKQPRGQQRQGGPPAADAAGPDDMEPKKGTGAPKECGEEEPRTCCGCRFPLLLALLQLALGIAVTVVGFLMASISSSLLVRDTPFWAGIIVCLVAYLGLFMLCVSYQVDERTCIQFSMKLLYFLLSALGLTVCVLAVAFAAHHYSQLTQFTCETTLDSCQCKLPSSEPLSRTFVYRDVTDCTSVTGTFKLFLLIQMILNLVCGLVCLLACFVMWKHRYQVFYVGVRICSLTASEGPQQKI

SEQ ID NO: 487 - DNA, 2905 bp, Homo sapien
cggcagccagctgagagcaatgggaaatggggagtcccagctgtcctcggtgcctgctcagaagctgggttggtttatccaggaatacctgaagccctacgaagaatgtcagacactgatcgacgagatggtgaacaccatctgtgacgtctgcaggaaccccgaacagttccccctggtgcagggagtggccataggtggctcctatggacggaaaacagtcttaagaggcaactccgatggtacccttgtccttttcttcagtgacttaaaacaattccaggatcagaagagaagccaacgtgacatcctcgataaaactggggataagctgaagttctgtctgttcacgaagtggttgaaaaacaatttcgagatccagaagtcccttgatgggtccaccatccaggtgttcacaaaaaatcagagaatctctttcgaggtgctggccgccttcaacgctctgagcttaaatgataatcccagcccctggatctatcgagagctcaaaagatccttggataagacaaatgccagtcctggtgagtttgcagtctgcttcactgaactccagcagaagttttttgacaaccgtcctggaaaactaaaggatttgatcctcttgataaagcactggcatcaacagtgccagaaaaaaatcaaggatttaccctcgctgtctccgtatgccctggagctgcttacggtgtatgcctgggaacaggggtgcagaaaagacaactttgacattgctgaaggcgtcagaacggttctggagctgatcaaatgccaggagaagctgtgtatctattggatggtcaactacaactttgaagatgagaccatcaggaacatcctgctgcaccagctccaatcagcgaggccagtaatcttggatccagttgacccaaccaataatgtgagtggagataaaatatgctggcaatggctgaaaaaagaagctcaaacctggttgacttctcccaacctggataatgagttacctgcaccatcttggaatgtcctgcctgcaccactcttcacgaccccaggccaccttctggataagttcatcaaggagtttctccagcccaacaaatgcttcctagagcagattgacagtgctgttaacatcatccgtacattccttaaagaaaactgcttccgacaatcaacagccaagatccagattgtccggggaggatcaaccgccaaaggcacagctctgaagactggctctgatgccgatctcgtcgtgttccataactcacttaaaagctacacctcccaaaaaaacgagcggcacaaaatcgtcaaggaaatccatgaacagctgaaagccttttggagggagaaggaggaggagcttgaagtcagctttgagcctcccaagtggaaggctcccagggtgctgagcttctctctgaaatccaaagtcctcaacgaaagtgtcagctttgatgtgcttcctgcctttaatgcactgggtcagctgagttctggctccacacccagccccgaggtttatgcagggctcattgatctgtataaatcctcggacctcccgggaggagagttttctacctgtttcacagtcctgcagcgaaacttcattcgctcccggcccaccaaactaaaggatttaattcgcctggtgaagcactggtacaaagagtgtgaaaggaaactgaagccaaaggggtctttgcccccaaagtatgccttggagctgctcaccatctatgcctgggagcaggggagtggagtgccggattttgacactgcagaaggtttccggacagtcctggagctggtcacacaatatcagcagctcggcatcttctggaaggtcaattacaactttgaagatgagaccgtgaggaagtttctactgagccagttgcagaaaaccaggcctgtgatcttggacccaggcgaacccacaggtgacgtgggtggaggggaccgttggtgttggcatcttctggacaaagaagcaaaggttaggttatcctctccctgcttcaaggatgggactggaaacccaataccaccttggaaagtgccgacaatgcagacaccaggaagttgtggagctaggatccatcctattgtcaatgagatgttctcatccagaagccatagaatcctgaataataattctaaaagaaacttctggagatcatctggcaatcgcttttaaagactcggctcaccgtgagaaagagtcactcacatccattcttcccttgatggtccctattcctccttcccttgccttcttggacttcttgaaatcaatcaagactgcaaaccctttcataaagctgccttgctgaactcctctctgcaggagccctgcttaaaatagttgatgtcatcactttatgtgcatcttatttctgtcaacttgtatttttttttcttgtatttttccaattagctcctcctttttccttccagtctaaaaaaggaatcctctgtgtcttcaaagcaaagctctttactttccccttggttctcataactctgtgatcttgctctcggtgcttccaactcatccacgtcctgtctgtttcctctgtatacaaaaccctttctgcccctgctgacacagacatcctctatgccagcagccaggccaaccctttcattagaacttcaagctctccaaaggctcagattataactgttgtcatatttatatgaggctgttgtcttttccttctgagcctgcctttatccccccacccaggagtatcctcttgccaaagcaaaagactttttccttggctttagccttaaagatacttgaaggtctaggtgctttaacctcacataccctcacttaaacttttatcactgttgcatataccagttgtgatacaataaagaatgtatctgg

SEQ ID NO: 488 - protein, 727 aa, Homo sapien
MGNGESQLSSVPAQKLGWFIQEYLKPYEECQTLIDEMVNTICDVCRNPEQFPLVQGVAIGGSYGRKTVLRGNSDGTLVLFFSDLKQFQDQKRSQRDILDKTGDKLKFCLFTKWLKNNFEIQKSLDGSTIQVFTKNQRISFEVLAAFNALSLNDNPSPWIYRELKRSLDKTNASPGEFAVCFTELQQKFFDNRPGKLKDLILLIKHWHQQCQKKIKDLPSLSPYALELLTVYAWEQGCRKDNFDIAEGVRTVLELIKCQEKLCIYWMVNYNFEDETIRNILLHQLQSARPVILDPVDPTNNVSGDKICWQWLKKEAQTWLTSPNLDNELPAPSWNVLPAPLFTTPGHLLDKFIKEFLQPNKCFLEQIDSAVNIIRTFLKENCFRQSTAKIQIVRGGSTAKGTALKTGSDADLVVFHNSLKSYTSQKNERHKIVKEIHEQLKAFWREKEEELEVSFEPPKWKAPRVLSFSLKSKVLNESVSFDVLPAFNALGQLSSGSTPSPEVYAGLIDLYKSSDLPGGEFSTCFTVLQRNFIRSRPTKLKDLIRLVKHWYKECERKLKPKGSLPPKYALELLTIYAWEQGSGVPDFDTAEGFRTVLELVTQYQQLGIFWKVNYNFEDETVRKFLLSQLQKTRPVILDPGEPTGDVGGGDRWCWHLLDKEAKVRLSSPCFKDGTGNPIPPWKVPTMQTPGSCGARIHPIVNEMFSSRSHRILNNNSKRNFWRSSGNRF

SEQ ID NO: 489 - DNA, 4422 bp, Homo sapien
gattattctggaggaagatgaccttcattttatggttatgtgtgtgtgtctgtgtgtctttggaaaaatatatataattttttcaaataggaagccaacatatcaagtgatgaattaaagtatgctgcagaatatatattctaaaactacaaaaaagtcactgaatatcaaaatgatacagcttatacatatagttactgtgacaagtgacagactgctagttcagaattcaaaaatcctttcctagtttgtgagataatgggctaaattccttctgcctgccactggggcaaagcaaattgctttagtttttgatgagagttcttagaagtttgttggtattccttcatccacagcatccattgttgaaataaccattttcagttgtgatgccttaactaagaagccaattgttagcctgaaatgcaatcttggtagccagtttcaatgaagctagagattagtcagaaaaagttagctgttgggctttagaaagggattttgagtcctgtcatttctacttgggagcattttggagcagattaagctttcagtataaaaacaagtggctacctgatggaaacttttcttacccttatagggaaactgagcacaagctgaatgatattgtctgctgcaaaaaaaaacaaacaaaaaaaaaacaaaacaaaaaacaaaaaaaaaaaaaaaaaaacctcgtgccgaattcggcacgaggggaagccccgtgcaccccccgccctccggccgccgccgccccgctggccctgcagccgtcgccgctgcctcgggctacagccccgggctcggcggtcccggctggggaaggagggcggcgagcgcgtccggagccgccggagatggcgggagggcactgcggcagcttccccgcggcggcggccggcagcggcgagatcgtccaactgaacgtaggggggaccagatttagtacctcaagacaaactcttatgtggattccagattcttttttttccagtttgctgagtgggagaatttcaacacttcgagatgaaactggtgctatatttattgatagagatccagcagcatttgcacccattttaaattttcttcggacaaaagaactagacttaaggggagtgagtattaatgttctcaggcatgaagcagaattttacgggatcactccattagtaagaaggcttctcttatgtgaagaattggagcgttcctcttgtggcagtgtcctttttcatggttacttgcccccaccaggtattcctagtcgtaaaataaacaacacagtcagatctgctgattctaggaatggtctaaattctacagaaggtgaagcccggggaaatggtacacagcctgttctctctggaacgggagaagaaactgttaggctaggatttcctgtggatccacgaaaggtgctaatagtagctggccatcacaactggattgtagctgcatatgcccattttgctgtgtggtacagaatcaaagaatcttcaggatggcagcaagtgtttacgagcccatatttggattggactatcgaacgagtagctttaaatgcaaaggtggttggagggccacatggagacaaagacaaaatggttgctgttgcctcagagagtagcatcatcttgtggagtgttcaggatgggggaagtggaagtgaaattggagtgttcagcctgggtgttcctgtagatgctctcttctttattggtaaccagttggtggccacgagtcatacagggaaagtgggagtgtggaatgctgtcactcagcactggcaggttcaagatgttgttcctataactagttatgacactgctggatcattccttctgcttggatgtaacaatggatcaatatattacatagatatgcagaagttccccttgcgaatgaaagataatgatcttcttgtaactgaactgtatcatgatccttcaaatgatgctattactgctctgagtgtttacctcacacccaaaacaagtgtcagtggtaactggatcgagatcgcctatggtacgagctctggagcagtacgagtgattgtacaacacccagagacagttgggtcaggtcctcagctttttcagactttcacagttcaccgaagtcccgtaacaaaaatcatgctatcagagaagcatcttgtatcagtctgtgcagataataatcatgtccggacgtggacagtaacacgattcagaggaatgatctctactcagccaggttctactcctttagcgtcattcaagatactatccctggaggagacagaaagtcatggtagctattcctctggaaatgacataggaccttttggagagcgagacgatcaacaggtgtttatccagaaagttgttcccatcaccaacaaactatttgtaagactctcatcgactggaaaaagaatatgtgagatccaggctgttgactgtactacaatatcctcatttacagtgagggaatgtgagggatccagtaggatgggctcaagaccaaggcgctacttgttcacaggccatacaaatggcagtattcaaatgtgggatctgaccactgctatggatatggttaacaaaagtgaagataaggatgtaggtggtccaaccgaagaagagctactcaaattactcgatcaatgtgatttgagcacatctcgctgtgctactcctaacatcagtccagcaacttccgtagttcagcatagccacttacgagaatcaaattctagccttcagcttcagcaccatgataccacccatgaagcagctacttacggttccatgaggccttacagagaaagtcctttattagcaagggcaagaaggactgagagctttcacagttatagggacttccagactattaatttgaacagaaatgtagaaagagctgtccctgaaaatggtaacttgggtccaatacaagctgaagtgaaaggggcaacaggggaatgtaatatatctgagagaaagtctcctggagtagaaataaaaagtttgagagaattggatagtggattggaagtgcataaaatagctgaaggtttttcagaatccaagaaaaggtcatcagaagatgaaaatgaaaataaaatagagtttaggaagaaaggaggatttgaagggggaggattccttggaagaaagaaagttccctatctggcatcatcaccaagtacttccgatggaggaactgactcacctggtactgcgtccccatctcctacaaagactactccatctcctcggcataaaaaaagtgattcttcaggtcaggagtacagcttgtgaaaactcaccaaaatgaatagttgtttcggttacatttagatgaaagttaaactttactgaatttcagtacattagtttttacactaaaactttacaagataaaattggacttcatttagtatctttttaacagaattacttggaataatgagatacaataatcatatctcttttgacattttggaaatttttttaattttacaagtacatttaacagatcatttataaagcaggagtccattttaacacttaccgactttttttggtttggaaacatattaccacgtcttaataggatggtgcccatataggtgagcatccctttagatcatgggaaccagcagactgcattcctaatcttcattatgcctgagacttgtcttacaatgttacctttaagtgaatcacataattgtctttggaacttggtctcccaacacttattgtgattgcaaagtgtttaccagatatttgatgaggtgctatgtttgtgaaaaacatatcatgtaattcaaaaacactattgatattgaataccagataccactatgtagtaagtcttttaggatgattttaatttagtcgtgcgtcattttctgattctcatcattgggagatcttaaatcttagcaagcattagcaatattaaatgccaaaattccattgaaactttcaagttggagcaattgtctgtgtttgaaaagatgaaataaaaataataatcaagggcaaagctttgagtgcccagaagggaaagctgtaccagttgctaacctgtcttgtttcaggagccaccatgtttttttttcagtgttaacaacaatcatgataattaaattaaaacactagtttgttcacttgtaggactgcagttctgaattttgggttaaaggttttggctgctgtaagaatgtgaatttgaatgtattttgaattgtaagagcaaaagaacgtttttgtacaattttttttcatttaattggaatgatcttcaggtttctacaaatagggtaattgtaaatttaaagcattagcatttattggtgaataatgtatatatccccattccaagaaatataagtgagtgaagttgaaataaaatctttaaaattta

SEQ ID NO: 490 - protein, 815 aa, Homo sapien
MAGGHCGSFPAAAAGSGEIVQLNVGGTRFSTSRQTLMWIPDSFFSSLLSGRISTLRDETGAIFIDRDPAAFAPILNFLRTKELDLRGVSINVLRHEAEFYGITPLVRRLLLCEELERSSCGSVLFHGYLPPPGIPSRKINNTVRSADSRNGLNSTEGEARGNGTQPVLSGTGEETVRLGFPVDPRKVLIVAGHHNWIVAAYAHFAVWYRIKESSGWQQVFTSPYLDWTIERVALNAKVVGGPHGDKDKMVAVASESSIILWSVQDGGSGSEIGVFSLGVPVDALFFIGNQLVATSHTGKVGVWNAVTQHWQVQDVVPITSYDTAGSFLLLGCNNGSIYYIDMQKFPLRMKDNDLLVTELYHDPSNDAITALSVYLTPKTSVSGNWIEIAYGTSSGAVRVIVQHPETVGSGPQLFQTFTVHRSPVTKIMLSEKHLVSVCADNNHVRTWTVTRFRGMISTQPGSTPLASFKILSLEETESHGSYSSGNDIGPFGERDDQQVFIQKVVPITNKLFVRLSSTGKRICEIQAVDCTTISSFTVRECEGSSRMGSRPRRYLFTGHTNGSIQMWDLTTAMDMVNKSEDKDVGGPTEEELLKLLDQCDLSTSRCATPNISPATSVVQHSHLRESNSSLQLQHHDTTHEAATYGSMRPYRESPLLARARRTESFHSYRDFQTINLNRNVERAVPENGNLGPIQAEVKGATGECNISERKSPGVEIKSLRELDSGLEVHKIAEGFSESKKRSSEDENENKIEFRKKGGFEGGGFLGRKKVPYLASSPSTSDGGTDSPGTASPSPTKTTPSPRHKKSDSSGQEYSL

SEQ ID NO: 491 - DNA, 2654 bp, Homo sapien
ctctgggcacttttgaactcacgaaccttgcgcaaaacccagaagatgtattcatgagccacccaggccactgacctcccactttggggaactcaaaggactgacctgcccctgccgcctgtgccccttgcgtggcgctcgcagaggatacgtgctacacggccttgtccggcctgtcgacccgtgctagtgggagcctagagaatggggcgctcctggtcgtgccgtgggctccatgggagagacattgcgggtttctggttggacggcccttttctggctcctgtgtggagttattcactctcccagaggctcctggagccagccaccctaactgagctgccagtggggtcgtgaggcaagatccccgccacccggggacatcttcaatctaggcgaggcgaagctgagcgggtctagtggaaagattgtgtctggtcgtttgaccacacaccgccctgatttgctgttttctttttttagggagaagggcttttctttagtggagaaatggaactcgcccccctacccccttgtctgctgctcccagccacgttggtggtattggccgatgagctggtttgactcattaatttctctcaatttgggtcccagctaaagaggtggggtgaagctggggacagctttcctgggtgagtttttcttttgaataatgtagtgcagtcaccctgtggcaaatgccaggacagctgcaggtgcccattagcaacgcctgccttctgggcaaggtgagggatgccataccttgagaccaagccggtgcccacctaagggctaaggcctcttgctggtgcacatgacatttgtcctgcagagctggggggaaggcgatgtggtgaccccacccccacccgttaatttaaagctgtttctaaacagttgagtttcttctaaagaggaagccttgcccagcaaggaccagtgagacagccggatcttggagacaattacaagacggggagtgagactcctgattgctctggaagcctgctgatttctacaactgatcatttgcagctgctggttttggtttccaccttaccctactggctgtaaaaacacaaatgtgtactttattgattttctttctaattctcccgcattggtggcttgggacttgggagagggagcaagccttcctccatggcccatcactcggctgtggagaacaaagaccaatgtgaagacactacagaggattctgtcttccaggcccagtccactggggagtgctggaatggggacctggggtggggaggcagagggtcactttacataggattaagttcgaggtggctaccgatttcagcacatgcactactgaaatttacacaaaaagaaagctgtgaaattgaagtcccaatttaagagtcctgaggcagaacctggtggctggaggcattcccagaggtggggaagagagcctgcccggccggagaacatctgccttgctgcacctgaggcccagcagagccgttcctgggactgtcagataatcggtgcagcggtggaaggagcctgcggctgctggcacagacttcacacagcacctcctctctgctgggtttccacacagcctgtcttcagatcctgctgccgcgtgcgaccagaggtgggaggcccctggtggcatggaagagggagggtcagtgccaagtctcaggaggagggcgcatgtgtgtatcaccctcagctggcggaacctggctgcgaactgtgcagttacgttgcatccacaggattccagttgcgtgtctgtttccttctctttctccgtatttatttttttattcttcggaggaggtggacatttcggaagtggtggggactaagggaagaactctctagttccctcagtgtgaagcctgtcgtgttctctccccttgcactggtcatcagtattgtgtaaaggaacaactgatatacttgagtgtgcaagcaaagaacccatttgccatgctgctatgaagactacttttagatcaacaataaaaaaaaacctacaaaaaaacctttattctttaattgttgcttttacggtgatattgtgcatgcaaaccaggagcattttgtgtcttaagaaaaataatcttagaacagatggctgtgaaaattacacccatgcacagaacaagccacaggaataatagttcaggatttggtttttctctttttcttgtaaacctggagggttgatatattctttccatgcagttattagaacttagttttgttccaacagttaaacttgcaatgaaaagaaaatgtgccatttttttcactcagaattattcatagctgtatatttgaaactgctaattacacacgtgtgatgtatgttggttttttagtgcaatttcttctgtagctattctttgaccaaactgtgggtattgttaatattaatttatatttgtctcattttgtatgtatgtgtagtgtgtttgtgagtatgtgtggtttataatctgacaaagtcatgaagctcagtttggctgtaatttaattccccttcccttatttttatttatttttgtactgtgctgattcaataaaatgcactgaccatccaaaaaaaatctatgtcgggtgcggagaaagaggtaatgaatgcggattcgatatcagcttat

SEQ ID NO: 492 - protein, 8 aa, Homo sapien
MNADSISA

SEQ ID NO: 493 - DNA, 1163 bp, Homo sapien
ctctacctgacacagctgcagcctgcaattcactcccactgcctgggattgcactggatccgtgtgctcagaacaaggtgaacgcccagctgcagccatgaagatctgtagcctcaccctgctctccttcctcctactggctgctcaggtgctcctggtggaggggaaaaaaaaagtgaagaatggacttcacagcaaagtggtctcagaacaaaaggacactctgggcaacacccagattaagcagaaaagcaggcccgggaacaaaggcaagtttgtcaccaaagaccaagccaactgcagatgggctgctactgagcaggaggagggcatctctctcaaggttgagtgcactcaattggaccatgaattttcctgtgtctttgctggcaatccaacctcatgcctaaagctcaaggatgagagagtctattggaaacaagttgcccggaatctgcgctcacagaaagacatctgtagatattccaagacagctgtgaaaaccagagtgtgcagaaaggattttccagaatccagtcttaagctagtcagctccactctatttgggaacacaaagcccaggaaggagaaaacagagatgtcccccagggagcacatcaagggcaaagagaccaccccctctagcctagcagtgacccagaccatggccaccaaagctcccgagtgtgtggaggacccagatatggcaaaccagaggaagactgccctggagttctgtggagagacttggagctctctctgcacattcttcctcagcatagtgcaggacacgtcatgctaatgaggtcaaaagagaacgggttcctttaagagatgtcatgtcgtaagtccctctgtatactttaaagctctctacagtccccccaaaatatgaacttttgtgcttagtgagtgcaacgaaatatttaaacaagttttgtattttttgcttttgtgttttggaatttgccttatttttcttggatgcgatgttcagaggctgtttcctgcagcatgtatttccatggcccacacagctatgtgtttgagcagcgaagagtctttgagctgaatgagccagagtgataatttcagtgcaacgaactttctgctgaattaatggtaataaaactctgggtgtttttcaaaaaaaaaaaaaaaaa

SEQ ID NO: 494 - protein, 234 aa, Homo sapien [sequence omitted]

SEQ ID NO: 495 - DNA, 4119 bp, Homo sapien
ctggagagcctgctgcccgcccgcccgtaaaatggtcccctcggctggacagctcgccctgttcgctctgggtattgtgttggctgcgtgccaggccttggagaacagcacgtccccgctgagtgcagacccgcccgtggctgcagcagtggtgtcccattttaatgactgcccagattcccacactcagttctgcttccatggaacctgcaggtttttggtgcaggaggacaagccagcatgtgtctgccattctgggtacgttggtgcacgctgtgagcatgcggacctcctggccgtggtggctgccagccagaagaagcaggccatcaccgccttggtggtggtctccatcgtggccctggctgtccttatcatcacatgtgtgctgatacactgctgccaggtccgaaaacactgtgagtggtgccgggccctcatctgccggcacgagaagcccagcgccctcctgaagggaagaaccgcttgctgccactcagaaacagtggtctgaagagcccagaggaggagtttggccaggtggactgtggcagatcaataaagaaaggcttcttcaggacagcactgccagagatgcctgggtgtgccacagaccttcctacttggcctgtaatcacctgtgcagccttttgtgggccttcaaaactctgtcaagaactccgtctgcttggggttattcagtgtgacctagagaagaaatcagcggaccacgatttcaagacttgttaaaaaagaactgcaaagagacggactcctgttcacctaggtgaggtgtgtgcagcagttggtgtctgagtccacatgtgtgcagttgtcttctgccagccatggattccaggctatatatttctttttaatgggccacctccccacaacagaattctgcccaacacaggagatttctatagttattgttttctgtcatttgcctactggggaagaaagtgaaggaggggaaactgtttaatatcacatgaagaccctagctttaagagaagctgtatcctctaaccacgagactctcaaccagcccaacatcttccatggacacatgacattgaagaccatcccaagctatcgccacccttggagatgatgtcttatttattagatggataatggttttatttttaatctcttaagtcaatgtaaaaagtataaaaccccttcagacttctacattaatgatgtatgtgttgctgactgaaaagctatactgattagaaatgtctggcctcttcaagacagctaaggcttgggaaaagtcttccagggtgcggagatggaaccagaggctgggttactggtaggaataaaggtaggggttcagaaatggtgccattgaagccacaaagccggtaaatgcctcaatacgttctgggagaaaacttagcaaatccatcagcagggatctgtcccctctgttggggagagaggaagagtgtgtgtgtctacacaggataaacccaatacatattgtactgctcagtgattaaatgggttcacttcctcgtgagccctcggtaagtatgtttagaaatagaacattagccacgagccataggcatttcaggccaaatccatgaaagggggaccagtcatttattttccattttgttgcttggttggtttgttgctttatttttaaaaggagaagtttaactttgctatttattttcgagcactaggaaaactattccagtaatttttttttcctcatttccattcaggatgccggctttattaacaaaaactctaacaagtcacctccactatgtgggtcttcctttcccctcaagagaaggagcaattgttcccctgacatctgggtccatctgacccatggggcctgcctgtgagaaacagtgggtcccttcaaatacatagtggatagctcatccctaggaattttcattaaaatttggaaacagagtaatgaagaaataatatataaactccttatgtgaggaaatgctactaatatctgaaaagtgaaagatttctatgtattaactcttaagtgcacctagcttattacatcgtgaaaggtacatttaaaatatgttaaattggcttgaaattttcagagaattttgtcttcccctaattcttcttccttggtctggaagaacaatttctatgaattttctctttattttttttttataattcagacaattctatgacccgtgtcttcatttttggcactcttatttaacaatgccacacctgaagcacttggatctgttcagagctgaccccctagcaacgtagttgacacagctccaggtttttaaattactaaaataagttcaagtttacatcccttgggccagatatgtgggttgaggcttgactgtagcatcctgcttagagaccaatcaatggacactggtttttagacctctatcaatcagtagttagcatccaagagactttgcagaggcgtaggaatgaggctggacagatggcggaacgagaggttccctgcgaagacttgagatttagtgtctgtgaatgttctagttcctaggtccagcaagtcacacctgccagtgccctcatccttatgcctgtaacacacatgcagtgagaggcctcacatatacgcctccctagaagtgccttccaagtcagtcctttggaaaccagcaggtctgaaaaagaggctgcatcaatgcaagcctggttggaccattgtccatgcctcaggatagaacagcctggcttatttggggatttttcttctagaaatcaaatgactgataagcattggctccctctgccatttaatggcaatggtagtctttggttagctgcaaaaatactccatttcaagttaaaaatgcatcttctaatccatctctgcaagctccctgtgtttccttgccctttagaaaatgaattgttcactacaattagagaatcatttaacatcctgacctggtaagctgccacacacctggcagtggggagcatcgctgtttccaatggctcaggagacaatgaaaagcccccatttaaaaaaataacaaacattttttaaaaggcctccaatactcttatggagcctggatttttcccactgctctacaggctgtgactttttttaagcatcctgacaggaaatgttttcttctacatggaaagatagacagcagccaaccctgatctggaagacagggccccggctggacacacgtggaaccaagccagggatgggctggccattgtgtccccgcaggagagatgggcagaatggccctagagttcttttccctgagaaaggagaaaaagatgggattgccactcacccacccacactggtaagggaggagaatttgtgcttctggagcttctcaagggattgtgttttgcaggtacagaaaactgcctgttatcttcaagccaggttttcgagggcacatgggtcaccagttgctttttcagtcaatttggccgggatggactaatgaggctctaacactgctcaggagacccctgccctctagttggttctgggctttgatctcttccaacctgcccagtcacagaaggaggaatgactcaaatgcccaaaaccaagaacacattgcagaagtaagacaaacatgtatatttttaaatgttctaacataagacctgttctctctagccattgatttaccaggctttctgaaagatctagtggttcacacagagagagagagagtactgaaaaagcaactcctcttcttagtcttaataatttactaaaatggtcaacttttcattatctttattataataaacctgatgcttttttttagaactccttactctgatgtctgtatatgttgcactgaaaaggttaatatttaatgttttaatttattttgtgtggtaagttaattttgatttctgtaatgtgttaatgtgattagcagttattttccttaatatctgaattatacttaaagagtagtgagcaatataagacgcaattgtgtttttcagtaatgtgcattgttattgagttgtactgtaccttatttggaaggatgaaggaatgaacctttttttcctaaaaaaaaaaaaaaaaaaaaaaaaaaaaaaaaa

SEQ ID NO: 496 - protein, 160 aa, Homo sapien
MVPSAGQLALFALGIVLAACQALENSTSPLSADPPVAAAVVSHFNDCPDSHTQFCFHGTCRFLVQEDKPACVCHSGYVGARCEHADLLAVVAASQKKQAITALVVVSIVALAVLIITCVLIHCCQVRKHCEWCRALICRHEKPSALLKGRTACCHSETVV

SEQ ID NO: 497 - DNA, 2667 bp, Homo sapien
gagggtgggtcgaccccgggaattcggcacgagcggcggcggggccacccgcgagtccagcgtcgccgcagccccccaatgcggccgcgagaagcagcgggggggcaggcgatcgaaggagccttcacgtaaatgggtccagtcatgcctcccagtaagaagccagaaagctcaggaattagtgtctccagtggactgagtcagtgttacgggggcagcggtttctccaaggcccttcaggaagacgatgacctcgacttttctctgcctgacatccgattagaagagggggccatggaagatgaagagctgaccaacctgaactggctgcacgagagcaagaacttgctgaagagctttggggagtcggtcctcaggagtgtcagccccgtccaggacctggacgatgacacccccccatcccctgcccactctgacatgccctacgatgccaggcagaaccccaactgcaaacccccctactccttcagctgcctcatatttatggccatcgaggactctccaaccaagcgcctgccagtgaaggatatctacaactggatcttggaacattttccgtattttgcaaatgcacctactgggtggaaaaactcagtgagacacaatttatcattgaataagtgttttaagaaagtggacaaagagaggagtcagagtattgggaaagggtcgttgtggtgcatagacccagagtatagacaaaatctaattcaggctttgaaaaagacaccttatcacccacacccacacgtgttcaatacacctcccacctgtcctcaggcatatcaaagcacatcaggtccacccatctggccgggcagtaccttcttcaagagaaatggagcccttctccaagatcctgacattgatgctgccagtgccatgatgcttttgaatactccccctgagatacaagcaggttttcctccaggagtgatccaaaatggagcgcgggtcctgagccgagggctgtttcctggcgtgcggccgctgccaatcactcccattggggtgacagcggccatgaggaatggcatcaccagctgccggatgcggactgagagtgagccatcttgtggctccccagtggtcagcggagaccccaaggaggatcacaactacagcagtgccaagtcctccaacgcccggagcacctcgcccaccagcgactccatctcctcctcctcctcctcagccgacgaccactatgagtttgccaccaaggggagccaggagggcagcgagggcagcgaggggagcttccggagccacgagagccccagcgacacggaagaggacgacaggaagcacagccagaaggagcccaaggattctctgggggacagcgggtacgcatcccagcacaagaagcgccagcacttcgccaaggccaggaaggtccccagcgacacactgcccctcaaaaagagacgcaccgaaaagccccccgagagcgatgatgaggagatgaaagaagcggcagggtccctcctgcacttagcagggatccggtcctgtttgaataacatcaccaatcggacggcaaaggggcagaaagagcaaaaggaaaccacaaaaaattaaaaacaagtcactgatttgttttgaacttacgaccatttggtttcagcatgtcaggagatttctaatgatttgtggcaatatcagcaattttttttcttttttcttgtttggggtttggttttctttcttttcttttccttttattgggttttaatttgccccctcttctttgttttggacccttaagaattttatttttaaaggagattgaagccatagaactcatattgacactcagctgttttacaaaagcttttcattatctgaagacaaaaccgaaaaagccaaaattaccattgcttcctccagcttgtcagaaacctgtggctgaatccgcagggatgtcaacgtcaatatcacaggaacacacattcggcacctagaaggcacgtgggcaaagtaatcatcgttcaggcccaacccttaggtttaaaaagtcaggttgtccatcccattggggttcactgagtgaaggcacataaagcaattgaggaggaggaggaacccctcgtccccctaggagcagacccaagcttgtggcaccaggcatctgatggtgccaggaaagccactggaattgtcacacggcgagcacagagggccggccaccagtcctcgatgcttctgaaccctgaaccccgatgacatcttacgaggtggacgttggactgttcatgcgcatcgggtgtcagtgactcatggagaagaaatggggtaaatttttagtgatgttgctaatcattgaattctgttctctattaaattaagaaaatgttccaaaagccataagcctgaagattggccctgtgcacgcacgcacacacacacacacacacacacacacacacacacacacacgaaggagagagagagaaaactgatggggaaaacaagctgtgtcttcttaactgcccaagtgaaaagcaaccaagtccaggaaattacaatagctgttaaggaaaggaaataatggtacagatctttttctgtctatcaaaactatttgatccaagtgaaaaaaaaaaaaaaactagaaagctacggaacctgcaatgcggccgc

SEQ ID NO: 498 - protein, 490 aa, Homo sapien
MGPVMPPSKKPESSGISVSSGLSQCYGGSGFSKALQEDDDLDFSLPDIRLEEGAMEDEELTNLNWLHESKNLLKSFGESVLRSVSPVQDLDDDTPPSPAHSDMPYDARQNPNCKPPYSFSCLIFMAIEDSPTKRLPVKDIYNWILEHFPYFANAPTGWKNSVRHNLSLNKCFKKVDKERSQSIGKGSLWCIDPEYRQNLIQALKKTPYHPHPHVFNTPPTCPQAYQSTSGPPIWPGSTFFKRNGALLQDPDIDAASAMMLLNTPPEIQAGFPPGVIQNGARVLSRGLFPGVRPLPITPIGVTAAMRNGITSCRMRTESEPSCGSPVVSGDPKEDHNYSSAKSSNARSTSPTSDSISSSSSSADDHYEFATKGSQEGSEGSEGSFRSHESPSDTEEDDRKHSQKEPKDSLGDSGYASQHKKRQHFAKARKVPSDTLPLKKRRTEKPPESDDEEMKEAAGSLLHLAGIRSCLNNITNRTAKGQKEQKETTKN

SEQ ID NO: 499 - DNA, 888 bp, Homo sapien
cagcctcttggaaagagggacactggaggggtgtgtttgcaatttaaatcactggatttttgcccaccctctttccaaataagaaggcaggagctgcttgctgaggtgtaaagggtcttctgagctgcagtggcaattagaccagaagatccccgctcctgtctctaaagaggggaaagggcaaggatggtggaggctttctgtgctacctggaagctgaccaacagtcagaactttgatgagtacatgaaggctctaggcgtgggctttgccactaggcaggtgggaaatgtgaccaaaccaacggtaattatcagtcaagaaggagacaaagtggtcatcaggactctcagcacattcaagaacacggagattagtttccagctgggagaagagtttgatgaaaccactgcagatgatagaaactgtaagtctgttgttagcctggatggagacaaacttgttcacatacagaaatgggatggcaaagaaacaaattttgtaagagaaattaaggatggcaaaatggttatgacccttacttttggtgatgtggttgctgttcgccactatgagaaggcataaaaatgttcctggtcggggcttggaagagctcttcagtttttctgtttcctcaagtctcagtgctatcctattacaacatggctgatcattaattagaaggttatccttggtgtggaggtggaaaatggtgatttaaaaacttgttactccaagcaacttgcccaattttaatctgaaaatttatcatgttttataatttgaattaaagttttgtccccccccccttttttttataaacaagtgaatacattttataatttcttttggaatgtaaatcaaatttgaataaaaatcttacacgtg

SEQ ID NO: 500 - protein, 132 aa, Homo sapien
MVEAFCATWKLTNSQNFDEYMKALGVGFATRQVGNVTKPTVIISQEGDKVVIRTLSTFKNTEISFQLGEEFDETTADDRNCKSVVSLDGDKLVHIQKWDGKETNFVREIKDGKMVMTLTFGDVVAVRHYEKA

SEQ ID NO: 501 - DNA, 619 bp, Homo sapien
agcagttctaagggaccatacagagtattcctctcttcacaccaggaccagccactgttgcagcatgagttcccagcagcagaagcagccctgcatcccaccccctcagcttcagcagcagcaggtgaaacagccttgccagcctccacctcaggaaccatgcatccccaaaaccaaggagccctgccaccccaaggtgcctgagccctgccaccccaaagtgcctgagccctgccagcccaagcttccagagccatgccaccccaaggtgcctgagccctgcccttcaatagtcactccagcaccagcccagcagaagaccaagcagaagtaatgtggtccacagccatgcccttgaggagccggccaccagatgctgaatcccctatcccattctgtgtatgagtcccatttgccttgcaattagcattctgtctcccccaaaaaagaatgtgctatgaagctttctttcctacacactctgagtctctgaatgaagctgaaggtcttagtaccagagctagttttcagctgctcagaattcatctgaagagagacttaagatgaaagcaaatgattcagctcccttatacccccattaaattcactttcaattcca

SEQ ID NO: 502 - protein, 89 aa, Homo sapien
MSSQQQKQPCIPPPQLQQQQVKQPCQPPPQEPCIPKTKEPCHPKVPEPCHPKVPEPCQPKLPEPCHPKVPEPCPSIVTPAPAQQKTKQK

SEQ ID NO: 503 - DNA, 438 bp, Homo sapien
ggcacgagggcccgtgccgccccagccgctgccgcctgcaccggacccggagccgccatgcccaagtgtcccaagtgcaacaaggaggtgtacttcgccgagagggtgacctctctgggcaaggactggcatcggccctgcctgaagtgcgagaaatgtgggaagacgctgacctctgggggccacgctgagcacgaaggcaaaccctactgcaaccacccctgctacgcagccatgtttgggcctaaaggctttgggcggggcggagccgagagccacactttcaagtaaaccaggtggtggagaccccatccttggctgcttgcagggccactgtccaggcaaatgccaggccttgtccccagatgcccagggctcccttgttgcccctaatgctctcagtaaacctgaacacttggaaaaaaaaaaaaaaaaaaa

SEQ ID NO: 504 - protein, 77 aa, Homo sapien
MPKCPKCNKEVYFAERVTSLGKDWHRPCLKCEKCGKTLTSGGHAEHEGKPYCNHPCYAAMFGPKGFGRGGAESHTFK

SEQ ID NO: 505 - DNA, 1512 bp, Homo sapien
ctcctctccagcccttctcctgtgtgcctgcctcctgccgccgccaccatgaccacctccatccgccagttcacctcctccagctccatcaagggctcctccggcctggggggcggctcgtcccgcacctcctgccggctgtctggcggcctgggtgccggctcctgcaggctgggatctgctggcggcctgggcagcaccctcgggggtagcagctactccagctgctacagctttggctctggtggtggctatggcagcagctttgggggtgttgatgggctgctggctggaggtgagaaggccaccatgcagaacctcaatgaccgcctggcctcctacctggacaaggtgcgtgccctggaggaggccaacactgagctggaggtgaagatccgtgactggtaccagaggcaggccccggggcccgcccgtgactacagccagtactacaggacaattgaggagctgcagaacaagatcctcacagccaccgtggacaatgccaacatcctgctacagattgacaatgcccgtctggctgctgatgacttccgcaccaagtttgagacagagcaggccctgcgcctgagtgtggaggccgacatcaatggcctgcgcagggtgctggatgagctgaccctggccagagccgacctggagatgcagattgagaacctcaaggaggagctggcctacctgaagaagaaccacgaggaggagatgaacgccctgcgaggccaggtgggtggtgagatcaatgtggagatggacgctgccccaggcgtggacctgagccgcatcctcaacgagatgcgtgaccagtatgagaagatggcagagaagaaccgcaaggatgccgaggattggttcttcagcaagacagaggaactgaaccgcgaggtggccaccaacagtgagctggtgcagagtggcaagagtgagatctcggagctccggcgcaccatgcaggccttggagatagagctgcagtcccagctcagcatgaaagcatccctggagggcaacctggcggagacagagaaccgctactgcgtgcagctgtcccagatccaggggctgattggcagcgtggaggagcagctggcccagcttcgctgcgagatggagcagcagaaccaggaatacaaaatcctgctggatgtgaagacgcggctggagcaggagattgccacctaccgccgcctgctggagggagaggatgcccacctgactcagtacaagaaagaaccggtgaccacccgtcaggtgcgtaccattgtggaagaggtccaggatggcaaggtcatctcctcccgcgagcaggtccaccagaccacccgctgaggactcagctaccccggccggccacccaggaggcagggagcagccgccccatctgccccacagtctccggcctctccagcctcagccccctgcttcagtcccttccccatgcttccttgcctgatgacaataaagcttgttgactcagctaaaaaaaaaaaaaaa

SEQ ID NO: 506 - protein, 432 aa, Homo sapien
MTTSIRQFTSSSSIKGSSGLGGGSSRTSCRLSGGLGAGSCRLGSAGGLGSTLGGSSYSSCYSFGSGGGYGSSFGGVDGLLAGGEKATMQNLNDRLASYLDKVRALEEANTELEVKIRDWYQRQAPGPARDYSQYYRTIEELQNKILTATVDNANILLQIDNARLAADDFRTKFETEQALRLSVEADINGLRRVLDELTLARADLEMQIENLKEELAYLKKNHEEEMNALRGQVGGEINVEMDAAPGVDLSRILNEMRDQYEKMAEKNRKDAEDWFFSKTEELNREVATNSELVQSGKSEISELRRTMQALEIELQSQLSMKASLEGNLAETENRYCVQLSQIQGLIGSVEEQLAQLRCEMEQQNQEYKILLDVKTRLEQEIATYRRLLEGEDAHLTQYKKEPVTTRQVRTIVEEVQDGKVISSREQVHQTTR

SEQ ID NO: 507 - DNA, 1414 bp, Homo sapien
cgccaaccccacctagatgcaaagcaggattcaaaagaacatctttgcgttttctaccggctccccatcatcgtactagggaggaagaagcgggtgagaaacaaaacttctttccattgtcctgcccgtttctgcggacttgttctgaggccgaggcacctctaagatactgatggctctgcagaggacccattcattgcttctgcttttgctgctgaccctgctggggctggggctggtccagccctcctatggccaggatggcatgtaccagcgattcctgcggcaacacgtgcaccctgaggagacaggtggcagtgatcgctactgcaacttgatgatgcaaagacggaagatgactttgtatcactgcaagcgcttcaacaccttcatccatgaagatatctggaacattcgtagtatctgcagcaccaccaatatccaatgcaagaacggcaagatgaactgccatgagggtgtagtgaaggtcacagattgcagggacacaggaagttccagggcacccaactgcagatatcgggccatagcgagcactagacgtgttgtcattgcctgtgagggtaacccacaggtgcctgtgcactttgacggttagatgccaccatgtagggattatcgcgagtggttgaccttacacttactccttaaatagcagtgagtaatgcatttgagctgccccaggctctgtctcctcagctcatttcttactctttttctctatataactcattctattaaatacattgcaccaaagagatatggagacataaacctgtaatgaatgaggctgggcttttctgtaataagcttccttttataatactggtcagcttagctctctcagatcctatcctgtggaatttagttattatgtgtatttatgtagtatttcaaacatttcaaaatgctttcatctatgtttatcacattttaataccacagcacttataatgatgtcactacatatagaagctcaaagttaagggatttgctgaagactgtaaagttaatggaagaattgagacaaaaatccagtgtagctggccacttatccagggctttttctacttcatcacaaggaatgttttgaaagtgtctgctttttttatccttaaaattcacctgtcagggaggcattaaaaatttggaaatgtatgccagcaaaatgtgagctctgtattttttggcattcttatgtttgggtttaataagattaagaaaatgatactgggaattttctttttcctgaaactttgaatcaccctagtaagtcaaagtactaaaaaatgtactagatcattaagacttatgtgctcttactgattgaaagattttttatgttttccttgtaataaaggacctaaaccgaaggtacctgaaaaaaaaaaaaaaa

SEQ ID NO: 508 - protein, 147 aa, Homo sapien
MALQRTHSLLLLLLLTLLGLGLVQPSYGQDGMYQRFLRQHVHPEETGGSDRYCNLMMQRRKMTLYHCKRFNTFIHEDIWNIRSICSTTNIQCKNGKMNCHEGVVKVTDCRDTGSSRAPNCRYRAIASTRRVVIACEGNPQVPVHFDG

SEQ ID NO: 509 - DNA, 874 bp, Homo sapien
gggcgggaagacgtgcagcctgggccgtggctgctcactgcgttcggacccagacccgctgcaggcagcagcagcccccgcccgcgcacgagcatggagctctggggggcctacctcctcctctgcctcttctccctcctgacccaggtcaccaccgagccaccaacccagaagcccaagaagattgtaaatgccaagaaagatgttgtgaacacaaagatgtttgaggagctcaagagccgtctggacaccctggcccaggaggtggccctgctgaaggagcagcaggccctgcagacggtctgcctgaaggggaccaaggtgcacatgaaatgctttctggccttcacccagacgaagaccttccacgaggccagcgaggactgcatctcgcgcgggggcaccctgagcacccctcagactggctcggagaacgacgccctgtatgagtacctgcgccagagcgtgggcaacgaggccgagatctggctgggcctcaacgacatggcggccgagggcacctgggtggacatgaccggcgcccgcatcgcctacaagaactgggagactgagatcaccgcgcaacccgatggcggcaagaccgagaactgcgcggtcctgtcaggcgcggccaacggcaagtggttcgacaagcgctgccgcgatcagctgccctacatctgccagttcgggatcgtgtagccggcggggcgggggccgtggggggcctggaggagggcaggagccgcgggaggccgggaggagggtggggaccttgcagcccccatcctctccgtgcgcttggagcctctttttgcaaataaagttggtgcacgttcgcggagaggaaaaaaaaaaaaaaaaaaaaaaaaaa

SEQ ID NO: 510 - protein, 202 aa, Homo sapien
MELWGAYLLLCLFSLLTQVTTEPPTQKPKKIVNAKKDVVNTKMFEELKSRLDTLAQEVALLKEQQALQTVCLKGTKVHMKCFLAFTQTKTFHEASEDCISRGGTLSTPQTGSENDALYEYLRQSVGNEAEIWLGLNDMAAEGTWVDMTGARIAYKNWETEITAQPDGGKTENCAVLSGAANGKWFDKRCRDQLPYICQFGIV

SEQ ID NO: 511 - DNA, 931 bp, Homo sapien
gcagagcccagggagctggaggtcggcgcttcctctcgtgcttggtccactgacgcgcggccccgccgcgaggagcatcagatccatgctgctgctgactcggagccccacagcttggcacaggctctctcagctcaagcctccggtcctccctgggaccctgggaggccaggccctgcatctgaggtcctggcttttgtcaaggcagggccctgcagagacaggtgggcagggccagccccagggccctgggcttcgaacccggctgctgatcacaggcctgttcggggctggactcggtggggcctggctggccctgagggctgagaaggagaggctgcagcagcaaaagcgaacagaagccctgcgccaggcagctgtgggccagggcgacttccacctgctggatcacagaggccgggctcgctgcaaggctgacttccggggccagtgggtgctgatgtactttggcttcactcactgccctgacatctgcccagacgagctggagaagctggtgcaggtggtgcggcagctggaagcagagcctggtttgcctccagtgcagcctgtcttcatcactgtggaccccgagcgggacgacgttgaagccatggcccgctacgtccaggacttccacccaagactgttgggtctgaccggctccaccaaacaggttgcccaggctagtcacagttaccgcgtgtactacaatgccggccccaaggatgaggaccaggactacatcgtggaccactccattgccatctacctgctcaaccctgacggcctcttcacggattactacggccggagcagatcggctgagcagatctcagacagtgtgcggcggcacatggcggctttccgcagtgtcctgtcttgagccactgcagtctgggccccatcattaaacgggctgcgtttaaaa

SEQ ID NO: 512 - protein, 266 aa, Homo sapien
MLLLTRSPTAWHRLSQLKPPVLPGTLGGQALHLRSWLLSRQGPAETGGQGQPQGPGLRTRLLITGLFGAGLGGAWLALRAEKERLQQQKRTEALRQAAVGQGDFHLLDHRGRARCKADFRGQWVLMYFGFTHCPDICPDELEKLVQVVRQLEAEPGLPPVQPVFITVDPERDDVEAMARYVQDFHPRLLGLTGSTKQVAQASHSYRVYYNAGPKDEDQDYIVDHSIAIYLLNPDGLFTDYYGRSRSAEQISDSVRRHMAAFRSVLS

SEQ ID NO: 513 - DNA, 1216 bp, Homo sapien
ttcggcacttgggagaagatgtttgaaaaaactgactctgctaatgagcctggactcagagctcaagtctgaactctacctccagacagaatgaagttcatctcgacatctctgcttctcatgctgctggtcagcagcctctctccagtccaaggtgttctggaggtctattacacaagcttgaggtgtagatgtgtccaagagagctcagtctttatccctagacgcttcattgatcgaattcaaatcttgccccgtgggaatggttgtccaagaaaagaaatcatagtctggaagaagaacaagtcaattgtgtgtgtggaccctcaagctgaatggatacaaagaatgatggaagtattgagaaaaagaagttcttcaactctaccagttccagtgtttaagagaaagattccctgatgctgatatttccactaagaacacctgcattcttcccttatccctgctctggattttagttttgtgcttagttaaatcttttccagggagaaagaacttccccatacaaataaggcatgaggactatgtgaaaaataaccttgcaggagctgatggggcaaactcaagcttcttcactcacagcaccctatatacacttggagtttgcattcttattcatcagggaggaaagtttctttgaaaatagttattcagttataagtaatacaggattattttgattatatacttgttgtttaatgtttaaaatttcttagaaaacaatggaatgagaatttaagcctcaaatttgaacatgtggcttgaattaagaagaaaattatggcatatattaaaagcaggcttctatgaaagactcaaaaagctgcctgggaggcagatggaacttgagcctgtcaagaggcaaaggaatccatgtagtagatatcctctgcttaaaaactcactacggaggagaattaagtcctacttttaaagaatttctttataaaatttactgtctaagattaatagcattcgaagatccccagacttcatagaatactcagggaaagcatttaaagggtgatgtacacatgtatcctttcacacatttgccttgacaaacttctttcactcacatctttttcactgactttttttgtgggggcggggccggggggactctggtatctaattctttaatgattcctataaatctaatgacattcaataaagttgagcaaacattttactt

SEQ ID NO: 514 - protein, 109 aa, Homo sapien
MKFISTSLLLMLLVSSLSPVQGVLEVYYTSLRCRCVQESSVFIPRRFIDRIQILPRGNGCPRKEIIVWKKNKSIVCVDPQAEWIQRMMEVLRKRSSSTLPVPVFKRKIP

SEQ ID NO: 515 - DNA, 3516 bp, Homo sapien
ggatcctggagacaactttgccgtgtgacgcgccgggaggactgcagggcccgcggccgagggctcggcgccgcctgtgagcgggcccgcgcggccggctctcccgggcaccaagcttgctccgcgccactgcccgccggcccgcggcgaggacgacctgcccgtctccgccgccggcggcccttcctggcgcgaggcagtgagggcgaggcgctcaggtgcgagcgcggggccccgccgcagcgcccgccgcagcgccgcgccaagccgcgcccggctccgctccggggggctccagcgccttcgcttccgtctcagccaagttgcgtggacccgctctttcgccaccttccccagccgccggccgaaccgccgctcccactgacgctgctttcgcttcacccgaaccggggctgcggggcccccgacgcggaaaggatggggagaaggctgcagatgccgaggcgccccgagacgcccgtgcggcagtgacccgcgacctccgccccgcccggcgcgcccctcgggcccccggggccctcggcgccccttccctgccgcgcgggaacccccgaggcccggccggccccctccccctgcgagccggcggcagccctcccggcgggcgggcgggcggaggcccgggcgggcgcgggcgcgggcgggggcggggcggggcggcgcgcccggagcccggagcccggccctgcgctcggctcgactcggctcgcctcgcggcgggcgccctcgtcgccagcggcgcaccatggacgggctgcccggtcgggcgctgggggccgcctgccttctgctgctggcggccggctggctggggcctgaggcctggggctcacccacgcccccgccgacgcctgccgcgccgccgccacccccgccacccggagccccgggtggctcgcaggacacctgtacgtcgtgcggcggcttccggcggccagaggagctcggccgagtggacggcgacttcctggaggcggtgaagcggcacatcttgagccgcctgcagatgcggggccggcccaacatcacgcacgccgtgcctaaggccgccatggtcacggccctgcgcaagctgcacgcgggcaaggtgcgcgaggacggccgcgtggagatcccgcacctcgacggccacgccagcccgggcgccgacggccaggagcgcgtttccgaaatcatcagcttcgccgagacagatggcctcgcctcctcccgggtccgcctatacttcttcatctccaacgaaggcaaccagaacctgtttgtggtccaggccagcctgtggctttacctgaaactcctgccctacgtcctggagaagggcagccggcggaaggtgcgggtcaaagtgtacttccaggagcagggccacggtgacaggtggaacatggtggagaagagggtggacctcaagcgcagcggctggcataccttcccactcacggaggccatccaggccttgtttgagcggggcgagcggcgactcaacctagacgtgcagtgtgacagctgccaggagctggccgtggtgccggtgttcgtggacccaggcgaagagtcgcaccgaccctttgtggtggtgcaggctcggctgggcgacagcaggcaccgcattcgcaagcgaggcctggagtgcgatggccggaccaacctctgttgcaggcaacagttcttcattgacttccgcctcatcggctggaacgactggatcatagcacccaccggctactacggcaactactgtgagggcagctgcccagcctacctggcaggggtccccggctctgcctcctccttccacacggctgtggtgaaccagtaccgcatgcggggtctgaaccccggcacggtgaactcctgctgcattcccaccaagctgagcaccatgtccatgctgtacttcgatgatgagtacaacatcgtcaagcgggacgtgcccaacatgattgtggaggagtgcggctgcgcctgacagtgcaaggcaggggcacggtggtggggcacggagggcagtcccgggtgggcttcttccagccccccgcgggaacggggtacacggtgggctgagtacagtcattctgttgggctgtggagatagtgccagggtgcggcctgagatatttttctacagcttcatagagcaaccagtcaaaaccagagcgagaaccctcaactgacatgaaatactttaaaatgcacacgtagccacgcacagccagacgcatcctgccacccacacagcagcctccaggataccagcaaatggatgcggtgacaaatggcagcttagctacaaatgcctgtcagtcggagagaatggggtgagcagccaccattccaccagctggcccggccacgtctcgaagttgcgccttcccgagcacacataaaagcacaaagacagagacgcagagagagagagagagccacggagaggaaaagcagatgcaggggtggggagcgcagctcggcggaggctgcgtgtgccccgtggcttttaccaggcctgctctgcctggctcgatgtctgcttcttcccagcctgggatccttcgtgcttcaaggcctggggagcctgtccttccatgcccttgtcgagggaaagagacccagaaaggacacaacccgtcagagacctgggagcaggggcaatgaccgtttgactgtttgtggcttgggcctctgacatgacttatgtgtgtgtgtgtttttggggtggggagggagggagagaagagggggctaaatttgatgctttaactgatctccaacagttgacaggtcatccttgccagttgtataactgaaaaaggacttttctaccaggtatgaccttttaagtgaaaatctgaattgttctaaatggaaagaaaaaaagttgcaatctgtgcccttcattggggacattcctctaggactggtttggggacgggtgggaatgacccctaggcaaggggatgagaccgcaggaggaaatggcggggaggtggcattcttgaactgctgaggatggggggtgtcccctcagcggaggccaagggaggggagcagcctagttggtcttggagagatggggaaggctttcagctgatttgcagaagttgcccatgtgggcccaaccatcagggctggccgtggacgtggcccctgcccactcacctgcccgcctgcccgcccgcccgcatagcacttgcagacctgcctgaacgcacatgacatagcacttgccgatctgcgtgtgcccagaagtggcccttggccgagcgccgaactcgctcgccctctagatgtccaagtgccacgtgaactatgcaatttaaagggttgacccacactagacgaaactggactcgtacgactctttttatattttttatacttgaaatgaaatcctttgcttcttttttaagcgaatgattgcttttaatgtttgcactgatttagttgcatgattagtcagaaactgccatttgaaaaaaaagttatttttatagcagc

SEQ ID NO: 516 - protein, 407 aa, Homo sapien
MDGLPGRALGAACLLLLAAGWLGPEAWGSPTPPPTPAAPPPPPPPGAPGGSQDTCTSCGGFRRPEELGRVDGDFLEAVKRHILSRLQMRGRPNITHAVPKAAMVTALRKLHAGKVREDGRVEIPHLDGHASPGADGQERVSEIISFAETDGLASSRVRLYFFISNEGNQNLFVVQASLWLYLKLLPYVLEKGSRRKVRVKVYFQEQGHGDRWNMVEKRVDLKRSGWHTFPLTEAIQALFERGERRLNLDVQCDSCQELAVVPVFVDPGEESHRPFVVVQARLGDSRHRIRKRGLECDGRTNLCCRQQFFIDFRLIGWNDWIIAPTGYYGNYCEGSCPAYLAGVPGSASSFHTAVVNQYRMRGLNPGTVNSCCIPTKLSTMSMLYFDDEYNIVKRDVPNMIVEECGCA

SEQ ID NO: 517 - DNA, 5749 bp, Homo sapien
cgcgggagccaacttcaggctgctcagaggaagcccgtgcagtcagtcacctgggtgcaagagcgttgctgcctcgggctctcccgctgcagggagagcggcactcgctggcctggatgtggttggatttaggggggctccgcagcaggggtttcgtggcggtggcaagcgctgcaacaggtagacggcgagagacggaccccggccgaggcagggatggagaccaaaggctaccacagtctccctgaaggtctagatatggaaagacggtggggtcaagtttctcaggctgtggagcgttcttccctgggacctacagagaggaccgatgagaataactacatggagattgtcaacgtaagctgtgtttccggtgctattccaaacaacagtactcaaggaagcagcaaagaaaaacaagaactactcccttgccttcagcaagacaataatcggcctgggattttaacatctgatattaaaactgagctggaatctaaggaactttcagcaactgtagctgagtccatgggtttatatatggattctgtaagagatgctgactattcctatgagcagcagaaccaacaaggaagcatgagtccagctaagatttatcagaatgttgaacagctggtgaaattttacaaaggaaatggccatcgtccttccactctaagttgtgtgaacacgcccttgagatcatttatgtctgactctgggagctccgtgaatggtggcgtcatgcgcgccattgttaaaagccctatcatgtgtcatgagaaaagcccgtctgtttgcagccctctgaacatgacatcttcggtttgcagccctgctggaatcaactctgtgtcctccaccacagccagctttggcagttttccagtgcacagcccaatcacccagggaactcctctgacatgctcccctaatgctgaaaatcgaggctccaggtcgcacagccctgcacatgctagcaatgtgggctctcctctctcaagtccgttaagtagcatgaaatcctcaatttccagccctccaagtcactgcagtgtaaaatctccagtctccagtcccaataatgtcactctgagatcctctgtgtctagccctgcaaatattaacaactcaaggtgctctgtttccagcccttcgaacactaataacagatccacgctttccagtccggcagccagtactgtgggatctatctgtagccctgtaaacaatgccttcagctacactgcttctggcacctctgctggatccagtacattgcgggatgtggttcccagtccagacacgcaggagaaaggtgctcaagaggtcccttttcctaagactgaggaagtagagagtgccatctcaaatggtgtgactggccagcttaatattgtccagtacataaaaccagaaccagatggagcttttagcagctcatgtctaggaggaaatagcaaaataaattcggattcttcattctcagtaccaataaagcaagaatcaaccaagcattcatgttcaggcacctcttttaaagggaatccaacagtaaacccgtttccatttatggatggctcgtatttttcctttatggatgataaagactattattccctatcaggaattttaggaccacctgtgcccggctttgatggtaactgtgaaggcagcggattcccagtgggtattaaacaagaaccagatgacgggagctattacccagaggccagcatcccttcctctgctattgttggggtgaattcaggtggacagtccttccactacaggattggtgctcaaggtacaatatctttatcacgatcggctagagaccaatctttccaacacctgagttcctttcctcctgtcaatactttagtggagtcatggaaatcacacggcgacctgtcgtctagaagaagtgatgggtatccggtcttagaatacattccagaaaatgtatcaagctctactttacgaagtgtttctactggatcttcaagaccttcaaaaatatgtttggtgtgtggggatgaggcttcaggatgccattatggggtagtcacctgtggcagctgcaaagttttcttcaaaagagcagtggaagggcaacacaactatttatgtgctggaagaaatgattgcatcattgataagattcgacgaaagaattgtcctgcttgcagacttcagaaatgtcttcaagctggaatgaatttaggagcacgaaagtcaaagaagttgggaaagttaaaagggattcacgaggagcagccacagcagcagcagcccccacccccacccccacccccgcaaagcccagaggaagggacaacgtacatcgctcctgcaaaagaaccctcggtcaacacagcactggttcctcagctctccacaatctcacgagcgctcacaccttcccccgttatggtccttgaaaacattgaacctgaaattgtatatgcaggctatgacagctcaaaaccagatacagccgaaaatctgctctccacgctcaaccgcttagcaggcaaacagatgatccaagtcgtgaagtgggcaaaggtacttccaggatttaaaaacttgcctcttgaggaccaaattaccctaatccagtattcttggatgtgtctatcatcatttgccttgagctggagatcgtacaaacatacgaacagccaatttctctattttgcaccagacctagtctttaatgaagagaagatgcatcagtctgccatgtatgaactatgccaggggatgcaccaaatcagccttcagttcgttcgactgcagctcacctttgaagaatacaccatcatgaaagttttgctgctactaagcacaattccaaaggatggcctcaaaagccaggctgcatttgaagaaatgaggacaaattacatcaaagaactgaggaagatggtaactaagtgtcccaacaattctgggcagagctggcagaggttctaccaactgaccaagctgctggactccatgcatgacctggtgagcgacctgctggaattctgcttctacaccttccgagagtcccatgcgctgaaggtagagttccccgcaatgctggtggagatcatcagcgaccagctgcccaaggtggagtcggggaacgccaagccgctctacttccaccggaagtgactgcccgctgcccagaagaactttgccttaagtttccctgtgttgttccacacccagaaggacccaagaaaacctgtttttaacatgtgatggttgattcacacttgttcaacagtttctcaagtttaaagtcatgtcagaggtttggagccgggaaagctgtttttccgtggatttggcgagaccagagcagtctgaaggattccccacctccaatcccccagcgcttagaaacatgttcctgttcctcgggatgaaaagccatatctagtcaataactctgattttgatattttcacagatggaagaagttttaactatgccgtgtagtttctggtatcgttcgcttgttttaaaagggttcaaggactaacgaacgttttaaagcttacccttggtttgcacataaaacgtatagtcaatatggggcattaatattcttttgttattaaaaaaacacaaaaaaataataaaaaaatatatacagattcctgttgtgtaataacagaactcgtggcgtggggcagcagctgcctctgagccctcgctcgtccacggtcttctgcatcactggtatacacactcgttagcgtccatttcttatttaattagaatggataagatgatgttaaatgccttggtttgatttctagtatctattgtgttggctttacaaataattttttgcagtcttttgctgtgctgtacattactgtatgtataaattatgaaggacctgaaataaggtataaggatcttttgtaaatgagacacatacaaaaaaaatctttaatggttaataggatgaatgggaaagtatttttgaaagaattctattttgctggagactatttaagtactatctttgtctaaacaaggtaatttttttttgtaaagtgcaatgtcctgcatgcataatgaaccgtttacagtgtatttaagaaagggaaagctgtgccttttttagcttcatatctaatttaccattattttacagtctctgttgtaaataaccacactgaaacctcttcggttgtcttgaaacctttctactttttctgtactttttgttttgttcttggtctcccgcttggggcatttgtgggactccagcacgttttctggcttctgcttcatcctgctccatcggggaatgacacactgcggtgtctgcagctcctggaaggtgtcatttgacaacacatgtgggagaggaggtccttggagtgctgcagctttgggaaagcctgcctcgtttcccttttcctctagaagcagaaccagctctacgagagtgagactgggaacttgatggctcagagagcatcttttcctcccattttagaaaatcagattttctcctgtgggaaaaaaaaattccatgcactctctctctgttaaagatcagctattcccttctgatcttggaaagaggttctgcactcctggaaccggtcacaggaacgcacagatcatggcaggatgcgctgggacggcccatcttggcaaggttcagtctgaatggcatggagaccgggagatagaggggttttagatttttaaaaggtaggttttaaaaataagttttatacataaacagttttggagaaaaattacagatcatataagcaagacagtggcactaaaatgtttaattcattaatctgtttgtttggcactgatgcaatgtatggcttttctcttgccccaaatcacaaacatatgtatctttggggaaactaacaatatgattgcactaaataaactactttgaatagaggccaaattaatcttttaaaaatgatgataatcatcaggtttactcagtgaaatcatattaattattttccaaaatctaaaagctgtagctggagaagcccatggccacgaggaagcagcaattaattagatcaacacttttctccagggttcaccatgcaggcaacattaccttgtctttcaaaagacacctgccttagtgcaaggggaaacctgtgaaagctgcactcagagggaggagtctttcttacataatttgcaatttcaggaatttaatttataggcagatctttaaatacagtcaacttacggtgcacagtaatatgaaagccacactttgaaggtaataaatacacagcatgcagactgggagttgctagcaaacaaatggcttacttacaaaagcagcttttagttcagacttagtttttataaaatgagaattctgacttacttaaccaggtttgggatggagatggtctgcatcagctttttgtattaacaaagttactggctctttgtgtgtctccaggtaactttgcttgattaaacagcaaagccatattctaaattcactgttgaatgcctgtcccagtccaaattgtctgtctgctcttatttttgtaccatattgctcttaaaaatcttggtttggtacagttcataattcaccaaaaagttcatataatttaaagaaacactaaattagtttaaaatgaagcaatttatatctttatgcaaaaacatatgtctgtctttgcaaaggactgtaagcagattacaataaatcctttacttt

SEQ ID NO: 518 - protein, 984 aa, Homo sapien
METKGYHSLPEGLDMERRWGQVSQAVERSSLGPTERTDENNYMEIVNVSCVSGAIPNNSTQGSSKEKQELLPCLQQDNNRPGILTSDIKTELESKELSATVAESMGLYMDSVRDADYSYEQQNQQGSMSPAKIYQNVEQLVKFYKGNGHRPSTLSCVNTPLRSFMSDSGSSVNGGVMRAIVKSPIMCHEKSPSVCSPLNMTSSVCSPAGINSVSSTTASFGSFPVHSPITQGTPLTCSPNAENRGSRSHSPAHASNVGSPLSSPLSSMKSSISSPPSHCSVKSPVSSPNNVTLRSSVSSPANINNSRCSVSSPSNTNNRSTLSSPAASTVGSICSPVNNAFSYTASGTSAGSSTLRDVVPSPDTQEKGAQEVPFPKTEEVESAISNGVTGQLNIVQYIKPEPDGAFSSSCLGGNSKINSDSSFSVPIKQESTKHSCSGTSFKGNPTVNPFPFMDGSYFSFMDDKDYYSLSGILGPPVPGFDGNCEGSGFPVGIKQEPDDGSYYPEASIPSSAIVGVNSGGQSFHYRIGAQGTISLSRSARDQSFQHLSSFPPVNTLVESWKSHGDLSSRRSDGYPVLEYIPENVSSSTLRSVSTGSSRPSKICLVCGDEASGCHYGVVTCGSCKVFFKRAVEGQHNYLCAGRNDCIIDKIRRKNCPACRLQKCLQAGMNLGARKSKKLGKLKGIHEEQPQQQQPPPPPPPPQSPEEGTTYIAPAKEPSVNTALVPQLSTISRALTPSPVMVLENIEPEIVYAGYDSSKPDTAENLLSTLNRLAGKQMIQVVKWAKVLPGFKNLPLEDQITLIQYSWMCLSSFALSWRSYKHTNSQFLYFAPDLVFNEEKMHQSAMYELCQGMHQISLQFVRLQLTFEEYTIMKVLLLLSTIPKDGLKSQAAFEEMRTNYIKELRKMVTKCPNNSGQSWQRFYQLTKLLDSMHDLVSDLLEFCFYTFRESHALKVEFPAMLVEIISDQLPKVESGNAKPLYFHRK

SEQ ID NO: 519 - DNA, 3589 bp, Homo sapien
actggcggccatggaactcaccggtaatagaggacacatctcttaactgggttgctctaagaactgatgtctaaaccgtctcagcatggcctgtagaggaggagctgggaatggccaccgtgcctcagctacactctctcgggttagccctggaagtctttacacatgtagaacccgtacccataatatatgcatggtatctgactttttctacccaaatatgggaggcgtggaaagccacatttaccagctctctcagtgcctgattgaaagagggcataaggttataattgtcacccatgcttatggaaatcgaaaaggcatccgttacctcaccagtggcctcaaagtctattacttgcctctgaaagtcatgtacaaccagtctacagccacgaccctctttcacagtctgccattgctcaggtacatatttgttcgggagagagtcacgataatccattcacatagttctttttctgctatggcccatgatgctctcttccacgccaagacaatggggcttcagacagtcttcacggaccattccctttttggatttgctgatgtcagctcggtgcttacaaacaagcttctaaccgtgtctctttgtgatacaaaccacatcatttgtgtgtcttatactagtaaggaaaatactgtactaagagcagcactgaatcctgaaatagtgtccgtcattcctaatgctgtagatcctactgacttcactccagacccatttagaaggcatgatagtataactattgttgttgtcagcagacttgtttacagaaaagggatcgatttgcttagtggtataatacctgaactctgtcagaaatatccagatttaaatttcataattggaggagagggaccaaagagaatcattttggaagaagttcgggaaagataccagctgcatgacagggtgcgtcttttgggagctttagaacacaaggatgttagaaatgtcttagttcaaggacatatttttctgaatacctcccttactgaagcattctgcatggcgatcgtggaagcagccagttgtggtttacaggttgtaagtaccagagttggtggaattcctgaggtgcttccagaaaaccttattattttatgtgagccttcagtaaaatctttgtgtgaaggattggaaaaggctattttccaactgaagtcagggacattgccagctccagaaaacatccataacatagtaaagactttctacacctggaggaatgttgcagaaagaactgaaaaggtatatgaccgggtatcagtggaagctgtgttgccaatggacaaacgactggacagacttatttctcactgcggcccagtaacaggctacatctttgctttgttggcagttttcaacttcctcttcctcattttcttgagatggatgactccagattctatcattgatgttgcaatagatgccactgggccacggggtgcctggactaataactattctcacagtaaaagagggggtgagaataatgagatatctgaaaccaggtagaaggaagcctagattgtaagattttaaacatttgtaatagttctataaagactatggaaaataaccttgcttttggggggtttttgtttttttagagttaatttagtaagttatgctacctctatatcattcaatattttctgttgaggaaagataaaaatgtatgcaattcctgagtgtagaaacttcttgcacttatttaaaatttaggagagaacatttaagccactcaggtatgcaatttttcagactactgaaatccctgtagcagagatgttttaacattatattttgagagctttgggtgctgaagggccaaacgttttctgggcattttttggccagtttttaatgtaacaccattagacactcaccagatgtttacaagttttctttaggggaactacaacaattatatgaactgttttatatcatgttcatatacatttattaggaatctaaatcatgtctttgaacatttattaggttcactcagtaggtgttacatgtaattaacaggttccttgagtaagatagtccatcagttaccagcacattttgaacccctgctctgtgtagaatgttgaactagatgcttcccgccattaaggaccaggggtgcattcactctttgtttaccattcaaatggcttacttcatcataattgtggttgatatgagatcaatatccaacatgccaaaaatgctcatgccagttaatgccaggaaaaaaatcaccgacacactactagtactttgttcctgttgtatgcattctcctaggtagagcctccatcttcagttgtgtttgtgaaggtattttttgctttttaaatactggggaccgatatcactgttgatagtgcagagaaaccctccacatttttcagtgcataattgagttttctataaatgccttcgtgttttctgagcagaatgtacgaggtgtgccatcccaaaaccagctgctaccctgtccttttaatgtaagtcactccccttcactgtggcctcgctgatgtctgataagtattgtcagtgtgcaaaaggctttacttcagaatggtttatttatagcaaactaagttgaaaattttagaaacagtctttgtgggtggatgttattaactgtcattgttgttgcccagagccatgggttttttaaccccaaattatccacatggtgtgtattatgaattctttgaactcttaaggtttttgtgagaaaaggactgtgaattcaaaacaataaggcacttgtgggtgcactacatagattctgacagtgttgtgattctgtataggatttttaaaaatgacaacattcacaaaatttattactttttaaaaaataacatgcctattaactggttgcactgatataaaagaaatatatttgtgttttgtttgtactaaaatgcaaaagcaagagtgcaatttttaaaatctagaagttaggggttttgttggagaaaaatggactgatctttaaactattcagtcttactgggatttttatgcatagaaactcacatataaacatgaaataaacagtgccagtattcataggaaagtgagaaactgtaatatttggccattattctattcaacaggttttagaggcatgccaccattttttccttatatttttgcttaatttttttaaattgtcatttaattcttaaactgtcatttatttgagatggaaataagatctaaagttagttgcctttgcctgtaaaacatgtgatttgcaaattattattttcctttttttttaacaaatggaagtaaatttgtttcacgtaaatcttaattttcaacctttctggataccttaattgtaactgtcagtttgcactggtcggtatatggaaacacattgctctaccctgctacttagttgattttaaagtgaatttacagtgatgagaaatttgtgaaaaatatattgtatttcttttgatgtttcaaaaggttgcctatgaaaaactgatttgttaaaacatgctacatgtccaaaaataaagaccagaatgacattttgat

SEQ ID NO: 520 - protein, 484 aa, Homo sapien
MACRGGAGNGHRASATLSRVSPGSLYTCRTRTHNICMVSDFFYPNMGGVESHIYQLSQCLIERGHKVIIVTHAYGNRKGIRYLTSGLKVYYLPLKVMYNQSTATTLFHSLPLLRYIFVRERVTIIHSHSSFSAMAHDALFHAKTMGLQTVFTDHSLFGFADVSSVLTNKLLTVSLCDTNHIICVSYTSKENTVLRAALNPEIVSVIPNAVDPTDFTPDPFRRHDSITIVVVSRLVYRKGIDLLSGIIPELCQKYPDLNFIIGGEGPKRIILEEVRERYQLHDRVRLLGALEHKDVRNVLVQGHIFLNTSLTEAFCMAIVEAASCGLQVVSTRVGGIPEVLPENLIILCEPSVKSLCEGLEKAIFQLKSGTLPAPENIHNIVKTFYTWRNVAERTEKVYDRVSVEAVLPMDKRLDRLISHCGPVTGYIFALLAVFNFLFLIFLRWMTPDSIIDVAIDATGPRGAWTNNYSHSKRGGENNEISETR

SEQ ID NO: 521 - DNA, 3040 bp, Homo sapien
gcctctcttcttgcgctgctcagctgggaacatcgtctcaccaggggcagcagcgacgcgctgcacagccagacaggagctggttgcggggcatggaagcagcctccttggcagccgggagaggagcaagcgcacgccactgcccgtgacccaggcgtccggctgctgtcccctgccggggagctcatccacgcagaggtctctccctgtcctccctgcgagcttttcctctgcagagcccagtggagccagccatgtaccgcggcaacgcttgctgaccccagtgaggagagaggcctgaatccgagggccctggcacctgtgagctcttggctgtcacctgccccaagcctcgcacctccgctccacagcagtccccacaggagacaaccctgacgggagcatggagctgctgtccacgccccacagcattgagatcaacaacatcacctgcgactccttccgcatctcctgggccatggaggacagtgacctggagagggtcacccattacttcattgaccttaacaagaaggagaataagaattccaacaagttcaagcaccgggacgtccccaccaagctcgtggccaaggcagtgccactgcccatgacggtgagaggccactggttcctgagcccccgcacggagtacagtgtggccgtgcagacggcagtgaagcagagcgatggggagtacctggtgtccggctggagcgagacggtggagttctgcactggggattatgccaaggagcacctggctcagcttcaggagaaagctgagcagatcgcaggccgcatgctccgcttctccgtcttctaccgcaaccatcacaaggagtacttccagcatgccaggacccactgcgggaacatgctgcagccttacctgaaggacaacagcggcagccacggctcccccaccagcggtatgctccacggggtcttcttcagctgcaacacggagttcaacacgggccagcccccgcaggactccccctacggccgctggcgcttccagatcccagctcagcgcctcttcaatcccagcaccaacctctactttgcggacttctactgcatgtacacggcctaccactacgccatcctggtgctggcgcccaaaggctccctgggggaccgcttctgccgcgaccgcctgcccctcctggacattgcttgcaacaagttcctgacctgcagcgtggaggatggggagctggtcttccgccacgcccaggacctcatcctggagatcatctacactgagcccgtcgacctgtccctgggcaccctgggggagatcagtgggcaccagctcatgagtctgtctactgccgatgccaagaaggaccccagctgcaagacctgcaacatcagcgtgggccgctagggactcctggggagctggggggcgagggagagatgagcggaaggtggaggtgggtagcccaggttcagggagctggctttctctctcctgcccccctgctccctccactctgcccagctgccctcccctcgccccttggcattggaggcaacagacggtggtcctcttggtaagtgtggcccacacccagcctggtggacatggaaaggcttctcagcctctgtagttggcagctgggctggacttctggagaacttcccctttcctctggtttccttgtcctactgttctttgcctcgtccaggtctctatctcccaaagacctgcccacctcctgggctctcccagggaagcccctctgggccaaagcccatgggtagcttggctgcctccagaagagatgcagagagctgtggggcgatctttcttagtcccactcaccccactcagggccaaccacagaatgccccctccctgctgagctgggtctctggggcttcccactccaggcctggatcccttccttctataaatagtctcctgcaccaccgtgactccctggctgctccttgccccaaagaaccctcttcctgcatgggagagctgtccctccttctccacctgcccaccgggacactccccctgctctctagaaaggaactctctttcttctcttggcactgggggcgtcaggctgtcggatgttccttccttccataccccagcataccttctccttgcttagagtgcaggggtctgagacagcagccactggggttgaggagggggaggagacccctgagacccagaggtgccccttcctcagctgggagtgggccgcctcatgctctgctggggcctggcatggaacgtgagacctgtaagctgtcccgcgggccccggcaccccgcccagctgtgcactttgctcactcgctctgccatggtgccatgactgtactgtgcccatgcgtgacctggactgtggaccctctgctgctccgcctctcccctccccactggctctgtctgctctcctgccaccctgctggccgggagcccctccccggggagttcttggtgaagtccttcccgggcctccttgtgtttttgcctcattcctactgtcacacaggtcacgagggtggactccctacaatcaacaaagcaaacagagagcctgtgggaggggctgacagcagcagccggctgtttgggggatgatggaggtgacatcaggcagaggagagtgcagcctcacagtgactttctcagaggtgacagagatgatggatgagcagctggattttcgtgatgaaggacggaagcagcagcgggccggcaaggccatacctcggtgagggacaggtggacaacggtcacctatctgtagccaggggcagttgtgtggccagctgtctctctgggatgagtcaggaggcctggaggcttggggagaggtgtggagaaggagagaacatggcccaggccctttccttccccctgtgctgacagcattgctgtgggggtggcccactgccctcccctggccctcatgtccccccggggctggggtccgcctgcctgtgctgtgcttgcgacgtgcatcaataaaccaccatggcctgagggccctgctcgtctc

SEQ ID NO: 522 - protein, 330 aa, Homo sapien
MELLSTPHSIEINNITCDSFRISWAMEDSDLERVTHYFIDLNKKENKNSNKFKHRDVPTKLVAKAVPLPMTVRGHWFLSPRTEYSVAVQTAVKQSDGEYLVSGWSETVEFCTGDYAKEHLAQLQEKAEQIAGRMLRFSVFYRNHHKEYFQHARTHCGNMLQPYLKDNSGSHGSPTSGMLHGVFFSCNTEFNTGQPPQDSPYGRWRFQIPAQRLFNPSTNLYFADFYCMYTAYHYAILVLAPKGSLGDRFCRDRLPLLDIACNKFLTCSVEDGELVFRHAQDLILEIIYTEPVDLSLGTLGEISGHQLMSLSTADAKKDPSCKTCNISVGR

SEQ ID NO: 523 - DNA, 2225 bp, Homo sapien
ggttctttgcactgaccaatgctgagagcagaccctcggagcagccgggttggaagtgtctctccacagtcaccagacagatccaggataggatgggcagcccagtgcaccgagtgtcattgggggatacctggagcaggcaaatgcaccccgacatagagagcgagaggtatatgcagtcctttgacgtggaacggctcaccaacatccttgatggaggtgcccagaacactgcactccgcaggaaagttgagagcatcatccacagttacccggagtttagctgtaaggacaattatttcatgacccagaatgagcgttataaggctgccatgcggagggcattccacatccggttgatagctcggcgcctgggttggttagaagatggtcgtgaattaggctacgcttacagagccctttctggagacgtggccttaaatatacacagagtcttcgtgagagccctcaggagcctgggctcagaggagcagattgccaaatgggacccactctgcaaaaacatccagatcatcgcaacgtatgcacagacagagttgggacatgggacatatcttcagggcctggagactgaagccacctatgacgcagccacccaggagtttgtgatacacagccccacgctgactgccaccaaatggtggcctggagacttgggacggtcagccacccatgccctggtccaggcccagctgatctgctcaggagccaggcggggcatgcacgcttttattgtgccaatccggagtcttcaggaccacaccccactgccaggaatcatcattggggacatcggacccaagatggactttgatcaaacagacaatggcttcctgcagctgaaccatgtgcgggtccccagggagaacatgctgagtcgctttgcacaggtcttgccagatggcacctacgtcaaactcggtacagcacagagcaactaccttcccatggtggtggtgcgggtggagctgctgtcaggggagatcctccctatactgcagaaggcctgtgtcatcgccatgcgctactcggtcatccgccgccaatcccggctccggcccagtgacccagaggcaaaggtcctggactaccagacacaacagcagaaactctttcctcagctggccatcagttatgccttccatttcctggcagtcagcctcttggagttcttccagcactcctacactgccattctgaaccaagacttcagcttcctgcctgagctccacgcgctgagcacgggcatgaaggccatgatgtcagaattctgcacccagggagctgagatgtgccgcagggcctgtggcggacatggctactcaaagctgagtggcctgccatcactggtcaccaaattgtcggcctcctgcacctacgagggtgagaacacagtgctctacctgcaggtggccaggttcctggtgaagagctacctgcagactcagatgtcccctggctccacgccacagagatctctctctccatctgtcgcatatctcaccgcacctgacctggccaggtgtccagcccagagggcagccgacttcctctgcccggagctctacaccacggcctgggcacatgtggcagtaaggctcataaaggactcagtgcagcatttacagaccctgacgcaatccggagctgaccagcacgaggcttggaaccagaccactgtcatacacctccaggctgctaaggtgcactgctactatgtcactgtgaagggttttacagaagctctggagaaactagaaaatgaaccagcgattcagcaggtgctcaagcgcctctgtgacctccatgccatacatggaatcttgactaactcgggtgactttctccatgacgccttcctgtctggtgcccaagtggacatggcaagaacagcctacctggacctgctccgcctgatccggaaggatgccatcctgttaactgatgcttttgacttcaccgatcagtgtttaaattcagcccttggctgttatgatggaaacgtctacgaacgcctgttccagtgggctcagaagtcaccaaccaatactcaggagaaccctgcctatgaggaatatataagaccacttttacaaagttggagatccaagctatgaaataaccaacagtattcaagaagcaaccagcaccatcatgtgataatggtactatggcatatatgcaacattaaaattttaaattag

SEQ ID NO: 524 - protein, 681 aa, Homo sapien
MGSPVHRVSLGDTWSRQMHPDIESERYMQSFDVERLTNILDGGAQNTALRRKVESIIHSYPEFSCKDNYFMTQNERYKAAMRRAFHIRLIARRLGWLEDGRELGYAYRALSGDVALNIHRVFVRALRSLGSEEQIAKWDPLCKNIQIIATYAQTELGHGTYLQGLETEATYDAATQEFVIHSPTLTATKWWPGDLGRSATHALVQAQLICSGARRGMHAFIVPIRSLQDHTPLPGIIIGDIGPKMDFDQTDNGFLQLNHVRVPRENMLSRFAQVLPDGTYVKLGTAQSNYLPMVVVRVELLSGEILPILQKACVIAMRYSVIRRQSRLRPSDPEAKVLDYQTQQQKLFPQLAISYAFHFLAVSLLEFFQHSYTAILNQDFSFLPELHALSTGMKAMMSEFCTQGAEMCRRACGGHGYSKLSGLPSLVTKLSASCTYEGENTVLYLQVARFLVKSYLQTQMSPGSTPQRSLSPSVAYLTAPDLARCPAQRAADFLCPELYTTAWAHVAVRLIKDSVQHLQTLTQSGADQHEAWNQTTVIHLQAAKVHCYYVTVKGFTEALEKLENEPAIQQVLKRLCDLHAIHGILTNSGDFLHDAFLSGAQVDMARTAYLDLLRLIRKDAILLTDAFDFTDQCLNSALGCYDGNVYERLFQWAQKSPTNTQENPAYEEYIRPLLQSWRSKL

SEQ ID NO: 525 - DNA, 2140 bp, Homo sapien
ggcacgagggagcagctcctcttccatctccagggtctcattctgttgcccaggctggagtgcagtggtgcgatctcggctcacagcaacctctctgcctccagaaatgacctccaccttcaacccccgagaatgtaaactgtccaagcaagaagggcaaaactatggcttcttcctgcgaattgagaaggacaccgagggccacctggtccgggtggttgagaagtgtagcccagcagagaaggctggccttcaagatggagacagagttcttaggatcaatggtgtctttgtggacaaagaagaacatatgcaggttgtggatctggtcagaaagagtgggaattcagtgactttactagttctggatggggattcctatgagaaagcagtgaaaacacgggtggacttgaaagagttgggtcaaagtcagaaggagcaaggtttgagtgataatatactttcccctgtgatgaatggaggtgtgcaaacttggacccagccccggctctgctatctcgtgaaggaaggaggcagctatggcttctctctgaaaactgtccaaggtaaaaagggggtgtacatgactgatattacacctcaaggtgtggctatgagagctggagttctggctgatgatcacttgattgaagtgaatggagagaatgtagaggatgccagccatgaggaagtggttgaaaaggtgaagaagtcaggaagccgtgtcatgttcctgctggtggacaaagaaactgacaagcgtcatgttgagcagaagatacaattcaaaagagaaacagccagtttgaaactgttaccccaccagccccgaattgtggagatgaagaaaggaagcaatggctatggtttctatctgagggcaggctcagaacagaaaggtcaaatcatcaaggacatagattctggaagtccagcagaggaggctggcttgaagaacaatgatctggtagttgctgtcaacggcgagtctgtggaaaccctggatcatgacagtgtggtagaaatgattagaaagggtggagatcagacttcactgttggtggtagacaaagagacggacaacatgtacagactggctcatttttctccatttctctactatcaaagtcaagaactgcccaatggctctgtcaaggaggctccagctcctactcccacttctctggaagtctcaagtccaccagatactacagaggaagtagatcataagcctaaactctgcaggctggctaaaggtgaaaatggctatggctttcacttaaatgcgattcggggtctgccaggctcattcatcaaagaggtacagaagggcggtcctgctgacttggctgggctagaggatgaggatgtcatcattgaagtgaatggggtgaatgtgctagatgaaccctatgagaaggtggtggatagaatccagagcagtgggaagaatgtcacacttctagtctgtggaaagaaggcctatgattatttccaagctaagaaaatccctattgtttcctccctggctgatccacttgacacccctccagattctaaagaaggaatagtggtggagtcaaaccatgactcgcacatggcaaaagaacgggcccacagtacagcctcacattcttcttccaattctgaagatacagagatgtgatgaaaacaagtaatagctttggctgtttatttgatagctgtttctgggtatttaataggaatcctttctcaaggaatgagttgtgacctgtttactgtctctttagaagaaaaactccactggaaaccattcaccatgtgtgattgtcttctgttatcatttgtcttacaggcggctattgcagacggctaatttatgcttaacttaggaagagataaggcaagagctagatttttttcatgtgatcttttccaagcttcaacttaacttaactacatttctctgtatgatgatgtctcttacttctacaggttccttgagcaccaaagatgattcataactctgtataggtgacagctgcttataaaagcatcttagcagataagcctattaaaattgtgcttttgtaacaatgttgtggttgctagaataaataccattaacaaatgcaaaaaaaaaaaaaaaaaaaaaaaa

SEQ ID NO: 526 - protein, 519 aa, Homo sapien
MTSTFNPRECKLSKQEGQNYGFFLRIEKDTEGHLVRVVEKCSPAEKAGLQDGDRVLRINGVFVDKEEHMQVVDLVRKSGNSVTLLVLDGDSYEKAVKTRVDLKELGQSQKEQGLSDNILSPVMNGGVQTWTQPRLCYLVKEGGSYGFSLKTVQGKKGVYMTDITPQGVAMRAGVLADDHLIEVNGENVEDASHEEVVEKVKKSGSRVMFLLVDKETDKRHVEQKIQFKRETASLKLLPHQPRIVEMKKGSNGYGFYLRAGSEQKGQIIKDIDSGSPAEEAGLKNNDLVVAVNGESVETLDHDSVVEMIRKGGDQTSLLVVDKETDNMYRLAHFSPFLYYQSQELPNGSVKEAPAPTPTSLEVSSPPDTTEEVDHKPKLCRLAKGENGYGFHLNAIRGLPGSFIKEVQKGGPADLAGLEDEDVIIEVNGVNVLDEPYEKVVDRIQSSGKNVTLLVCGKKAYDYFQAKKIPIVSSLADPLDTPPDSKEGIVVESNHDSHMAKERAHSTASHSSSNSEDTEM

SEQ ID NO: 527 - DNA, 1071 bp, Homo sapien
gcagttctggtcctcctaggagcggccgcctgcgcggcgcggccccgtggtcggatgctgggcggcagagaggccgaggcgcacgcgcggccctacatggcgtcggtgcagctgaacggcgcgcacctgtgcgcaggcgtcctggtggcggagcggtgggtgctgagcgcggcgcactgcctggaggacgcggccgacgggaaggtgcaggttctcctgggcgcgcactccctgtcgcagccggagccctccaagcgcctgtacgacgtgctccgcgcagtgccccacccggacagccagcccgacaccatcgaccacgacctcctgctgctacagctgtcggagaaggccacactgggccctgctgtgcgccccctgccctggcagcgcgtggaccgcgacgtggcaccgggaactctctgcgacgtggccggctggggcatagtcaaccacgcgggccgccgcccggacagcctgcagcacgtgctcttgccagtgctggaccgcgccacctgcaaccggcgcacgcaccacgacggcgccatcaccgagcgcttgatgtgcgcggagagcaatcgccgggacagctgcaagggtgactccgggggcccgctggtgtgcgggggcgtgctcgagggcgtggtcacctcgggctcgcgcgtttgcggcaaccgcaagaagcccgggatctacacccgcgtggcgagctatgcggcctggatcgacagcgtcctggcctagggtgccggggcctgaaggtcagggtcacccaagcaacaaagtcccgagcaatgaagtcatccactcctgcatctggttggtctttattgagcacctactatatgcagaaggggaggccgaggtgggaggatcattggatctcaggagttggagatcagcatgggccacgtagcgcgactccatctctacaaataaataaaaattagctgggcaattggcgggcatggaggtgggtgcttgtagttccagctactcaggaggctgaggtgggaggatgacttgaacgcaggaggctgaggctgcagtgagttgtgattgcaccactgccct

SEQ ID NO: 528 - protein, 228 aa, Homo sapien
MLGGREAEAHARPYMASVQLNGAHLCAGVLVAERWVLSAAHCLEDAADGKVQVLLGAHSLSQPEPSKRLYDVLRAVPHPDSQPDTIDHDLLLLQLSEKATLGPAVRPLPWQRVDRDVAPGTLCDVAGWGIVNHAGRRPDSLQHVLLPVLDRATCNRRTHHDGAITERLMCAESNRRDSCKGDSGGPLVCGGVLEGVVTSGSRVCGNRKKPGIYTRVASYAAWIDSVLA

SEQ ID NO: 529 - DNA, 2829 bp, Homo sapien
acatttcaaaaaaaatacatagactgatgtttcagacttgtgcagcataagcctacagggtacgaagaatgaactctgagaatgtttggagaatgtttcatcattactaacaggatattcctcatgacattgctgtctgatctttgaccatcagtctgtgacctgccccttctctttacatgcagccgctctctgctccctgccccaatgaacatctgcactaggcccaagccttggagtaatttacctgaagagtgacaccattgattttgaaactactgaagaaacccaagacagctgaaaaccagaaggcatctgaggagaatgagattactcagccgggtggatccagcgccaagccgggccttccctgcctgaactttgaagctgttttgtctccagacccagccctcatccactcaacacattcactgacaaactctcacgctcacaccgggtcatctgattgtgacatcagttgcaaggggatgaccgagcgcattcacagcatcaaccttcacaacttcagcaattccgtgctcgagaccctcaacgagcagcgcaaccgtggccacttctgtgacgtaacggtgcgcatccacgggagcatgctgcgcgcacaccgctgcgtgctggcagccggcagccccttcttccaggacaaactgctgcttggctacagcgacatcgagatcccgtcggtggtgtcagtgcagtcagtgcaaaagctcattgacttcatgtacagcggcgtgctacgggtctcgcagtcggaagctctgcagatcctcacggccgccagcatcctgcagatcaaaacagtcatcgacgagtgcacgcgcatcgtgtcacagaacgtgggcgatgtgttcccggggatccaggactcgggccaggacacgccgcggggcactcccgagtcaggcacgtcaggccagagcagcgacacggagtcgggctacctgcagagccacccacagcacagcgtggacaggatctactcggcactctacgcgtgctccatgcagaatggcagcggcgagcgctctttttacagcggcgcagtggtcagccaccacgagactgcgctcggcctgccccgcgaccaccacatggaagaccccagctggatcacacgcatccatgagcgctcgcagcagatggagcgctacctgtccaccacccccgagaccacgcactgccgcaagcagccccggcctgtgcgcatccagaccctagtgggcaacatccacatcaagcaggagatggaggacgattacgactactacgggcagcaaagggtgcagatcctggaacgcaacgaatccgaggagtgcacggaagacacagaccaggccgagggcaccgagagtgagcccaaaggtgaaagcttcgactcgggcgtcagctcctccataggcaccgagcctgactcggtggagcagcagtttgggcctggggcggcgcgggacagccaggctgaacccacccaacccgagcaggctgcagaagcccccgctgagggtggtccgcagacaaaccagctagaaacaggtgcttcctctccggagagaagcaatgaagtggagatggacagcactgttatcactgtcagcaacagctccgacaagagcgtcctacaacagccttcggtcaacacgtccatcgggcagccattgccaagtacccagctctacttacgccagacagaaaccctcaccagcaacctgaggatgcctctgaccttgaccagcaacacgcaggtcattggcacagctggcaacacctacctgccagccctcttcactacccagcccgcgggcagtggccccaagcctttcctcttcagcctgccacagcccctggcaggccagcagacccagtttgtgacagtgtcccagcccggtctgtcgacctttactgcacagctgccagcgccacagcccctggcctcatccgcaggccacagcacagccagtgggcaaggcgaaaaaaagccttatgagtgcactctctgcaacaagactttcaccgccaaacagaactacgtcaagcacatgttcgtacacacaggtgagaagccccaccaatgcagcatctgttggcgctccttctccttaaaggattaccttatcaagcacatggtgacacacacaggagtgagggcataccagtgtagtatctgcaacaagcgcttcacccagaagagctccctcaacgtgcacatgcgcctccaccggggagagaagtcctacgagtgctacatctgcaaaaagaagttctctcacaagaccctcctggagcgacacgtggccctgcacagtgccagcaatgggaccccccctgcaggcacacccccaggtgcccgcgctggccccccaggcgtggtggcctgcacggaggggaccacttacgtctgctccgtctgcccagcaaagtttgaccaaatcgagcagttcaacgaccacatgaggatgcatgtgtctgacggataagtagtatctttctctctttcttatgaacaaaacaaaacaacaacaaaaaacaaacaaacaaaaaagctatggcactagaatttaagaaatgttttggtttcatttttactttctgtttttgtttttgtttcgtttcattttgtactacatgaagaactgttttttgcctgctggtacattacatttccggaggcttgggtgaataatagttttcccagtctccctcggatggtggccttaaggcctggtagtgcttcaagaggtccactggttggatctctagctactggcctctaaatacaacccttctttacaaaaaaaaaaaaaaaaaaaa

SEQ ID NO: 530 - protein, 668 aa, Homo sapien
MTERIHSINLHNFSNSVLETLNEQRNRGHFCDVTVRIHGSMLRAHRCVLAAGSPFFQDKLLLGYSDIEIPSVVSVQSVQKLIDFMYSGVLRVSQSEALQILTAASILQIKTVIDECTRIVSQNVGDVFPGIQDSGQDTPRGTPESGTSGQSSDTESGYLQSHPQHSVDRIYSALYACSMQNGSGERSFYSGAVVSHHETALGLPRDHHMEDPSWITRIHERSQQMERYLSTTPETTHCRKQPRPVRIQTLVGNIHIKQEMEDDYDYYGQQRVQILERNESEECTEDTDQAEGTESEPKGESFDSGVSSSIGTEPDSVEQQFGPGAARDSQAEPTQPEQAAEAPAEGGPQTNQLETGASSPERSNEVEMDSTVITVSNSSDKSVLQQPSVNTSIGQPLPSTQLYLRQTETLTSNLRMPLTLTSNTQVIGTAGNTYLPALFTTQPAGSGPKPFLFSLPQPLAGQQTQFVTVSQPGLSTFTAQLPAPQPLASSAGHSTASGQGEKKPYECTLCNKTFTAKQNYVKHMFVHTGEKPHQCSICWRSFSLKDYLIKHMVTHTGVRAYQCSICNKRFTQKSSLNVHMRLHRGEKSYECYICKKKFSHKTLLERHVALHSASNGTPPAGTPPGARAGPPGVVACTEGTTYVCSVCPAKFDQIEQFNDHMRMHVSDG

SEQ ID NO: 531 - DNA, 1392 bp, Homo sapien
tgcagactgatatggattcaccactgctaacacctcctggttggaactacaggaatagaactggaaagggaaaaaaggcagcattcaccacatcccaatcctgaatccaagagtctaagatagtcccccactcctatctcaggcttagaggattagattaatctcctggagggaagactcttccttgaaacatttttttttatctgcctgtagctattgggataattcgggaaatccacagggacagttcaagtcatctttgtcctctactttctgttgcactctcagccttgttctctttttagaaactgcatggtaactattatatagctaaagaagagcattctgacctctgccctgggacttcctggatcctcctcttcttataaatacaagggcagagctggtatcccggggagccaggaagcagtgagcccaggagtcctcggccagccctgcctgcccaccaggaggatgaaggtctccgtggctgccctctcctgcctcatgcttgttgctgtccttggatcccaggcccagttcacaaatgatgcagagacagagttaatgatgtcaaagcttccactggaaaatccagtagttctgaacagctttcactttgctgctgactgctgcacctcctacatctcacaaagcatcccgtgttcactcatgaaaagttattttgaaacgagcagcgagtgctccaagccaggtgtcatattcctcaccaagaaggggcggcaagtctgtgccaaacccagtggtccgggagttcaggattgcatgaaaaagctgaagccctactcaatataataataaagagacaaaagaggccagccacccacctccaacacctcctgagcctctgaagctcccaccaggccagctctcctcccacaacagcttcccacagcatgaagatctccgtggctgccattcccttcttcctcctcatcaccatcgccctagggaccaagactgaatcctcctcacaaactggggggaaaccgaaggttgttaaaatacagctaaagttggtggggggaccttaccacccctcagagtgctgcttcacctacactacctacaagatcccgcgtcagcggattatggattactatgagaccaacagccagtgctccaagcccggaattgtcttcatcaccaaaaggggccattccgtctgtaccaaccccagtgacaagtgggtccaggactatatcaaggacatgaaggagaactgagtgacccagaaggggtggcgaaggcacagctcagagacataaagagaagatgccaaggccccctcctccacccaccgctaactctcagccccagtcaccctcttggagcttccctgctttgaattaaagaccactcatgctcttc

SEQ ID NO: 532 - protein, 109 aa, Homo sapien
MKISVAAIPFFLLITIALGTKTESSSQTGGKPKVVKIQLKLVGGPYHPSECCFTYTTYKIPRQRIMDYYETNSQCSKPGIVFITKRGHSVCTNPSDKWVQDYIKDMKEN

SEQ ID NO: 533 - DNA, 802 bp, Homo sapien
accaccatgaatctacttctgatccttacctttgttgcagctgctgttgctgccccctttgatgatgatgacaagatcgttgggggctacatctgtgaggagaattctgtcccctaccaggtgtccttgaattctggctaccacttctgcggtggctccctcatcagcgaacagtgggtggtgtcagcaggtcactgctacaagtcccgcatccaggtgagactgggagagcacaacatcgaagtcctggaggggaatgaacagttcatcaatgcagccaagatcatccgccaccccaaatacaacagccggactctggacaatgacatcctgctgatcaagctctcctcacctgccgtcatcaattcccgcgtgtccgccatctctctgcccactgcccctccagctgctggcaccgagtccctcatctccggctggggcaacactctgagttctggtgccgactacccagacgagctgcagtgcctggatgctcctgtgctgagccaggctgagtgtgaagcctcctaccctggaaagattaccaacaacatgttctgtgtgggcttcctcgagggaggcaaggattcctgccagggtgattctggtggccctgtggtctccaatggagagctccaaggaattgtctcctggggctatggctgtgcccagaagaacaggcctggagtctacaccaaggtctacaactatgtggactggattaaggacaccatagctgccaacagctaaagcccctggtccctctgcagtctctataccaataaagtgaccctgctctcac

SEQ ID NO: 534 - protein, 247 aa, Homo sapien
MNLLLILTFVAAAVAAPFDDDDKIVGGYICEENSVPYQVSLNSGYHFCGGSLISEQWVVSAGHCYKSRIQVRLGEHNIEVLEGNEQFINAAKIIRHPKYNSRTLDNDILLIKLSSPAVINSRVSAISLPTAPPAAGTESLISGWGNTLSSGADYPDELQCLDAPVLSQAECEASYPGKITNNMFCVGFLEGGKDSCQGDSGGPVVSNGELQGIVSWGYGCAQKNRPGVYTKVYNYVDWIKDTIAANS

SEQ ID NO: 535 - DNA, 1375 bp, Homo sapien
attcagaggctgctgcctgcttaggaggttgtagaaagctctgtaggttctctctgtgtgtcctacaggagtcttcaggccagctccctgtcggatggcttttatgaaaaaatatctcctccccattctggggctcttcatggcctactactactattctgcaaacgaggaattcagaccagagatgctccaaggaaagaaagtgattgtcacaggggccagcaaagggatcggaagagagatggcttatcatctggcgaagatgggagcccatgtggtggtgacagcgaggtcaaaagaaactctacagaaggtggtatcccactgcctggagcttggagcagcctcagcacactacattgctggcaccatggaagacatgaccttcgcagagcaatttgttgcccaagcaggaaagctcatgggaggactagacatgctcattctcaaccacatcaccaacacttctttgaatctttttcatgatgatattcaccatgtgcgcaaaagcatggaagtcaacttcctcagttacgtggtcctgactgtagctgccttgcccatgctgaagcagagcaatggaagcattgttgtcgtctcctctctggctgggaaagtggcttatccaatggttgctgcctattctgcaagcaagtttgctttggatgggttcttctcctccatcagaaaggaatattcagtgtccagggtcaatgtatcaatcactctctgtgttcttggcctcatagacacagaaacagccatgaaggcagtttctgggatagtccatatgcaagcagctccaaaggaggaatgtgccctggagatcatcaaagggggagctctgcgccaagaagaagtgtattatgacagctcactctggaccactcttctgatcagaaatccatgcaggaagatcctggaatttctctactcaacgagctataatatggacagattcataaacaagtaggaactccctgagggctgggcatgctgagggattttgggactgttctgtctcatgtttatctgagctcttatctatgaagacatcttcccagagtgtccccagagacatgcaagtcatgggtcacacctgacaaatggaaggagttcctctaacatttgcaaaatggaaatgtaataataatgaatgtcatgcaccgctgcagccagcagttgtaaaattgttagtaaacataggtataattaccagatagttatattaaatttatatcttatatataataatatgtgatgattaatacaatattaattataataaaggtcacataaactttataaattcataactggtagctataacttgagcttattcaggatggttctttaaaccataaactgtacaatg

SEQ ID NO: 536 - protein, 292 aa, Homo sapien
MAFMKKYLLPILGLFMAYYYYSANEEFRPEMLQGKKVIVTGASKGIGREMAYHLAKMGAHVVVTARSKETLQKVVSHCLELGAASAHYIAGTMEDMTFAEQFVAQAGKLMGGLDMLILNHITNTSLNLFHDDIHHVRKSMEVNFLSYVVLTVAALPMLKQSNGSIVVVSSLAGKVAYPMVAAYSASKFALDGFFSSIRKEYSVSRVNVSITLCVLGLIDTETAMKAVSGIVHMQAAPKEECALEIIKGGALRQEEVYYDSSLWTTLLIRNPCRKILEFLYSTSYNMDRFINK

SEQ ID NO: 537 - DNA, 1585 bp, Homo sapien
acagcagttacactgcggcgggcgtctgttctagtgtttgagccgtcgtgcttcaccggtctacctcgctagcatgtcgggccgcggcaagactggcggcaaggcccgcgccaaggccaagtcgcgctcgtcgcgcgccggcctccagttcccagtgggccgtgtacaccggctgctgcggaagggccactacgccgagcgcgttggcgccggcgcgccagtgtacctggcggcagtgctggagtacctcaccgctgagatcctggagctggcgggcaatgcggcccgcgacaacaagaagacgcgaatcatcccccgccacctgcagctggccatccgcaacgacgaggagctcaacaagctgctgggcggcgtgacgatcgcccagggaggcgtcctgcccaacatccaggccgtgctgctgcccaagaagaccagcgccaccgtggggccgaaggcgccctcgggcggcaagaaggccacccaggcctcccaggagtactaagagggcccgcgccgcggccggccgccccagctccccatgccaccacaaaggcccttttaagggccaccaccgccctcatggaaagagctgagccgcttcagactgcggggcaagcgggccgcggctcccttcccctcccctcccctcgcccgccttcgccgcccggcctcgagtccccgcccgcccccgctcccgtcccgcaccgcctgccgcgtcggcctcgggcctgccctgtccgccgtccgccctccggtagggttcgggccttccggatgcggcttgggcgctcttcggggacctccgtggcgcggaagacccgagcctgccggggggaggccggcggcgccgcacctgcccgcctcggcgttcgtgactcagccgccccatcccgagtcgctaaggggctgcggggaggccgcagcaccttctggaagacttggccttccgctctgacgcagggccgaggtgggcagtccaggccgagagccggcggccctgaaggtgagtgaggccctcggcagctgcagccggggtgtctggtacccccccggcgtggtgcttagcccaggactttcagacggccgctggccgggaggctttggtgggagagacgcgatcgccgatttcggtctggcgccccttctgcggccgggacccaggcctttcacatcagctctccctccatcttcattcataggtctgcgctggggccgggacgaagcacttggtaacaggcacatcttcctcccgagtgactgcctcctaggaggacatttaggggagggcagaggcctgcagtttggcttcacggctggctatgtggacagcaagagtcgttttgcggaacgcgactggcagccaggcctgtcgggcccccgacgccgccccatttcccttccagcaaactcaactcggcaatccaagcacctagataccagcacaagtcggttaatccctgtctggactgagcctccgttggcttctgaactggaattctgcagctaacccttccacgactagaaccttaggcattggggagttttagatggactaattttattaaaggattgtttttttttt

SEQ ID NO: 538 - protein, 143 aa, Homo sapien
MSGRGKTGGKARAKAKSRSSRAGLQFPVGRVHRLLRKGHYAERVGAGAPVYLAAVLEYLTAEILELAGNAARDNKKTRIIPRHLQLAIRNDEELNKLLGGVTIAQGGVLPNIQAVLLPKKTSATVGPKAPSGGKKATQASQEY

SEQ ID NO: 539 - DNA, 2752 bp, Homo sapien
cattcccacccttccttctttaataagcaggagcgaaaaagacaaattccaaagaggattgttcagttcaagggaatgaagaattcagaataattttggtaaatggattccaatatcgggaataagaataagctgaacagttgacctgctttgaagaaacatactgtccatttgtctaaaataatctataacaaccaaaccaatcaaaatgaattcaacattattttcccaggttgaaaatcattcagtccactctaatttctcagagaagaatgcccagcttctggcttttgaaaatgatgattgtcatctgcccttggccatgatatttaccttagctcttgcttatggagctgtgatcattcttggtgtctctggaaacctggccttgatcataatcatcttgaaacaaaaggagatgagaaatgttaccaacatcctgattgtgaacctttccttctcagacttgcttgttgccatcatgtgtctcccctttacatttgtctacacattaatggaccactgggtctttggtgaggcgatgtgtaagttgaatccttttgtgcaatgtgtttcaatcactgtgtccattttctctctggttctcattgctgtggaacgacatcagctgataatcaaccctcgagggtggagaccaaataatagacatgcttatgtaggtattgctgtgatttgggtccttgctgtggcttcttctttgcctttcctgatctaccaagtaatgactgatgagccgttccaaaatgtaacacttgatgcgtacaaagacaaatacgtgtgctttgatcaatttccatcggactctcataggttgtcttataccactctcctcttggtgctgcagtattttggtccactttgttttatatttatttgctacttcaagatatatatacgcctaaaaaggagaaacaacatgatggacaagatgagagacaataagtacaggtccagtgaaaccaaaagaatcaatatcatgctgctctccattgtggtagcatttgcagtctgctggctccctcttaccatctttaacactgtgtttgattggaatcatcagatcattgctacctgcaaccacaatctgttattcctgctctgccacctcacagcaatgatatccacttgtgtcaaccccatattttatgggttcctgaacaaaaacttccagagagacttgcagttcttcttcaacttttgtgatttccggtctcgggatgatgattatgaaacaatagccatgtccacgatgcacacagatgtttccaaaacttctttgaagcaagcaagcccagtcgcatttaaaaaaatcaacaacaatgatgataatgaaaaaatctgaaactacttatagcctatggtcccggatgacatctgtttaaaaacaagcacaacctgcaacatactttgattacctgttctcccaaggaatggggttgaaatcatttgaaaatgactaagattttcttgtcttgctttttactgcttttgttgtagttgtcataattacatttggaacaaaaggtgtgggctttggggtcttctggaaatagttttgaccagacatctttgaagtgctttttgtgaatttatgcatataatataaagacttttatactgtacttattggaatgaaatttctttaaagtattacgatgcgctgacttcagaagtacctgccatccaatacggtcattagattgggtcatcttgattagattagattagattagattgtcaacagattgggccatccttactttatgataggcatcattttagtgtgttacaatagtaacagtatgcaaaagcagcattcaggagccgaaagatagtcttgaagtcattcagaagtggtttgaggtttctgttttttggtggtttttgtttgttttttttttttttcaccttaagggaggctttcatttcctcccgactgattgtcacttaaatcaaaatttaaaaatgaataaaaagacatacttctcagctgcaaatattatggagaattgggcacccacaggaatgaagagagaaagcagctccccaacttcaaaaccattttggtacctgacaacaagagcattttagagtaattaatttaataaagtaaattagtattgctgcaaatagctaaattatatttatttgaattgatggtcaagagattttccattttttttacagactgttcagtgtttgtcaagcttctggtctaatatgtactcgaaagactttccgcttacaatttgtagaaacacaaatatcgttttccatacagcagtgcctatatagtgactgattttaactttcaatgtccatctttcaaaggaagtaacaccaaggtacaatgttaaaggaatattcactttacctagcagggaaaaatacacaaaaactgcagatacttcatatagcccattttaacttgtataaactgtgtgacttgtggcgtcttataaataatgcactgtaaagattactgaatagttgtgtcatgttaatgtgcctaatttcatgtatcttgtaatcatgattgagcctcagaatcatttggagaaactatattttaaagaacaagacatacttcaatgtattatacagataaagtattacatgtgtttgattttaaaagggcggacattttattaaaatcaatattgtttttgctttttctgaggagtctctttcagtttcattttttctcatcccatgacttccctccgatggt

SEQ ID NO: 540 - protein, 384 aa, Homo sapien
MNSTLFSQVENHSVHSNFSEKNAQLLAFENDDCHLPLAMIFTLALAYGAVIILGVSGNLALIIIILKQKEMRNVTNILIVNLSFSDLLVAIMCLPFTFVYTLMDHWVFGEAMCKLNPFVQCVSITVSIFSLVLIAVERHQLIINPRGWRPNNRHAYVGIAVIWVLAVASSLPFLIYQVMTDEPFQNVTLDAYKDKYVCFDQFPSDSHRLSYTTLLLVLQYFGPLCFIFICYFKIYIRLKRRNNMMDKMRDNKYRSSETKRINIMLLSIVVAFAVCWLPLTIFNTVFDWNHQIIATCNHNLLFLLCHLTAMISTCVNPIFYGFLNKNFQRDLQFFFNFCDFRSRDDDYETIAMSTMHTDVSKTSLKQASPVAFKKINNNDDNEKI

SEQ ID NO: 541 - DNA, 799 bp, Homo sapien
cactcccaaagaactgggtactcaacactgagcagatctgttctttgagctaaaaaccatgtgctgtaccaagagtttgctcctggctgctttgatgtcagtgctgctactccacctctgcggcgaatcagaagcagcaagcaactttgactgctgtcttggatacacagaccgtattcttcatcctaaatttattgtgggcttcacacggcagctggccaatgaaggctgtgacatcaatgctatcatctttcacacaaagaaaaagttgtctgtgtgcgcaaatccaaaacagacttgggtgaaatatattgtgcgtctcctcagtaaaaaagtcaagaacatgtaaaaactgtggcttttctggaatggaattggacatagcccaagaacagaaagaaccttgctggggttggaggtttcacttgcacatcatggagggtttagtgcttatctaatttgtgcctcactggacttgtccaattaatgaagttgattcatattgcatcatagtttgctttgtttaagcatcacattaaagttaaactgtattttatgttatttatagctgtaggttttctgtgtttagctatttaatactaattttccataagctattttggtttagtgcaaagtataaaattatatttgggggggaataagattatatggactttcttgcaagcaacaagctattttttaaaaaaactatttaacattcttttgtttatattgttttgtctcctaaattgttgtaattgcattataaaataagaaaaacattaataagacaaatatt

SEQ ID NO: 542 - protein, 96 aa, Homo sapien
MCCTKSLLLAALMSVLLLHLCGESEAASNFDCCLGYTDRILHPKFIVGFTRQLANEGCDINAIIFHTKKKLSVCANPKQTWVKYIVRLLSKKVKNM

SEQ ID NO: 543 - DNA, 634 bp, Homo sapien
cggctgagaggcagcgaactcatctttgccagtacaggagcttgtgccgtggcccacagcccacagcccacagccatgggctgggacctgacggtgaagatgctggcgggcaacgaattccaggtgtccctgagcagctccatgtcggtgtcagagctgaaggcgcagatcacccagaagattggcgtgcacgccttccagcagcgtctggctgtccacccgagcggtgtggcgctgcaggacagggtcccccttgccagccagggcctgggccctggcagcacggtcctgctggtggtggacaaatgcgacgaacctctgagcatcctggtgaggaataacaagggccgcagcagcacctacgaggtccggctgacgcagaccgtggcccacctgaagcagcaagtgagcgggctggagggtgtgcaggacgacctgttctggctgaccttcgaggggaagcccctggaggaccagctcccgctgggggagtacggcctcaagcccctgagcaccgtgttcatgaatctgcgcctgcggggaggcggcacagagcctggcgggcggagctaagggcctccaccagcatccgagcaggatcaagggccggaaataaaggctgttgtaagagaat

SEQ ID NO: 544 - protein, 165 aa, Homo sapien
MGWDLTVKMLAGNEFQVSLSSSMSVSELKAQITQKIGVHAFQQRLAVHPSGVALQDRVPLASQGLGPGSTVLLVVDKCDEPLSILVRNNKGRSSTYEVRLTQTVAHLKQQVSGLEGVQDDLFWLTFEGKPLEDQLPLGEYGLKPLSTVFMNLRLRGGGTEPGGRS

SEQ ID NO: 545 - DNA, 1543 bp, Homo sapien
gctctcattaccttctgcccatcacttaataaatagccagccaattcatcaacattctggtacactgttggagagatgagacagtcacaccagctgcccctagtggggctcttactgttttcttttattccaagccaactatgcgagatttgtgaggtaagtgaagaaaactacatccgcctaaaacctctgttgaatacaatgatccagtcaaactataacaggggaaccagcgctgtcaatgttgtgttgtccctcaaacttgttggaatccagatccaaaccctgatgcaaaagatgatccaacaaatcaaatacaatgtgaaaagcagattgtcagatgtaagctcgggagagcttgccttgattatactggctttgggagtatgtcgtaacgctgaggaaaacttaatatatgattaccacctgatcgacaagctagaaaataaattccaagcagaaattgaaaatatggaagcacacaatggcactcccctgactaactactaccagctcagcctggacgttttggccttgtgtctgttcaatgggaactactcaaccgccgaagttgtcaaccacttcactcctgaaaataaaaactattattttggtagccagttctcagtagatactggtgcaatggctgtcctggctctgacctgtgtgaagaagagtctaataaatgggcagatcaaagcagatgaaggcagtttaaagaacatcagtatttatacaaagtcactggtagaaaagattctgtctgagaaaaaagaaaatggtctcattggaaacacatttagcacaggagaagccatgcaggccctctttgtatcatcagactattataatgaaaatgactggaattgccaacaaactctgaatacagtgctcacggaaatttctcaaggagcattcagcaatccaaacgctgcagcccaggtcttacctgccctgatgggaaagaccttcttggatattaacaaagactcttcttgcgtctctgcttcaggtaacttcaacatctccgctgatgagcctataactgtgacacctcctgactcacaatcatatatctccgtcaattactctgtgagaatcaatgaaacatatttcaccaatgtcactgtgctaaatggttctgtcttcctcagtgtgatggagaaagcccagaaaatgaatgatactatatttggtttcacaatggaggagcgctcatgggggccctatatcacctgtattcagggcctatgtgccaacaataatgacagaacctactgggaacttctgagtggaggcgaaccactgagccaaggagctggtagttacgttgtccgcaatggagaaaacttggaggttcgctggagcaaatactaataagcccaaactttcctcagctgcataaaatccatttgcagtggagttccatgtttattgtccttatgccttcttcttcatttatcccagtacgagcaggagagttaataacctccccttctctctctacatgttcaataaaagttgttgaaagattaacaactgt

SEQ ID NO: 546 - protein, 433 aa, Homo sapien
MRQSHQLPLVGLLLFSFIPSQLCEICEVSEENYIRLKPLLNTMIQSNYNRGTSAVNVVLSLKLVGIQIQTLMQKMIQQIKYNVKSRLSDVSSGELALIILALGVCRNAEENLIYDYHLIDKLENKFQAEIENMEAHNGTPLTNYYQLSLDVLALCLFNGNYSTAEVVNHFTPENKNYYFGSQFSVDTGAMAVLALTCVKKSLINGQIKADEGSLKNISIYTKSLVEKILSEKKENGLIGNTFSTGEAMQALFVSSDYYNENDWNCQQTLNTVLTEISQGAFSNPNAAAQVLPALMGKTFLDINKDSSCVSASGNFNISADEPITVTPPDSQSYISVNYSVRINETYFTNVTVLNGSVFLSVMEKAQKMNDTIFGFTMEERSWGPYITCIQGLCANNNDRTYWELLSGGEPLSQGAGSYVVRNGENLEVRWSKY

SEQ ID NO: 547 - DNA, 3068 bp, Homo sapien
cacgttcccgtaccgaagggttcagtaccagcagcccgaccatcacgcggcgggatgtctgtggttggcattgacctcggctttctcaactgctacattgctgtcgcgagaagtggcggcatcgagaccatcgccaatgagtacagcgacaggtgtaccccggcctgtatatcattgggatcaagaactcgagccattggaaatgcagcaaagagccagatagtcacgaacgtaagaaatacaattcatggcttcaaaaagcttcatgggcgatcatttgatgatcccattgtgcaaactgaaaggatcaggcttccctatgaactgcagaaaatgcctaatggaagtgcaggagttaaggtgcggtacttagaggaagagagaccttttgcaattgagcaagttactggaatgctgttagccaagcttaaagagacttcagaaaatgctttgaagaaaccagtggctgactgtgtgatttcaattcctagcttttttactgatgccgagagaagatctgtgatggctgcagcccaggttgcaggcttaaattgtttaaggttgatgaatgaaactactgcagttgcactggcgtatggaatttataaacaggatcttcccccattagatgagaaaccaagaaatgtagtatttattgatatgggacattctgcctatcaggtctcggtttgtgcttttaacaaaggaaaacttaaagtcttggctactacctttgatccatatttgggtggcaggaactttgatgaggctttagtagactacttctgtgatgagttcaagaccaaatataagataaatgtgaaagaaaactctcgggccttgttgcgtttatatcaggaatgtgaaaaactaaagaagctaatgagtgcaaatgcatcagatcttccattgaacattgagtgtttcatgaatgaccttgatgtttctagtaaaatgaacagggctcaatttgaacaactgtgtgcttcccttttggccagggttgaaccacctttaaaagcagtaatggaacaagctaacttacaacgtgaagacattagtagtatagaaattgtaggaggagcaacacgaattcctgcagtgaaagaacaaatcactaaattctttcttaaagacataagtaccacattaaatgctgatgaagctgttgcaagaggatgtgcgttacagtgtgcgattctctcaccagcatttaaagtgcgtgaattttccataacagaccttgttccctattcaatcacattaaggtggaagacctcttttgaagatggaagtggggaatgtgaagttttctgtaagaaccatcctgccccattctcaaaagtcattactttccacaagaaggaaccatttgaactagaagcattttatactaatttacatgaagtgccttatcctgatgcaagaattgggagcttcactattcagaatgtttttccacagtctgatggtgatagttccaaagtgaaggttaaagttcgtgttaacatccatggaatcttcagtgtggctagcgcatcagtaattgagaagcaaaatttggaaggcgatcacagtgatgctccaatggagacagaaacttcatttaaaaatgaaaacaaagataatatggataaaatgcaggttgatcaagaagaagggcatcaaaaatgtcatgctgaacacactccagaagaggaaattgatcatacaggagccaaaacaaagtcagctgtctcagacaaacaagaccgattaaatcagacacttaaaaaaggaaaagtcaaaagtattgatctaccgatccagagtagcctatgtagacaactaggccaagatcttctcaacagctacattgaaaatgaggggaagatgatcatgcaagataagttagagaaagaaagaaatgatgctaagaatgccgttgaagaatatgtatatgattttagagacaggctgggcactgtctatgaaaaattcatcactccagaagacttgagtaaactgtctgcagtattggaagacacagaaaattggctttatgaagacggagaggaccaacctaaacaagtttatgtggataagcttcaagaactaaagaaatacggccagcctattcaaatgaagtacatggagcatgaagagagaccaaaagccttaaatgacttgggaaaaaagatccaacttgtcatgaaagtgatagaagcttatagaaacaaggatgaaagatatgatcatctggatcctactgaaatggaaaaggttgaaaaatgtatcagtgatgccatgagttggctgaatagtaagatgaatgcacagaacaaactaagtctcactcaagatcctgtggtaaaagtttcagaaatagtagcaaagtcaaaggaactggataatttctgtaaccccatcatttacaagcccaaaccaaaagcagaagttcctgaagacaaaccaaaagctaatagtgaacgcaatggcccaatggatggacagagtggaactgaaactaaatcagattcaacaaaagacagctcacagcatactaaatcctctggagagatggaagtggactaagtcttaattttaccttcacattaattcaaaccgtgcaagtaaccacggggtccatcttttacatctggtacacacaacagacgctcagttgttcttaaccacttttgtcatttgtttttggagtagttttgaaaagtgttttatattgagtgcacttctgttcatttccattgctgcttatatgcagcgttagccgaattagatttacaagacaatctaagctttccggataattttatatatcaaacatacaggatggatacatagttggcaacagtctaccttatttaaagcttctactgggataaacctcaattcctttattcaggaaaggatactttattgcattattgttgcagaagcatagatttaattgcatctttattttgaaaaacaaatgaaaattgatggggtttaaagctacagaggcactgacctttttctagttattgtattgctacaatttaaatattaaaacaaataagagctttctc

SEQ ID NO: 548 - protein, 839 aa, Homo sapien
MSVVGIDLGFLNCYIAVARSGGIETIANEYSDRCTPACISLGSRTRAIGNAAKSQIVTNVRNTIHGFKKLHGRSFDDPIVQTERIRLPYELQKMPNGSAGVKVRYLEEERPFAIEQVTGMLLAKLKETSENALKKPVADCVISIPSFFTDAERRSVMAAAQVAGLNCLRLMNETTAVALAYGIYKQDLPPLDEKPRNVVFIDMGHSAYQVSVCAFNKGKLKVLATTFDPYLGGRNFDEALVDYFCDEFKTKYKINVKENSRALLRLYQECEKLKKLMSANASDLPLNIECFMNDLDVSSKMNRAQFEQLCASLLARVEPPLKAVMEQANLQREDISSIEIVGGATRIPAVKEQITKFFLKDISTTLNADEAVARGCALQCAILSPAFKVREFSITDLVPYSITLRWKTSFEDGSGECEVFCKNHPAPFSKVITFHKKEPFELEAFYTNLHEVPYPDARIGSFTIQNVFPQSDGDSSKVKVKVRVNIHGIFSVASASVIEKQNLEGDHSDAPMETETSFKNENKDNMDKMQVDQEEGHQKCHAEHTPEEEIDHTGAKTKSAVSDKQDRLNQTLKKGKVKSIDLPIQSSLCRQLGQDLLNSYIENEGKMIMQDKLEKERNDAKNAVEEYVYDFRDRLGTVYEKFITPEDLSKLSAVLEDTENWLYEDGEDQPKQVYVDKLQELKKYGQPIQMKYMEHEERPKALNDLGKKIQLVMKVIEAYRNKDERYDHLDPTEMEKVEKCISDAMSWLNSKMNAQNKLSLTQDPVVKVSEIVAKSKELDNFCNPIIYKPKPKAEVPEDKPKANSERNGPMDGQSGTETKSDSTKDSSQHTKSSGEMEVD

SEQ ID NO: 549 - DNA, 1085 bp, Homo sapien
atcctgtctgtccgaacccagacacaagtcttcactccttcctgcgagccctgaggaagccttctttccccagacatggccaacaagggtccttcctatggcatgagccgcgaagtgcagtccaaaatcgagaagaagtatgacgaggagctggaggagcggctggtggagtggatcatagtgcagtgtggccctgatgtgggccgcccagaccgtgggcccttgggcttccaggtgtggctgaagaatggcgtgattctgagcaagctggtgaacagcctgtaccctgatggctccaagccggtgaaggtgcccgagaacccaccctccatggtcttcaagcagatggagcaggtggctcagttcctgaaggcggctgaggactctggggtcatcaagactgacatgttccagactgttgacctctttgaaggcaaagacatggcagcagtgcagaggaccctgatggctttgggcagcttggcagtgaccaagaatgatgggcactaccgtggagatcccaactggtttatgaagaaagcgcaggagcataagagggaattcacagagagccagctgcaggagggaaagcatgtcattggccttcagatgggcagcaacagaggggcctcccaggccggcatgacaggctacggacgacctcggcagatcatcagttagagcggagagggctagccctgagcccggcgctcccccagctccttggctgcagccatcccgcttagcctgcctcacccacacccgtgtggtaccttcagccctggccaagctttgaggctctgtcactgagcaatggtaactgcacctgggcagctcctccctgtgcccccagcctcagcccaacttcttacccgaaagcatcactgccttggcccctccctcccggcggcccccatcacctctactgtctcctccctgggctaagcaggggagaagcgggctgggggtagcctggatgtgggcgaagtccactgtcctccttggcggcaaaagcccattgaagaagaaccagcccagcctgccccctatcttgtacctggaatatttttggggttggaactctc

SEQ ID NO: 550 - protein, 201 aa, Homo sapien
MANKGPSYGMSREVQSKIEKKYDEELEERLVEWIIVQCGPDVGRPDRGPLGFQVWLKNGVILSKLVNSLYPDGSKPVKVPENPPSMVFKQMEQVAQFLKAAEDSGVIKTDMFQTVDLFEGKDMAAVQRTLMALGSLAVTKNDGHYRGDPNWFMKKAQEHKREFTESQLQEGKHVIGLQMGSNRGASQAGMTGYGRPRQIIS

SEQ ID NO: 551 - DNA, 540 bp, Homo sapien
gaattccgaggggtcgctgtgctgagcggcgggactgagctgttgagttagagccaacatgagtgagcgacaaggtgctgggccaaccaatggaaaagacaagacatctggtgaaaatgatggacagaagaaagttcaagaagaatttgacattgacatggatgcaccagagacagaacgtgcagcggtggccattcagtctcagttcagaaaattccagaagaagaaggctgggtctcagtcctagtgggagaaccccctcctagtccacctgaaagcaccaaattcaaccatcatctgtcaagaaattaaaagaacaacaccctagagagaagtcatccacacacaatccacacacgcatagcaaacctccaatgcatgtacagaaacctgtgatatttatacccttgtaggaaggtatagacaatggaattgtgagtagcttaatctctatgtttctctccattttcattcctcctgcaactattttccttgatgttgtaataaaatgaagttacgatgagaaaaaaaaaaaaaaaa

SEQ ID NO: 552 - protein, 62 aa, Homo sapien
MSERQGAGPTNGKDKTSGENDGQKKVQEEFDIDMDAPETERAAVAIQSQFRKFQKKKAGSQS

SEQ ID NO: 553 - DNA, 3178 bp, Homo sapien
ggcaccgattcggggcctgcccggacttcgccgcacgctgcagaacctcgcccagcgcccaccatgccccggcagctcagcgcggcggccgcgctcttcgcgtccctggccgtaattttgcacgatggcagtcaaatgagagcaaaagcatttccagaaaccagagattattctcaacctactgcagcagcaacagtacaggacataaaaaaacctgtccagcaaccagctaagcaagcacctcaccaaactttagcagcaagattcatggatggtcatatcacctttcaaacagcggccacagtaaaaattccaacaactaccccagcaactacaaaaaacactgcaaccaccagcccaattacctacaccctggtcacaacccaggccacacccaacaactcacacacagctcctccagttactgaagttacagtcggccctagcttagccccttattcactgccacccaccatcaccccaccagctcatacagctggaaccagttcatcaaccgtcagccacacaactgggaacaccactcaacccagtaaccagaccacccttccagcaactttatcgatagcactgcacaaaagcacaaccggtcagaagcctgatcaacccacccatgccccaggaacaacggcagctgcccacaataccacccgcacagctgcacctgcctccacggttcctgggcccacccttgcacctcagccatcgtcagtcaagactggaatttatcaggttctaaacggaagcagactctgtataaaagcagagatggggatacagctgattgttcaagacaaggagtcggttttttcacctcggagatacttcaacatcgaccccaacgcaacgcaagcctctgggaactgtggcacccgaaaatccaaccttctgttgaattttcagggcggatttgtgaatctcacatttaccaaggatgaagaatcatattatatcagtgaagtgggagcctatttgaccgtctcagatccagagacagtttaccaaggaatcaaacatgcggtggtgatgttccagacagcagtcgggcattccttcaagtgcgtgagtgaacagagcctccagttgtcagcccacctgcaggtgaaaacaaccgatgtccaacttcaagcctttgattttgaagatgaccactttggaaatgtggatgagtgctcgtctgactacacaattgtgcttcctgtgattggggccatcgtggttggtctctgccttatgggtatgggtgtctataaaatccgcctaaggtgtcaatcatctggataccagagaatctaattgttgcccggggggaatgaaaataatggaatttagagaactctttcatcccttccaggatggatgttgggaaattccctcagagtgtgggtccttcaaacaatgtaaaccaccatcttctattcaaatgaagtgagtcatgtgtgatttaagttcaggcagcacatcaatttctaaatactttttgtttattttatgaaagatatagtgagctgtttattttctagtttcctttagaatattttagccactcaaagtcaacatttgagatatgttgaattaacataatatatgtaaagtagaataagccttcaaattataaaccaagggtcaattgtaactaatactactgtgtgtgcattgaagattttattttacccttgatcttaacaaagcctttgctttgttatcaaatggactttcagtgcttttactatctgtgttttatggtttcatgtaacatacatattcctggtgtagcacttaactccttttccactttaaatttgtttttgttttttgagacggagtttcactcttgtcacccaggctggagtacagtggcacgatctcggcttatggcaacctccgcctcccgggttcaagtgattctcctgcttcagcttcccgagtagctgggattacaggcacacactaccacgcctggctaatttttgtatttttattatagacgggtttcaccatgttggccagactggtcttgaactcttgacctcaggtgatccacccacctcagcctcccaaagtgctgggattacaggcatgagccattgcgcccggccttaaatgttttttttaatcatcaaaaagaacaacatatctcaggttgtctaagtgtttttatgtaaaaccaacaaaaagaacaaatcagcttatattttttatcttgatgactcctgctccagaattgctagactaagaattaggtggctacagatggtagaactaaacaataagcaagagacaataataatggcccttaattattaacaaagtgccagagtctaggctaagcactttatctatatctcatttcattctcacaacttataagtgaatgagtaaactgagacttaagggaactgaatcacttaaatgtcacctggctaactgatggcagagccagagcttgaattcatgttggtctgacatcaaggtctttggtcttctccctacaccaagttacctacaagaacaatgacaccacactctgcctgaaggctcacacctcataccagcatacgctcaccttacagggaaatgggtttatccaggatcatgagacattagggtagatgaaaggagagctttgcagataacaaaatagcctatccttaataaatcctccactctctggaaggagactgaggggctttgtaaaacattagtcagttgctcatttttatgggattgcttagctgggctgtaaagatgaaggcatcaaataaactcaaagtatttttaaatttttttgataatagagaaacttcgctaaccaactgttctttcttgagtgtatagccccatcttgtggtaacttgctgcttctgcacttcatatccatatttcctattgttcactttattctgtagagcagcctgccaagaattttatttctgctgttttttttgctgctaaagaaaggaactaagtcaggatgttaacagaaaagtccacataaccctagaattcttagtcaaggaataattcaagtcagcctagagaccatgttgactttcctcatgtgtttccttatgactcagtaagttggcaaggtcctgactttagtcttaataaaacattgaattgtagtaaaggtttttgcaataaaaacttactttgg

SEQ ID NO: 554 - protein, 416 aa, Homo sapien
MPRQLSAAAALFASLAVILHDGSQMRAKAFPETRDYSQPTAAATVQDIKKPVQQPAKQAPHQTLAARFMDGHITFQTAATVKIPTTTPATTKNTATTSPITYTLVTTQATPNNSHTAPPVTEVTVGPSLAPYSLPPTITPPAHTAGTSSSTVSHTTGNTTQPSNQTTLPATLSIALHKSTTGQKPDQPTHAPGTTAAAHNTTRTAAPASTVPGPTLAPQPSSVKTGIYQVLNGSRLCIKAEMGIQLIVQDKESVFSPRRYFNIDPNATQASGNCGTRKSNLLLNFQGGFVNLTFTKDEESYYISEVGAYLTVSDPETVYQGIKHAVVMFQTAVGHSFKCVSEQSLQLSAHLQVKTTDVQLQAFDFEDDHFGNVDECSSDYTIVLPVIGAIVVGLCLMGMGVYKIRLRCQSSGYQRI

SEQ ID NO: 555 - DNA, 5428 bp, Homo sapien
gcggggagccggcggttatctgggcggcggagcgctcacaatgtggcaggagacagaaaagataagatgctcccaagtcccttgcagctctcttcagaagaaaaatcactagtgctctgctcttgccataataccaaacctttttgactcatgctttggtgctgcaacactggaagaattgcacacagtttccaggaatatctttttttcatttgagtgattctttgtggatgagaaaagatttgagtcttaataattaccttgttttaaagctatttctttatagtctgaactgtttaataaattgggccacttaccaatgagccacacagccagttcttgtcaggagctggttgaaaactgtgctgtgcatgtagcaggaatggcacaagaagatagccgtcgtggtcaagtgccatcttccttttatcatggtgccaaccaagaacttgacctgtccaccaaagtgtacaaaagggaatcaggaagtccttattctgtgttagtggacaccaagatgagcaaaccgcatctccatgaaacagaagaacagccatatttcagggagacaagagcagtgtctgacgtgcatgctgttaaggaagaccgggagaattctgatgacacagaggaggaagaggaagaagtctcttacaaaagggagcagatcatagtggaggtaaaccttaataatcaaacattaaatgtatctaaaggggaaaagggtgtctcttctcagtccaaagagactcctgttcttaagacaagcagtgaggaggaagaggaagagagtgaggaagaggccacagatgacagcaatgactatggagagaatgaaaagcagaagaaaaaggagaagatagtagagaaagtcagcgttacacaaaggagaaccaggagagctgcctctgttgccgcagctaccacttcccctactcccagaactacaagaggtcgtaggaagagtgtagagccacctaagcgtaagaagcgggccacaaaggagcccaaagcaccagtccagaaagctaagtgtgaagagaaagagactctgacctgtgagaagtgccccagggtatttaacactcgctggtacctggagaagcacatgaacgttactcataggcgcatgcagatttgtgataaatgtggcaagaagtttgtcctggaaagtgagctgtcccttcaccagcaaacagactgtgaaaaaaacattcagtgtgtttcctgtaacaaatcgttcaagaaactctggtcccttcatgaacatatcaagatcgtccatggatatgcagaaaagaaattttcctgtgaaatttgtgagaagaaattctataccatggctcatgtgcggaaacacatggttgcacacacaaaagacatgccatttacatgcgaaacctgtggaaaatcattcaaacgcagtatgtcactcaaggtgcactccttgcagcattctggagagaagccctttagatgcgagaactgtgacgaaaggtttcagtacaagtaccagctacgctcccacatgagcattcatattgggcacaaacagttcatgtgccagtggtgtggcaaggatttcaacatgaagcagtacttcgacgaacacatgaaaacacacactggagagaaaccctttatctgtgaaatctgtggcaaaagcttcaccagccgccccaacatgaagagacaccgcagaactcacacaggcgagaagccctatccatgtgatgtgtgtggccagcggttccgcttctcgaacatgcttaaggcccacaaggagaagtgctttcgggtgaccagccccgtgaatgtgccacctgctgtccagatcccacttacaacttccccagccaccccagttccttctgtggtgaacacagccacaaccccaacccctccaatcaatatgaatcctgtaagcactcttccccctcggcccatcccccaccccttctcacacctgcacatccacccacaccctcaccacccacaccaccttcccatccctccagtccctcacctcccgccacctccagctctctttaagagtgagcctttaaatcatagaggccagagtgaggacaactttctgcggcacctggcagagaagaacagttcagcacagcatcattaacatccgtctccttagtgtgttctccaggagacacgtccccatgtgtgagcgtgcacagagggagtcggtgagcatttccttagttctcagactctcctccgcctctaccaagagcttcgccagtgtcactgaatcaacagatccaagggaatgaacaagaagactaccttgagctcacagagggactgtcatctaaaccaggggaaccactgaactaaagcccaatttgcttgcattttctgatgacttttataagtttcaaatactcagacttgtggaattttataatttcatatcagctgatgaggtatgcttgcttttatatcccagacttctcctcaaagaggggataggcctggtttcctttgtactaatcgggaaggctgtgagattaatccagagcattaattgtatcactgtgtatggtaaggaattcttttcagcttttggtgccagctacagagttgagctggccatgtttcacagtatatcaagcattatagagaaagacagaaattttcttctttgtgtagctctcctaacgcactctttattttactacagaaattattttagagtttttgtatagacttctttggtagtctgtttctaaaatgaaatgtatttcaataagcagtgtaattttttcagtgtagctgaacctatgttgtaaaatagaaaaaaatttttataatcatcaaaatgtgattcttaaagatgcatataacttctataattcaaagctattcttacatccgtacaactcaaaaggtgcttcagagactagatgtatctgagagggtctccagaccaggttactgcaaaaatgaggttttgctttcaggatttggcgtaaatacttggtagttttgacatctctgcttaacactcaagagaggctccctaatgtgctcctgtcctccatgttctgcttggcttcgttagtgcattacatgaaatgatttgcaggggatggggccttttccagggaagtcacctaaagcttgcatgttttgaaaatttgaataaggctgtttgctgacaggaggaggaagtagtggagatcatttcatctcagtcacgtctgtttctcacttcccttaggaattgtgttgatgtttaacttttatgggatgacaaattgaaatcgctcattttgaggttgctttatttttctagaattgttataagaagctaaaatagtaaacttaaaatcacaaacatgacattgctgatagtggctgagaaattcagatgagaagacaaattggttatgaattttgaaatatctattatatgtaaaatgtggatatgttcacaaccttgagctattttaacacagtttaaatatagtgagggaaaactcctaagttttactgccctgtcctctgcaaattatgtaataccagcattcttaggcgataaagagagcagcacctctagtacctttaggcagattactttttcaagtttggggaacttcaaaagaccataatcaaccaggagcttattataggaaaggctgaacagaagggctagtgtattgattacacttaacagatcatatttatccagactcagtatagcttaaaattttgtatttctttatctgagagaactgagttcccaggctaaatcacttacctcccaccccctctccaattttttttttaagagacaaggtcttgctatgttgcccaggctagagtgcagtggctattcacaggtgcagttatagcacactacagcctccaactcttgggttcaagcaaccctgcctcagctaaccaagtagctgggactacaggtgcatgctaccatgcccagtccattttttaatcttgaaatttcttcatttttctttcttcggtttcttaaaatctttgcctgaatcagaacgctggcttttatttatttttttatttttaatattaaatgtgcagatatgcttcgagcacttttctaactaatgagctctgtggtaagaaaaaatgaactctttcaattgagattaagtccatatttttcaaacatcacgttctctattggctttttggtttagtgtttctaaattttctccttctgattttgcctgtcttatataatgagcataggaaaattttggaatgaggcagaaaagtatatcaagacatacttcctggttttggatgtaagttttaaagaatggtatttttaatatttgtacacattctttgagcacccaggtacccaagccaataaggaaagttaattccttgcatatgactgttatatctttagtggttgtctccctctccctccacagtctccttggcattccatgacaagtttgtcaacctacacttttatatagacatgtcattatttcatggtcaagcctgtagtattaaaatgatttttttaaaagatgtaaactgtgcttagttaattggttatattttgttctgtttttttttttttttttttttttttttgaggcagagtcttgttctgttgcctgggctggagtgcagtggcgtgatcttggctcactgcaacccccgccccccgggttcaagtgattctcctgcctcagcctcccgagtagctggaattacaggcatgcgccagcacgcccggctaagttttgtatttttggcagagatggggtttcaccatattggccaggctggtctcaaactcctgaccttgtgatccgcccacctcagcctccgaaagtgctgggattacaggcgtgagccaccacgtccaactgccttattttgttctgaataaatttacagtattgggcagcaattctggattctagacttgagaccacagaatcaaccatttcatgaggttgtactgtaattatacactggaatattcaggtagtcatctttgatttttcattcaagtaaatatagccataagaaaatatctgctatacaggaaaaccagtattaagcaaataccaccatccttaacagaaacaaaaatatatatatatattatttttaaaaattagcattgtcatacagtacaattcttagtgaagtgtattgtggaacaatttagaaacttcctttttttcccctagattaaggatactttccttgacttgagacttgtggtcttcaggaaaactactcagaatataatgactcctcatcagtatcatattgtatataaataatgaaatgcattaagaatattcacaacattgaacccaggaggcggagcttgcagtgagccgagattgcgccactgcgctccagcctgggcaacagagcgagactccatctc

SEQ ID NO: 556 - protein, 606 aa, Homo sapien
MSHTASSCQELVENCAVHVAGMAQEDSRRGQVPSSFYHGANQELDLSTKVYKRESGSPYSVLVDTKMSKPHLHETEEQPYFRETRAVSDVHAVKEDRENSDDTEEEEEEVSYKREQIIVEVNLNNQTLNVSKGEKGVSSQSKETPVLKTSSEEEEEESEEEATDDSNDYGENEKQKKKEKIVEKVSVTQRRTRRAASVAAATTSPTPRTTRGRRKSVEPPKRKKRATKEPKAPVQKAKCEEKETLTCEKCPRVFNTRWYLEKHMNVTHRRMQICDKCGKKFVLESELSLHQQTDCEKNIQCVSCNKSFKKLWSLHEHIKIVHGYAEKKFSCEICEKKFYTMAHVRKHMVAHTKDMPFTCETCGKSFKRSMSLKVHSLQHSGEKPFRCENCDERFQYKYQLRSHMSIHIGHKQFMCQWCGKDFNMKQYFDEHMKTHTGEKPFICEICGKSFTSRPNMKRHRRTHTGEKPYPCDVCGQRFRFSNMLKAHKEKCFRVTSPVNVPPAVQIPLTTSPATPVPSVVNTATTPTPPINMNPVSTLPPRPIPHPFSHLHIHPHPHHPHHLPIPPVPHLPPPPALFKSEPLNHRGQSEDNFLRHLAEKNSSAQHH

SEQ ID NO: 557 - DNA, 3336 bp, Homo sapien
ttttcttagacattaactgcagacggctggcaggatagaagcagcggctcacttggactttttcaccagggaaatcagagacaatgatggggctcttccccagaactacaggggctctggccatcttcgtggtggtcatattggttcatggagaattgcgaatagagactaaaggtcaatatgatgaagaagagatgactatgcaacaagctaaaagaaggcaaaaacgtgaatgggtgaaatttgccaaaccctgcagagaaggagaagataactcaaaaagaaacccaattgccaagattacttcagattaccaagcaacccagaaaatcacctaccgaatctctggagtgggaatcgatcagccgccttttggaatctttgttgttgacaaaaacactggagatattaacataacagctatagtcgaccgggaggaaactccaagcttcctgatcacatgtcgggctctaaatgcccaaggactagatgtagagaaaccacttatactaacggttaaaattttggatattaatgataatcctccagtattttcacaacaaattttcatgggtgaaattgaagaaaatagtgcctcaaactcactggtgatgatactaaatgccacagatgcagatgaaccaaaccacttgaattctaaaattgccttcaaaattgtctctcaggaaccagcaggcacacccatgttcctcctaagcagaaacactggggaagtccgtactttgaccaattctcttgaccgagagcaagctagcagctatcgtctggttgtgagtggtgcagacaaagatggagaaggactatcaactcaatgtgaatgtaatattaaagtgaaagatgtcaacgataacttcccaatgtttagagactctcagtattcagcacgtattgaagaaaatattttaagttctgaattacttcgatttcaagtaacagatttggatgaagagtacacagataattggcttgcagtatatttctttacctctgggaatgaaggaaattggtttgaaatacaaactgatcctagaactaatgaaggcatcctgaaagtggtgaaggctctagattatgaacaactacaaagcgtgaaacttagtattgctgtcaaaaacaaagctgaatttcaccaatcagttatctctcgataccgagttcagtcaaccccagtcacaattcaggtaataaatgtaagagaaggaattgcattccgtcctgcttccaagacatttactgtgcaaaaaggcataagtagcaaaaaattggtggattatatcctgggaacatatcaagccatcgatgaggacactaacaaagctgcctcaaatgtcaaatatgtcatgggacgtaacgatggtggatacctaatgattgattcaaaaactgctgaaatcaaatttgtcaaaaatatgaaccgagattctactttcatagttaacaaaacaatcacagctgaggttctggccatagatgaatacacgggtaaaacttctacaggcacggtatatgttagagtacccgatttcaatgacaattgtccaacagctgtcctcgaaaaagatgcagtttgcagttcttcaccttccgtggttgtctccgctagaacactgaataatagatacactggcccctatacatttgcactggaagatcaacctgtaaagttgcctgccgtatggagtatcacaaccctcaatgctacctcggccctcctcagagcccaggaacagatacctcctggagtataccacatctccctggtacttacagacagtcagaacaatcggtgtgagatgccacgcagcttgacactggaagtctgtcagtgtgacaacaggggcatctgtggaacttcttacccaaccacaagccctgggaccaggtatggcaggccgcactcagggaggctggggcctgccgccatcggcctgctgctccttggtctcctgctgctgctgttggccccccttctgctgttgacctgtgactgtggggcaggttctactgggggagtgacaggtggttttatcccagttcctgatggctcagaaggaacaattcatcagtggggaattgaaggagcccatcctgaagacaaggaaatcacaaatatttgtgtgcctcctgtaacagccaatggagccgatttcatggaaagttctgaagtttgtacaaatacgtatgccagaggcacagcggtggaaggcacttcaggaatggaaatgaccactaagcttggagcagccactgaatctggaggtgctgcaggctttgcaacagggacagtgtcaggagctgcttcaggattcggagcagccactggagttggcatctgttcctcagggcagtctggaaccatgagaacaaggcattccactggaggaaccaataaggactacgctgatggggcgataagcatgaattttctggactcctacttttctcagaaagcatttgcctgtgcggaggaagacgatggccaggaagcaaatgactgcttgttgatctatgataatgaaggcgcagatgccactggttctcctgtgggctccgtgggttgttgcagttttattgctgatgacctggatgacagcttcttggactcacttggacccaaatttaaaaaacttgcagagataagccttggtgttgatggtgaaggcaaagaagttcagccaccctctaaagacagcggttatgggattgaatcctgtggccatcccatagaagtccagcagacaggatttgttaagtgccagactttgtcaggaagtcaaggagcttctgctttgtccgcctctgggtctgtccagccagctgtttccatccctgaccctctgcagcatggtaactatttagtaacggagacttactcggcttctggttccctcgtgcaaccttccactgcaggctttgatccacttctcacacaaaatgtgatagtgacagaaagggtgatctgtcccatttccagtgttcctggcaacctagctggcccaacgcagctacgagggtcacatactatgctctgtacagaggatccttgctcccgtctaatatgaccagaatgagctggaataccacactgaccaaatctggatctttggactaaagtattcaaaatagcatagcaaagctcactgtattgggctaataatttggcacttattagcttctctcataaactgatcacgattataaattaaatgtttgggttcataccccaaaagcaatatgttgtcactcctaattctcaagtactattcaaattgtagtaaatcttaaagtttttcaaaaccctaaaatcatattcgc

SEQ ID NO: 558 - protein, 999 aa, Homo sapien
MMGLFPRTTGALAIFVVVILVHGELRIETKGQYDEEEMTMQQAKRRQKREWVKFAKPCREGEDNSKRNPIAKITSDYQATQKITYRISGVGIDQPPFGIFVVDKNTGDINITAIVDREETPSFLITCRALNAQGLDVEKPLILTVKILDINDNPPVFSQQIFMGEIEENSASNSLVMILNATDADEPNHLNSKIAFKIVSQEPAGTPMFLLSRNTGEVRTLTNSLDREQASSYRLVVSGADKDGEGLSTQCECNIKVKDVNDNFPMFRDSQYSARIEENILSSELLRFQVTDLDEEYTDNWLAVYFFTSGNEGNWFEIQTDPRTNEGILKVVKALDYEQLQSVKLSIAVKNKAEFHQSVISRYRVQSTPVTIQVINVREGIAFRPASKTFTVQKGISSKKLVDYILGTYQAIDEDTNKAASNVKYVMGRNDGGYLMIDSKTAEIKFVKNMNRDSTFIVNKTITAEVLAIDEYTGKTSTGTVYVRVPDFNDNCPTAVLEKDAVCSSSPSVVVSARTLNNRYTGPYTFALEDQPVKLPAVWSITTLNATSALLRAQEQIPPGVYHISLVLTDSQNNRCEMPRSLTLEVCQCDNRGICGTSYPTTSPGTRYGRPHSGRLGPAAIGLLLLGLLLLLLAPLLLLTCDCGAGSTGGVTGGFIPVPDGSEGTIHQWGIEGAHPEDKEITNICVPPVTANGADFMESSEVCTNTYARGTAVEGTSGMEMTTKLGAATESGGAAGFATGTVSGAASGFGAATGVGICSSGQSGTMRTRHSTGGTNKDYADGAISMNFLDSYFSQKAFACAEEDDGQEANDCLLIYDNEGADATGSPVGSVGCCSFIADDLDDSFLDSLGPKFKKLAEISLGVDGEGKEVQPPSKDSGYGIESCGHPIEVQQTGFVKCQTLSGSQGASALSASGSVQPAVSIPDPLQHGNYLVTETYSASGSLVQPSTAGFDPLLTQNVIVTERVICPISSVPGNLAGPTQLRGSHTMLCTEDPCSRLI

SEQ ID NO: 559 - DNA, 2373 bp, Homo sapien
ggcacgaggagcgtttcgtttggacttctcgacttgagtgcccgcctccttcgccgccgcctctgcagtcctcagcgcagttatgcccagttcttcccgctgtggggacacgaccacggaggaatccttgcttcagggactcgggaccctgctggaccccttcctcgggtttaggggatgtggggaccaggagaaagtcaggatccctaagagtcttccctgcctggatggatgagtggcttcttctccacctagattctttccacaggagccagcatacttcctgaacatggagagtgttgttcgccgctgcccattcttatcccgagtcccccaggcctttctgcagaaagcaggcaaatctctgttgttctatgcccaaaactgccccaagatgatggaagttggggccaagccagcccctcgggcattgtccactgcagcagtacactaccaacagatcaaagaaacccctccggccagtgagaaagacaaaactgctaaggccaaggtccaacagactcctgatggatcccagcagagtccagatggcacacagcttccgtctggacaccccttgcctgccacaagccagggcactgcaagcaaatgccctttcctggcagcacagatgaatcagagaggcagcagtgtcttctgcaaagccagtcttgagcttcaggaggatgtgcaggaaatgaatgccgtgaggaaagaggttgctgaaacctcagcaggccccagtgtggttagtgtgaaaaccgatggaggggatcccagtggactgctgaagaacttccaggacattatgcaaaagcaaagaccagaaagagtgtctcatcttcttcaagataacttgccaaaatctgtttccacttttcagtatgatcgtttctttgagaaaaaaattgatgagaaaaagaatgaccacacctatcgagtttttaaaactgtgaaccggcgagcacacatcttccccatggcagatgactattcagactccctcatcaccaaaaagcaagtgtcagtctggtgcagtaatgactacctaggaatgagtcgccacccacgggtgtgtggggcagttatggacactttgaaacaacatggtgctggggcaggtggtactagaaatatttctggaactagtaaattccatgtggacttagagcgggagctggcagacctccatgggaaagatgccgcactcttgttttcctcgtgctttgtggccaatgactcaaccctcttcaccctggctaagatgatgccaggctgtgagatttactctgattctgggaaccatgcctccatgatccaagggattcgaaacagccgagtgccaaagtacatcttccgccacaatgatgtcagccacctcagagaactgctgcaaagatctgacccctcagtccccaagattgtggcatttgaaactgtccattcaatggatggggcggtgtgcccactggaagagctgtgtgatgtggcccatgagtttggagcaatcaccttcgtggatgaggtccacgcagtggggctttatggggctcgaggcggagggattggggatcgggatggagtcatgccaaaaatggacatcatttctggaacacttggcaaagcctttggttgtgttggagggtacatcgccagcacgagttctctgattgacaccgtacggtcctatgctgctggcttcatcttcaccacctctctgccacccatgctgctggctggagccctggagtctgtgcggatcctgaagagcgctgagggacgggtgcttcgccgccagcaccagcgcaacgtcaaactcatgagacagatgctaatggatgccggcctccctgttgtccactgccccagccacatcatccctgtgcgggttgcagatgctgctaaaaacacagaagtctgtgatgaactaatgagcagacataacatctacgtgcaagcaatcaattaccctacggtgccccggggagaagagctcctacggattgcccccacccctcaccacacaccccagatgatgaactacttccttgagaatctgctagtcacatggaagcaagtggggctggaactgaagcctcattcctcagctgagtgcaacttctgcaggaggccactgcattttgaagtgatgagtgaaagagagaagtcctatttctcaggcttgagcaagttggtatctgctcaggcctgagcatgacctcaattatttcacttaaccccaggccattatcatatccagatggtcttcagagttgtctttatatgtgaattaagttatattaaattttaatctatagtaaaaacatagtcctggaaataaaaaaaaaaaaaaaaaaaaaaaaaaaaaaaaaa

SEQ ID NO: 560 - protein, 640 aa, Homo sapien
MESVVRRCPFLSRVPQAFLQKAGKSLLFYAQNCPKMMEVGAKPAPRALSTAAVHYQQIKETPPASEKDKTAKAKVQQTPDGSQQSPDGTQLPSGHPLPATSQGTASKCPFLAAQMNQRGSSVFCKASLELQEDVQEMNAVRKEVAETSAGPSVVSVKTDGGDPSGLLKNFQDIMQKQRPERVSHLLQDNLPKSVSTFQYDRFFEKKIDEKKNDHTYRVFKTVNRRAHIFPMADDYSDSLITKKQVSVWCSNDYLGMSRHPRVCGAVMDTLKQHGAGAGGTRNISGTSKFHVDLERELADLHGKDAALLFSSCFVANDSTLFTLAKMMPGCEIYSDSGNHASMIQGIRNSRVPKYIFRHNDVSHLRELLQRSDPSVPKIVAFETVHSMDGAVCPLEELCDVAHEFGAITFVDEVHAVGLYGARGGGIGDRDGVMPKMDIISGTLGKAFGCVGGYIASTSSLIDTVRSYAAGFIFTTSLPPMLLAGALESVRILKSAEGRVLRRQHQRNVKLMRQMLMDAGLPVVHCPSHIIPVRVADAAKNTEVCDELMSRHNIYVQAINYPTVPRGEELLRIAPTPHHTPQMMNYFLENLLVTWKQVGLELKPHSSAECNFCRRPLHFEVMSEREKSYFSGLSKLVSAQA

SEQ ID NO: 561 - DNA, 1820 bp, Homo sapien
acagagatggcactgatgcaggaactgtatagcacaccagcctccaggctggactccttcgtggctcagtggctgcagccccaccgggagtggaaggaagaggtgctagacgctgtgcggaccgtggaggagtttctgaggcaggagcatttccaggggaagcgtgggctggaccaggatgtgcgggtgctgaaggtagtcaaggtgggctccttcgggaatggcacggttctcaggagcaccagagaggtggagctggtggcgtttctgagctgtttccacagcttccaggaggcagccaagcatcacaaagatgttctgaggctgatatggaaaaccatgtggcaaagccaggacctgctggacctcgggctcgaggacctgaggatggagcagagagtccccgatgctcttgtcttcaccatccagaccagggggactgcggagcccatcacggtcaccattgtgcctgcctacagagccctggggccttctcttcccaactcccagccaccccctgaggtctatgtgagcctgatcaaggcctgcggtggtcctggaaatttctgcccatccttcagcgagctgcagagaaatttcgtgaaacatcggccaactaagctgaagagcctcctgcgcctggtgaaacactggtaccagcagtatgtgaaagccaggtcccccagagccaatctgccccctctctatgctcttgaacttctaaccatctatgcctgggaaatgggtactgaagaagacgagaatttcatgttggacgaaggcttcaccactgtgatggacctgctcctggagtatgaagtcatctgtatctactggaccaagtactacacactccacaatgcaatcattgaggattgtgtcagaaaacagctcaaaaaagagaggcccatcatcctggatccggccgaccccaccctcaacgtggcagaagggtacagatgggacatcgttgctcagagggcctcccagtgcctgaaacaggactgttgctatgacaacagggagaaccccatctccagctggaacgtgaagagggcacgagacatccacttgacagtggagcagaggggttacccagatttcaacctcatcgtgaacccttatgagcccataaggaaggttaaagagaaaatccggaggaccaggggctactctggcctgcagcgtctgtccttccaggttcctggcagtgagaggcagcttctcagcagcaggtgctccttagccaaatatgggatcttctcccacactcacatctatctgctggagaccatcccctccgagatccaggtcttcgtgaagaatcctgatggtgggagctacgcctatgccatcaaccccaacagcttcatcctgggtctgaagcagcagattgaagaccagcaggggcttcctaaaaagcagcagcagctggaattccaaggccaagtcctgcaggactggttgggtctggggatctatggcatccaagacagtgacactctcatcctctcgaagaagaaaggagaggctctgtttccagccagttagttttctctgggagacttctctgtacatttctgccatgtactccagaactcatcctgtcaatcactctgtcccattgtctactgggaaggtcccaggtcttcaccagttttacaatgagttatcccaggccagacgtggtagctcacacctgtaatcccagaactttgggaggccgaggtgggaggagcgcttgagccgaggagttcaagaccagcctgggtatcatagggagaccccgtctctacaaaataaaaaaataattcactggg

SEQ ID NO: 562 - protein, 514 aa, Homo sapien
MALMQELYSTPASRLDSFVAQWLQPHREWKEEVLDAVRTVEEFLRQEHFQGKRGLDQDVRVLKVVKVGSFGNGTVLRSTREVELVAFLSCFHSFQEAAKHHKDVLRLIWKTMWQSQDLLDLGLEDLRMEQRVPDALVFTIQTRGTAEPITVTIVPAYRALGPSLPNSQPPPEVYVSLIKACGGPGNFCPSFSELQRNFVKHRPTKLKSLLRLVKHWYQQYVKARSPRANLPPLYALELLTIYAWEMGTEEDENFMLDEGFTTVMDLLLEYEVICIYWTKYYTLHNAIIEDCVRKQLKKERPIILDPADPTLNVAEGYRWDIVAQRASQCLKQDCCYDNRENPISSWNVKRARDIHLTVEQRGYPDFNLIVNPYEPIRKVKEKIRRTRGYSGLQRLSFQVPGSERQLLSSRCSLAKYGIFSHTHIYLLETIPSEIQVFVKNPDGGSYAYAINPNSFILGLKQQIEDQQGLPKKQQQLEFQGQVLQDWLGLGIYGIQDSDTLILSKKKGEALFPAS

SEQ ID NO: 563 - DNA, 3486 bp, Homo sapien
cacaacctagtccagagcctcacagtcctactgaacctcctgcatggggcagcagtattgtgaaagttccgtctggtatatttgatgtcaacagcaggaaaagtagcactggtagtatatcaaatgtgctgttttctactcaagatccagttgaagatgcagtctttggcgaagctactaatctcaagaagaatggtgatagaggagaaaaaagacaaaagcattttcctgagaggagttgtagttttagttctgaaagtcgagcaggaatgttgcttaagaagagtagtttggattcgaattcaagtgaaatggctatcatgatgggagcagatgccaagattctcacagcagcattgacatgtcctaagacttctctacttcatattgcaagaacccatagctttgagaatgttagctgtcacctacctgatagtaggacttgtatgtctgaaagcacttggaatcctgagcacagatcatctccggtgccagagatgcttgaggaaagccaagaactccttgagcctgtggttgatgacgtacctaaaactactgcaacagtagatacatatgagagtctactaagtgatagtaacagtaatcagtccagagacttgaaaacagtatccaaagatctgagaaataagagaagtagtttatatggtattgctaaggtggttcagagggaagatgttgaaactggactagatcctttgtctcttttagccactgaatgtacaggaggaaaaactcctgattctgaagataagttgttttctccagttattgcacgtaatctggctgatgaaatagaaagctatatgaacctaaaaagtcccctaggtagtaaatcttctagtatggaattacacagagaggaaaacagagagtctggcatgactactgcatttattcatgctctagagaggagatcaagcctacctttagatcatggttcaccagcacaggaaaatcctgaaagtgaaaagagctcacctgcagtgtccaggtctaaaacttttactgggcgtttcaagcagcaaaccccctctcgaactcataaagaacgttcaacttctttgtcagcactggtgcgttcttcgccacatggctcgttgggttctgtagtaaattctttgtcagggctaaagctggataatatactctcagggcccaagatagatgtcctgaaatctggtatgaaacaagcagcgacagtagccagtaagatgtgggtagctgttgcgtctgcctacagctactcagatgatgaggaagaaactaatagagactacagcttcccagctggcctagaagaccatattttgggggagaatatatcgcctaacacaagtatctcagggttggtccccagtgaacttacccagagcaacacaagtcttggcagtagcagcagtagtggagatgtaggaaaactgcattatccaacaggtgaagttccatttccaagaggcatgaaagggcaagactttgaaaaatcagatcatggttcttctcaaaataccagcatgtctagcatctatcagaattgtgcaatggaggttttgatgtccagttgttcacagtgtagagcttgtggagctttagtttatgatgaagaaattatggctggatggacagcagatgactcaaatttgaatacagcttgtccattctgtaaaagcaacttcttgcctcttctcaatatagaattcaaagatttgagaggttctgcaagctttttcctgaaaccaagtacctctggtgacagtttacaaagtggaagcattccattggcaaatgaatccttggagcacaaacctgtatccagtttagcagaacctgacttgatcaactttatggacttcccaaaacataaccagatcataactgaagaaacaggctctgcagttgaaccaagtgatgaaataaagagagccagtggagatgtccaaactatgaaaatttcatctgtgcctaatagtttatcaaagcgaaatgtgtctttgactcgaagtcacagtgttggaggcccattgcagaatattgactttacccagcgaccgtttcatggcatctcaacagttagtcttccaaatagtctgcaggaagttgtggatcctttaggaaaaagacccaatcctccccctgtttctgtgccctacttgagtcctctagtactccgtaaagaacttgaatctttgctagaaaatgaaggtgatcaggtgattcatacatcttctttcatcaatcaacatccaatcattttctggaacctcgtttggtatttcagacgtttggaccttcctagtaacttgccaggacttatcctcacatctgaacattgtaatgaaggtgtacagcttcctctgtcatctctgtcccaggatagcaaacttgtgtatattcagctgttatgggataatatcaaccttcatcaggaaccaagagaacctctgtatgtctcatggaggaattttaattctgaaaagaaatcatctctcctgtcagaggaacaacaagaaacaagcactttagtagaaaccatcaggcagagtattcagcacaataatgttcttaaacccatcaacctactttcacagcaaatgaagccaggcatgaaaagacaaagaggcatttgacaatgaatatggaattgcatacaatagtctgtcttcagagattcttgaaaggttgcagaaaattgatgctccaccaagtgccagtgtcgagtggtgcaggaagtgttttggagcgcctctcatttaaatagagattcactagaatgttgacacacaaggcttggggattagatttcatctggaaacattcaagttttttttttccaaatcgtaagaactggtgaatacggaattgaagtaactcttggggacaatatataatgaattatgattcatattgcattaccttgaaatatgaagtgccatttgaatgtcccagggcttattaatattgaagattttcaacccctgaactgcttttctgcctctgtggaaaactactttgggattcttcagtatttgtagtagtttgatagaaataatgaggaaccatattcattctaggcattgtttatatttgaagttactgagtttgaggaatggcaaattaaatttgcctaacccccaaaacaaatgaaatatctcaattataaaagcaacatggccgggcacggtggctcaggcctgtaatcccagcactttgggaggctgagcaaggtgggtggatcacttgaggccaggagttcgagaccagcctggccaacacggtgagaccctgtctttactaaaaatacaaaaattagccaggcgcaccactgtagtcccagctactcaggctgaggcaggagaatcgcttgaactgaggcagaggctacagtgagtggagatcacgccactgcaactccagcttgggtgacagagtgagaccgtctcaaaaaaaaaaaaaaaaaaaaaaaaaaaa

SEQ ID NO: 564 - protein, 791 aa, Homo sapien
MLLKKSSLDSNSSEMAIMMGADAKILTAALTCPKTSLLHIARTHSFENVSCHLPDSRTCMSESTWNPEHRSSPVPEMLEESQELLEPVVDDVPKTTATVDTYESLLSDSNSNQSRDLKTVSKDLRNKRSSLYGIAKVVQREDVETGLDPLSLLATECTGGKTPDSEDKLFSPVIARNLADEIESYMNLKSPLGSKSSSMELHREENRESGMTTAFIHALERRSSLPLDHGSPAQENPESEKSSPAVSRSKTFTGRFKQQTPSRTHKERSTSLSALVRSSPHGSLGSVVNSLSGLKLDNILSGPKIDVLKSGMKQAATVASKMWVAVASAYSYSDDEEETNRDYSFPAGLEDHILGENISPNTSISGLVPSELTQSNTSLGSSSSSGDVGKLHYPTGEVPFPRGMKGQDFEKSDHGSSQNTSMSSIYQNCAMEVLMSSCSQCRACGALVYDEEIMAGWTADDSNLNTACPFCKSNFLPLLNIEFKDLRGSASFFLKPSTSGDSLQSGSIPLANESLEHKPVSSLAEPDLINFMDFPKHNQIITEETGSAVEPSDEIKRASGDVQTMKISSVPNSLSKRNVSLTRSHSVGGPLQNIDFTQRPFHGISTVSLPNSLQEVVDPLGKRPNPPPVSVPYLSPLVLRKELESLLENEGDQVIHTSSFINQHPIIFWNLVWYFRRLDLPSNLPGLILTSEHCNEGVQLPLSSLSQDSKLVYIQLLWDNINLHQEPREPLYVSWRNFNSEKKSSLLSEEQQETSTLVETIRQSIQHNNVLKPINLLSQQMKPGMKRQRGI

SEQ ID NO: 565 - DNA, 2439 bp, Homo sapien
cagcacccagctccccgccaccgccatggtccccgacaccgcctgcgttcttctgctcaccctggctgccctcggcgcgtccggacagggccagagcccgttgggctcagacctgggcccgcagatgcttcgggaactgcaggaaaccaacgcggcgctgcaggacgtgcgggactggctgcggcagcaggtcagggagatcacgttcctgaaaaacacggtgatggagtgtgacgcgtgcgggatgcagcagtcagtacgcaccggcctacccagcgtgcggcccctgctccactgcgcgcccggcttctgcttccccggcgtggcctgcatccagacggagagcggcggccgctgcggcccctgccccgcgggcttcacgggcaacggctcgcactgcaccgacgtcaacgagtgcaacgcccacccctgcttcccccgagtccgctgtatcaacaccagcccggggttccgctgcgaggcttgcccgccggggtacagcggccccacccaccagggcgtggggctggctttcgccaaggccaacaagcaggtttgcacggacatcaacgagtgtgagaccgggcaacataactgcgtccccaactccgtgtgcatcaacacccggggctccttccagtgcggcccgtgccagcccggcttcgtgggcgaccaggcgtccggctgccagcgcggcgcacagcgcttctgccccgacggctcgcccagcgagtgccacgagcatgcagactgcgtcctagagcgcgatggctcgcggtcgtgcgtgtgtcgcgttggctgggccggcaacgggatcctctgtggtcgcgacactgacctagacggcttcccggacgagaagctgcgctgcccggagccgcagtgccgtaaggacaactgcgtgactgtgcccaactcagggcaggaggatgtggaccgcgatggcatcggagacgcctgcgatccggatgccgacggggacggggtccccaatgaaaaggacaactgcccgctggtgcggaacccagaccagcgcaacacggacgaggacaagtggggcgatgcgtgcgacaactgccggtcccagaagaacgacgaccaaaaggacacagaccaggacggccggggcgatgcgtgcgacgacgacatcgacggcgaccggatccgcaaccaggccgacaactgccctagggtacccaactcagaccagaaggacagtgatggcgatggtataggggatgcctgtgacaactgtccccagaagagcaacccggatcaggcggatgtggaccacgactttgtgggagatgcttgtgacagcgatcaagaccaggatggagacggacatcaggactctcgggacaactgtcccacggtgcctaacagtgcccaggaggactcagaccacgatggccagggtgatgcctgcgacgacgacgacgacaatgacggagtccctgacagtcgggacaactgccgcctggtgcctaaccccggccaggaggacgcggacagggacggcgtgggcgacgtgtgccaggacgactttgatgcagacaaggtggtagacaagatcgacgtgtgtccggagaacgctgaagtcacgctcaccgacttcagggccttccagacagtcgtgctggacccggagggtgacgcgcagattgaccccaactgggtggtgctcaaccagggaagggagatcgtgcagacaatgaacagcgacccaggcctggctgtgggttacactgccttcaatggcgtggacttcgagggcacgttccatgtgaacacggtcacggatgacgactatgcgggcttcatctttggctaccaggacagctccagcttctacgtggtcatgtggaagcagatggagcaaacgtattggcaggcgaaccccttccgtgctgtggccgagcctggcatccaactcaaggctgtgaagtcttccacaggccccggggaacagctgcggaacgctctgtggcatacaggagacacagagtcccaggtgcggctgctgtggaaggacccgcgaaacgtgggttggaaggacaagaagtcctatcgttggttcctgcagcaccggccccaagtgggctacatcagggtgcgattctatgagggccctgagctggtggccgacagcaacgtggtcttggacacaaccatgcggggtggccgcctgggggtcttctgcttctcccaggagaacatcatctgggccaacctgcgttaccgctgcaatgacaccatcccagaggactatgagacccatcagctgcggcaagcctagggaccagggtgaggacccgccggatgacagccaccctcaccgcggctggatgggggctctgcacccagcccaaggggtggccgtcctgagggggaagtgagaagggctcagagaggacaaaataaagtgtgtgtgcaggg

SEQ ID NO: 566 - protein, 757 aa, Homo sapien
MVPDTACVLLLTLAALGASGQGQSPLGSDLGPQMLRELQETNAALQDVRDWLRQQVREITFLKNTVMECDACGMQQSVRTGLPSVRPLLHCAPGFCFPGVACIQTESGGRCGPCPAGFTGNGSHCTDVNECNAHPCFPRVRCINTSPGFRCEACPPGYSGPTHQGVGLAFAKANKQVCTDINECETGQHNCVPNSVCINTRGSFQCGPCQPGFVGDQASGCQRGAQRFCPDGSPSECHEHADCVLERDGSRSCVCRVGWAGNGILCGRDTDLDGFPDEKLRCPEPQCRKDNCVTVPNSGQEDVDRDGIGDACDPDADGDGVPNEKDNCPLVRNPDQRNTDEDKWGDACDNCRSQKNDDQKDTDQDGRGDACDDDIDGDRIRNQADNCPRVPNSDQKDSDGDGIGDACDNCPQKSNPDQADVDHDFVGDACDSDQDQDGDGHQDSRDNCPTVPNSAQEDSDHDGQGDACDDDDDNDGVPDSRDNCRLVPNPGQEDADRDGVGDVCQDDFDADKVVDKIDVCPENAEVTLTDFRAFQTVVLDPEGDAQIDPNWVVLNQGREIVQTMNSDPGLAVGYTAFNGVDFEGTFHVNTVTDDDYAGFIFGYQDSSSFYVVMWKQMEQTYWQANPFRAVAEPGIQLKAVKSSTGPGEQLRNALWHTGDTESQVRLLWKDPRNVGWKDKKSYRWFLQHRPQVGYIRVRFYEGPELVADSNVVLDTTMRGGRLGVFCFSQENIIWANLRYRCNDTIPEDYETHQLRQA

SEQ ID NO: 567 - DNA, 2680 bp, Homo sapien
ggggtggtgcagggcaggggtggtatatcctgtctgacggagggcgggcctcgccagtgccagagagggacgaaccagggtggaagcgccaggagcagctgcagggagccctcacgcggacctcgcactctatggccgtagggagccgctgagagcgagaagagcacgctcctgcccgcccgctgcaccgcacctcgcctcgcctctctgctctcctaggccccggccgcgcgccacccgcctcccgccaccatgaaccactcgccgctcaagaccgccttggcgtacgaatgcttccaggaccaggacaactccacgttggctttgccgtcggaccaaaagatgaaaacaggcacgtctggcaggcagcgcgtgcaggagcaggtgatgatgaccgtcaagcggcagaagtccaagtcttcccagtcgtccaccctgagccactccaatcgaggttccatgtatgatggcttggctgacaattacaactatgggaccaccagcaggagcagctactactccaagttccaggcagggaatggctcatggggatatccgatctacaatggaaccctcaagcgggagcctgacaacaggcgcttcagctcctacagccagatggagaactggagccggcactacccccggggcagctgtaacaccaccggcgcaggcagcgacatctgcttcatgcagaaaatcaaggcgagccgcagtgagcccgacctctactgtgacccacggggcaccctgcgcaagggcacgctgggcagcaagggccagaagaccacccagaaccgctacagcttttacagcacctgcagtggtcagaaggccataaagaagtgccctgtgcgcccgccctcttgtgcctccaagcaggaccctgtgtatatcccgcccatctcctgcaacaaggacctgtcctttggccactctagggccagctccaagatctgcagtgaggacatcgagtgcagtgggctgaccatccccaaggctgtgcagtacctgagctcccaggatgagaagtaccaggccattggggcctattacatccagcatacctgcttccaggatgaatctgccaagcaacaggtctatcagctgggaggcatctgcaagctggtggacctcctccgcagccccaaccagaacgtccagcaggccgcggcaggggccctgcgcaacctggtgttcaggagcaccaccaacaagctggagacccggaggcagaatgggatccgcgaggcagtcagcctcctgaggagaaccgggaacgccgagatccagaagcagctgactgggctgctctggaacctgtcttccactgacgagctgaaggaggaactcattgccgacgccctgcctgttctggccgaccgcgtcatcattcccttctctggctggtgcgatggcaatagcaacatgtcccgggaagtggtggaccctgaggtcttcttcaatgccacaggctgcttgaggaacctgagctcggccgatgcaggccgccagaccatgcgtaactactcagggctcattgattccctcatggcctatgtccagaactgtgtagcggccagccgctgtgacgacaagtctgtggaaaactgcatgtgtgttctgcacaacctctcctaccgcctggacgccgaggtgcccacccgctaccgccagctggagtataacgcccgcaacgcctacaccgagaagtcctccactggctgcttcagcaacaagagcgacaagatgatgaacaacaactatgactgccccctgcctgaggaagagaccaaccccaagggcagcggctggttgtaccattcagatgccatccgcacctacctgaacctcatgggcaagagcaagaaagatgctaccctggaggcctgtgctggtgccctgcagaacctgacagccagcaaggggctgatgtccagtggcatgagccagttgattgggctgaaggaaaagggcctgccacaaattgcccgcctcctgcaatctggcaactctgatgtggtgcggtccggagcctccctcctgagcaacatgtcccgccaccctctgctgcacagagtgatggggaaccaggtgttcccggaggtgaccaggctcctcaccagccacactggcaataccagcaactccgaagacatcttgtcctcggcctgctacactgtgaggaacctgatggcctcgcagccacaactggccaagcagtacttctccagcagcatgctcaacaacatcatcaacctgtgccgaagcagtgcctcacccaaggccgcagaagctgcccggcttctcctgtctgacatgtggtccagcaaggaactgcagggtgtcctcagacagcaaggtttcgataggaacatgctgggaaccttagctggggccaacagcctcaggaacttcacctcccgattctaagaagagactgtccaagcaagttaggcttgcaggaagatatgacccagctgagaagccctcaggcctcgctggatggggttttctgtccatcctgtgcagtatttgggaaagttcacaagaaactgagaagaaacctaaaaactgtggatagtggaaagatttttagattttttttttccttggggaaactggcaggcaatgggggttagggaggttggggcggggggggctttcttgagttaaaggg

SEQ ID NO: 568 - protein, 726 aa, Homo sapien
MNHSPLKTALAYECFQDQDNSTLALPSDQKMKTGTSGRQRVQEQVMMTVKRQKSKSSQSSTLSHSNRGSMYDGLADNYNYGTTSRSSYYSKFQAGNGSWGYPIYNGTLKREPDNRRFSSYSQMENWSRHYPRGSCNTTGAGSDICFMQKIKASRSEPDLYCDPRGTLRKGTLGSKGQKTTQNRYSFYSTCSGQKAIKKCPVRPPSCASKQDPVYIPPISCNKDLSFGHSRASSKICSEDIECSGLTIPKAVQYLSSQDEKYQAIGAYYIQHTCFQDESAKQQVYQLGGICKLVDLLRSPNQNVQQAAAGALRNLVFRSTTNKLETRRQNGIREAVSLLRRTGNAEIQKQLTGLLWNLSSTDELKEELIADALPVLADRVIIPFSGWCDGNSNMSREVVDPEVFFNATGCLRNLSSADAGRQTMRNYSGLIDSLMAYVQNCVAASRCDDKSVENCMCVLHNLSYRLDAEVPTRYRQLEYNARNAYTEKSSTGCFSNKSDKMMNNNYDCPLPEEETNPKGSGWLYHSDAIRTYLNLMGKSKKDATLEACAGALQNLTASKGLMSSGMSQLIGLKEKGLPQIARLLQSGNSDVVRSGASLLSNMSRHPLLHRVMGNQVFPEVTRLLTSHTGNTSNSEDILSSACYTVRNLMASQPQLAKQYFSSSMLNNIINLCRSSASPKAAEAARLLLSDMWSSKELQGVLRQQGFDRNMLGTLAGANSLRNFTSRF

SEQ ID NO: 569 - DNA, 1707 bp, Homo sapien
gggaagctccaggcaaacagcccagcaaacagcagcactcagctaaaaggaagactcacagaacacagttgaagaaggaaagtggcgatggacctcatcccaaatttggcggtggaaacctggcttctcctggctgtcagcctggtgctcctctatctatatgggacccgtacacatggactttttaagagactgggaattccagggcccacacctctgcctttgttgggaaatgttttgtcctatcgtcagggtctctggaaatttgacacagagtgctataaaaagtatggaaaaatgtggggaacgtatgaaggtcaactccctgtgctggccatcacagatcccgacgtgatcagaacagtgctagtgaaagaatgttattctgtcttcacaaatcgaaggtctttaggcccagtgggatttatgaaaagtgccatctctttagctgaggatgaagaatggaagagaatacggtcattgctgtctccaaccttcaccagcggaaaactcaaggagatgttccccatcattgcccagtatggagatgtattggtgagaaacttgaggcgggaagcagagaaaggcaagcctgtcaccttgaaagacatctttggggcctacagcatggatgtgattactggcacatcatttggagtgaacatcgactctctcaacaatccacaagacccctttgtggagagcactaagaagttcctaaaatttggtttcttagatccattatttctctcaataatactctttccattccttaccccagtttttgaagcattaaatgtctctctgtttccaaaagataccataaattttttaagtaaatctgtaaacagaatgaagaaaagtcgcctcaacgacaaacaaaagcaccgactagatttccttcagctgatgattgactcccagaattcgaaagaaactgagtcccacaaagctctgtctgatctggagctcgcagcccagtcaataatcttcatttttgctggctatgaaaccaccagcagtgttctttccttcactttatatgaactggccactcaccctgatgtccagcagaaactgcaaaaggagattgatgcagttttgcccaataaggcaccacctacctatgatgccgtggtacagatggagtaccttgacatggtggtgaatgaaacactcagattattcccagttgctattagacttgagaggacttgcaagaaagatgttgaaatcaatggggtattcattcccaaagggtcaatggtggtgattccaacttatgctcttcaccatgacccaaagtactggacagagcctgaggagttccgccctgaaaggttcagtaagaagaaggacagcatagatccttacatatacacaccctttggaactggacccagaaactgcattggcatgaggtttgctctcatgaacatgaaacttgctctaatcagagtccttcagaacttctccttcaaaccttgtaaagaaacacagatccccttgaaattagacacgcaaggacttcttcaaccagaaaaacccattgttctaaaggtggattcaagagatggaaccctaagtggagaatgagttattctaaggatttctactttggtcttcaagaaagctgtgccccagaacaccagagatttcaacttagtcaataaaaccttgaaataaagatgggcttaatctaatgta

SEQ ID NO: 570 - protein, 502 aa, Homo sapien
MDLIPNLAVETWLLLAVSLVLLYLYGTRTHGLFKRLGIPGPTPLPLLGNVLSYRQGLWKFDTECYKKYGKMWGTYEGQLPVLAITDPDVIRTVLVKECYSVFTNRRSLGPVGFMKSAISLAEDEEWKRIRSLLSPTFTSGKLKEMFPIIAQYGDVLVRNLRREAEKGKPVTLKDIFGAYSMDVITGTSFGVNIDSLNNPQDPFVESTKKFLKFGFLDPLFLSIILFPFLTPVFEALNVSLFPKDTINFLSKSVNRMKKSRLNDKQKHRLDFLQLMIDSQNSKETESHKALSDLELAAQSIIFIFAGYETTSSVLSFTLYELATHPDVQQKLQKEIDAVLPNKAPPTYDAVVQMEYLDMVVNETLRLFPVAIRLERTCKKDVEINGVFIPKGSMVVIPTYALHHDPKYWTEPEEFRPERFSKKKDSIDPYIYTPFGTGPRNCIGMRFALMNMKLALIRVLQNFSFKPCKETQIPLKLDTQGLLQPEKPIVLKVDSRDGTLSGE

SEQ ID NO: 571 - DNA, 4627 bp, Homo sapien
tcacttgcctgatatttccagtgtcagagggacacagccaacgtggggtcccttctaggctgacagccgctctccagccactgccgcgagcccgtctgctcccgccctgcccgtgcactctccgcagccgccctccgccaagccccagcgcccgctcccatcgccgatgaccgcggggaggaggatggagatgctctgtgccggcagggtccctgcgctgctgctctgcctgggtttccatcttctacaggcagtcctcagtacaactgtgattccatcatgtatcccaggagagtccagtgataactgcacagctttagttcagacagaagacaatccacgtgtggctcaagtgtcaataacaaagtgtagctctgacatgaatggctattgtttgcatggacagtgcatctatctggtggacatgagtcaaaactactgcaggtgtgaagtgggttatactggtgtccgatgtgaacacttctttttaaccgtccaccaacctttaagcaaagagtatgtggctttgaccgtgattcttattattttgtttcttatcacagtcgtcggttccacatattatttctgcagatggtacagaaatcgaaaaagtaaagaaccaaagaaggaatatgagagagttacctcaggggatccagagttgccgcaagtctgaatggcgccatcaaacttatgggcagggataacagtgtgcctggttaatattaatattccattttattaataatatttatgttgggtcaagtgttaggtcaataacactgtattttaatgtacttgaaaaatgtttttatttttgttttatttttgacagactatttgctaatgtataatgtgcagaaaatatttaatatcaaaagaaaattgatatttttatacaagtaatttcctgagctaaatgcttcattgaaagcttcaaagtttatatgcctggtgcacagtgcttagaagtaagcaattcccaggtcatagctcaagaattgttagcaaatgacagatttctgtaagcctatatatatagtcaaatcgatttagtaagtatgttttttatgttcctcaaatcagtgataattggtttgactgtaccatggtttgatatgtagttggcaccatggtatcatatattaaaacaataatgcaattagaatttgggagaagcaaatataggtcctgtgttaaacactacacatttgaaacaagctaaccctggggagtctatggtctcttcactcaggtctcagctataattctgttatatgaggggcagtggacagttccctatgccaactcacgactcctacaggtactagtcactcatctaccagattctgcctatgtaaaatgaattgaaaaacaattttctgtaatcttttatttaagtagtgggcatttcatagcttcacaatgttccttttttgtatattacaacatttatgtgaggtaattattgctcaacagacaattagaaaaaagtccacacttgaagcctaaatttgtgctttttaagaatatttttagactatttctttttataggggctttgctgaattctaacattaaatcacagcccaaaatttgatggactaattattattttaaaatatatgaagacaataattctacatgttgtcttaagatggaaatacagttatttcatcttttattcaaggaagttttaactttaatacagctcagtaaatggcttcttctagaatgtaaagttatgtatttaaagttgtatcttgacacaggaaatgggaaaaaacttaaaaattaatatggtgtatttttccaaatgaaaaatctcaattgaaagcttttaaaatgtagaaacttaaacacaccttcctgtggaggctgagatgaaaactagggctcattttcctgacatttgtttattttttggaagagacaaagatttcttctgcactctgagcccataggtctcagagagttaataggagtatttttgggctattgcataaggagccactgctgccaccacttttggattttatgggaggctccttcatcgaatgctaaacctttgagtagagtctccctggatcacataccaggtcagggaggatctgttcttcctctacgtttatcctggcatgtgctagggtaaacgaaggcataataagccatggctgacctctggagcaccaggtgccaggacttgtctccatgtgtatccatgcattatataccctggtgcaatcacacgactgtcatctaaagtcctggccctggcccttactattaggaaaataaacagacaaaaacaagtaaatatatatggtcctatacatattgtatatatattcatatacaaacatgtatgtatacatgaccttaatggatcatagaattgcagtcatttggtgctctgctaaccatttatataaaacttaaaaacaagagaaaagaaaaatcaattagatctaaacagttatttctgtttcctatttaatatagctgaagtcaaaatatgtaagaacacattttaaatactctacttacagttggccctctgtggttagttccacatctgtggattcaaccaaccaaggacggaaaatgcttaaaaaataatacaacaacaacaaaaaatacattataacaactatttacttttttttttttctttttgagatggagtctcgctctgttgcccaggttggagtgcagtggcacgatctcggctcactgcaacctcacctcccgggttcaagagatcctcctgcctcagcctcctgagcagctgggactacaggcgcatgccaccatgcccagctaatttttgtatttttagtagaggcggggtttcaccatgttggccaggatggtctcaatctcctaaccttgagatccaccctccacagcctcccaaactgctgggattacaggcgtgagccaccgcacgtagcatttacattaggtattacaagtaatgtaaagatgatttaagtatacaggaggatgtgaataggttatatgcaagcactatgcccttttatataagtgacttgaacatctgtgcccgattttagtatgtgcaggggggcgatctgggaatcagtcccctgtggataccaaggtacaactgtatttattaacgcttactagatgtgaggagagtctgaatattttcagtgatcttggctgtttcaaaaaaatctattgacttttcaataaatcagctgcaatccatttatttcatttacaaaagatttattgtaagcctctcaatcttggtttttcagttgatcttaagcatgtcaattcataaaaacaagtcatttttgtatttttcatctttaagaatgcttaaaaaagctaatccctaaaatagttagatctttgtaaatgcatattaaataataaagtatgacccacattactttttatgggtgaaaataagacaaaaataatagttttagtgaggatggtgctgagtaaacataaaaactgatttgctctcagctgatgtgtcctgtacacagtgggaagattttagttcacacttagtctaactcccccattttacagatttctcactatatatatttctagaaggggctatgcatattcaatgtattgagaaccaaagcaaccacaaatgcataaatgcataatttatggtcttcaaccaaggccacataataacccagttaacttactctttaaccaggaatattaagttctataactagtactcaaggtttaaccttaaaattaagatttccttaaccttaaccttaaaattgatattatattaaacatacataatacaatgtaactccactgttctcctgaatattttttgctctaatctctctgccgaaagtcaaagtgatgggagaattggtatactggtatgactacgtcttaagtcagatttttatttatgagtctttgagactaaattcaatcaccaccaggtatcaaatcaacttttatgcagcaaatatatgattctagtgtctgacttttgttaaattcagtaatgcagtttttaaaaacctgtatctgacccactttgtaatttttgctccaatatccattctgtagacttttgaaaaaaaagtttttaatttgatgcccaatatattctgaccgttaaaaaattcttgttcatatgggagaagggggagtaatgacttgtacaaacagtatttctggtgtatattttaatgtttttaaaaagagtaatttcatttaaatatctgttattcaaatttgatgatgttaaatgtaatataatgtattttctttttattttgcactctgtaattgcactttttaagtttgaagagccattttggtaaacggtttttattaaagatgctatggaacataaagttgtattgcatgcaatttaaagtaacttatttgactatgaatattatcggattactgaattgtatcaatttgtttgtgttcaatatcagctttgataattgtgtaccttaagatattgaaggagaaaatagataatttacaagatattattaatttttatttatttttcttgggaattgaaaaaaattgaaataaataaaaatgcattgaacatcttgcattcaaaatcttcactgac

SEQ ID NO: 572 - protein, 169 aa, Homo sapien
MTAGRRMEMLCAGRVPALLLCLGFHLLQAVLSTTVIPSCIPGESSDNCTALVQTEDNPRVAQVSITKCSSDMNGYCLHGQCIYLVDMSQNYCRCEVGYTGVRCEHFFLTVHQPLSKEYVALTVILIILFLITVVGSTYYFCRWYRNRKSKEPKKEYERVTSGDPELPQV

SEQ ID NO: 573 - DNA, 2048 bp, Homo sapien
ctattgatctggactcctggataggcagctggaccaacggacggacgccatgagggctctgctgctcctggggttcctgctggtgagcttggagtcaacactttcgattccaccttgggaagcccccaaggagcataagtacaaagctgaagagcacacagtcgttctcactgtcaccggggagccctgccacttccccttccagtaccaccggcagctgtaccacaaatgtacccacaagggccggccaggccctcagccctggtgtgctaccacccccaactttgatcaggaccagcgatggggatactgtttggagcccaagaaagtgaaagaccactgcagcaaacacagcccctgccagaaaggagggacctgtgtgaacatgccaagcggcccccactgtctctgtccacaacacctcactggaaaccactgccagaaagagaagtgctttgagcctcagcttctccggtttttccacaagaatgagatatggtatagaactgagcaagcagctgtggccagatgccagtgcaagggtcctgatgcccactgccagcggctggccagccaggcctgccgcaccaacccgtgcctccatgggggtcgctgcctagaggtggagggccaccgcctgtgccactgcccggtgggctacaccggacccttctgcgacgtggacaccaaggcaagctgctatgatggccgcgggctcagctaccgcggcctggccaggaccacgctctcgggtgcgccctgtcagccgtgggcctcggaggccacctaccggaacgtgactgccgagcaagcgcggaactggggactgggcggccacgccttctgccggaacccggacaacgacatccgcccgtggtgcttcgtgctgaaccgcgaccggctgagctgggagtactgcgacctggcacagtgccagaccccaacccaggcggcgcctccgaccccggtgtcccctaggcttcatgtcccactcatgcccgcgcagccggcaccgccgaagcctcagcccacgacccggaccccgcctcagtcccagaccccgggagccttgccggcgaagcgggagcagccgccttccctgaccaggaacggcccactgagctgcgggcagcggctccgcaagagtctgtcttcgatgacccgcgtcgttggcgggctggtggcgctacgcggggcgcacccctacatcgccgcgctgtactggggccacagtttctgcgccggcagcctcatcgccccctgctgggtgctgacggccgctcactgcctgcaggaccggcccgcacccgaggatctgacggtggtgctcggccaggaacgccgtaaccacagctgtgagccgtgccagacgttggccgtgcgctcctaccgcttgcacgaggccttctcgcccgtcagctaccagcacgacctggctctgttgcgccttcaggaggatgcggacggcagctgcgcgctcctgtcgccttacgttcagccggtgtgcctgccaagcggcgccgcgcgaccctccgagaccacgctctgccaggtggccggctggggccaccagttcgagggggcggaggaatatgccagcttcctgcaggaggcgcaggtaccgttcctctccctggagcgctgctcagccccggacgtgcacggatcctccatcctccccggcatgctctgcgcagggttcctcgagggcggcaccgatgcgtgccagggtgattccggaggcccgctggtgtgtgaggaccaagctgcagagcgccggctcaccctgcaaggcatcatcagctggggatcgggctgtggtgaccgcaacaagccaggcgtctacaccgatgtggcctactacctggcctggatccgggagcacaccgtttcctgattgctcagggactcatctttccctccttggtgattccgcagtgagagagtggctggggcatggaaggcaagattgtgtcccattcccccagtgcggccagctccgcgccaggatggcgaggaactcaataaagtgctttgaaaatgctgag

SEQ ID NO: 574 - protein, 615 aa, Homo sapien
MRALLLLGFLLVSLESTLSIPPWEAPKEHKYKAEEHTVVLTVTGEPCHFPFQYHRQLYHKCTHKGRPGPQPWCATTPNFDQDQRWGYCLEPKKVKDHCSKHSPCQKGGTCVNMPSGPHCLCPQHLTGNHCQKEKCFEPQLLRFFHKNEIWYRTEQAAVARCQCKGPDAHCQRLASQACRTNPCLHGGRCLEVEGHRLCHCPVGYTGPFCDVDTKASCYDGRGLSYRGLARTTLSGAPCQPWASEATYRNVTAEQARNWGLGGHAFCRNPDNDIRPWCFVLNRDRLSWEYCDLAQCQTPTQAAPPTPVSPRLHVPLMPAQPAPPKPQPTTRTPPQSQTPGALPAKREQPPSLTRNGPLSCGQRLRKSLSSMTRVVGGLVALRGAHPYIAALYWGHSFCAGSLIAPCWVLTAAHCLQDRPAPEDLTVVLGQERRNHSCEPCQTLAVRSYRLHEAFSPVSYQHDLALLRLQEDADGSCALLSPYVQPVCLPSGAARPSETTLCQVAGWGHQFEGAEEYASFLQEAQVPFLSLERCSAPDVHGSSILPGMLCAGFLEGGTDACQGDSGGPLVCEDQAAERRLTLQGIISWGSGCGDRNKPGVYTDVAYYLAWIREHTVS

SEQ ID NO: 575 - DNA, 1927 bp, Homo sapien
tgccagcccaagtcggaacttggatcacatcagatcctctcgagctccagcaggagaggcccttcctcgcctggcagcccctgagcggctcagcagggcaccatggcaagatcccttctcctgcccctgcagatcttactgctatccttagccttggaaactgcaggagaagaagcccagggtgacaagattattgatggcgccccatgtgcaagaggctcccacccatggcaggtggccctgctcagtggcaatcagctccactgcggaggcgtcctggtcaatgagcgctgggtgctcactgccgcccactgcaagatgaatgagtacaccgtgcacctgggcagtgatacgctgggcgacaggagagctcagaggatcaaggcctcgaagtcattccgccaccccggctactccacacagacccatgttaatgacctcatgctcgtgaagctcaatagccaggccaggctgtcatccatggtgaagaaagtcaggctgccctcccgctgcgaaccccctggaaccacctgtactgtctccggctggggcactaccacgagcccagatgtgacctttccctctgacctcatgtgcgtggatgtcaagctcatctccccccaggactgcacgaaggtttacaaggacttactggaaaattccatgctgtgcgctggcatccccgactccaagaaaaacgcctgcaatggtgactcagggggaccgttggtgtgcagaggtaccctgcaaggtctggtgtcctggggaactttcccttgcggccaacccaatgacccaggagtctacactcaagtgtgcaagttcaccaagtggataaatgacaccatgaaaaagcatcgctaacgccacactgagttaattaactgtgtgcttccaacagaaaatgcacaggagtgaggacgccgatgacctatgaagtcaaatttgactttacctttcctcaaagatatatttaaaccaacctcatgccctgttgataaaccaatcaaattggtaaagacctaaaaccaaaacaaataaagaaacacaaaaccctcagtgctggagaagagtcagtgagaccagcactctcaaacactggaactggacgttcgtacagtctttacggaagacacttggtcaacgtacaccgagacccttattcaccacctttgacccagtaactctaatcttaggaagaacctactgaaacaaaaaaaatccaaaatgtagaacaagacttgaatttaccatgatattatttatcacagaaatgaagtgaaaccatcaaacatgttccaaaagtaccagatggcttaaataatagtctggcttggcacaacgatgttttttttctttgagacagagtctctgttgcttgggctgcaatgcagtgatgcaatcttggctcactgcaacctccgcctcctgggttcaagtgattctcgtgcttcagcctcccaagtacctgggactacaggtgtgcaccaccacaccaggctaattttttgtgtatttttactagagacagggtttcaccatgttggccagcgtggtcttgaacgcctgacctcagatgatccacccaccttggcctcccaaagtgctgggattacaggcatgagccaccacggccagcccacaatgatattacaaacctattaaaaatgatacttagacagaattgtcagtattattcaagaacatttaggctataggatgttaaatgacaaaaggaaggacaaaaatatatatgtatgtgaccctacccataaaaaatgaaatattcacagaatcagatctgaaaacacatgtcccagactgcatactggggtcgtcatgaggtgtctccttccttctgtgtacttttccttgaatgtgcacttttataacatgaaaaataaaggtggggaaaaaagtctgaaga

SEQ ID NO: 576 - protein, 253 aa, Homo sapien
MARSLLLPLQILLLSLALETAGEEAQGDKIIDGAPCARGSHPWQVALLSGNQLHCGGVLVNERWVLTAAHCKMNEYTVHLGSDTLGDRRAQRIKASKSFRHPGYSTQTHVNDLMLVKLNSQARLSSMVKKVRLPSRCEPPGTTCTVSGWGTTTSPDVTFPSDLMCVDVKLISPQDCTKVYKDLLENSMLCAGIPDSKKNACNGDSGGPLVCRGTLQGLVSWGTFPCGQPNDPGVYTQVCKFTKWINDTMKKHR

SEQ ID NO: 577 - DNA, 1258 bp, Homo sapien
tcaggccccgcccgccctgccctcccctcccgatcccggagccatgtggcccctggccctagtgatcgcctccctgaccttggccttgtcaggaggtgtctcccaggagtcttccaaggttctcaacaccaatgggaccagtgggtttctcccaggtggctacacctgcttcccccactctcagccctggcaggctgccctactagtgcaagggcggctactctgtgggggagtcctggtccaccccaaatgggtcctcactgccgcacactgtctaaaggaggggctcaaagtttacctaggcaagcacgccctagggcgtgtggaagctggtgagcaggtgagggaagttgtccactctatcccccaccctgaataccggagaagccccacccacctgaaccacgaccatgacatcatgcttctggagctgcagtccccggtccagctcacaggctacatccaaaccctgcccctttcccacaacaaccgcctaacccctggcaccacctgtcgggtgtctggctggggcaccaccaccagcccccaggtgaattaccccaaaactctacaatgtgccaacatccaacttcgctcagatgaggagtgtcgtcaagtctacccaggaaagatcactgacaacatgttgtgtgccggcacaaaagagggtggcaaagactcctgtgagggtgactctgggggccccctggtctgtaacagaacactgtatggcatcgtctcctggggagacttcccatgtgggcaacctgaccggcctggtgtctacacccgtgtctcaagatacgtcctgtggatccgtgaaacaatccgaaaatatgaaacccagcagcaaaaatggttgaagggcccacaataaaagttgagaaatgtaccggcttccatcctgtcaccatgacttcctcacatggtctgcttagcccttctctgctccttattcccagtgttccatttgaaccagtgatccatgtcctgaaaaatgctcaatctcagctaacattccatgtttcagaagcattcaggcactgccaggcttgcagtctcccagatgttgcatccctgaaacatctcaacaacctgaatgtcccaacccagacaatggcccaggtctctcaacttcatcagtgtggcttctatgagcccagatcaccacctgaacgttctgtctgtggcacattcttaaatatttccatcagcccatctcaacaatatatgtcctataaatggaccatccttgaca

SEQ ID NO: 578 - protein, 277 aa, Homo sapien
MWPLALVIASLTLALSGGVSQESSKVLNTNGTSGFLPGGYTCFPHSQPWQAALLVQGRLLCGGVLVHPKWVLTAAHCLKEGLKVYLGKHALGRVEAGEQVREVVHSIPHPEYRRSPTHLNHDHDIMLLELQSPVQLTGYIQTLPLSHNNRLTPGTTCRVSGWGTTTSPQVNYPKTLQCANIQLRSDEECRQVYPGKITDNMLCAGTKEGGKDSCEGDSGGPLVCNRTLYGIVSWGDFPCGQPDRPGVYTRVSRYVLWIRETIRKYETQQQKWLKGPQ

SEQ ID NO: 579 - DNA, 5554 bp, Homo sapien
  Unsure 2790, 2861, 2890, 3009, 3018, 3841, 3878: Unknown base
gaattccgatctctcgtcctcttcctgggctaggccgccccaggcgcggcccctgcgactcctggcacggccccgtgctcggctgccgccctggcgcgcgccacactgtcgtccccggacgggcgcggaccggctcggccggggcgccggcggctggggaggggtcgctggccccggggccgcgcatgcgccgccaccaacttggggctgtcagtggagggcgagtgctggttctcaggggaggcgacgccttcgggccaacgggcctcgagccgaggcagcagtgggaacgactcatcctttttccagccctggggcgtggctggggtcggggtcggggtcggggccggtgggggccccgcccccgtctcctggcctgcccccttcatgggccgcgatgatggcggccctgtacccgagcacggacctctcgggcgcctcctcctcctccctgccttcctctccatcctcttcctcgccgaacgaggtgatggcgctgaaggatgtgcgggaggtgaaggaggagaatacgctgaatgagaagcttttcttgctggcgtgcgacaagggtgactattatatggttaaaaagattttggaggaaaacagttcaggtgacttgaacataaattgcgtagatgtgcttgggagaaatgctgttaccataactattgaaaacgaaaacttggatatactgcagcttcttttggactacggttgtcagaaactaatggaacgaattcagaatcctgagtattcaacaactatggatgttgcacctgtcattttagctgctcatcgtaacaactatgaaattcttacaatgctcttaaaacaggatgtatctctacccaagccccatgcagttggctgtgaatgcacattgtgttctgcaaaaaacaaaaaggatagcctccggcattccaggtttcgtcttgatatatatcgatgtttggccagtccagctctaataatgttaacagaggaggatccaattctgagagcatttgaacttagtgctgatttaaaagaactaagtcttgtggaggtggaattcaggaatgattatgaggaactagcccggcaatgtaaaatgtttgctaaggatttacttgcacaagcccggaattctcgtgaattggaagttattctaaaccatacgtctagtgacgagcctcttgacaaacggggattattagaagaaagaatgaatttaagtcgtctaaaacttgctatcaaatataaccagaaagagtttgtctcccagtctaactgccagcagttcctgaacactgtttggtttggacagatgtcgggttaccgacgcaagcccacctgtaagaagataatgactgttttgacagtaggcatcttttggccagttttgtcactttgttatttgatagctcccaaatctcagtttggcagaatcattcacacaccttttatgaaatttatcattcatggagcatcatatttcacatttctgctgttgcttaatctatactctcttgtttacaatgaggataagaaaaacacaatggggccagcccttgaaagaatagactatcttcttattctgtggattattgggatgatttggtcagacattaaaagactctggtatgaagggttggaagactttttagaagaatctcgtaatcaactcagttttgtcatgaattctctttatttggcaacctttgccctcaaagtggttgctcacaacaagtttcatgattttgctgatcggaaggattgggatgcattccatcctacactggtggcagaagggctttttgcatttgcaaatgttctaagttatcttcgtctcttttttatgtatacaaccagctctatcttgggtccattacagatttcaatgggacagatgttacaagattttggaaaatttcttgggatgtttcttcttgttttgttttctttcacaattggactgacacaactgtatgataaaggatatacttcaaaggagcagaaggactgtgtaggcatcttctgtgaacagcaaagcaatgataccttccattcgttcattggcacctgctttgctttgttctggtatattttctccttagcgcatgtggcaatctttgtcacaagatttagctatggagaagaactgcagtcctttgtgggagctgtcattgttggtacatacaatgtcgtggttgtgattgtgcttaccaaactgctggtggcaatgcttcataaaagctttcagttgatagcaaatcatgaagacaaagaatggaagtttgctcgagcaaaattatggcttagctactttgatgacaaatgtacgttacctccacctttcaacatcattccctcaccaaagactatctgctatatgattagtagcctcagtaagtggatttgctctcatacatcaaaaggcaaggtcaaacggcaaaacagtttaaaggaatggaggaatttgaaacagaagagagatgaaaactatcaaaaagtgatgtgctgcctagtgcatcgttacttgacttccatgagacagaagatgcaaagtacagatcaggcaactgtggaaaatctaaacgaactgcgccaagatctgtcaaaattccgaaatgaaataagggatttacttggctttcggacttctaaatatgctatgttttatccaagaaattaaccattttctaaatcatggagcgaataattttcaataacagatccaaaagactatattgcataacttgcaatgaaattaatgagatatatattgaaataaagaattatgtaaangccattctttaaaatatttatagcataaatatatgttatgtaaagtgtgtatatagaattagttttttaanccttctgttagtggctttttgcagaagcnaaacagattaagtagatagattttgttagcatgctgcttggttttcttacttagtgctttaaaatgtttttttttatgtttaagaggggcagttataaatggacacattgcccagaatnttttgtaanatgaagaccagcaaatgtaggctgatctccttcacaggatacacttgaaatatagaagttatgttttaaatatctctgttttaggagttcacatatagttcagcatttattgtttaggagtataattttattttatctaaaataatagtctattttttcttttgtattttgttataatcttaagcaacaaagaaaaaaccctaatatttgaatctatttatgtctttcaatttaaattcacttcagtttttgttattgtaatatatttacttttacatggttataatcactttatatttttaatgtttttttcacttaatattttatatatacatttccatgtattgatgtagttagtccacatttaaatttttatagaattatatagtttttgaaaaatacagtcagtagatgttttattttttagctattcagttatgtttataagtttgcatagctacttctcgacatttggtttgttttaatttttttgtatcataatagtcctatttttttttcaagttggagtgaatgtttttagttttaagatagataggagacacttttttatcacatgtagtcacaacctgttttgtttttgtaaaacataggaagtctctttaatgcaatgatttgttttatatttggactaaggttcttgagcttatctcccaaggtactttccataatttaacacagcttctataaaagtgacttcatgcttacttgtggatcattcttgctgcttaagatgaaaagcattggttttttaaaattagagaataaaatatgtatttaaatttttggtgtgttcacataaagngatgtagctaaaatgttttcataggctattatatatnctcgcagcatttccagttaagaggatattaggtatataattctcttcttaaccgaatgtcagatggtcttacgccacagggtgcaggtaacccttggcctgtaagcaccaccgatccagggatcattgtctaaataggttactattgtttgtttcatctggaattccgagggtgcacaaattaccagcagcctgagggaggtcttattggaaggcttcctgcaggaggtggcatctgatccgggcctagacatgggagttggaattttccagacagggaagggcactgtgggtggaaaacaaagcacgaacaaacgtatggtgtgggaccaagcctcacatggtgcataaatgatcagaggtgaggctgaagcctaggtgtgtgtcaggggaagagctagaaaggaaggtggggcagggaagctcagtgagtgtctgctacatgtgaggcttcattctgagcaccaactctgcgcgctaatgccacgaagtggagtcatgattcttccattttccaggtgaagaaaccaaagcacggggagaattagcttgtccaagggctcatggccagtcggtggtgccactgggatttaaccagggattccagctgtggaagctgcatgctgccagctgagcactccgtctgtccaccctggcaaatgacatgctgagggctgggggcagtcatctttccagcagttgtcgaccagaaataatgataatgcatcagccaggtgggcaagaactcagactttgtggtcagacctcgctgtggcagggagcttagaaaagtcacttttcctccacagctgtgtaacatggggaaagggggatgctcagctcacctctcatggcccttgtgtggggatttcaagggtaaatgctggaaaagcactgaatatacagcacttagtagaggctttgcaagcggctgtcctcacccaaacggatccttccccaggaaagctctgcaaatggagccacttggctttttgcctgatgccatattccgttgtttaaaacggcgatcccaaacttaagagtatgaaaggggtgttttgcagacaatgcataattaaccacttctaaacacagggtgtgccaggctccctcaaagctgttaattattcttcattagtgatcttaagttaatgtaaaataatcctggagctctgccagaggctcgggcaggggaaggagcagagccgcttatttcaactagcaaacggaaagaaatcttcacggggcgcctctgcgttctgccttggttgtggggagatgcctctatagactctttagctctgcccaaaggccattgtgggaggcggcaagccctctcccaagttcccagagcccagccgacctcagggtactttggttaatgaaatagttcaggtgggaagaaaatatggaggagagtagtatacccatcgcccagcttccaaaataagctgttaatggtgtggtggactgcccctgtgggccaccccacaaatcttatccctttcctgcttccccagagctaagcctaaacagtccctcttgtttggtgtgtagatttcccatgcacatttttttaaattgctgtaggtacatagtaagtgtatatatttatggggtacgtgagatgttttgacacaggcacgcaatgtgaaatacacacttcatggagaattc

SEQ ID NO: 580 - protein, 759 aa, Homo sapien
  Unsure 2790, 2861, 2890, 3009, 3018, 3841, 3878: Unknown amino acid
MMAALYPSTDLSGASSSSLPSSPSSSSPNEVMALKDVREVKEENTLNEKLFLLACDKGDYYMVKKILEENSSGDLNINCVDVLGRNAVTITIENENLDILQLLLDYGCQKLMERIQNPEYSTTMDVAPVILAAHRNNYEILTMLLKQDVSLPKPHAVGCECTLCSAKNKKDSLRHSRFRLDIYRCLASPALIMLTEEDPILRAFELSADLKELSLVEVEFRNDYEELARQCKMFAKDLLAQARNSRELEVILNHTSSDEPLDKRGLLEERMNLSRLKLAIKYNQKEFVSQSNCQQFLNTVWFGQMSGYRRKPTCKKIMTVLTVGIFWPVLSLCYLIAPKSQFGRIIHTPFMKFIIHGASYFTFLLLLNLYSLVYNEDKKNTMGPALERIDYLLILWIIGMIWSDIKRLWYEGLEDFLEESRNQLSFVMNSLYLATFALKVVAHNKFHDFADRKDWDAFHPTLVAEGLFAFANVLSYLRLFFMYTTSSILGPLQISMGQMLQDFGKFLGMFLLVLFSFTIGLTQLYDKGYTSKEQKDCVGIFCEQQSNDTFHSFIGTCFALFWYIFSLAHVAIFVTRFSYGEELQSFVGAVIVGTYNVVVVIVLTKLLVAMLHKSFQLIANHEDKEWKFARAKLWLSYFDDKCTLPPPFNIIPSPKTICYMISSLSKWICSHTSKGKVKRQNSLKEWRNLKQKRDENYQKVMCCLVHRYLTSMRQKMQSTDQATVENLNELRQDLSKFRNEIRDLLGFRTSKYAMFYPRN

SEQ ID NO: 581 - DNA, 3109 bp, Homo sapien
cattggacttcagcatgactactcagttgccagcttacgtggcaattttgcttttctatgtctcaagagccagctgccaggacactttcattgcagctgtttatgagcatgcagcgatattgcccaatgccaccctaacaccagtgtctcgtgaggaggctttggcattaatgaatcggaatctggacattttggaaggagcgatcacatcagcagcagatcagggtgcgcatattattgtgactccagaagatgctatttatggctggaacttcaacagggactctctctacccatatttggaggacatcccagaccctgaagtaaactggatcccctgtaataatcgtaacagatttggccagaccccagtacaagaaagactcagctgcctggccaagaacaactctatctatgttgtggcaaatattggggacaagaagccatgcgataccagtgatcctcagtgtccccctgatggccgttaccaatacaacactgatgtggtatttgattctcaaggaaaactggtggcacgctaccataagcaaaaccttttcatgggtgaaaatcaattcaatgtacccaaggagcctgagattgtgactttcaataccacctttggaagttttggcattttcacatgctttgatatactcttccatgatcctgctgttaccttggtgaaagatttccacgtggacaccatagtattcccaacagcttggatgaatgttttgccacatttgtcagctgttgaattccactcagcttgggctatgggcatgagggtcaatttccttgcatccaacatacattacccctcaaagaaaatgacaggaagtggcatctatgcacccaattcttcaagagcatttcattatgatatgaagacagaagagggaaaactcctcctctcgcaactggattcccacccatcccattctgcagtggtgaactggacttcctatgccagcagtatagaagcgctctcatcaggaaacaaggaatttaaaggcactgtctttttcgatgaattcacttttgtgaagctcacaggagttgcaggaaattatacagtttgtcagaaagatctctgctgtcatttaagctacaaaatgtctgagaacataccaaatgaagtgtacgctctaggggcatttgacggactgcacactgtggaagggcgctattatctacagatttgtaccctgttgaaatgtaaaacgactaatttaaacacttgcggtgactcagctgaaacagcttctaccaggtttgaaatgttctccctcagtggcactttcggaacccagtatgtctttcctgaggtgttgctgagtgaaaatcagcttgcacctggagaatttcaggtgtcaactgacggacgcttgtttagtctgaagccaacatccggacctgtcttaacagtaactctgtttgggaggttgtatgagaaggactgggcatcaaatgcttcatcaggcctcacagcacaagcaagaataataatgctaatagttatagcacctattgtatgctcattaagttggtagaatattgactttttctcttttttatttgggataatttaaaaaatgatggatgagaaaagaaagattggtccgggttaatattatcctctagtataagtgaattactagtttctctttatttagacaaacacacacacaccagataatataaacttaataaattatctgttaatgtagattttatttaaaaaactatatttgaacattggtctttcttggacgtgagctaattatatcaaataagtatcacaaatcttttacgcagaagaaataaaaactacgggtagaaaacataagaactatcataaaatttacttacaaggaggctgctcttgttaccacttttattatattacgtatcacttattcagctctgctgaaaatttccaatgactttgtttgtttgctcttttagttttttacctaaacaatacattttgattctcttgtgggttgataatgtctccccaaaatttacatgttgaagcacctcagaatgtgactgtatttggagacagggtctttaaagaggtaaaataaggtcattaggatagaccctaattcaatatgactgatgatcataaaagaagaggcgagtagggcacaacaggcacaaagggagaccataaggagacacagaggaaggacaactctttacaagctaagaagagagggcctcagaagaaaccaaccctgccaacaccttgatcttggacttccagcctccaaaactatgagaaataaatttctattgtttaagtcacccagtccatggtactttgttaggcagccctggcaaatgaatcaaagacccattcctgttcctctccccaccactactgttttctactgtaatctgaagcttcaacaaaaggcttacctggtaagaatattcagctggtctgggtcctcaagactccaatagacactcttaaagaaggattgctgatggattgatagtgaaaccattagatcattgaattcctctggaattagaaaaccagagagtcccattttaagaaattagatatttaatatagcattgtgtgttctattttagtaacagcagaatctcttgacattacacaactcagtgaaacaacatcatttaagccaaaatatctcccaactgactgatagactctgagcactaatatcatagtgctgtgatgatggacaattacatagtaccgataacagccatgcactgtgcaaagcatgcccttctgcacaggagagcaaggcacttgcagtagtgatctatgccagcaaaacatcattttgagacaaacatttttgtggcagatgtttttcctaaaaagtactatatcatccaagaaatatttgagtaaaatcccttgttcttttgggtgacattaactgacatttgctttttttcaagacctaatagaaaataagaaagcccataatgtatttagaaacaggaatcctcagagcaattctctgtattctcatataatttcaatgtaaaacagaaaacatattgatgtgttggtgataggcttgaattattaaaaacttcaaaaacaaaa

SEQ ID NO: 582 - protein, 513 aa, Homo sapien
MTTQLPAYVAILLFYVSRASCQDTFIAAVYEHAAILPNATLTPVSREEALALMNRNLDILEGAITSAADQGAHIIVTPEDAIYGWNFNRDSLYPYLEDIPDPEVNWIPCNNRNRFGQTPVQERLSCLAKNNSIYVVANIGDKKPCDTSDPQCPPDGRYQYNTDVVFDSQGKLVARYHKQNLFMGENQFNVPKEPEIVTFNTTFGSFGIFTCFDILFHDPAVTLVKDFHVDTIVFPTAWMNVLPHLSAVEFHSAWAMGMRVNFLASNIHYPSKKMTGSGIYAPNSSRAFHYDMKTEEGKLLLSQLDSHPSHSAVVNWTSYASSIEALSSGNKEFKGTVFFDEFTFVKLTGVAGNYTVCQKDLCCHLSYKMSENIPNEVYALGAFDGLHTVEGRYYLQICTLLKCKTTNLNTCGDSAETASTRFEMFSLSGTFGTQYVFPEVLLSENQLAPGEFQVSTDGRLFSLKPTSGPVLTVTLFGRLYEKDWASNASSGLTAQARIIMLIVIAPIVCSLSW

SEQ ID NO: 583 - DNA, 1408 bp, Homo sapien
ctctcgagcctgctgcctgctcccccgccccaccagccatggtggtttctggagcgcccccagccctgggtgggggctgtctcggcaccttcacctccctgctgctgctggcgtcgacagccatcctcaatgcggccaggatacctgttcccccagcctgtgggaagccccagcagctgaaccgggttgtgggcggcgaggacagcactgacagcgagtggccctggatcgtgagcatccagaagaatgggacccaccactgcgcaggttctctgctcaccagccgctgggtgatcactgctgcccactgtttcaaggacaacctgaacaaaccatacctgttctctgtgctgctgggggcctggcagctggggaaccctggctctcggtcccagaaggtgggtgttgcctgggtggagccccaccctgtgtattcctggaaggaaggtgcctgtgcagacattgccctggtgcgtctcgagcgctccatacagttctcagagcgggtcctgcccatctgcctacctgatgcctctatccacctccctccaaacacccactgctggatctcaggctgggggagcatccaagatggagttcccttgccccaccctcagaccctgcagaagctgaaggttcctatcatcgactcggaagtctgcagccatctgtactggcggggagcaggacagggacccatcactgaggacatgctgtgtgccggctacttggagggggagcgggatgcttgtctgggcgactccgggggccccctcatgtgccaggtggacggcgcctggctgctggccggcatcatcagctggggcgagggctgtgccgagcgcaacaggcccggggtctacatcagcctctctgcgcaccgctcctgggtggagaagatcgtgcaaggggtgcagctccgcgggcgcgctcaggggggtggggccctcagggcaccgagccagggctctggggccgccgcgcgctcctagggcgcagcgggacgcggggctcggatctgaaaggcggccagatccacatctggatctggatctgcggcggcctcgggcggtttcccccgccgtaaataggctcatctacctctacctctgggggcccggacggctgctgcggaaaggaaaccccctccccgacccgcccgacggcctcaggccccgcctccaaggcatcaggccccgcccaacggcctcatgtccccgcccccacgacttccggccccgccccgggccccagcgcttttgtgtatataaatgttaatgatttttataggtatttgtaaccctgcccacatatcttatttattcctccaatttcaataaattatttattctccaaaaaaaaaaaaaaaaaaaaaaaaaataaaaaaaaaaacaaaaaaaaaaaaaaa

SEQ ID NO: 584 - protein, 317 aa, Homo sapien
MVVSGAPPALGGGCLGTFTSLLLLASTAILNAARIPVPPACGKPQQLNRVVGGEDSTDSEWPWIVSIQKNGTHHCAGSLLTSRWVITAAHCFKDNLNKPYLFSVLLGAWQLGNPGSRSQKVGVAWVEPHPVYSWKEGACADIALVRLERSIQFSERVLPICLPDASIHLPPNTHCWISGWGSIQDGVPLPHPQTLQKLKVPIIDSEVCSHLYWRGAGQGPITEDMLCAGYLEGERDACLGDSGGPLMCQVDGAWLLAGIISWGEGCAERNRPGVYISLSAHRSWVEKIVQGVQLRGRAQGGGALRAPSQGSGAAARS

SEQ ID NO: 585 - DNA, 466 bp, Homo sapien
accactgctggctttttgctgtagctccacattcctgtgcattgaggggttaacattaggctgggaagatgacaaaacttgaagagcatctggagggaattgtcaatatcttccaccaatactcagttcggaaggggcattttgacaccctctctaagggtgagctgaagcagctgcttacaaaggagcttgcaaacaccatcaagaatatcaaagataaagctgtcattgatgaaatattccaaggcctggatgctaatcaagatgaacaggtcgactttcaagaattcatatccctggtagccattgcgctgaaggctgcccattaccacacccacaaagagtaggtagctctctgaaggctttttacccagcaatgtcctcaatgagggtcttttctttccctcaccaaaacccagccttgcccgtggggagtaagagttaataaacacactcacgaaaagtt

SEQ ID NO: 586 - protein, 92 aa, Homo sapien
MTKLEEHLEGIVNIFHQYSVRKGHFDTLSKGELKQLLTKELANTIKNIKDKAVIDEIFQGLDANQDEQVDFQEFISLVAIALKAAHYHTHKE

SEQ ID NO: 587 - DNA, 437 bp, Homo sapien
gtccaaacacacacatctcactcatccttctactcgtgacgcttcccagctctggctttttgaaagcaaagatgagcaacactcaagctgagaggtccataataggcatgatcgacatgtttcacaaatacaccagacgtgatgacaagattgacaagccaagcctgctgacgatgatgaaggagaacttccccaacttccttagtgcctgtgacaaaaagggcacaaattacctcgccgacgtctttgagaaaaaggacaagaatgaggataagaagattgatttttctgagtttctgtccttgctgggagacatagccacagactaccacaagcagagccatggagcagcgccctgttccgggggcagccagtgacccagccccaccaatgggcctccagagacccaggaacaataaaatgtcttctcccaccag

SEQ ID NO: 588 - protein, 101 aa, Homo sapien
MSNTQAERSIIGMIDMFHKYTRRDDKIDKPSLLTMMKENFPNFLSACDKKGTNYLADVFEKKDKNEDKKIDFSEFLSLLGDIATDYHKQSHGAAPCSGGSQ

SEQ ID NO: 589 - DNA, 5744 bp, Homo sapien
agcgcatggagccagaggaggaggatgaactaggctcagggcgggatgtggattccaactccaacgcggacagtgagaaatgggtggcaggagatggtttggaagaacaggaattttctatcaaggaggcaaacttcacagagggaagtctgaagctaaagattcagaccacaaagcgggctaagaaacccccaaagaatttggagaactatatatgtccacctgagatcaagatcaccatcaagcagtctggggaccagaaggtgtcccgtgctggaaaaaatagcaaagccacgaaggaggaagaaagaagccactccaaaaagaagctcctcacagccagtgaccttgcagccagtgacctcaaaggatttcagccacaggcttacgaaaggccccagaaacattcaactctccattatgacacgggcctcccacaggacttcaccggtgacaccttaaaaccaaagcaccagcaaaaaagcagcagccagaaccacatggactggtccaccaactctgacagcggacccgtcactcagaattgcttcatcagtccagagtctggcagagaaactgcaagcaccagcaagatccccgctcttgagcccgtggcttcctttgcaaaggcccagggtaagaaaggcagtgcagggaacacgtggagtcagttgtctaacaataacaaagatctgctcttgggaggtgtggctccatccccaagcagccacagctcaccagccccacccagcagctctgctgagtgcaacgggcttcagcccttggtggatcaagatggaggaggtacaaaggagcccccagaaccacctacggtgggcagcaagaaaaagtccagtaaaaaagatgtgataagtcagaccataccaaacccagacctggattgggtcaagaatgcccagaaagcatttgacaatacagaagggaaaagggaaggttattccgcagatagtgcccaagaggcatcaccagccaggcagaacgtgagttctgccagtaatcctgaaaatgactcaagtcatgtccggattactatccccatcaaggcaccctctctggatccaaccaaccataagaggaaaaaaagacagtccattaaagcggtggtggaaaagatcatgccagagaaagccttggcttctggaatcaccatgagcagtgaagtagttaacaggatactttccaactctgaggggaataagaaggatccccgtgtccctaagttgagtaaaatgatagagaatgagtccccctcagttggccttgaaactggtggaaatgctgagaaagttatcccaggaggtgtgtctaagccgcggaagccacccatggtcatgacacctccaacgtgcacagatcactctccatccagaaagctgccagaaatccagcatccaaaatttgctgcaaaacgaaggtggacttgcagcaaaccaaaacctagcaccatgcttcgagaggcagttatggccacctctgataaactgatgctggagcccccgtctgcatatcccatcaccccatccagccctctctacaccaacacagacagtcttactgtgatcactccagtcaaaaagaagcggggacgaccaaagaagcagcctttgctcacagtcgagacgattcatgagggaacttccaccagccccgtcagtcccatcagccgagagtttcctggcactaagaaaagaaagcgacgacgcaatttagcgaagttggcccagctagtgccgggagaggacaaacccatgagcgagatgaaatttcacaagaaagttggaaagctcggcgtgttggataagaagaccatcaaaactatcaataagatgaagacactcaagaggaaaaacatcttgaatcagatcttgtcctgttccagcagcgttgctctgaaggcaaaagctcccccagagaccagccctggggcagcagccattgaaagcaaactgggcaagcagattaatgtcagcaagaggggaaccatctacattggcaagaagcggggcaggaagccaagagcagagctgccacccccatccgaagaacccaaaacagccatcaagcaccccaggcctgtttctagccagccggatgttccagccgtgccttccaactttcagtcacttgtggcgtcttcaccagcagctatgcacccactttcaacacagttaggtgggtccaatggcaacctgagccctgccagcactgaaaccaatttttcagagttgaaaactatgccaaatctccagcccatcagtgctcttccaaccaaaacccaaaagggaatacacagtggaacctggaagctgtctccacccagactgatggccaactccccttcacacctgtgcgagattggctccctaaaggaaatcacgctgtcccctgtgagcgagtcccacagtgaggagacgatccccagcgacagcggcattgggacagacaacaacagcacttctgaccaagcggagaagagctcagaatcccgaaggaggtactcttttgatttctgctccctggacaacccggaggccattccgtccgacaccagcacaaagaaccggcatggccaccggcaaaagcatctcattgtggacaactttctggcccacgaaagcctcaagaagccaaagcacaagaggaaacggaaaagcctgcaaaaccgcgatgacctccagtttctggcagacctggaggagctaatcaccaagttccaagtgttcagaatctcccaccggagttacaccttctaccacgagaatccatatcccagcatttttcggattaattttgatcactattacccggtgccatatatccagtatgacccgttgctctatcttcgtaggacttcagacttgaagtcaaagaagaagcgtggtaggcctgcaaaaaccaatgacaccatgacaaaggtgccttttttacaagggttcagctaccctattcccagtggaagttactatgcaccctatggaatgccttacacatcaatgcctatgatgaaccttggttattacggtcagtacccagctcctttgtacctatcgcacacgcttggagcagcttccccattcatgaggccaacagtgccaccacctcagttccacacaaactcccacataaagatgtccggtgcagctaagcataaagccaagcatggagtacacctgcagggacctgttagcatgggccttggtgacatgcagccttctctgaaccctcccaaggtaggcagtgccagtctgtccagtggtcggctccataagaggaaacacaaacacaagcataagcacaaggaagaccggatcctagggacccatgacaacctgagtggtctttttgcaggcaaagccacaggcttctccagccacatcctgagcgagcggctgagtagcgcagacaaagagctcccgctggtgagtgagaagaacaagcataaggagaaacagaagcaccagcacagcgaagccggccacaaagcttctaagaacaactttgaggtggacaccctgtctacactgtcactttccgacgcccagcattggacacaggccaaggaaaaaggagacttgagcagtgagcctgtggactcatgcacgaaaagatactctggcagtggcggggatggtggcagcacgagatcggagaacctggacgtgttcagtgaaatgaacccttcgaatgacaagtgggacagtgacgtgagtgggagtaaaaggaggagctatgaaggctttggaacgtacagggaaaaggacatccaagccttcaagatgaaccgcaaggagagaagttcttatgactcctccatgtctccagggatgccaagtccccacttaaaagtggaccagacagcagtgcatagtaagaacgaaggctcagtgcccaccatgatgaccaggaagaagccagccgcagttgacagtgttacaattccaccagccccagtgttatctctccttgctgcatctgcagcaacgtcggatgcagtcggctcctccctgaagaagaggttcaagcggcgggagatcgaagccatccagtgcgaagtgcggaagatgtgcaactacaccaagatcctgtccaccaagaagaacctggaccacgtgaacaagatcctgaaggccaagcggctgcagagacaatcaaaaacaggcaacaacttcgtgaagaagaggcgcgggcgtcccaggaagcagcccacccagttcgatgaggactccagagaccaaatgccggtgctggaaaaatgcatcgacctgcccagcaaaagaggccagaagcccagcctgagcccgctggtgctggagcccgccgccagccaagacaccatcatggccaccatcgaggcggtcatccacatggcccgggaggcgccgcccctgcccccgccaccgccgccgcccctgccgccaccgccgccaccacccctgcccccgccaccccctctacccaagaccccccgaggcggaaagaggaaacacaaaccgcaggcccccgctcagcccccacagcagtcgcccccgcagcagccccttccccaggaagaggaggtgaaagccaaaaggcagaggaagtcccgagggagtgagagcgaggtccttccctagggcgggtctgggcgtctgcacctggggcctagggaactgacacgtgggaagcgcagtgagccggggcgggggcggaatcccccgctgcagggacacccacgcccttctctccagaagccgggcaggcagaatccggccagacgacggggctgagccatcaggagctcttgggaaagcaaagcagggagacaccttcagaagaagcttgtctgagcttcaccgcagctcccaccacgcggcgcttcagtacggctggatcctccgcaggcgagcggaaggcccccaggaggagcaggctggtggcactctcctgacctcacgctgccaaggtgcgccctcgactcccgatttcatttgctggccaggaaaatcgaaagggaaacaccctcaattaggaaacattccaaggggagaaaagctgcaaattgctcaactggcattgctgtaacccgttccatttaattggtttttatttcttttgattttcaagctctgctaagctttggggtaccaacgtcatcttcaggtgacctgaatctttcccttaaccgtacagtttctcgatggaattgtgtgatcagaaggtggaattctagtgataggcgacctcagacccgcattcatgttctgtgtgcctcttctattgcacatacactgatttttagcattgtctattcctatttttcctttgcccattgtacttccatatatcttttcattaacttacttgctgccttttttttttcttggtacacatttaaataaagtaatccttaacctgtgctgtaaagttcacccttggcatgctgttccaagaacctgggtttgaatcccaatcgttgtgaaacatactcagtattgataaaacctttttaataagtgatgcagagcagccaaggatatgttgacccagatgtcaaccaggctatttttatacttaaaacatgtcagcagagcataggcagaataaaatggtttaaataccccacagcaaatagagtaactgacaaaccaccaaaaactgaaaccccagacccaccagaaagacaagtgtctagcaatgccttggtacctgatctttttcattcaaataattgtcataggttgttc

SEQ ID NO: 590 - protein, 1542 aa, Homo sapien
MEPEEEDELGSGRDVDSNSNADSEKWVAGDGLEEQEFSIKEANFTEGSLKLKIQTTKRAKKPPKNLENYICPPEIKITIKQSGDQKVSRAGKNSKATKEEERSHSKKKLLTASDLAASDLKGFQPQAYERPQKHSTLHYDTGLPQDFTGDTLKPKHQQKSSSQNHMDWSTNSDSGPVTQNCFISPESGRETASTSKIPALEPVASFAKAQGKKGSAGNTWSQLSNNNKDLLLGGVAPSPSSHSSPAPPSSSAECNGLQPLVDQDGGGTKEPPEPPTVGSKKKSSKKDVISQTIPNPDLDWVKNAQKAFDNTEGKREGYSADSAQEASPARQNVSSASNPENDSSHVRITIPIKAPSLDPTNHKRKKRQSIKAVVEKIMPEKALASGITMSSEVVNRILSNSEGNKKDPRVPKLSKMIENESPSVGLETGGNAEKVIPGGVSKPRKPPMVMTPPTCTDHSPSRKLPEIQHPKFAAKRRWTCSKPKPSTMLREAVMATSDKLMLEPPSAYPITPSSPLYTNTDSLTVITPVKKKRGRPKKQPLLTVETIHEGTSTSPVSPISREFPGTKKRKRRRNLAKLAQLVPGEDKPMSEMKFHKKVGKLGVLDKKTIKTINKMKTLKRKNILNQILSCSSSVALKAKAPPETSPGAAAIESKLGKQINVSKRGTIYIGKKRGRKPRAELPPPSEEPKTAIKHPRPVSSQPDVPAVPSNFQSLVASSPAAMHPLSTQLGGSNGNLSPASTETNFSELKTMPNLQPISALPTKTQKGIHSGTWKLSPPRLMANSPSHLCEIGSLKEITLSPVSESHSEETIPSDSGIGTDNNSTSDQAEKSSESRRRYSFDFCSLDNPEAIPSDTSTKNRHGHRQKHLIVDNFLAHESLKKPKHKRKRKSLQNRDDLQFLADLEELITKFQVFRISHRSYTFYHENPYPSIFRINFDHYYPVPYIQYDPLLYLRRTSDLKSKKKRGRPAKTNDTMTKVPFLQGFSYPIPSGSYYAPYGMPYTSMPMMNLGYYGQYPAPLYLSHTLGAASPFMRPTVPPPQFHTNSHIKMSGAAKHKAKHGVHLQGPVSMGLGDMQPSLNPPKVGSASLSSGRLHKRKHKHKHKHKEDRILGTHDNLSGLFAGKATGFSSHILSERLSSADKELPLVSEKNKHKEKQKHQHSEAGHKASKNNFEVDTLSTLSLSDAQHWTQAKEKGDLSSEPVDSCTKRYSGSGGDGGSTRSENLDVFSEMNPSNDKWDSDVSGSKRRSYEGFGTYREKDIQAFKMNRKERSSYDSSMSPGMPSPHLKVDQTAVHSKNEGSVPTMMTRKKPAAVDSVTIPPAPVLSLLAASAATSDAVGSSLKKRFKRREIEAIQCEVRKMCNYTKILSTKKNLDHVNKILKAKRLQRQSKTGNNFVKKRRGRPRKQPTQFDEDSRDQMPVLEKCIDLPSKRGQKPSLSPLVLEPAASQDTIMATIEAVIHMAREAPPLPPPPPPPLPPPPPPPLPPPPPLPKTPRGGKRKHKPQAPAQPPQQSPPQQPLPQEEEVKAKRQRKSRGSESEVLP

SEQ ID NO: 591 - DNA, 1599 bp, Homo sapien
cactgcttattaaagtacactattcaggcatatcatgtaggtttactttctgtgtttctagagaccaagaagcgggacgttcaccatgggaagaaaatcgctgtaccttctgattgtggggatcctcatagcatattatatttatacgcctctcccagataacgttgaggagccatggagaatgatgtggataaacgcacatctgaaaactatacaaaatttggctacatttgtggagctccatgggagttccatttttatggattcctttaaggttgtcgggagctttgatgaagtcccaccaacctcagatgaaaatgtcactgtgactgagacaaaattcaacaacattcttgttcgggtatatgtgccaaagagaaagtctgaagcactaagaagggggttgttttacatccatggtggaggctggtgcgtgggaagtgctgctctaagtggttatgacttgctgtcaagatggacagcagacagacttgatgctgtcgtcgtatcaaccaactacagattagcacctaagtatcatttcccaattcaatttgaagatgtatataatgccttaaggtggttcttacgtaaaaaagttcttgcaaaatatggtgtgaaccctgagagaatcggtatttctggagatagtgcaggagggaatttagctgcagcagtgactcaacagctccttgatgacccagatgtcaagatcaaactcaagatccagtctttaatttatcctgcccttcagcctcttgatgtagatttaccgtcatatcaagaaaattcaaattttctatttctatccaaatcactcatggtcagattctggagtgaatattttaccactgatagatcacttgaaaaagccatgctttccagacaacatgtacctgtggaatcaagtcatctcttcaaatttattaattggagttccctgctccctgagaggtttataaaaggacatgtttataacaatccaaattatggcagttctgagctggctaaaaaatatccagggttcctagatgtgagggcagcccctttgttggctgatgacaacaaattacgtggcttacccctgacctatgtcatcacctgtcaatatgatctcttaagagatgatggactcatgtatgtcacccgacttcgcaacactggggttcaggtgactcataaccatgttgaggatggattccatggagcattttcatttctgggacttaaaattagtcacagacttataaatcagtatattgagtggctaaaggaaaatctatagtaaaacatgtagctataacatattttaaaaataaaatctgaaaacctcagaaaatttcgattagaaattggtctttcttagaatggtctagttaagttccacatgtagcataattcttaaataggcacttttctgttttttttttcttactgtgggatttcatttcaattttctacattgtctatctgctttttcggagattttccttcttacactgttaatcttattttaaaaaatattacattcttgtatactttatttttgtgagttggctactatttacgatgcaagagaataaatgtgagcaaagattg

SEQ ID NO: 592 - protein, 399 aa, Homo sapien
MGRKSLYLLIVGILIAYYIYTPLPDNVEEPWRMMWINAHLKTIQNLATFVELHGSSIFMDSFKVVGSFDEVPPTSDENVTVTETKFNNILVRVYVPKRKSEALRRGLFYIHGGGWCVGSAALSGYDLLSRWTADRLDAVVVSTNYRLAPKYHFPIQFEDVYNALRWFLRKKVLAKYGVNPERIGISGDSAGGNLAAAVTQQLLDDPDVKIKLKIQSLIYPALQPLDVDLPSYQENSNFLFLSKSLMVRFWSEYFTTDRSLEKAMLSRQHVPVESSHLFKFINWSSLLPERFIKGHVYNNPNYGSSELAKKYPGFLDVRAAPLLADDNKLRGLPLTYVITCQYDLLRDDGLMYVTRLRNTGVQVTHNHVEDGFHGAFSFLGLKISHRLINQYIEWLKENL

SEQ ID NO: 593 - DNA, 4428 bp, Homo sapien
ttaaggaaatccgggctgctcttccccatctggaagtggctttccccacatcggctcgtaaactgattatgaaacatacgatgttaattcggagctgcatttcccagctgggcactctcgcgcgctggtccccggggcctcgccccccaccccctgcccttccctcccgcgtcctgcccccatcctccaccccccgcgctggccaccccgcctccttggcagcctctggcggcagcgcgctccactcgcctcccgtgctcctctcgcccatggaattaattctggctccacttgttgctcggcccaggttggggagaggacggagggtggccgcagcgggttcctgagtgaattacccaggagggactgagcacagcaccaactagagaggggtcagggggtgcgggactcgagcgagcaggaaggaggcagcgcctggcaccagggctttgactcaacagaattgagacacgtttgtaatcgctggcgtgccccgcgcacaggatcccagcgaaaatcagatttcctggtgaggttgcgtgggtggattaatttggaaaaagaaactgcctatatcttgccatcaaaaaactcacggaggagaagcgcagtcaatcaacagtaaacttaagagacccccgatgctcccctggtttaacttgtatgcttgaaaattatctgagagggaataaacatcttttccttcttccctctccagaagtccattggaatattaagcccaggagttgctttggggatggctggaagtgcaatgtcttccaagttcttcctagtggctttggccatatttttctccttcgcccaggttgtaattgaagccaattcttggtggtcgctaggtatgaataaccctgttcagatgtcagaagtatatattataggagcacagcctctctgcagccaactggcaggactttctcaaggacagaagaaactgtgccacttgtatcaggaccacatgcagtacatcggagaaggcgcgaagacaggcatcaaagaatgccagtatcaattccgacatcgacggtggaactgcagcactgtggataacacctctgtttttggcagggtgatgcagataggcagccgcgagacggccttcacatacgccgtgagcgcagcaggggtggtgaacgccatgagccgggcgtgccgcgagggcgagctgtccacctgcggctgcagccgcgccgcgcgccccaaggacctgccgcgggactggctctggggcggctgcggcgacaacatcgactatggctaccgctttgccaaggagttcgtggacgcccgcgagcgggagcgcatccacgccaagggctcctacgagagtgctcgcatcctcatgaacctgcacaacaacgaggccggccgcaggacggtgtacaacctggctgatgtggcctgcaagtgccatggggtgtccggctcatgtagcctgaagacatgctggctgcagctggcagacttccgcaaggtgggtgatgccctgaaggagaagtacgacagcgcggcggccatgcggctcaacagccggggcaagttggtacaggtcaacagccgcttcaactcgcccaccacacaagacctggtctacatcgaccccagccctgactactgcgtgcgcaatgagagcaccggctcgctgggcacgcagggccgcctgtgcaacaagacgtcggagggcatggatggctgcgagctcatgtgctgcggccgtgggtacgaccagttcaagaccgtgcagacggagcgctgccactgcaagttccactggtgctgctacgtcaagtgcaagaagtgcacggagatcgtggaccagtttgtgtgcaagtagtgggtgccacccagcactcagccccgctcccaggacccgcttatttatagaaagtacagtgattctggtttttggtttttagaaatattttttatttttccccaagaattgcaaccggaaccattttttttcctgttaccatctaagaactctgtggtttattattaatattataattattatttggcaataatgggggtgggaaccacgaaaaatatttattttgtggatctttgaaaaggtaatacaagacttcttttggatagtatagaatgaagggggaaataacacataccctaacttagctgtgtgggacatggtacacatccagaaggtaaagaaatacattttctttttctcaaatatgccatcatatgggatgggtaggttccagttgaaagagggtggtagaaatctattcacaattcagcttctatgaccaaaatgagttgtaaattctctggtgcaagataaaaggtcttgggaaaacaaaacaaaacaaaacaaacctcccttccccagcagggctgctagcttgctttctgcattttcaaaatgataatttacaatggaaggacaagaatgtcatattctcaaggaaaaaaggtatatcacatgtctcattctcctcaaatattccatttgcagacagaccgtcatattctaatagctcatgaaatttgggcagcagggaggaaagtccccagaaattaaaaaatttaaaactcttatgtcaagatgttgatttgaagctgttataagaattgggattccagatttgtaaaaagacccccaatgattctggacactagattttttgtttggggaggttggcttgaacataaatgaaatatcctgtattttcttagggatacttggttagtaaattataatagtagaaataatacatgaatcccattcacaggtttctcagcccaagcaacaaggtaattgcgtgccattcagcactgcaccagagcagacaacctatttgaggaaaaacagtgaaatccaccttcctcttcacactgagccctctctgattcctccgtgttgtgatgtgatgctggccacgtttccaaacggcagctccactgggtcccctttggttgtaggacaggaaatgaaacattaggagctctgcttggaaaacagttcactacttagggatttttgtttcctaaaacttttattttgaggagcagtagttttctatgttttaatgacagaacttggctaatggaattcacagaggtgttgcagcgtatcactgttatgatcctgtgtttagattatccactcatgcttctcctattgtactgcaggtgtaccttaaaactgttcccagtgtacttgaacagttgcatttataaggggggaaatgtggtttaatggtgcctgatatctcaaagtcttttgtacataacatatatatatatatacatatatataaatataaatataaatatatctcattgcagccagtgatttagatttacagcttactctggggttatctctctgtctagagcattgttgtccttcactgcagtccagttgggattattccaaaagttttttgagtcttgagcttgggctgtggccccgctgtgatcataccctgagcacgacgaagcaacctcgtttctgaggaagaagcttgagttctgactcactgaaatgcgtgttgggttgaagatatctttttttcttttctgcctcacccctttgtctccaacctccatttctgttcactttgtggagagggcattacttgttcgttatagacatggacgttaagagatattcaaaactcagaagcatcagcaatgtttctcttttcttagttcattctgcagaatggaaacccatgcctattagaaatgacagtacttattaattgagtccctaaggaatattcagcccactacatagatagctttttttttttttttttttttttaataaggacacctctttccaaacaggccatcaaatatgttcttatctcagacttacgttgttttaaaagtttggaaagatacacatcttttcatacccccccttaggaggttgggctttcatatcacctcagccaactgtggctcttaatttattgcataatgatatccacatcagccaactgtggctctttaatttattgcataatgatattcacatcccctcagttgcagtgaattgtgagcaaaagatcttgaaagcaaaaagcactaattagtttaaaatgtcacttttttggtttttattatacaaaaaccatgaagtactttttttatttgctaaatcagattgttcctttttagtgactcatgtttatgaagagagttgagtttaacaatcctagcttttaaaagaaactatttaatgtaaaatattctacatgtcattcagatattatgtatatcttctagcctttattctgtacttttaatgtacatatttctgtcttgcgtgatttgtatatttcactggtttaaaaaacaaacatcgaaaggcttattccaaatggaagatagaatataaaataaaacgttacttgtaaaaaaaaaaaa

SEQ ID NO: 594 - protein, 365 aa, Homo sapien
MAGSAMSSKFFLVALAIFFSFAQVVIEANSWWSLGMNNPVQMSEVYIIGAQPLCSQLAGLSQGQKKLCHLYQDHMQYIGEGAKTGIKECQYQFRHRRWNCSTVDNTSVFGRVMQIGSRETAFTYAVSAAGVVNAMSRACREGELSTCGCSRAARPKDLPRDWLWGGCGDNIDYGYRFAKEFVDARERERIHAKGSYESARILMNLHNNEAGRRTVYNLADVACKCHGVSGSCSLKTCWLQLADFRKVGDALKEKYDSAAAMRLNSRGKLVQVNSRFNSPTTQDLVYIDPSPDYCVRNESTGSLGTQGRLCNKTSEGMDGCELMCCGRGYDQFKTVQTERCHCKFHWCCYVKCKKCTEIVDQFVCK

SEQ ID NO: 595 - DNA, 2619 bp, Homo sapien
cctttagaggagcctgagaagaggcagaggaagggcgaaacatggctgctctaggagtccagagtatcaactggcagaaggccttcaaccgacaagcgcatcacacagacaagttctccagccaggagctcatcttgcggagaggccaaaacttccaggtcttaatgatcatgaacaaaggccttggctctaacgaaagactggagttcattgacaccacagggccttacccctcagagtcggccatgacgaaggctgtgtttccactctccaatggcagtagtggtggctggagtgcggtgcttcaggccagcaatggcaatactctgactatcagcatctccagtcctgccagcgcacccataggacggtacacaatggccctccagatcttctcccagggcggcatctcctctgtgaaacttgggacgttcatactgctttttaacccctggctgaatgtggatagcgtctttatgggtaaccatgctgagagagaagagtatgttcaggaagatgccggcatcatctttgtgggaagcacaaaccgaattggcatgattggctggaactttggacagtttgaagaagacattctcagcatctgcctctcaatcttggataggagtctgaatttccgccgtgacgctgctactgatgtggccagcagaaatgaccccaaatacgttggccgggtgctgagtgccatgatcaatagcaatgatgacaatggtgtgcttgctgggaattggagcggcacttacaccggtggccgggacccaaggagctgggacggcagcgtggagatcctcaaaaattggaaaaaatctggcttcagcccagtccgatatggccagtgctgggtctttgctgggaccctcaacacagcgctgcggtctttggggattccttcccgggtgatcaccaacttcaactcagctcatgacacagaccgaaatctcagtgtggatgtgtactacgaccccatgggaaaccccctggacaagggtagtgatagcgtatggaatttccatgtctggaatgaaggctggtttgtgaggtctgacctgggccccccgtacggtggatggcaggtgttggatgctaccccgcaggaaagaagccaaggggtgttccagtgcggccccgcttcggtcattggtgttcgagagggtgatgtgcagctgaacttcgacatgccctttatcttcgcggaggttaatgccgaccgcatcacctggctgtacgacaacaccactggcaaacagtggaagaattccgtgaacagtcacaccattggcaggtacatcagcaccaaggcggtgggcagcaatgctcgcatggacgtcacggacaagtacaagtacccagaaggctctgaccaggaaagacaagtgttccaaaaggctttggggaaacttaaacccaacacgccatttgccgcgacgtcttcgatgggtttggaaacagaggaacaggagcccagcatcatcgggaagctgaaggtcgctggcatgctggcagtaggcaaagaagtcaacctggtcctactgctcaaaaacctgagcagggatacgaagacagtgacagtgaacatgacagcctggaccatcatctacaacggcacgcttgtacatgaagtgtggaaggactctgccacaatgtccctggaccctgaggaagaggcagaacatcccataaagatctcgtacgctcagtatgagaggtacctgaagtcagacaacatgatccggatcacagcggtgtgcaaggtcccagatgagtctgaggtggtggtggagcgggacatcatcctggacaaccccaccttgaccctggaggtgctgaacgaggctcgtgtgcggaagcctgtgaacgtgcagatgctcttctccaatccactggatgagccggtgagggactgcgtgctgatggtggagggaagcggcctgctgttgggtaacctgaagatcgacgtgccgaccctagggcccaaggagcggtcccgggtccgttttgatatcctgccctcccggagtggcaccaagcaactgctcgccgacttctcctgcaacaagttccctgcaatcaaggccatgttgtccatcgacgtagccgaatgaagggcgctggtggcctcccgtacaaacttggacaacacggagcagggagagctcaccatggaatgaaccccccgcccatgctgtccggcctgggaaaccctctccatctcccaaggctgccagacatggactccgggctccagcacatccccctctcctctcccccaggttggggctgggtccaccctgtcctatgacttgatcacttttgcacattccctggccgtttctccccagagctgcctgctctgtgagccccacagccctgctcattcctcacgcccttcaatgctgcaggatggactggcccctgacccagggactctccaaacgggatacaggagagaagctggtctagactgtttgctgatccccaacctgcacggggcattcctgcttctctctcaggccaccacagagggcaggggatggttagtcacctgccccagcactcacaccctaactcaaaataaatgttaaataagtgcgatcacac

SEQ ID NO: 596 - protein, 693 aa, Homo sapien
MAALGVQSINWQKAFNRQAHHTDKFSSQELILRRGQNFQVLMIMNKGLGSNERLEFIDTTGPYPSESAMTKAVFPLSNGSSGGWSAVLQASNGNTLTISISSPASAPIGRYTMALQIFSQGGISSVKLGTFILLFNPWLNVDSVFMGNHAEREEYVQEDAGIIFVGSTNRIGMIGWNFGQFEEDILSICLSILDRSLNFRRDAATDVASRNDPKYVGRVLSAMINSNDDNGVLAGNWSGTYTGGRDPRSWDGSVEILKNWKKSGFSPVRYGQCWVFAGTLNTALRSLGIPSRVITNFNSAHDTDRNLSVDVYYDPMGNPLDKGSDSVWNFHVWNEGWFVRSDLGPPYGGWQVLDATPQERSQGVFQCGPASVIGVREGDVQLNFDMPFIFAEVNADRITWLYDNTTGKQWKNSVNSHTIGRYISTKAVGSNARMDVTDKYKYPEGSDQERQVFQKALGKLKPNTPFAATSSMGLETEEQEPSIIGKLKVAGMLAVGKEVNLVLLLKNLSRDTKTVTVNMTAWTIIYNGTLVHEVWKDSATMSLDPEEEAEHPIKISYAQYERYLKSDNMIRITAVCKVPDESEVVVERDIILDNPTLTLEVLNEARVRKPVNVQMLFSNPLDEPVRDCVLMVEGSGLLLGNLKIDVPTLGPKERSRVRFDILPSRSGTKQLLADFSCNKFPAIKAMLSIDVAE

SEQ ID NO: 597 - DNA, 2709 bp, Homo sapien
gggtcctgtcccatccatcctgacctgttccatctcagccccaggactcagtactgcggttgccaacactgctgccaggcatgatggatgggccacgttccgatgtgggccgttggggtggcaaccccttgcagccccctaccacgccatctccagagccagagccagagccagacggacgctctcgcagaggaggaggccgttccttctgggctcgctgctgtggctgctgttcatgccgaaatgcggcagatgacgactggggacctgaaccctctgactccaggggtcgagggtccagctctggcactcgaagacctggctcccggggctcagactcccgccggcctgtatcccggggcagcggtgtcaatgcagctggagatggcaccatccgagagggcatgctagtagtgaacggtgtggacttgctgagctcgcgctcggaccagaaccgccgagagcaccacacagacgagtatgagtacgacgagctgatagtgcgccgcgggcagcctttccatatgctcctcctcctgtcccggacctatgaatcctctgatcgcatcacccttgagttactcatcggaaacaaccccgaggtgggcaagggcacgcacgtgatcatcccagtgggcaaggggggcagtggaggctggaaagcccaggtggtcaaggccagtgggcagaatctgaacctgcgggtccacacttcccccaacgccatcatcggcaagtttcagttcacagtccgcacacaatcagacgctggggagttccagttgccctttgacccccgcaatgagatctacatcctcttcaacccctggtgcccagaggacattgtgtacgtggaccatgaggattggcggcaggagtatgttcttaatgagtctgggagaatttactacgggaccgaagcacagattggtgagcggacctggaactacggccagtttgaccacggggtgctggatgcctgcttatacatcctggaccggcgggggatgccatatggaggccgtggagacccagtcaatgtctcccgggtcatctctgccatggtgaactccctggatgacaatggagtcctgattgggaactggtctggtgattactcccgaggcaccaacccatcagcgtgggtgggcagcgtggagatcctgcttagctacctacgcacgggatattccgtcccctatggccagtgctgggtctttgctggagtgaccaccacagtgctgcgctgcctgggtctggccacccgtactgtcaccaacttcaactccgcccacgacacagacacatcccttaccatggacatctacttcgacgagaacatgaagcccctggagcacctgaaccatgattctgtctggaacttccatgtgtggaacgactgctggatgaagaggccggatctgccctcgggctttgatgggtggcaggtggtggatgccacaccccaagagactagcagtggcatcttctgctgcggcccctgctctgtggagtccatcaagaatggcctggtctacatgaagtacgacacgcctttcatttttgctgaggtgaatagtgacaaggtgtactggcagcggcaggatgatggcagcttcaagattgtttatgtggaggagaaggccatcggcacactcattgtcacaaaggccatcagctccaacatgcgggaggacatcacctacctctataagcacccagaaggctcagacgcagagcggaaggcagtagagacagcagcagcccacggcagcaaacccaatgtgtatgccaaccggggctcagcggaggatgtggccatgcaggtggaggcacaggacgcggtgatggggcaggatctgatggtctctgtgatgctgatcaatcacagcagcagccgccgcacagtgaaactgcacctctacctctcagtcactttctatactggtgtcagtggtaccatcttcaaggagaccaagaaggaagtggagctggcaccaggggcctcggaccgtgtgaccatgccagtggcctacaaggaataccggccccatcttgtggaccagggggccatgctgctcaatgtctcaggccacgtcaaggagagcgggcaggtgctggccaagcagcacaccttccgtctgcgcaccccagacctctccctcacgttactgggagcagcagtggttggccaggagtgtgaagtacagattgtcttcaagaacccccttcccgtcaccctcaccaatgtcgtcttccggctcgaaggctctgggttacagaggcccaagatcctcaacgttggggacattggaggcaatgaaacagtgacactgcgccagtcgtttgtgcctgtgcgaccaggcccccgccagctcattgccagcttggacagcccacagctctcccaggtgcacggtgtcatccaggtggatgtggccccagcccctggggatgggggcttcttctcagacgctggaggtgacagtcacttaggagagaccatccctatggcatctcgaggtggagcttagccctgtgccaggagcaatgggactggagtcagatgagcaaggacattgccccaagataggggcacactacagagcagctccccaggagctcaggtggggagtccagggctcccggagagggagtcagtcttcacttgcactgggggaacagatgctaataaactgttttttaatg

SEQ ID NO: 598 - protein, 817 aa, Homo sapien
MMDGPRSDVGRWGGNPLQPPTTPSPEPEPEPDGRSRRGGGRSFWARCCGCCSCRNAADDDWGPEPSDSRGRGSSSGTRRPGSRGSDSRRPVSRGSGVNAAGDGTIREGMLVVNGVDLLSSRSDQNRREHHTDEYEYDELIVRRGQPFHMLLLLSRTYESSDRITLELLIGNNPEVGKGTHVIIPVGKGGSGGWKAQVVKASGQNLNLRVHTSPNAIIGKFQFTVRTQSDAGEFQLPFDPRNEIYILFNPWCPEDIVYVDHEDWRQEYVLNESGRIYYGTEAQIGERTWNYGQFDHGVLDACLYILDRRGMPYGGRGDPVNVSRVISAMVNSLDDNGVLIGNWSGDYSRGTNPSAWVGSVEILLSYLRTGYSVPYGQCWVFAGVTTTVLRCLGLATRTVTNFNSAHDTDTSLTMDIYFDENMKPLEHLNHDSVWNFHVWNDCWMKRPDLPSGFDGWQVVDATPQETSSGIFCCGPCSVESIKNGLVYMKYDTPFIFAEVNSDKVYWQRQDDGSFKIVYVEEKAIGTLIVTKAISSNMREDITYLYKHPEGSDAERKAVETAAAHGSKPNVYANRGSAEDVAMQVEAQDAVMGQDLMVSVMLINHSSSRRTVKLHLYLSVTFYTGVSGTIFKETKKEVELAPGASDRVTMPVAYKEYRPHLVDQGAMLLNVSGHVKESGQVLAKQHTFRLRTPDLSLTLLGAAVVGQECEVQIVFKNPLPVTLTNVVFRLEGSGLQRPKILNVGDIGGNETVTLRQSFVPVRPGPRQLIASLDSPQLSQVHGVIQVDVAPAPGDGGFFSDAGGDSHLGETIPMASRGGA

SEQ ID NO: 599 - DNA, 1325 bp, Homo sapien
agcatctacaaaggaggaatagtcaaagcagcagcggcggcggcggcggcggcagcagcagcagcagcaggagaccttctctgatggatgacctctgtgaagcaaatggcacttttgccatcagcttatttaaaatattgggggaagaggacaactcaagaaacgtattcttctctcccatgagcatctcctctgccctggccatggtcttcatgggggcaaagggaagcactgcagcccagatgtcccaggcactttgtttatacaaagacggagatattcaccgaggtttccagtcacttctcagtgaagttaacagaactggcactcagtacttgcttagaactgccaacagactctttggagaaaagacgtgtgatttccttccagactttaaagaatactgtcagaagttctatcaggcagagctggaggagttgtcctttgctgaagacactgaagagtgcaggaagcatataaatgactgggtggcagagaagactgaaggtaagatttcagaggtactggatgctgggacagtcgatcccctgacaaagctagtccttgtgaatgccatttatttcaagggaaagtggaatgagcaatttgacagaaagtacacaaggggaatgctctttaaaaccaacgaggaaaaaaagacagtgcagatgatgtttaaggaagctaagtttaaaatggggtatgcggatgaggtacacacccaggtcctggagctgccctatgtggaagaggagctgagcatggtcattctgcttcccgatgacaacacggacctcgccgtggtggaaaaagcacttacatatgagaaattcaaagcctggacaaattcagaaaagttgacaaaaagtaaggttcaagttttccttcccagattaaagctggaggagagttatgacttggagcctttccttcgaagattaggaatgatcgatgcttttgacgaagccaaggcagacttttctggaatgtcaactgagaagaatgtgcctctgtccaaggttgcccacaagtgcttcgtggaggtcaatgaggaaggcacagaggctgccgcagccactgctgtggtcaggaattcccggtgcagcagaatggagccaagattctgtgcagaccacccttttcttttcttcatcaggcgccacaaaaccaactgcatcttgttctgtggcaggttctcttctccgtaaagaggagcaattgctgtacataccctcctttccttctacctatcttgccttaattaacattccctgtgacctagttggtgcagtggcttgaatgccaaaataaagcgtgtgcactgg

SEQ ID NO: 600 - protein, 374 aa, Homo sapien
MDDLCEANGTFAISLFKILGEEDNSRNVFFSPMSISSALAMVFMGAKGSTAAQMSQALCLYKDGDIHRGFQSLLSEVNRTGTQYLLRTANRLFGEKTCDFLPDFKEYCQKFYQAELEELSFAEDTEECRKHINDWVAEKTEGKISEVLDAGTVDPLTKLVLVNAIYFKGKWNEQFDRKYTRGMLFKTNEEKKTVQMMFKEAKFKMGYADEVHTQVLELPYVEEELSMVILLPDDNTDLAVVEKALTYEKFKAWTNSEKLTKSKVQVFLPRLKLEESYDLEPFLRRLGMIDAFDEAKADFSGMSTEKNVPLSKVAHKCFVEVNEEGTEAAAATAVVRNSRCSRMEPRFCADHPFLFFIRRHKTNCILFCGRFSSP

SEQ ID NO: 601 - DNA, 3839 bp, Homo sapien
caggtctcgacttcactgctctgtgtcctctgctccaggaggcccagcctgtgtggccctgtgacctgcaggtattggaagagccacagctaagatgccaggaacccctggaagcctagaaatgggactgttgacatttagggatgtggccatagaattctctccggaggagtggcaatgtctggacactgcacagcagaatttatataggaatgtgatgttagagaactacagaaacctggccttcctgggtattgctctctctaagccagacctgattacttatctggagcaaggaaaagagccctggaatatgaagcaacatgagatggtggatgaacccacaggtatatgtcctcattttcctcaagacttttggccagagcagagcatggaagattcttttcaaaaagtattactgagaaaatatgaaaaatgtggacatgagaatttacagttaagaaaaggttgtaaaagtgtggatgagtgtaaggtgcacaaagaaggttataataaacttaaccagtgtctcacaactgcccagagcaaagtatttcaatgtgggaaatatttgaaagtcttctataaatttttaaattcaaacagacatacgataagacataccggaaagaaatgcttcaaatgtaaaaaatgtgtcaagtcattttgcatccgtttacacaaaacccaacataaatgcgtttatattacagagaagtcctgtaaatgtaaagaatgtgaaaaaacctttcattggtcctcaacccttactaatcataaggaaattcatactgaagataaaccctacaaatgtgaagaatgtggcaaagcttttaagcagctctcaacccttactacacataaaataatctgtgctaaagagaaaatctacaagtgtgaagaatgtggcaaagcatttctatggtcctcaaccctaactagacataagaggatacacactggagagaaaccctacaaatgtgaagaatgtggcaaagcttttagccattcttcaacccttgctaaacataagagaattcatactggagagaaaccctacaaatgtgaagaatgtggcaaagcttttagccattcttcagcccttgctaaacataagagaattcatactggagagaaaccctacaaatgtaaagaatgtggcaaagcttttagcaattcctcaacccttgctaatcataagataactcatactgaagagaaaccctacaaatgtaaagaatgtgacaaaacttttaagcgactctcaacccttactaaacataaaataatacatgctggagagaaactctacaaatgtgaagaatgtggcaaagcttttaatcgatcttcaaatcttactatacataagtttattcatactggagagaaaccttacaagtgtgaagaatgtggcaaagcatttaactggtcctcaagccttactaaacataaaagatttcatactagagagaaacccttcaaatgtaaagaatgtggcaaaggatttatatggtcttcaaccctaactagacataagaggatacacactggagagaagccctacaaatgtgaagaatgtggcaaagcttttaggcaatcctcaacccttactaaacataagataattcatactggagagaaaccctacaaatttgaagaatgtggcaaagcttttagacaatccttaacccttaataaacataagataattcatagtagagagaaaccctacaaatgtaaagaatgtggcaaagcttttaagcaattctcaacccttactacacataaaataattcatgctggaaagaaactctacaaatgtgaagaatgtggcaaagcttttaatcattcctcaagtctttctacacataagataattcatactggagagaagtcttacaagtgtgaagaatgtggcaaagcatttctatggtcctcaaccctaagaagacataagaggatacacactggagagaaaccctacaaatgtgaagaatgtggcaaagcttttagccattcttcagcccttgctaaacataagagaattcatactggagagaaaccctacaaatgtaaagaatgtggcaaagcttttagcaattcctcaacccttgctaatcataagataactcatactgaagagaaaccctacaaatgtaaagaatgtgacaaaacttttaagcgactctcaacccttactaaacataaaataatacatgctggagagaaactctacaaatgtgaagaatgtggcaaagcttttaatcgatcttcaaatcttactatacataagtttattcatactggagagaaaccttacaagtgtgaagaatgtggcaaagcatttaactggtcctcaagccttactaaacataaaagaattcatactagagagaaacccttcaaatgtaaagaatgtggcaaagcatttatatggtcttcaaccctaactagacataagaggatacacactggagagaagccctacaaatgtgaagaatgtggcaaagcttttagccgttcctcaacccttactaagcataagacaattcatactggagagaaaccctacaaatgtaaagaatgtggcaaagcttttaagcactcctcagcccttgctaaacataaaataatacatgctggagagaaactctacaaatgtgaggaatgtggcaaagcttttaatcaatcttcaaatcttacgacacataagataattcatactaaagagaaaccttccaagagtgaagaatgtgacaaagcatttatctggtcctcaacccttactgaacataagagaattcataccagagagaaaccctacaaatgtgaagaatgtggcaaagcatttagccagccttcacaccttactacacataagaggatgcacactggagagaaaccctacaaatgtgaagaatgtggcaaagcttttagccaatcctcaacccttactacacataagataattcatactggagagaaaccctacaaatgtgaagaatgtggcaaagcttttaggaaatcttcaactcttactgaacataagataattcatactggagagaaaccctacaaatgtgaagaatgtggcaaagcatttagccaatcctcaaccctaactagacatacgaggatgcacactggagagaaaccatacaaatgtgaagaatgtgggaaagcttttaatcgatcctcaaagcttactacacataagataattcatactggagagaaaccttacaagtgtgaagaatgtggcaaagcatttatatcatcctcaaccctaaatggacataagagaattcatactagagagaaaccctacaaatgtgaagaatgtggcaaagcatttagccaatcttcaaccctaactagacataagaggttgcacaccggagagaaaccctacaaatgtggagaatgtggcaaagcctttaaagagtcctcagctcttactaaacataagataattcacactggagagaaaccctacaaatgtgaaaaatgttgcaaagcctttaaccagtcttcaatccttactaaccataagaaaattcatactatcacacctgtaatcccactactttgggaggccgaggcgggcggatcacgaggtcaggagatggagaccatcctggctaacacagtgaaaccccttctctactaaaaaatacaaaaaactagccgggcgtggtggcgggcgcctgtagtcccagctatgcgagaggctgaggcaggagaatggcgtgaacccgggaggcggagcttgcagtgagccgagatcacgccactgcactcaagcctgggcgacagagcgagactccgtctcaaaaaaa

SEQ ID NO: 602 - protein, 1191 aa, Homo sapien
MPGTPGSLEMGLLTFRDVAIEFSPEEWQCLDTAQQNLYRNVMLENYRNLAFLGIALSKPDLITYLEQGKEPWNMKQHEMVDEPTGICPHFPQDFWPEQSMEDSFQKVLLRKYEKCGHENLQLRKGCKSVDECKVHKEGYNKLNQCLTTAQSKVFQCGKYLKVFYKFLNSNRHTIRHTGKKCFKCKKCVKSFCIRLHKTQHKCVYITEKSCKCKECEKTFHWSSTLTNHKEIHTEDKPYKCEECGKAFKQLSTLTTHKIICAKEKIYKCEECGKAFLWSSTLTRHKRIHTGEKPYKCEECGKAFSHSSTLAKHKRIHTGEKPYKCEECGKAFSHSSALAKHKRIHTGEKPYKCKECGKAFSNSSTLANHKITHTEEKPYKCKECDKTFKRLSTLTKHKIIHAGEKLYKCEECGKAFNRSSNLTIHKFIHTGEKPYKCEECGKAFNWSSSLTKHKRFHTREKPFKCKECGKGFIWSSTLTRHKRIHTGEKPYKCEECGKAFRQSSTLTKHKIIHTGEKPYKFEECGKAFRQSLTLNKHKIIHSREKPYKCKECGKAFKQFSTLTTHKIIHAGKKLYKCEECGKAFNHSSSLSTHKIIHTGEKSYKCEECGKAFLWSSTLRRHKRIHTGEKPYKCEECGKAFSHSSALAKHKRIHTGEKPYKCKECGKAFSNSSTLANHKITHTEEKPYKCKECDKTFKRLSTLTKHKIIHAGEKLYKCEECGKAFNRSSNLTIHKFIHTGEKPYKCEECGKAFNWSSSLTKHKRIHTREKPFKCKECGKAFIWSSTLTRHKRIHTGEKPYKCEECGKAFSRSSTLTKHKTIHTGEKPYKCKECGKAFKHSSALAKHKIIHAGEKLYKCEECGKAFNQSSNLTTHKIIHTKEKPSKSEECDKAFIWSSTLTEHKRIHTREKPYKCEECGKAFSQPSHLTTHKRMHTGEKPYKCEECGKAFSQSSTLTTHKIIHTGEKPYKCEECGKAFRKSSTLTEHKIIHTGEKPYKCEECGKAFSQSSTLTRHTRMHTGEKPYKCEECGKAFNRSSKLTTHKIIHTGEKPYKCEECGKAFISSSTLNGHKRIHTREKPYKCEECGKAFSQSSTLTRHKRLHTGEKPYKCGECGKAFKESSALTKHKIIHTGEKPYKCEKCCKAFNQSSILTNHKKIHTITPVIPLLWEAEAGGSRGQEMETILANTVKPLLY

SEQ ID NO: 603 - DNA, 2217 bp, Homo sapien
cggacatggccgcacgccttctccgagggtccctacgcgtcctgggcggccaccgtgcgccgcgccagctgcccgccgcgcgatgttctcattccggaggggaagaacgtctagaaactccttctgctaaaaaattaacagatataggaattcgaagaatcttttctccagagcatgacattttccggaaaagtgtaaggaagtttttccaagaagaagtgattcctcatcactcagaatgggagaaagctggagaagtaagtagggaggtttgggaaaaagctggaaaacaaggactgcttggtgtcaatattgcagagcatcttggtggaattggaggggatctgtactccgcagctattgtctgggaggagcaagcttattcaaattgttcaggcccaggttttagtattcattcaggtattgtcatgtcctatattacaaaccatggctcagaagaacagattaagcactttattccccagatgactgcaggcaaatgtattggtgcaatagcaatgacagagcctggagctggaagtgacttacagggaataaaaacaaatgctaaaaaggatggaagtgactggattctcaatggaagcaaggtgttcatcagtaatgggtcattaagtgatgttgtgattgtagttgcggtcacaaatcatgaagctccctcccctgcccatggtattagcctttttctggtggaaaatggaatgaaaggatttatcaagggacgaaagctacataaaatgggattaaaagcccaggataccgcagaactattctttgaagatatacggttgccagctagtgccctacttggagaagagaataaaggcttctattacatcatgaaagagcttccacaggaaaggctgttaattgctgatgtggcaatttcagctagtgaattcatgtttgaagaaaccaggaactatgttaaacaaagaaaagcttttggcaaaacagttgctcacctacagacagtgcaacataaattagcagaattaaaaacacatatatgtgtaacccgagcatttgtggacaactgtctccagctgcatgaagcgaaacgtttggactccgccactgcttgcatggcgaaatattgggcatctgagttacaaaatagtgtagcttacgactgtgtacagctccatggaggttggggatacatgtgggagtacccaattgcaaaagcttatgtggatgccagagttcagccaatctatggtggtacaaatgaaataatgaaggagctgattgcaagagagattgtctttgacaagtagacatctgcccacatcctggagtcctattacagctaatctcgttttaaatctgctcaagataaaatgtaacttggaaagcgaggaaacactaaacatgtttttacctgctctctctatagagaaggaaataaaatataaatataagattaacacagtggaaggacaaatctttgaagccaaaattctagttttccaatataaggtttaacttacagttttttatgtagccaaaggtaaacggttttctgaatcttgcctaggtgtttcatttatctctaaaattctaaaaagcataaatcattcaaatcttcaaaccaaggcagaaataattttatgtcgctatagtataaaaacattaataagatagcacattgacttttaaagggaaaagtaaatataacttagcatgtaaactcatttcggctaccatttgctccaaattccctagaacagtggtttttaccactgtactccaaccccgtttttaagcaatggaactctttcttcaaacaaaagcttatgcagaacatctctgtgaaacgctgctgagtgagaactgctttcattgaagctggaagccatcataccttactgccttgaaacccctaggactcagctaagtatttgcctaaccctgaccagggaatgccttggttctgtcaattgctgacatctgagaacacagaataatccatcatttttaatttcaagatattggtacattttataggtatcaaagcaatggcttttcttttgcaacagttaatgtatttattaacttaataattactttatgtcttctataaaccaggctgttaatacaatgatgacaaacaaaactggcaagatcactaaaaaataagtgaataaacaaataagtagtaaaataaggtaagaagtaaatatgtaaaagagataa

SEQ ID NO: 604 - protein, 430 aa, Homo sapien [sequence omitted]

SEQ ID NO: 605 - DNA, 2191 bp, Homo sapien
atcctacgggccacgcctgggccttgctgccaggaagcttcggccccgcagctcggcttgctgcggtctcaggtttctttacctccggaaagaagaatattggccccttgaattctggaagttcattgaagagtctgaaattagggacttatttcaaatttggacatggctagtcgaggcgcaacaagacccaacgggccaaatactggaaataaaatatgccagttcaaactagtacttctgggagagtccgctgttggcaaatcaagcctagtgcttcgttttgtgaaaggccaatttcatgaatttcaagagagtaccattggggctgcttttctaacccaaactgtatgtcttgatgacactacagtaaagtttgaaatatgggatacagctggtcaagaacgataccatagcctagcaccaatgtactacagaggagcacaagcagccatagttgtatatgatatcacaaatgaggagtcctttgcaagagcaaaaaattgggttaaagaacttcagaggcaagcaagtcctaacattgtaatagctttatcgggaaacaaggccgacctagcaaataaaagagcagtagatttccaggaagcacagtcctatgcagatgacaatagtttattattcatggagacatccgctaaaacatcaatgaatgtaaatgaaatattcatggcaatagctaaaaaattgccaaagaatgaaccacaaaatccaggagcaaattctgccagaggaagaggagtagaccttaccgaacccacacaaccaaccaggaatcagtgttgtagtaactaaacctctagtttgaactagctggaatagtcttctgcttcctaaatgttaataacaatggaattggagcatttaaccagcccagtatgacttccaaaagaagagacttatgatagagtcaagtttctaatacagaattattttaagtgttttgaacttaatttttaataacatgcatgggtccctctcactaatgtttcaacaatagggaaaaatgagaactatgtggacacttgtttcattggaaggttagggggaataatttctcatcactaggaatatagacaaatgactgtctgggcccacacagttaaccagcccatttctccacactggtacagtagtcacctgtgaaaaaaaaaattggaacttactaatttgggcttttcaaaaacattctttgtttagaaggagattctaaagttatttatgatgcttagccatagtattcaggcaaatgttcatttctcctggtacctgtatttaaaatgtacattccacattttaataaattaaccacaagaaaataatcccacatatacaaggtcaggggtggggaagagtattaatggtatcttaattatacccagtctggtttttttttttaaatggggtaaaaatcaaatgcaaccccatcttgttttaggaattttgagaactaataaatgcaccttaatggtcagtgttcctttcaaacatgtgagttctttaacaaaaatgaaataaaccaggtgtctgtgatttctaattaatcaccgctggccattacacaggttttgttgtttggggtggggagggggcttttgttcccttttgacataatatagtcaatgcactaacaattatgtatattcaaacttgattattttaaattcgatcttcagctgtactgtaaatagggtactgcattgtagtctccatatctgtattacttttctgtaatatttaagagttgcttaaaagcatacaaaatgtactgttactaaaacagctaattatttctctctccccctttgacaggaaggggcttcagttgttcctccatggctagaaccataataaacaatgtacccgtaatttgtaacataaagtattgcaatatgttagtaacaatcttgcagccttcctttccaaagttcattttattttgatcagttcagtatattgcactaattattttaggtattttcattatatgaaagctaccatgtgtcagagatgatttaatctatttaagtgttggactgctaggagaacttgtacatttatgataatgcagaattaggaaaacggttcaccagtgtttagttttatattgaggtgctcaggttggaataaagtggtataaaaagcaaaaaaaaaaaaaaaaaaaaaaaaaaaa

SEQ ID NO: 606 - protein, 215 aa, Homo sapien
MASRGATRPNGPNTGNKICQFKLVLLGESAVGKSSLVLRFVKGQFHEFQESTIGAAFLTQTVCLDDTTVKFEIWDTAGQERYHSLAPMYYRGAQAAIVVYDITNEESFARAKNWVKELQRQASPNIVIALSGNKADLANKRAVDFQEAQSYADDNSLLFMETSAKTSMNVNEIFMAIAKKLPKNEPQNPGANSARGRGVDLTEPTQPTRNQCCSN

SEQ ID NO: 607 - DNA, 1013 bp, Homo sapien
gttcccagaagctccccaggctctagtgcaggaggagaaggaggaggagcaggaggtggagattcccagttaaaaggctccagaatcgtgtaccaggcagagaactgaagtactggggcctcctccactgggtccgaatcagtaggtgaccccgcccctggattctggaagacctcaccatgggacgcccccgacctcgtgcggccaagacgtggatgttcctgctcttgctggggggagcctgggcaggacactccagggcacaggaggacaaggtgctggggggtcatgagtgccaaccccattcgcagccttggcaggcggccttgttccagggccagcaactactctgtggcggtgtccttgtaggtggcaactgggtccttacagctgcccactgtaaaaaaccgaaatacacagtacgcctgggagaccacagcctacagaataaagatggcccagagcaagaaatacctgtggttcagtccatcccacacccctgctacaacagcagcgatgtggaggaccacaaccatgatctgatgcttcttcaactgcgtgaccaggcatccctggggtccaaagtgaagcccatcagcctggcagatcattgcacccagcctggccagaagtgcaccgtctcaggctggggcactgtcaccagtccccgagagaattttcctgacactctcaactgtgcagaagtaaaaatctttccccagaagaagtgtgaggatgcttacccggggcagatcacagatggcatggtctgtgcaggcagcagcaaaggggctgacacgtgccagggcgattctggaggccccctggtgtgtgatggtgcactccagggcatcacatcctggggctcagacccctgtgggaggtccgacaaacctggcgtctataccaacatctgccgctacctggactggatcaagaagatcataggcagcaagggctgattctaggataagcactagatctcccttaataaactcacaactctctggttc

SEQ ID NO: 608 - protein, 260 aa, Homo sapien
MGRPRPRAAKTWMFLLLLGGAWAGHSRAQEDKVLGGHECQPHSQPWQAALFQGQQLLCGGVLVGGNWVLTAAHCKKPKYTVRLGDHSLQNKDGPEQEIPVVQSIPHPCYNSSDVEDHNHDLMLLQLRDQASLGSKVKPISLADHCTQPGQKCTVSGWGTVTSPRENFPDTLNCAEVKIFPQKKCEDAYPGQITDGMVCAGSSKGADTCQGDSGGPLVCDGALQGITSWGSDPCGRSDKPGVYTNICRYLDWIKKIIGSKG

SEQ ID NO: 609 - DNA, 1326 bp, Homo sapien
atggaaggagacttctcggtgtgcaggaactgtaaaagacatgtagtctctgccaacttcaccctccatgaggcttactgcctgcggttcctggtcctgtgtccggagtgtgaggagcctgtccccaaggaaaccatggaggagcactgcaagcttgagcaccagcaggttgggtgtacgatgtgtcagcagagcatgcagaagtcctcgctggagtttcataaggccaatgagtgccaggagcgccctgttgagtgtaagttctgcaaactggacatgcagctcagcaagctggagctccacgagtcctactgtggcagccggacagagctctgccaaggctgtggccagttcatcatgcaccgcatgctcgcccagcacagagatgtctgtcggagtgaacaggcccagctcgggaaaggggaaagaatttcagctcctgaaagggaaatctactgtcattattgcaaccaaatgattccagaaaataagtatttccaccatatgggtaaatgttgtccagactcagagtttaagaaacactttcctgttggaaatccagaaattcttccttcatctcttccaagtcaagctgctgaaaatcaaacttccacgatggagaaagatgttcgtccaaagacaagaagtataaacagatttcctcttcattctgaaagttcatcaaagaaagcaccaagaagcaaaaacaaaaccttggatccacttttgatgtcagagcccaagcccaggaccagctcccctagaggagataaagcagcctatgacattctgaggagatgttctcagtgtggcatcctgcttcccctgccgatcctaaatcaacatcaggagaaatgccggtggttagcttcatcaaaaaggaaaacaagtgagaaatttcagctagatttggaaaaggaaaggtactacaaattcaaaagatttcacttttaacactggcattcctgcctacttgctgtggtggtcttgtgaaaggtgatgggttttattcgttgggctttaaaagaaaaggtttggcagaactaaaaacaaaactcacgtatcatctcaatagatacagaaaaggcttttgataaaattcaacttgacttcatgttaaaaaccctcaacaaaccaggcgtcgaaggaacatacctcaaaataataagagccatctatgacaaaaccacagccaacatcatactgaatgagcaaaagctggagcattactcttgagaagtagaacaaggcacttcagtcctattcaacatagtactggaagtctcgccacagcaatcaggcaagagaaagaagtaaaaggcaccc

SEQ ID NO: 610 - protein, 317 aa, Homo sapien
MEGDFSVCRNCKRHVVSANFTLHEAYCLRFLVLCPECEEPVPKETMEEHCKLEHQQVGCTMCQQSMQKSSLEFHKANECQERPVECKFCKLDMQLSKLELHESYCGSRTELCQGCGQFIMHRMLAQHRDVCRSEQAQLGKGERISAPEREIYCHYCNQMIPENKYFHHMGKCCPDSEFKKHFPVGNPEILPSSLPSQAAENQTSTMEKDVRPKTRSINRFPLHSESSSKKAPRSKNKTLDPLLMSEPKPRTSSPRGDKAAYDILRRCSQCGILLPLPILNQHQEKCRWLASSKRKTSEKFQLDLEKERYYKFKRFHF

SEQ ID NO: 611 - DNA, 2175 bp, Homo sapien
gagaaattggagaagataaaactggacactggggagaccacaacttcatgctgcgtgggatctcccagctacctgcagtggccaccatgtcttgggtcctgctgcctgtactttggctcattgttcaaactcaagcaatagccataaagcaaacacctgaattaacgctccatgaaatagtttgtcctaaaaaacttcacattttacacaaaagagagatcaagaacaaccagacagaaaagcatggcaaagaggaaaggtatgaacctgaagttcaatatcagatgatcttaaatggagaagaaatcattctctccctacaaaaaaccaagcacctcctggggccagactacactgaaacattgtactcacccagaggagaggaaattaccacgaaacctgagaacatggaacactgttactataaaggaaacatcctaaatgaaaagaattctgttgccagcatcagtacttgtgacgggttgagaggatacttcacacatcatcaccaaagataccagataaaacctctgaaaagcacagacgagaaagaacatgccgtctttacatctaaccaggaggaacaagacccagctaaccacacatgtggtgtgaagagcactgacgggaaacaaggcccaattcgaatctctagatcactcaaaagcccagagaaagaagactttcttcgggcacagaaatacattgatctctatttggtgctggataatgccttttataagaactataatgagaatctaactctgataagaagctttgtgtttgatgtgatgaacctactcaatgtgatatataacaccatagatgttcaagtggccttggtaggtatggaaatctggtctgatggggataagataaaggtggtgcccagcgcaagcaccacgtttgacaacttcctgagatggcacagttctaacctggggaaaaagatccacgaccatgctcagcttctcagcgggattagcttcaacaatcgacgtgtgggactggcagcttcaaattccttgtgttccccatcttcggttgctgttattgaggctaaaaaaaagaataatgtggctcttgtaggagtgatgtcacatgagctgggccatgtccttggtatgcctgatgttccattcaacaccaagtgtccctctggcagttgtgtgatgaatcagtatctgagttcaaaattcccaaaggatttcagtacatcttgccgtgcacattttgaaagataccttttatctcagaaaccaaagtgcctgctgcaagcacctattcctacaaatataatgacaacaccagtgtgtgggaaccaccttctagaagtgggagaagactgtgattgtggctctcctaaggagtgtaccaatctctgctgtgaagccctaacgtgtaaactgaagcctggaactgattgcggaggagatgctccaaaccataccacagagtgaatccaaaagtctgcttcactgagatgctaccttgccaggacaagaaccaagaactctaactgtcccaggaatcttgtgaattttcacccataatggtctttcacttgtcattctactttctatattgttatcagtccaggaaacaggtaaacagatgtaattagagacattggctctttgtttaggcctaatctttctttttacttttttttttcttttttctttttttttaaagatcatgaatttgtgacttagttctgccctttggagaacaaaagaaagcagtcttccatcaaatcaccttaaaatgcacggctaaactattcagagttaacactccagaattgttaaattacaagtactatgctttaatgcttctttcatcttactagtatggcctataaaaaaaataataccacttgatgggtgaaggctttggcaatagaaagaagaatagaattcaggttttatgttattcctctgtgttcacttcgccttgctcttgaaagtgcagtatttttctacatcatgtcgagaatgattcaatgtaaatatttttcattttatcatgtatatcctatacacacatctccttcatcatcatatatgaagtttattttgagaagtctacattgcttacattttaattgagccagcaaagaaggcttaatgatttattgaaccataatgtcaataaaaacacaacttttgaggc

SEQ ID NO: 612 - protein, 470 aa, Homo sapien
MLRGISQLPAVATMSWVLLPVLWLIVQTQAIAIKQTPELTLHEIVCPKKLHILHKREIKNNQTEKHGKEERYEPEVQYQMILNGEEIILSLQKTKHLLGPDYTETLYSPRGEEITTKPENMEHCYYKGNILNEKNSVASISTCDGLRGYFTHHHQRYQIKPLKSTDEKEHAVFTSNQEEQDPANHTCGVKSTDGKQGPIRISRSLKSPEKEDFLRAQKYIDLYLVLDNAFYKNYNENLTLIRSFVFDVMNLLNVIYNTIDVQVALVGMEIWSDGDKIKVVPSASTTFDNFLRWHSSNLGKKIHDHAQLLSGISFNNRRVGLAASNSLCSPSSVAVIEAKKKNNVALVGVMSHELGHVLGMPDVPFNTKCPSGSCVMNQYLSSKFPKDFSTSCRAHFERYLLSQKPKCLLQAPIPTNIMTTPVCGNHLLEVGEDCDCGSPKECTNLCCEALTCKLKPGTDCGGDAPNHTTE

SEQ ID NO: 613 - DNA, 2396 bp, Homo sapien
ggcaccaggtctcccaggcttcctcagcgtcgacgccggggagcgccctggggttgggagcgcccggggcccgcgaaggaggaggtggctcaggtgtcagggcgcaccgtgggaaccggccccgggggaggcgtggaaacgcggggcctgggactcgaccagcctctcccgtgcggatcgcaaaatctcggagctgaaacagcccgttgttcgcagcctccctctgacccgccaccctgcacattgttttccattcgcccgggtcgcgggtgggaggagaggcacgccggggttctggagcttggccgcgcgccaggcttgtggccttcgtccccctggggccactggggcggccacgcctctccggcgggaggagagaacgcgtgggtccgggtggctgctccggcccttccgcctccagctcggccatggggtcgcgcagctcccacgccgcggtcattcccgacggggacagtattcggcgagagaccggcttctcccaagccagcctgctccgcctgcaccaccggttccgggcactggacaggaataagaagggctacctgagccgcatggatctccagcagataggggcgctcgccgtgaaccccctgggagaccgaattatagaaagcttcttccccgatgggagccagcgagtggatttcccaggctttgtcagggtcttggctcattttcgccctgtagaagatgaggacacagaaacccaagaccccaagaaacctgaacctctcaacagcagaaggaacaaacttcactatgcatttcagctctatgacctggatcgcgatgggaagatctccaggcatgagatgctgcaggttctccgtctgatggttggggtacaggtgacagaagagcagctggagaacatcgctgaccgcacggtgcaggaggctgatgaagatggggatggggctgtgtccttcgtggagttcaccaagtccttagagaagatggacgttgagcaaaaaatgagcatccggatcctgaagtgactccgtttgtgccttgggcttgctcctgcaaccagtatctccttggaattcatccaaagcccccatggacgcatggacgcagggcgacaataaactgtattttcgtttctaactctatttagggccaagagaagaaagctggaaggatgtgtactaaagtctagctcagcagtccccaacctttttggcatcagggacagtttttccacggatgggtgacaggggatggttttgggatgattcaagtgcattacatttattgtgcactttatttctattatgattacattgtaatatataatgaaataattatacaactcaccataatgtagaatcagcaggagccctgagcttgttttcctgcaattagacggtcccatatgggagtgatgggagacagtgacagatcatcaggcattagattctcataaggagtgcacaatctagatcctttggtgtgcagttcacagtaggatttgggctcctatgataatctaatgccactgctgatctgacaggaggcagagctcaggcggtaatgcaagcaatggggagtggctgtaaatatagatgaagcttcagctcgcctgccgctcaccttgtgctgtgcagcccggttcctaacagaccacagaccccacaccaggtctatctcatttggtctcagagctgtgaatcagccagcaatattttagttgcaaatcactgaaaacccaactcaaagtgacttaagtcagaaagaaattttatgaattcaggtaattaaaaagtccagaagtatctgcctttaggcacagctggatccaagggcacaaatgatgtcatcaggctccagttattctccatctcccagctcagctttttctgtctgtaagcctgattttcaggaaggctctttcctagtgatggagatgaccaccatcagctccaggcttctatcctgctaacccagtaacccagtgggaagagatttacttattccaataattccaagtggagagtgtcattgacccgtttggggtctcatctctacttctaggggaatgaaacactttgagtggccaggcctgtgtcatgtgctaattcctagagccagggaaataaggtctgaggattcaggatggggtgaaaggtggttgcttaaaggaaaatgaaatacaattagcagaataaggggaaacgagtggtctgctctgctcgggcaaaacaagagatgcccattactgtgagggacccttgaagtctggactcttaaatgggtttttgctgatttcctgggtgcatgctaggatgatggggcttgatgcagtagggaagagacgatgtaaaaataataaacaatatataccttcaaaaaaaaaaaaaaaaaaaaaaaaa

SEQ ID NO: 614 - protein, 196 aa, Homo sapien
MGSRSSHAAVIPDGDSIRRETGFSQASLLRLHHRFRALDRNKKGYLSRMDLQQIGALAVNPLGDRIIESFFPDGSQRVDFPGFVRVLAHFRPVEDEDTETQDPKKPEPLNSRRNKLHYAFQLYDLDRDGKISRHEMLQVLRLMVGVQVTEEQLENIADRTVQEADEDGDGAVSFVEFTKSLEKMDVEQKMSIRILK

SEQ ID NO: 615 - DNA, 3669 bp, Homo sapien
acctaaaaccttgcaagttcaggaagaaaccatctgcatccatattgaaaacctgacacaatgtatgcagcaggctcagtgtgagtgaactggaggcttctctacaacatgacccaaaggagcattgcaggtcctatttgcaacctgaagtttgtgactctcctggttgccttaagttcagaactcccattcctgggagctggagtacagcttcaagacaatgggtataatggattgctcattgcaattaatcctcaggtacctgagaatcagaacctcatctcaaacattaaggaaatgataactgaagcttcattttacctatttaatgctaccaagagaagagtatttttcagaaatataaagattttaatacctgccacatggaaagctaataataacagcaaaataaaacaagaatcatatgaaaaggcaaatgtcatagtgactgactggtatggggcacatggagatgatccatacaccctacaatacagagggtgtggaaaagagggaaaatacattcatttcacacctaatttcctactgaatgataacttaacagctggctacggatcacgaggccgagtgtttgtccatgaatgggcccacctccgttggggtgtgttcgatgagtataacaatgacaaacctttctacataaatgggcaaaatcaaattaaagtgacaaggtgttcatctgacatcacaggcatttttgtgtgtgaaaaaggtccttgcccccaagaaaactgtattattagtaagctttttaaagaaggatgcacctttatctacaatagcacccaaaatgcaactgcatcaataatgttcatgcaaagtttatcttctgtggttgaattttgtaatgcaagtacccacaaccaagaagcaccaaacctacagaaccagatgtgcagcctcagaagtgcatgggatgtaatcacagactctgctgactttcaccacagctttcccatgaatgggactgagcttccacctcctcccacattctcgcttgtacaggctggtgacaaagtggtctgtttagtgctggatgtgtccagcaagatggcagaggctgacagactccttcaactacaacaagccgcagaattttatttgatgcagattgttgaaattcataccttcgtgggcattgccagtttcgacagcaaaggagagatcagagcccagctacaccaaattaacagcaatgatgatcgaaagttgctggtttcatatctgcccaccactgtatcagctaaaacagacatcagcatttgttcagggcttaagaaaggatttgaggtggttgaaaaactgaatggaaaagcttatggctctgtgatgatattagtgaccagcggagatgataagcttcttggcaattgcttacccactgtgctcagcagtggttcaacaattcactccattgccctgggttcatctgcagccccaaatctggaggaattatcacgtcttacaggaggtttaaagttctttgttccagatatatcaaactccaatagcatgattgatgctttcagtagaatttcctctggaactggagacattttccagcaacatattcagcttgaaagtacaggtgaaaatgtcaaacctcaccatcaattgaaaaacacagtgactgtggataatactgtgggcaacgacactatgtttctagttacgtggcaggccagtggtcctcctgagattatattatttgatcctgatggacgaaaatactacacaaataattttatcaccaatctaacttttcggacagctagtctttggattccaggaacagctaagcctgggcactggacttacaccctgaacaatacccatcattctctgcaagccctgaaagtgacagtgacctctcgcgcctccaactcagctgtgcccccagccactgtggaagcctttgtggaaagagacagcctccattttcctcatcctgtgatgatttatgccaatgtgaaacagggattttatcccattcttaatgccactgtcactgccacagttgagccagagactggagatcctgttacgctgagactccttgatgatggagcaggtgctgatgttataaaaaatgatggaatttactcgaggtattttttctcctttgctgcaaatggtagatatagcttgaaagtgcatgtcaatcactctcccagcataagcaccccagcccactctattccagggagtcatgctatgtatgtaccaggttacacagcaaacggtaatattcagatgaatgctccaaggaaatcagtaggcagaaatgaggaggagcgaaagtggggctttagccgagtcagctcaggaggctccttttcagtgctgggagttccagctggcccccaccctgatgtgtttccaccatgcaaaattattgacctggaagctgtaaaagtagaagaggaattgaccctatcttggacagcacctggagaagactttgatcagggccaggctacaagctatgaaataagaatgagtaaaagtctacagaatatccaagatgactttaacaatgctattttagtaaatacatcaaagcgaaatcctcagcaagctggcatcagggagatatttacgttctcaccccagatttccacgaatggacctgaacatcagccaaatggagaaacacatgaaagccacagaatttatgttgcaatacgagcaatggataggaactccttacagtctgctgtatctaacattgcccaggcgcctctgtttattccccccaattctgatcctgtacctgccagagattatcttatattgaaaggagttttaacagcaatgggtttgataggaatcatttgccttattatagttgtgacacatcatactttaagcaggaaaaagagagcagacaagaaagagaatggaacaaaattattataaataaatatccaaagtgtcttccttcttagatataagacccatggccttcgactacaaaaacatactaacaaagtcaaattaacatcaaaactgtattaaaatgcattgagtttttgtacaatacagataagatttttacatggtagatcaacaattctttttgggggtagattagaaaacccttacactttggctatgaacaaataataaaaattattctttaaagtaatgtctttaaaggcaaagggaagggtaaagtcggaccagtgtcaaggaaagtttgttttattgaggtggaaaaatagccccaagcagagaaaaggagggtaggtctgcattataactgtctgtgtgaagcaatcatttagttactttgattaatttttcttttctccttatctgtgcagaacaggttgcttgtttacaactgaagatcatgctatattttatatatgaagcccctaatgcaaagctctttacctcttgctattttgttatatatattacagatgaaatctcactgctaatgctcagagatcttttttcactgtaagaggtaacctttaacaatatgggtattacctttgtctcttcataccggttttatgacaaaggtctattgaatttatttgtttgtaagtttctactcccatcaaagcagctttctaagttattgccttggttattatggatgatagttatagcccttataatgccttacctaggaaa

SEQ ID NO: 616 - protein, 943 aa, Homo sapien
MTQRSIAGPICNLKFVTLLVALSSELPFLGAGVQLQDNGYNGLLIAINPQVPENQNLISNIKEMITEASFYLFNATKRRVFFRNIKILIPATWKANNNSKIKQESYEKANVIVTDWYGAHGDDPYTLQYRGCGKEGKYIHFTPNFLLNDNLTAGYGSRGRVFVHEWAHLRWGVFDEYNNDKPFYINGQNQIKVTRCSSDITGIFVCEKGPCPQENCIISKLFKEGCTFIYNSTQNATASIMFMQSLSSVVEFCNASTHNQEAPNLQNQMCSLRSAWDVITDSADFHHSFPMNGTELPPPPTFSLVQAGDKVVCLVLDVSSKMAEADRLLQLQQAAEFYLMQIVEIHTFVGIASFDSKGEIRAQLHQINSNDDRKLLVSYLPTTVSAKTDISICSGLKKGFEVVEKLNGKAYGSVMILVTSGDDKLLGNCLPTVLSSGSTIHSIALGSSAAPNLEELSRLTGGLKFFVPDISNSNSMIDAFSRISSGTGDIFQQHIQLESTGENVKPHHQLKNTVTVDNTVGNDTMFLVTWQASGPPEIILFDPDGRKYYTNNFITNLTFRTASLWIPGTAKPGHWTYTLNNTHHSLQALKVTVTSRASNSAVPPATVEAFVERDSLHFPHPVMIYANVKQGFYPILNATVTATVEPETGDPVTLRLLDDGAGADVIKNDGIYSRYFFSFAANGRYSLKVHVNHSPSISTPAHSIPGSHAMYVPGYTANGNIQMNAPRKSVGRNEEERKWGFSRVSSGGSFSVLGVPAGPHPDVFPPCKIIDLEAVKVEEELTLSWTAPGEDFDQGQATSYEIRMSKSLQNIQDDFNNAILVNTSKRNPQQAGIREIFTFSPQISTNGPEHQPNGETHESHRIYVAIRAMDRNSLQSAVSNIAQAPLFIPPNSDPVPARDYLILKGVLTAMGLIGIICLIIVVTHHTLSRKKRADKKENGTKLL

SEQ ID NO: 617 - DNA, 1447 bp, Homo sapien
tgtcactgagggttgactgactggagagctcaagtgcagcaaagagaagtgtcagagcatgagcgccaagtccagaaccatagggattattggagctcctttctcaaagggacagccacgaggaggggtggaagaaggccctacagtattgagaaaggctggtctgcttgagaaacttaaagaacaagagtgtgatgtgaaggattatggggacctgccctttgctgacatccctaatgacagtccctttcaaattgtgaagaatccaaggtctgtgggaaaagcaagcgagcagctggctggcaaggtggcagaagtcaagaagaacggaagaatcagcctggtgctgggcggagaccacagtttggcaattggaagcatctctggccatgccagggtccaccctgatcttggagtcatctgggtggatgctcacactgatatcaacactccactgacaaccacaagtggaaacttgcatggacaacctgtatctttcctcctgaaggaactaaaaggaaagattcccgatgtgccaggattctcctgggtgactccctgtatatctgccaaggatattgtgtatattggcttgagagacgtggaccctggggaacactacattttgaaaactctaggcattaaatacttttcaatgactgaagtggacagactaggaattggcaaggtgatggaagaaacactcagctatctactaggaagaaagaaaaggccaattcatctaagttttgatgttgacggactggacccatctttcacaccagctactggcacaccagtcgtgggaggtctgacatacagagaaggtctctacatcacagaagaaatctacaaaacagggctactctcaggattagatataatggaagtgaacccatccctggggaagacaccagaagaagtaactcgaacagtgaacacagcagttgcaataaccttggcttgtttcggacttgctcgggagggtaatcacaagcctattgactaccttaacccacctaagtaaatgtggaaacatccgatataaatctcatagttaatggcataattagaaagctaatcattttcttaagcatagagttatccttctaaagacttgttctttcagaaaaatgtttttccaattagtataaactctacaaattccctcttggtgtaaaattcaagatgtggaaattctaacttttttgaaatttaaaagcttatattttctaacttggcaaaagacttatccttagaaagagaagtgtacattgatttccaattaaaaatttgctggcattaaaaataagcacacttacataagcccccatacatagagtgggactcttggaatcaggagacaaagctaccacatgtggaaaggtactatgtgtccatgtcattcaaaaaatgtgattttttataataaactctttataacaag

SEQ ID NO: 618 - protein, 322 aa, Homo sapien
MSAKSRTIGIIGAPFSKGQPRGGVEEGPTVLRKAGLLEKLKEQECDVKDYGDLPFADIPNDSPFQIVKNPRSVGKASEQLAGKVAEVKKNGRISLVLGGDHSLAIGSISGHARVHPDLGVIWVDAHTDINTPLTTTSGNLHGQPVSFLLKELKGKIPDVPGFSWVTPCISAKDIVYIGLRDVDPGEHYILKTLGIKYFSMTEVDRLGIGKVMEETLSYLLGRKKRPIHLSFDVDGLDPSFTPATGTPVVGGLTYREGLYITEEIYKTGLLSGLDIMEVNPSLGKTPEEVTRTVNTAVAITLACFGLAREGNHKPIDYLNPPK

SEQ ID NO: 619 - DNA, 1725 bp, Homo sapien
ccgtgcagtccgagatgggctcgtctcgggcaccctggatggggcgtgtgggtgggcacgggatgatggcactgctgctggctggtctcctcctgccagggaccttggctaagagcattggcaccttctcagacccctgtaaggaccccacgcgtatcacctcccctaacgacccctgcctcactgggaagggtgactccagcggcttcagtagctacagtggctccagcagttctggcagctccatttccagtgccagaagctctggtggtggctccagtggtagctccagcggatccagcattgcccagggtggttctgcaggatcttttaagccaggaacggggtattcccaggtcagctactcctccggatctggctctagtctacaaggtgcatccggttcctcccagctggggagcagcagctctcactcgggaagcagcggctctcactcgggaagcagcagctctcattcgagcagcagcagcagctttcagttcagcagcagcagcttccaagtagggaatggctctgctctgccaaccaatgacaactcttaccgcggaatactaaacccttcccagcctggacaaagctcttcctcttcccaaacctctggggtatccagcagtggccaaagcgtcagctccaaccagcgtccctgtagttcggacatccccgactctccctgcagtggagggcccatcgtctcgcactctggcccctacatccccagctcccactctgtgtcagggggtcagaggcctgtggtggtggtggtggaccagcacggttctggtgcccctggagtggttcaaggtcccccctgtagcaatggtggccttccaggcaagccctgtcccccaatcacctctgtagacaaatcctatggtggctacgaggtggtgggtggctcctctgacagttatctggttccaggcatgacctacagtaagggtaaaatctatcctgtgggctacttcaccaaagagaaccctgtgaaaggctctccaggggtcccttcctttgcagctgggccccccatctctgagggcaaatacttctccagcaaccccatcatccccagccagtcggcagcttcctcggccattgcgttccagccagtggggactggtggggtccagctctgtggaggcggctccacgggctccaagggaccctgctctccctccagttctcgagtccccagcagttctagcatttccagcagcgccggttcaccctaccatccctgcggcagtgcttcccagagcccctgctccccaccaggcaccggctccttcagcagcagctccagttcccaatcgagtggcaaaatcatccttcagccttgtggcagcaagtccagctcttctggtcacccttgcatgtctgtctcctccttgacactgactgggggccccgatggctctccccatcctgatccctccgctggtgccaagccctgtggctccagcagtgctggaaagatcccctgccgctccatccgggatatcctagcccaagtgaagcctctggggccccagctagctgaccctgaagttttcctaccccaaggagagttactcgacagtccataagtcaactgttgtgtgtgtgcatgccttgggcacaaacaagcacatacactatatcccatatgggagaaggccagtgcccaggcatagggttagctcagtttccctccttcccaaaagagtg

SEQ ID NO: 620 - protein, 529 aa, Homo sapien
MGSSRAPWMGRVGGHGMMALLLAGLLLPGTLAKSIGTFSDPCKDPTRITSPNDPCLTGKGDSSGFSSYSGSSSSGSSISSARSSGGGSSGSSSGSSIAQGGSAGSFKPGTGYSQVSYSSGSGSSLQGASGSSQLGSSSSHSGSSGSHSGSSSSHSSSSSSFQFSSSSFQVGNGSALPTNDNSYRGILNPSQPGQSSSSSQTSGVSSSGQSVSSNQRPCSSDIPDSPCSGGPIVSHSGPYIPSSHSVSGGQRPVVVVVDQHGSGAPGVVQGPPCSNGGLPGKPCPPITSVDKSYGGYEVVGGSSDSYLVPGMTYSKGKIYPVGYFTKENPVKGSPGVPSFAAGPPISEGKYFSSNPIIPSQSAASSAIAFQPVGTGGVQLCGGGSTGSKGPCSPSSSRVPSSSSISSSAGSPYHPCGSASQSPCSPPGTGSFSSSSSSQSSGKIILQPCGSKSSSSGHPCMSVSSLTLTGGPDGSPHPDPSAGAKPCGSSSAGKIPCRSIRDILAQVKPLGPQLADPEVFLPQGELLDSP

SEQ ID NO: 621 - DNA, 2284 bp, Homo sapien
aaaggagactggccgctggggctcaggaccgggattatccgagctctgcagaagtgcaccgctattgctttgggagggtaaaaaaaaaaaatcacacggtttccagtgaaaaagtgacagagggtggtggcctttggaaccgtcgtgaagtcttctgcctggaacccgaaacttgcatgctatggaacacccgctctttggctgcctgcgcagccctcacgccacggcgcaaggcttgcacccgttctcccaatcctctctcgccctccatggaagatctgaccatatgtcttaccccgagctctctacttcttcctcatcttgcataatcgcgggataccccaacgaagagggcatgtttgccagccagcatcacagggggcaccaccaccaccaccaccaccaccatcaccaccatcagcagcagcagcaccaggctctgcaaaccaactggcacctcccgcagatgtcttccccaccgagtgcggctcggcacagcctctgcctccagcccgactctggagggcccccagagttggggagcagcccgcccgtcctgtgctccaactcttccagcttgggctccagcaccccgactggggccgcgtgcgcgccgggggactacggccgccaggcactgtcacctgcggaggcggagaagcgaagcggcggcaagaggaaaagcgacagctcagactcccaggaaggaaattacaagtcagaagtcaacagcaaacccaggaaagaaaggacagcatttaccaaagagcaaatcagagaacttgaagcagaatttgcccatcataattatctcaccagactgaggcgatacgagatagcagtgaatctggatctcactgaaagacaggtgaaagtctggttccaaaacaggcggatgaagtggaagagggtaaagggtggacagcaaggagctgcggctcgggaaaaggaactggtgaatgtgaaaaagggaacacttctcccatcagagctgtcgggaattggtgcagccaccctccagcaaacaggggactctatagcaaatgaagacagtcacgacagtgaccacagctcagagcatgcgcacttatgatataaacagaggaccagctccattctcaggaaagaaatgttgtgatggcaagccttacccaaatatcgtttacacagagagatgactatggcagtgatgtttaatattattaaatccaggcatttcgaatctgtttttcatgatttatagagggtttacacaaagtgccacttattaaagagcttccacagtgaagatggagaaggtgaacttgctttgaatattccagatgtgtttggtcgtgcgtatggcagtgagcaggtatgtgtttgcttttgcttgcactgaaaattaaattgctatcaagagcaaactatgaacggttttttattcaagatgtctccagagtgaagatgccgaggatgaacttgcattgaacattccagatgtgtgagatcatgtgtattacagtgggcaggtatttgcttttgcttgcactgaaaattaaattgctatcaagaataaaccatgaaacattttatcctgaacagccacagtgcctgaattcactcaagtggataaaaagtgtattttaactctgtatatattacccttaagtcattttcctgtcttcactaatttagcaatgcattcatattagctgatgaaaataggcactcacaatgacaaccagagccagtttcttgtcttttttatacattttgtcatcccagagacaatcagtatgtgcttacctgtgttcaagtagagaaaaatacagtagagtctgataggacatattcttgtaccacagacaaaacaaatcttatgttgcatttactatcaactgctgctaatacgttattataaaacttacctagctcctgaattcttcctatcttatagcttaaaaaaattaggatcataggcaaatcagttaccttgcagaaagagctttgtatgacagacattgtcttattttatttctgtaaaatattagctgtatgaatatgatttaattaacaagaaaacatttcttcctgattgacaacagtgttagacaaggtgcaaagcgaaactggttgctcaagttgatagaaaacaaaattctgaatatcttcaaattaaattcggtaaaaacacattattttttcatatgtgatgtattcatgcagaacaactatctttgtattttgtttttaaaatgtgtttaataaatgatcctttgtaaataaaaaaaaaaaaaaaaaa

SEQ ID NO: 622 - protein, 303 aa, Homo sapien
MEHPLFGCLRSPHATAQGLHPFSQSSLALHGRSDHMSYPELSTSSSSCIIAGYPNEEGMFASQHHRGHHHHHHHHHHHHQQQQHQALQTNWHLPQMSSPPSAARHSLCLQPDSGGPPELGSSPPVLCSNSSSLGSSTPTGAACAPGDYGRQALSPAEAEKRSGGKRKSDSSDSQEGNYKSEVNSKPRKERTAFTKEQIRELEAEFAHHNYLTRLRRYEIAVNLDLTERQVKVWFQNRRMKWKRVKGGQQGAAAREKELVNVKKGTLLPSELSGIGAATLQQTGDSIANEDSHDSDHSSEHAHL

SEQ ID NO: 623 - DNA, 735 bp, Homo sapien
cgacatcagagatgaggacagcattgctgctccttgcagccctggctgtggctacagggccagcccttaccctgcgctgccacgtgtgcaccagctccagcaactgcaagcattctgtggtctgcccggccagctctcgcttctgcaagaccacgaacacagtggagcctctgagggggaatctggtgaagaaggactgtgcggagtcgtgcacacccagctacaccctgcaaggccaggtcagcagcggcaccagctccacccagtgctgccaggaggacctgtgcaatgagaagctgcacaacgctgcacccacccgcaccgccctcgcccacagtgccctcagcctggggctggccctgagcctcctggccgtcatcttagcccccagcctgtgaccttccccccagggaaggcccctcatgcctttccttccctttctctggggattccacacctctcttccccagccggcaacgggggtgccaggagccccaggctgagggcttccccgaaagtctgggaccaggtccaggtgggcatggaatgctgatgacttggagcaggccccacagaccccacagaggatgaagccaccccacagaggatgcagcccccagctgcatggaaggtggaggacagaagccctgtggatccccggatttcacactccttctgttttgttgccgtttattttgtactcaaatctctacatggagataaatgatttaaacc

SEQ ID NO: 624 - protein, 128 aa, Homo sapien
MRTALLLLAALAVATGPALTLRCHVCTSSSNCKHSVVCPASSRFCKTTNTVEPLRGNLVKKDCAESCTPSYTLQGQVSSGTSSTQCCQEDLCNEKLHNAAPTRTALAHSALSLGLALSLLAVILAPSL

SEQ ID NO: 625 - DNA, 1804 bp, Homo sapien
ggggccgggcggggccagcggcgcattagcgccttgtcaattcggctgctcagacttgctccggcctccgcgtccgcgcccagcgcgcccagcgacgtgcgggcggcctggcccgcgccctcccgcgcccggcctgcgtcccgcgccctgcgccaccgccgccgagccgcagcccgccgcgcgcccccggcagcgccggccccatgcccgccggccgccggggccccgccgcccaatccgcgcggcggccgccgccgttgctgcccctgctgctgctgctctgcgtcctcggggcgccgcgagccggatcaggagcccacacagctgtgatcagtccccaggatcccacgcttctcatcggctcctccctgctggccacctgctcagtgcacggagacccaccaggagccaccgccgagggcctctactggaccctcaacgggcgccgcctgccccctgagctctcccgtgtactcaacgcctccaccttggctctggccctggccaacctcaatgggtccaggcagcggtcgggggacaacctcgtgtgccacgcccgtgacggcagcatcctggctggctcctgcctctatgttggcctgcccccagagaaacccgtcaacatcagctgctggtccaagaacatgaaggacttgacctgccgctggacgccaggggcccacggggagaccttcctccacaccaactactccctcaagtacaagcttaggtggtatggccaggacaacacatgtgaggagtaccacacagtggggccccactcctgccacatccccaaggacctggctctctttacgccctatgagatctgggtggaggccaccaaccgcctgggctctgcccgctccgatgtactcacgctggatatcctggatgtggtgaccacggaccccccgcccgacgtgcacgtgagccgcgtcgggggcctggaggaccagctgagcgtgcgctgggtgtcgccacccgccctcaaggatttcctctttcaagccaaataccagatccgctaccgagtggaggacagtgtggactggaaggtggtggacgatgtgagcaaccagacctcctgccgcctggccggcctgaaacccggcaccgtgtacttcgtgcaagtgcgctgcaacccctttggcatctatggctccaagaaagccgggatctggagtgagtggagccaccccacagccgcctccactccccgcagtgagcgcccgggcccgggcggcggggcgtgcgaaccgcggggcggagagccgagctcggggccggtgcggcgcgagctcaagcagttcctgggctggctcaagaagcacgcgtactgctccaacctcagcttccgcctctacgaccagtggcgagcctggatgcagaagtcgcacaagacccgcaaccaggacgaggggatcctgccctcgggcagacggggcacggcgagaggtcctgccagataagctgtaggggctcaggccaccctccctgccacgtggagacgcagaggccgaacccaaactggggccacctctgtaccctcacttcagggcacctgagccaccctcagcaggagctggggtggcccctgagctccaacggccataacagctctgactcccacgtgaggccacctttgggtgcaccccagtgggtgtgtgtgtgtgtgtgagggttggttgagttgcctagaacccctgccagggctgggggtgagaaggggagtcattactccccattacctagggcccctccaaaagagtccttttaaataaatgagctatttaggtgcaaa

SEQ ID NO: 626 - protein, 422 aa, Homo sapien
MPAGRRGPAAQSARRPPPLLPLLLLLCVLGAPRAGSGAHTAVISPQDPTLLIGSSLLATCSVHGDPPGATAEGLYWTLNGRRLPPELSRVLNASTLALALANLNGSRQRSGDNLVCHARDGSILAGSCLYVGLPPEKPVNISCWSKNMKDLTCRWTPGAHGETFLHTNYSLKYKLRWYGQDNTCEEYHTVGPHSCHIPKDLALFTPYEIWVEATNRLGSARSDVLTLDILDVVTTDPPPDVHVSRVGGLEDQLSVRWVSPPALKDFLFQAKYQIRYRVEDSVDWKVVDDVSNQTSCRLAGLKPGTVYFVQVRCNPFGIYGSKKAGIWSEWSHPTAASTPRSERPGPGGGACEPRGGEPSSGPVRRELKQFLGWLKKHAYCSNLSFRLYDQWRAWMQKSHKTRNQDEGILPSGRRGTARGPAR

SEQ ID NO: 627 - DNA, 2709 bp, Homo sapien
gggaatagcagaataggagcaagccagcactagtcagctaactaagtgactcaaccaaggccttttttccttgttatctttgcagatacttcattttcttagcgtttctggagattacaacatcctgcggttccgtttctgggaactttactgatttatctcccccctcacacaaataagcattgattcctgcatttctgaagatctcaagatctggactactgttgaaaaaatttccagtgaggctcacttatgtctgtaaagatgggaaaaaaatacaagaacattgttctactaaaaggattagaggtcatcaatgattatcattttagaatggttaagtccttactgagcaacgatttaaaacttaatttaaaaatgagagaagagtatgacaaaattcagattgctgacttgatggaagaaaagttccgaggtgatgctggtttgggcaaactaataaaaattttcgaagatataccaacgcttgaagacctggctgaaactcttaaaaaagaaaagttaaaagtaaaaggaccagccctatcaagaaagaggaagaaggaagtgcatgctacttcacctgcaccctccacaagcagcactgtcaaaactgaaggagcagaggcaactcctggagctcagaaaagaaaaaaatcaaccaaagaaaaggctggacccaaagggagtaaggtgtccgaggaacagactcagcctccctctcctgcaggagccggcatgtccacagccatgggccgttccccatctcccaagacctcattgtcagctccacccaacagttcttcaactgagaacccgaaaacagtggccaaatgtcaggtaactcccagaagaaatgttctccaaaaacgcccagtgatagtgaaggtactgagtacaacaaagccatttgaatatgagaccccagaaatggagaaaaaaataatgtttcatgctacagtggctacacagacacagttcttccatgtgaaggttttaaacaccagcttgaaggagaaattcaatggaaagaaaatcatcatcatatcagattatttggaatatgatagtctcctagaggtcaatgaagaatctactgtatctgaagctggtcctaaccaaacgtttgaggttccaaataaaatcatcaacagagcaaaggaaactctgaagattgatattcttcacaaacaagcttcaggaaatattgtatatggggtatttatgctacataagaaaacagtaaatcagaagaccacaatctacgaaattcaggatgatagaggaaaaatggatgtagtggggacaggacaatgtcacaatatcccctgtgaagaaggagataagctccagcttttctgctttcgacttagaaaaaagaaccagatgtcaaaactgatttcagaaatgcatagttttatccagataaagaaaaaaacaaacccgagaaacaatgaccccaagagcatgaagctaccccaggaacagcgtcagcttccatatccttcagaggccagcacaaccttccctgagagccatcttcggactcctcagatgccaccaacaactccatccagcagtttcttcaccaagaaaagtgaagacacaatctccaaaatgaatgacttcatgaggatgcagatactgaaggaagggagtcattttccaggaccgttcatgaccagcataggcccagctgagagccatccccacactcctcagatgcctccatcaacaccaagcagcagtttcttaaccacgttgaaaccaagactgaagactgaacctgaagaagtttccatagaagacagtgcccagagtgacctcaaagaagtgatggtgctgaacgcaacagaatcatttgtatatgagcccaaagagcagaagaaaatgtttcatgccacagtggcaactgagaatgaagtcttccgagtgaaggtttttaatattgacctaaaggagaagttcaccccaaagaagatcattgccatagcaaattatgtttgccgcaatgggttcctggaggtatatcctttcacacttgtggctgatgtgaatgctgaccgaaacatggagatcccaaaaggattgattagaagtgccagcgtaactcctaaaatcaatcagctttgctcacaaactaaaggaagttttgtgaatggggtgtttgaggtacataagaaaaatgtaaggggtgaattcacttattatgaaatacaagataatacagggaagatggaagtggtggtgcatggacgactgaacacaatcaactgtgaggaaggagataaactgaaactcaccagctttgaattggcaccgaaaagtgggaataccggggagttgagatctgtaattcatagtcacatcaaggtcatcaagaccaggaaaaacaagaaagacatactcaatcctgattcaagtatggaaacttcaccagactttttcttctaaaatctggatgtcattgacgataatgtttatggagataaggtctaagtccctaaaaaaatgtacatatacctggttgaaatacaacactatacatacacaccaccatatatactagctgttaatcctatggaatgggggtattgggagtgcttttttaatttttcatagtttttttttaataaaatggcatattttgcatctacaacttctataataagaaaaaataaataaacattatcttttttgtgaaaaaaa

SEQ ID NO: 628 - protein, 729 aa, Homo sapien
MGKKYKNIVLLKGLEVINDYHFRMVKSLLSNDLKLNLKMREEYDKIQIADLMEEKFRGDAGLGKLIKIFEDIPTLEDLAETLKKEKLKVKGPALSRKRKKEVHATSPAPSTSSTVKTEGAEATPGAQKRKKSTKEKAGPKGSKVSEEQTQPPSPAGAGMSTAMGRSPSPKTSLSAPPNSSSTENPKTVAKCQVTPRRNVLQKRPVIVKVLSTTKPFEYETPEMEKKIMFHATVATQTQFFHVKVLNTSLKEKFNGKKIIIISDYLEYDSLLEVNEESTVSEAGPNQTFEVPNKIINRAKETLKIDILHKQASGNIVYGVFMLHKKTVNQKTTIYEIQDDRGKMDVVGTGQCHNIPCEEGDKLQLFCFRLRKKNQMSKLISEMHSFIQIKKKTNPRNNDPKSMKLPQEQRQLPYPSEASTTFPESHLRTPQMPPTTPSSSFFTKKSEDTISKMNDFMRMQILKEGSHFPGPFMTSIGPAESHPHTPQMPPSTPSSSFLTTLKPRLKTEPEEVSIEDSAQSDLKEVMVLNATESFVYEPKEQKKMFHATVATENEVFRVKVFNIDLKEKFTPKKIIAIANYVCRNGFLEVYPFTLVADVNADRNMEIPKGLIRSASVTPKINQLCSQTKGSFVNGVFEVHKKNVRGEFTYYEIQDNTGKMEVVVHGRLNTINCEEGDKLKLTSFELAPKSGNTGELRSVIHSHIKVIKTRKNKKDILNPDSSMETSPDFFF

SEQ ID NO: 629 - DNA, 3138 bp, Homo sapien
cgggtgccatgcagctttctctaatttgctctcagttcctggctatgaattgctaaactatcagtctcgcgctcaccgcccggctgaggaggtgaaagtttctccccaggaagataaaccgcaaaagacatatattgtgcatgatttgcgccttttctttggctttttctttctttcttcacccccccacccacttttttttttttttttttcaaaaagcagagagggaaaaacggagagtgaaggagcgaggaggcgagcgtgagagaaaggagagagagagaaaagaaagggcgaggggctagtggaggaaggaaggaggggcggctgcgcgaggcggagagagggcgaagcagtcgcggcactggcgctcacattcctctatgctacaaatccaggaggaagtttttttttagggggctgagatgctccatgcctttaaaagggcagccttgacgcgcggccctctcggcagagactgagcggcgagaaagtgcgagccgggccggcagaatctgcctggcgggcgctggagcctgcgttactcgcggcccgcagccgtccggctactttgcgtttggcccggccagcgccgcgcggcgcgcgcgcgccattgcctgcaggctaggacttcgcgaggtgggtcgactcaccctccctcctcctcttcttcctcctcttcctcctcctcttgttcctcctcctcctcccgattttccctcctcggctggcgagggtggggggggcgggggaggccggggctcgccccgagcagccacgatgctcctggacgccggcccccagtacccagcgatcggcgtgaccacctttggcgcgtcccgccaccactccgcgggcgacgtggccgaacgagacgtgggcctgggcatcaacccgttcgccgacggcatgggcgccttcaagctcaaccccagttcgcacgagctggcttcggccggccagacagccttcacgtcgcaggcgccaggctacgcggctgctgcggccctgggccatcaccatcacccgggccacgtcggctcctattccagcgcagccttcaactccacgcgggactttctgttccgcaaccggggttttggcgacgcggcggcggcagccagcgcacagcacagcctctttgctgcatcggccgggggcttcgggggcccacacggccacacggacgccgcgggccacctcctcttccccgggcttcacgagcaggctgccggccacgcgtcgcctaacgtggtcaacgggcagatgaggctcggcttctcgggggacatgtacccgcgaccggagcagtacggccaggtgaccagcccgcgttcggagcactatgctgcgccgcagctgcacggctacgggcccatgaacgtgaacatggccgcgcatcacggcgccggcgccttcttccgctacatgcgccaacccatcaagcaagagctcatctgcaagtggatcgagcccgagcagctggccaaccccaaaaagtcgtgcaacaaaactttcagcaccatgcacgagctagttacgcacgtcaccgtggagcacgtaggtggcccggagcagagtaatcacatctgcttctgggaggagtgtccgcgcgagggcaagcccttcaaagccaaatacaaactggttaaccacatccgcgtgcacacgggcgagaagccctttccctgccccttccctggctgtggcaaggtcttcgcgcgctccgagaatttaaagatccacaaaaggacgcacacaggggagaagcccttcaagtgcgagtttgagggctgtgaccggcgcttcgctaacagcagcgaccgcaagaagcacatgcacgtgcacacgagcgacaagccctatctttgcaagatgtgcgacaagtcctacacgcatcccagttccgtgcgcaaacacatgaaggtccacgaatcctcctcgcagggctcgcagccttcgccggccgccagctctggctacgaatcctccacgcctcccaccatcgtgtctccctccacagacaacccgaccacaagctccttatcgccctcctcctccgcagtccaccacacagccggccacagtgcgctctcttccaattttaacgaatggtacgtttaaaatcagaaacaaaacatcgaacaaaaccctatttaagagacttgatcacacacgtatacacaacattactgaaagaaccctgcgaatcaaaacaacccccacacagaccccgcaatcctcttttaaaaaatctgccaatagacccaggacgagtaagagaggaagcatcaaccttttaaaaatttcctttcgctttcattatttttctttttttggcaaaggcttggtacccaaggtgcggtagggggtcgagggggaggaggccacctgaccaaatgccgccaaccccgagggccagtttcttgtcgaattggtacgggctctctggggcttcggcttctttttttctttgttttcttgtaaatacagaattattagcttaaaactgtactgttgaattctgtaaatagttatatctcggttggagcgggtgggtgggattgtggcgttgtggtctttgcattgggggaggggggagggaccggatgggcggggggagggggagggggaggggtgggcggccgaaagccaactgtttgtactgaatggcaagaatgttctagtaaatgtgtaccaaaatgtgaattactttgtacgattacagtctccacgtcgacctaacccaatattattggtattaatgtgctttttttgtataaagtgcaaacatttcgtcccaaagtctaagtactttagtgcagtaaaatgttgtttcatgtcctgtcaagaattcgtatagtacgagcctggatctgcgtgtcaaactgttccatttgtttatgtaaagtgatattaaaaaagatataaactataactgtccgttacttttggcaaaagatacaaccacataatgtatataattcctagtttccatatttatccgcatgtaaagggccggtttatccatgttacagctcttcaatatttatggctagaagaactcgtatgtacactttagtttccagaactgtttggtaacctttcgtaccttattaaagattcttaaatctcaaa

SEQ ID NO: 630 - protein, 447 aa, Homo sapien [sequence omitted]

SEQ ID NO: 631 - DNA, 503 bp, Homo sapien
gacagcggcttccttgatccttgccacccgcgactgaacaccgacagcagcagcctcaccatgaagttgctgatggtcctcatgctggcggccctctcccagcactgctacgcaggctctggctgccccttattggagaatgtgatttccaagacaatcaatccacaagtgtctaagactgaatacaaagaacttcttcaagagttcatagacgacaatgccactacaaatgccatagatgaattgaaggaatgttttcttaaccaaacggatgaaactctgagcaatgttgaggtgtttatgcaattaatatatgacagcagtctttgtgatttattttaactttctgcaagacctttggctcacagaactgcagggtatggtgagaaaccaactacggattgctgcaaaccacaccttctctttcttatgtctttttactacaaactacaagacaattgttgaaacctgctatacatgtttattttaataaattgatggca

SEQ ID NO: 632 - protein, 93 aa, Homo sapien
MKLLMVLMLAALSQHCYAGSGCPLLENVISKTINPQVSKTEYKELLQEFIDDNATTNAIDELKECFLNQTDETLSNVEVFMQLIYDSSLCDLF

SEQ ID NO: 633 - DNA, 2249 bp, Homo sapien
gtctacttatcaataagcagctgcctgtgcagagtgcaggctgcacctttggacagcctttaaaactgaattctcagaattttagaacaaatttttgtctagaaatgctgactttggttcattaggtagtggtaaaacaggctcccttcgaagctctccttcatcaccttcctaagtgcatgtacagggaagctctccttcatcaccttcctaagtgcatgggggaaaatacctagggctcaacagtcttgagaagtgtggaaacattttctttgtgagtgagaacagatcacctagagaaaggaaaccagattcccatcactgcttctgggtatcagatgctagcgctgcactccattttgcaatggcctcccttgctgcagcaaatgcagagttttgcttcaacctgttcagagagatggatgacaatcaaggaaatggaaatgtgttcttttcctctctgagcctcttcgctgccctggccctggtccgcttgggcgctcaagatgactccctctctcagattgataagttgcttcatgttaacactgcctcaggatatggaaactcttctaatagtcagtcagggctccagtctcaactgaaaagagttttttctgatataaatgcatcccacaaggattatgatctcagcattgtgaatgggctttttgctgaaaaagtgtatggctttcataaggactacattgagtgtgccgaaaaattatacgatgccaaagtggagcgagttgactttacgaatcatttagaagacactagacgtaatattaataagtgggttgaaaatgaaacacatggcaaaatcaagaacgtgattggtgaaggtggcataagctcatctgctgtaatggtgctggtgaatgctgtgtacttcaaaggcaagtggcaatcagccttcaccaagagcgaaaccataaattgccatttcaaatctcccaagtgctctgggaaggcagtcgccatgatgcatcaggaacggaagttcaatttgtctgttattgaggacccatcaatgaagattcttgagctcagatacaatggtggcataaacatgtacgttctgctgcctgagaatgacctctctgaaattgaaaacaaactgacctttcagaatctaatggaatggaccaatccaaggcgaatgacctctaagtatgttgaggtattttttcctcagttcaagatagagaagaattatgaaatgaaacaatatttgagagccctagggctgaaagatatctttgatgaatccaaagcagatctctctgggattgcttcggggggtcgtctgtatatatcaaggatgatgcacaaatcttacatagaggtcactgaggagggcaccgaggctactgctgccacaggaagtaatattgtagaaaagcaactccctcagtccacgctgtttagagctgaccacccattcctatttgttatcaggaaggatgacatcatcttattcagtggcaaagtttcttgcccttgaaaatccaattggtttctgttatagcagtccccacaacatcaaagraccaccacaagtcaatagatytgrgtttaattggaaaaatgtggtgtttcctttgagtttatttcttcctaacattggtcagcagatgacactggtgacttgacccttcctagacacctggttgattgtcctgatccctgctcttagcattctaccaccatgtgtctcacccatttctaatttcattgtctttcttcccacgctcatttctatcattctcccccatgacccgtctggaaattatggagrgtgctcaactggtaaggagaacgtagaagtagccctagggatcctttttgaaactctacagttatcgcagatattctagcttcattgtaagcaatctaggaaataagccctgctgctttctagaaataagtgtgaaggataaattttctttgttgacctatgaagattttagagtttaccttcatatgtttgattttaaatcagtgtataatctagatggtaaaaaatgtgaaattgggattagggacctaccaaaatatttcattaatgctttcaattgacaaattttggcctttctttgataagacaatatgtacatgttttttcaaatattaaagatcttttaactgttggcagttgttatctacagaatcatatttcatatgctgtgtagtttataagtttttcctctatttatcagaataaagaaatacaacatacctgtaaa

SEQ ID NO: 634 - protein, 380 aa, Homo sapien
MASLAAANAEFCFNLFREMDDNQGNGNVFFSSLSLFAALALVRLGAQDDSLSQIDKLLHVNTASGYGNSSNSQSGLQSQLKRVFSDINASHKDYDLSIVNGLFAEKVYGFHKDYIECAEKLYDAKVERVDFTNHLEDTRRNINKWVENETHGKIKNVIGEGGISSSAVMVLVNAVYFKGKWQSAFTKSETINCHFKSPKCSGKAVAMMHQERKFNLSVIEDPSMKILELRYNGGINMYVLLPENDLSEIENKLTFQNLMEWTNPRRMTSKYVEVFFPQFKIEKNYEMKQYLRALGLKDIFDESKADLSGIASGGRLYISRMMHKSYIEVTEEGTEATAATGSNIVEKQLPQSTLFRADHPFLFVIRKDDIILFSGKVSCP

SEQ ID NO: 635 - DNA, 6162 bp, Homo sapien
ggaagcccgaggcagatgccacgcaattctggagctggatacggctgcccacacggggaccccagcatgctggacagcagagagaccccacaggagagccggcaggacatgattgtgaggaccacccaagaaaaattgaaaaccagctcactgactgacaggcagccactctccaaagagtccctgaaccatgctctcgagctctcagtgccagagaaggtgaataatgcccagtgggatgctccagaggaggcgctgtggacgactcgggccgatgggcgggtgcgcctgcgcatagaccccagctgcccacagcttccctacactgtgcatcggatgttctacgaggccctggataagtatggggacctcatcgctttgggcttcaagcgccaggacaagtgggaacacatctcctactcccaatactacctgctcgcccgcagagccgccaagggcttcctgaagctcggcctgaagcaggcccacagtgtggccatcctcggcttcaactccccggagtggttcttctcggcagtgggcacagtatttgcaggtggcatcgtcactggcatctacaccaccagctccccagaggcctgccagtacatcgcttatgactgctgcgccaatgtcatcatggtcgacacgcagaagcagctggaaaagatcctgaagatctggaaacagttgccacatctaaaggcagtcgtgatatataaagaacctcctccaaacaagatggccaatgtgtacacgatggaggaattcatggagctggggaatgaagtgcctgaggaagccctggacgccatcattgacacccagcagcccaaccagtgctgtgtgctagtctacacttccggcaccactgggaaccccaagggcgtgatgctgagtcaagacaatatcacgtggacggcacggtacggcagccaggccggtgacatccggccggcagaagtccagcaggaggtggtagtcagctacctgcccctcagccatattgccgcccagatctacgacctgtggacaggcatccagtggggggcccaggtttgctttgccgaacccgacgccctgaaggggagcctggtgaacacgctgcgggaggtggagcccacatcacacatgggggtgccccgggtatgggagaagatcatggagcgcatccaggaggtggcggctcagtctggcttcatccggcgaaagatgctgctgtgggccatgtcggtgaccttggagcagaacctcacctgccccggcagcgacctgaagcccttcacaaccagactggcagattacctggtgctagccaaggttcgccaggcactgggatttgccaagtgtcaaaagaacttctatggagcggcccccatgatggcagagacacagcacttcttcctgggtctcaacatccgcttgtatgcgggctacggcctcagtgagacctcaggcccccacttcatgtccagtccctacaactaccggctgtacagctcaggcaagttggtgcccggctgtcgggtgaagctggtgaaccaggacgcagagggcattggcgagatctgcctgtggggccgcaccatattcatgggctacctgaacatggaggacaagacttgtgaggccatcgacgaggaaggctggctgcacacgggtgatgctggccgcctggacgccgatggcttcctctacatcactgggcgcctcaaagaattaatcatcacagctggtggggagaatgtgccccctgtgcccatcgaggaggccgtgaagatggagctgcccatcatcagcaacgccatgctcattggggaccagaggaagttcctgtccatgctgctcaccttgaagtgcactctggacccagacacctctgaccagactgataatctgactgaacaagctgtggagttctgccagagggtgggcagcagagccaccacagtgtccgagatcatagagaagaaggatgaggccgtgtaccaggccatcgaagaggggatccggagggtcaacatgaacgcggcggcccggccctaccacatccagaagtgggccattctcgagagagacttctccatttcgggtggagagttgggtcccacgatgaaactgaaacggctcacagttttggagaagtacaaaggtatcattgactccttttaccaagagcaaaaaatgtaatcagggcctatgcctgcagtttctatagaatagagggcaggcgttccgagcctcttcctgagccccaggtctcttcagtctgggcacaggcatttctgccaagtctgttagatctccaggtcagggcacagcactggctctacatttaccaggtcttacgccaacaatagctgacaattccaagaagcttcacgtgtgggtagttttaattcagtttaagtattgctttttgttcaggtgacaaatgagatcagctctccttccagaacgaaagggctgataatttttggccttagttccaggtagattaaaaagctgctagctcacatacaggacagccagcagtaggctgtggagcgggtaggagagagatggctgatactgctcacgtgcgctgcaggaaaagcaatcagtcacaactcacctagcgacctgacttactctggaatcttggcgggcatcgccgaccctattattccattaccaggcactccgccacccacatgccaactgacttgatgcttaataaaactgctgctgcctgtttgattctatttaatgtataatttgaatattaaaccttttaacagaactgtcaacaaggacctgattttttttgtcaattgagcaggtgggaccagtgcagagagtagtgggcatttaactcacaggactgtgcacagcgggcatgcgagtgaccattagtgccctggaataaacaaaggtgcaggatggggtcaagtggcgcattctcataaaagcagccagctctacgttagcctgtcgccaccagaccaccccacttccattctgaatacgggaagcagccattctcagtagcaagctgagccaaaatgaccgaaggcatctgaacaggaaacaggtagagaaagcaaacatctcagttttggaattctttattactttgaacccaagagccactgataactggcacaatccaatgaaacagaggaagcagcagcttaaacaaaggaaaatacatttaagattataagtctgggggggcggttacaagcttaaaaagtgacccagacagggatatcattgctaaaaaaaaaaaaatccccttgtgacctgggtacattttgcaaagccacaggtttgcaatgttacacaagggccaaaggaggccatgagttgtctttggttgtggggacagagggtaactgttcatgaaaatagtgagtgtctgaagattaagaaaatcatgctgcagcagaggagaagggagaggaagacaggaaggaaaaggagatgcctgagggtcaaaagctgagcccaagcctaagcccaagctcaagctcaagccccagcatggcataattttgtgaattaactcaggctgagttgcctccagtctttggaatgtcatcttatactggtactgctgaggcagagggcagtaattggtgctttgggataggagaaggggcagttgctgaaatacaaaattaatagcatcccaagttcctcaattgcagccaaaatacatgtgttcgggcctttcggcagtatcgcccccagaactacctgctgtagtgtggtccattcccagacagcaacatgcaagaataagtttacaatacacttagcccttctggcttcagatcaggggctcagaggctgtgacaactcatgatgctgaaaatgtatccagtgaaaatgaagtactagctctctgcttcattaaaagctcttggaaagaatattaaatctcaagacaacaaaataattgaacacacaatacatttgtgtctttgtatccaatatattacctttgtcttattaacaaaaattatatctctcattatatatttcttggatctgaagtttttattcacactcagtaatttctgtaaaggacaaatctgtctctattttccatatcatttagaaatataccacattcactctttttgatgtgaactttcccaggaaaattctcttgtgcccatttagttttagaagagtgtcattttgtgctattatgtcaatatcctgttttatttccattatgtttttcaaaaaccgaagaaaataaggtttttcttaaaaagttagacattttctcttgttaattctgtatcctgttatttacagctgaagagaaactattttaacttaagtgtaaaatggtttagaatagcaaatgatacagtccactcagagtttacaaaaaaaacatttaccaggtagacacttaataaataaaacaagcacttggaaaaagttctttgaaaacagacctagggacatccacctgcatcttttgcacagattttgttaagaaaaggccagatctaaaaatgtactgtcaagaaacaagcaaaccaatgcatacatacgtaggtattctaaacagaggttcatgtggtgtccatttagagtgactgatgtaaatgccagttgtagaagtgttaatctaaatcttttactcggcgacagatttcctctgtgaagtctgagcattttgcattgcctcccaaatcttttgtcaagctctgagaaaaggaaaaagcaaaaataaaagatgtatccgcaaactaaactaaaccaaggagattttaaagccctcagtgagatgccacctgggcaagttactcggctgctctttcatttagttcctcatttcaaagtgaggaaccactccaccaccatctacccagcccaggaggatcgggatccaatctcatagtgtatacaacagcactctgcaaagaataaggtgctcttgatgcaaagggaggcagggagctttaccaaaattttccctttgttcacacaatagaccctaacccagattagttggtcatggatatttaaataaaagcgaatctaaataagaagtttaaaaatccttgggaaatatgtctcaggaatagacctgagacatattttgatctatttttgtttttattattattttttttttagatggagtctcactctgttgcccaggctggagtgcagtggcacgatcccagctcaccacaacctctgcctcctgggttcaagcgattctcctgcctcagcgtcctgaatagctggaattacaagtgcatgccaccatacccaactaatttttgtatctgatctatttttggaggctgggacacaaatacgaaagaaatatttaaatcattaactctttttttttttttaagagatggggtctcactatgtggcccaggctggtcttgaactcagaggctaaggtgatcctcctgcctcagcctatagctgcaactacaggcatgcaccaccacacctgcctaaatcattaactcttaaacctccctctttaggaaagaaagcctcccatacaactgatctgttctaccagcttatcctttctttcctgcatacagaccccaatatatttaattctctttatctttccatcctacacaataaaagggcccactatgtaattcaggcacctctctactgggctgtagattataacttcccaaatataactttaaagaataagaaaatcatatgacctccaatgtgactatcaggctgttaaaaacaagcctgaatttcttgtattttggccacacgatataatttcaaattacagaatttttttaaaagaagggaccaactttgaagatattacgctaagtgaaataagccagactcaaaggacaaatactgtatgattccacttacatgaggtacctagagtagtcaaattcatagagacaggaagcagaatggcaggtgtcagaggatgggagggggaagggaaagttactgtttaacgggtgcagagtctcagtttgagaaaatgaaactggtctggagatgactgatggtgatggttacattacaatgtgaatgtacttaacattattgaactgtatacctaaatacggctaaaatggcaaattttatgttatgcatatttttcacaatttttgttaaaaaggacctcaaattagg

SEQ ID NO: 636 - DNA, 2357 bp, Homo sapien
gaatcacgacccctccctgccatgtatccgcagggcagacatccggctccccatcaacccgggcagccgggatttaaattcacggtggctgagtcttgtgacaggatcaaagacgaattccagttcctgcaagctcagtatcacagcctcaaagtggagtacgacaagctggcaaacgagaagacggagatgcagcgccattatgtgatgtactatgagatgtcctatggcttgaacattgaaatgcacaagcagacagagattgcgaagagactgaacacaattttagcacagatcatgcctttcctgtcacaagagcaccagcagcaggtggcgcaggcagtggagcgcgccaagcaggtcaccatgacggagctgaacgccatcatcgggcagcagcagctccaggcgcagcacctctcccatgccacacacggccccccggtccagttgccaccccacccgtcaggtctccagcctccaggaatccccccagtgacagggagcagctccgggctgctggcactgggcgccctgggcagccaggcccatctgacggtgaaggatgagaagaaccaccatgaactcgatcacagagagagagaatccagtgcgaataactctgtgtcaccctcggaaagcctccgggccagtgagaagcaccggggctctgcggactacagcatggaagccaagaagcggaaggtggaggagaaggacagcttgagccgatacgacagtgatggagacaagagtgatgatctggtggtggatgtttccaatgaggaccccgcaacgccccgggtcagcccggcacactcccctcctgaaaatgggctggacaaggcccgtagcctgaaaaaagatgcccccaccagccctgcctcggtggcctcttccagtagcacaccttcctccaagaccaaagaccttggtcataacgacaaatcctccacccctgggctcaagtccaacacaccaaccccaaggaacgacgccccaactccaggcaccagcacgaccccagggctcaggtcgatgccgggtaaacctccgggcatggacccgataggtataatggcctcggctctgcgcacgcccatctccatcaccagctcctatgcggcgcccttcgccatgatgagccaccatgagatgaacggctccctcaccagtcctggcgcctacgccggcctccacaacatcccaccccagatgagcgccgccgccgctgctgcagccgctgcctatggccgatcgccaatggtgagctttggagctgttggttttgaccctcaccccccgatgcgggccacaggcctcccctcaagcctggcctccattcctggaggaaaaccagcgtactcattccatgtgagtgctgatgggcagatgcagcccgtgcccttcccccacgacgccctggcaggccccggcatcccgaggcacgcccggcagatcaacacactcagccacgggggggtggtgtgtgccgtgaccatcagcaaccccagcaggcacgtctacacaggtggcaagggctgcgtgaagatctgggacatcagccagccaggcagcaagagccccatctcccagctggactgcctgaacagggacaattacatgcgctcctgcaagctgcaccctgatgggcgcacgctcatcgtgggcggcgagggcagcacgctcaccatctgggacctggcctcgcccacgccccgcatcaaggccgagctgacgtcctcggctcccgcctgttatgccctggccattagccctgacgccaaagtctgcttctcctgctgcagcgatgggaacattgctgtctgggacctgcacaaccagaccctggtcaggcagttccagggccacacagatggggccagctgcatagacatctcccatgatggcaccaaactgtggacagggggcctggacaacacggtgcgctcctgggacctgcgggagggccgacagctacagcagcatgacttcacttcccagatcttctcgctgggctactgccccactggggagtggctggctgtgggcatggagagcagcaacgtggaggtgctgcaccacaccaagcctcacaagtaccagctgcacctgcacgagagctgcgtgctctccctcaagttcgcctactgcggcaagtggttcgtgagcactgggaaagataaccttctcaacgcctggaggacgccttatggagccagcatatcccagtctaaagaatcctcgtctgtcttgagttgtgacatttcagcggatgacaaatacattgtaacaggctctggtgacaagaaggccacagtttatgaggtcatctactaaacaagaactccagcagg

SEQ ID NO: 637 - protein, 772 aa, Homo sapien
MYPQGRHPAPHQPGQPGFKFTVAESCDRIKDEFQFLQAQYHSLKVEYDKLANEKTEMQRHYVMYYEMSYGLNIEMHKQTEIAKRLNTILAQIMPFLSQEHQQQVAQAVERAKQVTMTELNAIIGQQQLQAQHLSHATHGPPVQLPPHPSGLQPPGIPPVTGSSSGLLALGALGSQAHLTVKDEKNHHELDHRERESSANNSVSPSESLRASEKHRGSADYSMEAKKRKVEEKDSLSRYDSDGDKSDDLVVDVSNEDPATPRVSPAHSPPENGLDKARSLKKDAPTSPASVASSSSTPSSKTKDLGHNDKSSTPGLKSNTPTPRNDAPTPGTSTTPGLRSMPGKPPGMDPIGIMASALRTPISITSSYAAPFAMMSHHEMNGSLTSPGAYAGLHNIPPQMSAAAAAAAAAYGRSPMVSFGAVGFDPHPPMRATGLPSSLASIPGGKPAYSFHVSADGQMQPVPFPHDALAGPGIPRHARQINTLSHGGVVCAVTISNPSRHVYTGGKGCVKIWDISQPGSKSPISQLDCLNRDNYMRSCKLHPDGRTLIVGGEGSTLTIWDLASPTPRIKAELTSSAPACYALAISPDAKVCFSCCSDGNIAVWDLHNQTLVRQFQGHTDGASCIDISHDGTKLWTGGLDNTVRSWDLREGRQLQQHDFTSQIFSLGYCPTGEWLAVGMESSNVEVLHHTKPHKYQLHLHESCVLSLKFAYCGKWFVSTGKDNLLNAWRTPYGASISQSKESSSVLSCDISADDKYIVTGSGDKKATVYEVIY

SEQ ID NO: 638 - DNA, 576 bp, Homo sapien
cttctctgggacacattgccttctgttttctccagcatgcgcttgctccagctcctgttcagggccagccctgccaccctgctcctggttctctgcctgcagttgggggccaacaaagctcaggacaacactcggaagatcataataaagaattttgacattcccaagtcagtacgtccaaatgacgaagtcactgcagtgcttgcagttcaaacagaattgaaagaatgcatggtggttaaaacttacctcattagcagcatccctctacaaggtgcatttaactataagtatactgcctgcctatgtgacgacaatccaaaaaccttctactgggacttttacaccaacagaactgtgcaaattgcagccgtcgttgatgttattcgggaattaggcatctgccctgatgatgctgctgtaatccccatcaaaaacaaccggttttatactattgaaatcctaaaggtagaataatggaagccctgtctgtttgccacacccaggtgatttcctctaaagaaacttggctggaatttctgctgtggtctataaaataaacttcttaacatgctt

SEQ ID NO: 639 - protein, 146 aa, Homo sapien
MRLLQLLFRASPATLLLVLCLQLGANKAQDNTRKIIIKNFDIPKSVRPNDEVTAVLAVQTELKECMVVKTYLISSIPLQGAFNYKYTACLCDDNPKTFYWDFYTNRTVQIAAVVDVIRELGICPDDAAVIPIKNNRFYTIEILKVE

SEQ ID NO: 640 - DNA, 1560 bp, Homo sapien
ggcacgaggcctgagctcaggagtttgagaccagcctgtctctactaacaatataaaaattagctgggagtcacggtgggcgcctgtaatcccagctactcgggaggctgaggcaggagaattgcttgaacccaggagacagaggttgtagtgagctgagatcgcaccactgcactctagccttggcaacagtgcaagactgtctcaaaaacagcaacagagagcaggacgtgagacttctacctgctcactcagaatcatttctgcaccaaccatggccacgtttgtggagctcagtaccaaagccaagatgcccattgtgggcctgggcacttggaagtctcctcttggcaaagtgaaagaagcagtgaaggtggccattgatgcaggatatcggcacattgactgtgcctatgtctatcagaatgaacatgaagtgggggaagccatccaagagaagatccaagagaaggctgtgaagcgggaggacctgttcatcgtcagcaagttgtggcccactttctttgagagaccccttgtgaggaaagcctttgagaagaccctcaaggacctgaagctgagctatctggacgtctatcttattcactggccacagggattcaagtctggggatgaccttttccccaaagatgataaaggtaatgccatcggtggaaaagcaacgttcttggatgcctgggaggccatggaggagctggtggatgaggggctggtgaaagcccttggggtctccaatttcagccacttccagatcgagaagctcttgaacaaacctggactgaaatataaaccagtgactaaccaggttgagtgtcacccatacctcacacaggagaaactgatccagtactgccactccaagggcatcaccgttacggcctacagccccctgggctctccggatagaccttgggccaagccagaagacccttccctgctggaggatcccaagattaaggagattgctgcaaagcacaaaaaaaccgcagcccaggttctgatccgtttccatatccagaggaatgtgattgtcatccccaagtctgtgacaccagcacgcattgttgagaacattcaggtctttgactttaaattgagtgatgaggagatggcaaccatactcagcttcaacagaaactggagggcctgtaacgtgttgcaatcctctcatttggaagactatcccttcgatgcagaatattgaggttgaatctcctggtgagattatacaggagattctctttcttcgctgaagtgtgactacctccactcatgtcccattttagccaagcttatttaagatcacagtgaacttagtcctgttatagacgagaatcgaggtgctgttttagacatttatttctgtatgttcaactaggatcagaatatcacagaaaagcatggcttgaataaggaaatgacaattttttccacttatctgatcagaacaaatgtttattaagcatcagaaactctgccaacactgaggatgtaaagatcaataaaaaaaataataatcataaaaaaaaaaaaaaaaaa

SEQ ID NO: 641 - protein, 316 aa, Homo sapien
MATFVELSTKAKMPIVGLGTWKSPLGKVKEAVKVAIDAGYRHIDCAYVYQNEHEVGEAIQEKIQEKAVKREDLFIVSKLWPTFFERPLVRKAFEKTLKDLKLSYLDVYLIHWPQGFKSGDDLFPKDDKGNAIGGKATFLDAWEAMEELVDEGLVKALGVSNFSHFQIEKLLNKPGLKYKPVTNQVECHPYLTQEKLIQYCHSKGITVTAYSPLGSPDRPWAKPEDPSLLEDPKIKEIAAKHKKTAAQVLIRFHIQRNVIVIPKSVTPARIVENIQVFDFKLSDEEMATILSFNRNWRACNVLQSSHLEDYPFDAEY

SEQ ID NO: 642 - DNA, 1327 bp, Homo sapien
ggtcgacgacgtggcagccgggatgcactaggcaaagccagctgggctcctgagtccggtgggtacttggagaacttactacgtctagctggaggattgtaaatgtaccaatcagcatgctgtgtctagctcaagaactcaagctccatgaggagatgtttcattgtcgagagcagtcatgatggcctgcactccacacaatgcaacagagtgaaagagcaggttctgcttctttggtgtagtcctgaagcttcctaagaaacttcacatcaggtgatggataggagcaaccctgtaaaaccagccttagactattttttaaacaggctggtgaattaccagatctccgtcaagtgcagtaaccagttcaagttggaagtgtgtcttttgaatgcagaaaacaaagtcgtggacaaccaggctgggacccagggccagctgaaggtgctgggtgccaacctctggtggccgtacctgatgcacgaacaccccgcctacctctactcgtgggaggatggtgattgctcacaccaaagccttggacccctcccagcctgtgacctttgtgaccaactccacctacgcagcagacaagggggctctgtatgtggatgtgatccgtgtgaacagctactactcttggtatcgcaactacgggcacctggagttgattcagctgcagctggccgcccagtttgagaattggtgtaagacatcacaatcccattattcagagcgcgtatggagtggaaacgcttgtagggtttcaccagtctttcccagggaactccgatgaagtgttccaacaaaatgagcgagtgaaccaagaagaggatgacattagatccaggagatacaacagaggagataatctccaggatgcctgtgaagaaagatccctggatcccaggatgattataggacaagttgttcataatccagcaggccagaagacttccagggaaactcattcaaggaggtgaaaatgatggatgactcctccaagatgaaaatggaccagccgcagtgctcacgcctgtaataccagcactttgggaggctgaggcaggcggatcacttgaggtcaggagtttgaaactagcctggccaacgtggcaaaactccatctctattaaaaatacaaaaattagccaggcatagtggtgcatgcctgtagtcccagctacttgggatgccgaggcaggaagaattgcttgaacctgggaggcagagtctgcagtgagccgagatcatgccactgcactccagcctgggtgacagagccactccgtctcaaaaaaaaaaaaaaaaaaaaaaaaaaaaaaaa

SEQ ID NO: 643 - protein, 140 aa, Homo sapien [sequence omitted]

SEQ ID NO: 644 - DNA, 627 bp, Homo sapien
gcggccgcaagctcggcactcacggctctgagggctccgacggcactgacggccatggcgcgttcgaacctcccgctggcgctgggcctggccctggtcgcattctgcctcctggcgctgccacgcgacgcccgggcccggccgcaggagcgcatggtcggagaactccgggacctgtcgcccgacgacccgcaggtgcagaaggcggcgcaggcggccgtggccagctacaacatgggcagcaacagcatctactacttccgagacacgcacatcatcaaggcgcagagccagctggtggccggcatcaagtacttcctgacgatggagatggggagcacagactgccgcaagaccagggtcactggagaccacgtcgacctcaccacttgccccctggcagcaggggcgcagcaggagaagctgcgctgtgactttgaggtccttgtggttccctggcagaactcctctcagctcctaaagcacaactgtgtgcagatgtgataagtccccgagggcgaaggccattgggtttggggccatggtggagggcacttcaggtccgtgggccgtatctgtcacaataaatggccagtgctgcttcttgcaaaaaaaaaaaaaaaaaaa

SEQ ID NO: 645 - protein, 149 aa, Homo sapien
MARSNLPLALGLALVAFCLLALPRDARARPQERMVGELRDLSPDDPQVQKAAQAAVASYNMGSNSIYYFRDTHIIKAQSQLVAGIKYFLTMEMGSTDCRKTRVTGDHVDLTTCPLAAGAQQEKLRCDFEVLVVPWQNSSQLLKHNCVQM

SEQ ID NO: 646 - DNA, 2449 bp, Homo sapien
cgctgccaccatggacagtagcacctggagccccaagaccaccgcggtcacccggcctgttgagacccacgagctcattcgcaatgcagccgatatctccatcatcgttatctacttcgtggtagtgatggccgtcggactgtgggctatgttttccaccaatcgtgggactgttggaggcttcttcctggcaggccgaagtatggtgtggtggccgattggagcctccctctttgctagtaacattggaagtggccactttgtggggctggccgggactggggcagcttcaggcatcgccattggaggctttgaatggaatgccctggttttggtggttgtgctgggctggctgtttgtccccatctatattaaggctggggtggtgacaatgccagagtacctgaggaagcggtttggaggccagcggatccaggtctacctttcccttctgtccctgctgctctacattttcaccaagatctcggcagacatcttctcgggggccatattcatcaatctggccttaggcctgaatctgtatttagccatctttctcttattggcaatcactgccctttacacaattacagggggcctggcggcggtgatttacacggacaccttgcagacggtgatcatgctggtggggtctttaatcctgactgggtttgcttttcacgaagtgggaggctatgacgccttcatggaaaagtacatgaaagccattccaaccatagtgtctgatggcaacaccacctttcaggaaaaatgctacactccaagggccgactccttccacatcttccgagatcccctcacgggagacctcccatggcctgggttcatctttgggatgtccatccttaccttgtggtactggtgcacagatcaggtcattgtgcagcgctgcctctcagccaagaatatgtctcacgtgaagggtggctgcatcctgtgtgggtatctaaagctgatgcccatgttcatcatggtgatgccaggaatgatcagccgcattctgtacacagaaaaaattgcctgtgtcgtcccttcagaatgtgagaaatattgcggtaccaaggttggctgtaccaacatcgcctatccaaccttagtggtggagctcatgcccaatggactgcgaggcctgatgctatcagtcatgctggcctccctcatgagctccctgacctccatcttcaacagcgccagcaccctcttcaccatggacatctacgccaaggtccgcaagagagcatctgagaaagagctcatgattgccggaaggttgtttatcctggtgctgattggcatcagcatcgcctgggtgcccattgtgcagtcagcacaaagtgggcaactcttcgattacatccagtccatcaccagttacttgggaccacccattgcggctgtcttcctgcttgctattttctggaagagagtcaatgagccaggagccttttggggactgatcctaggacttctgattgggatttcacgtatgattactgagtttgcttatggaaccgggagctgcatggagcccagcaactgtcccacgattatctgtggggtgcactacttgtactttgccattatcctcttcgccatttctttcatcaccatcgtggtcatctccctcctcaccaaacccattccggatgtgcatctctaccgtctgtgttggagcctgcgcaacagcaaagaggagcgtattgacctggatgcggaagaggagaacatccaagaaggccctaaggagaccattgaaatagaaacacaagttcctgagaagaaaaaaggaatcttcaggagagcctatgacctattttgtgggctagagcagcacggtgcacccaagatgactgaggaagaggagaaagccatgaagatgaagatgacggacacctctgagaagcctttgtggaggacagtgttgaacgtcaatggcatcatcctggtgaccgtggctgtcttttgccatgcatattttgcctgagtcctaccttttgctgtagatttaccatggctggactcttactcaccttcctttagtctcgtcctgtggtgttgaagggaaatcagccagttgtaaattttgcccaggtggataaatgtgtacatgtgtaattataggctagctggaagaaaaccattagtttgctgttaatttatgcatttgaagccagtgtgatacagccatctgtacctactggagccgcagaagggagtccactcagtcacatccagaaaaaggcagactaagaatcagaagccatgtgattgatgtctgacgtgagtctgtctcaggtagattccgggtgtcagtgtggtttataatccttgaatattgttttagaaactttggtctccctggttcctgccacttttcctgtccgtcctcctccccattttttttttaaaagaaagctgttttcccctc

SEQ ID NO: 647 - protein, 664 aa, Homo sapien
MDSSTWSPKTTAVTRPVETHELIRNAADISIIVIYFVVVMAVGLWAMFSTNRGTVGGFFLAGRSMVWWPIGASLFASNIGSGHFVGLAGTGAASGIAIGGFEWNALVLVVVLGWLFVPIYIKAGVVTMPEYLRKRFGGQRIQVYLSLLSLLLYIFTKISADIFSGAIFINLALGLNLYLAIFLLLAITALYTITGGLAAVIYTDTLQTVIMLVGSLILTGFAFHEVGGYDAFMEKYMKAIPTIVSDGNTTFQEKCYTPRADSFHIFRDPLTGDLPWPGFIFGMSILTLWYWCTDQVIVQRCLSAKNMSHVKGGCILCGYLKLMPMFIMVMPGMISRILYTEKIACVVPSECEKYCGTKVGCTNIAYPTLVVELMPNGLRGLMLSVMLASLMSSLTSIFNSASTLFTMDIYAKVRKRASEKELMIAGRLFILVLIGISIAWVPIVQSAQSGQLFDYIQSITSYLGPPIAAVFLLAIFWKRVNEPGAFWGLILGLLIGISRMITEFAYGTGSCMEPSNCPTIICGVHYLYFAIILFAISFITIVVISLLTKPIPDVHLYRLCWSLRNSKEERIDLDAEEENIQEGPKETIEIETQVPEKKKGIFRRAYDLFCGLEQHGAPKMTEEEEKAMKMKMTDTSEKPLWRTVLNVNGIILVTVAVFCHAYFA

SEQ ID NO: 648 - DNA, 3139 bp, Homo sapien
acagacagaaacgagggaagagagagaaattggggaccctgaagaaagggggccagcagcaggtaggtgccatcagggacaagaacagcacctcccagggtgggagaccccaggcctttctggcagcaggtctggatggaaagtggacaggaggctcacccgtctgcatcccctgctcctgcccctgctcggctacaaaaaccaaagggacagcagctgaccacaccccggtagccactcctgcataaagctctcccctcctgtgaccagctgaggacctcaggctgcagcggagccatgcccagatacacggtgcacgtacgtggggaatggctggcagtgccctgccaggacgcgcagctcactgtgggctggctgggccgggaggccgtgaggcgctatatcaagaataagcccgacaatggtggcttcacctccgtggatgacgcgcacttccttgtgcgccggtgcaagggcctgggcctgctggacaacgaggaccggctcgaggtggccctagagaacaacgagttcgtggaagtggttatagagggtgatgccatgtctcctgacttcattccatctcaaccagaaggagtttatctatacagcaagtaccgggagcctgaaaagtacatcgagttagatggagaccgtctgaccacggaggatctggtcaacttgggaaagggacgctacaaaataaagctcaccccaacagctgagaagagggtgcagaaatccagggaggtcatagatagcatcataaaagagaaaacagttgtttacggtattactacaggttttgggaaatttgccagaactgtaattcctatcaataagctacaggagcttcaggtcaacttagtacgctcacattcttcaggtgttgggaaaccactaagtcctgagaggtgtcggatgctcttggctttaaggatcaatgtcttagccaaaggatacagtggcatttccctggagaccctcaaacaagtcatagaaatgtttaatgcctcctgcctgccctatgtcccagagaaaggaaccgttggtgccagtggagaccttgccccactctctcatcttgctcttgggctagttggagaagggaagatgtggtctccgaagagtggctgggctgatgctaaatacgtgctagaagcccatggattgaaaccagttattttaaaaccaaaagagggcctggcactcatcaatgggacgcagatgatcacatccctgggctgtgaagctgtagagcgagccagtgctattgcacggcaggctgacattgtggcagccctgacccttgaggtgctgaagggcaccaccaaagcctttgacactgacattcatgctcttcgacctcaccgtgggcaaattgaagttgcttttcggtttcggtcactcttggactcagatcaccacccatcagaaatagcagagagtcacaggttctgtgatcgcgtccaggatgcatacaccttgcgctgctgtccacaggtccatggtgtggtgaatgatacaatagcatttgtgaagaacatcattaccacagaactgaacagcgcaacagataatcctatggtctttgccaataggggagagacagtttctggaggaaacttccatggtgaatacccagccaaagccctagactacttggccattggcatccatgaacttgctgcaatcagtgagagaagaatcgagcggctctgcaatccctccctcagtgagctgcctgccttcctggtggctgaaggtggtctgaactctgggttcatgatagctcactgcacggcagcagcccttgtttctgagaacaaggctctgtgccatccctcgtctgttgactccctctccaccagcgcagccacggaggaccacgtctccatgggaggatgggcagcaaggaaagccctcagggtcatcgagcatgtggagcaagtgctggccatcgagctccttgcagcctgccagggcatagagtttctacgtcccctgaaaacaaccactccgctggagaaggtctatgacctggtgcgctctgttgtaaggccctggataaaagatcgcttcatggccccggacatcgaggcagcccacaggctgctcctggagcagaaggtttgggaagtagctgctccatacattgaaaaatacagaatggagcatattccagaatcaagacctctttctccaacagccttttcactgcaatttctgcacaagaaatccaccaaaatcccggagtctgaggacctttaatgggctttgtcatgaagtagcagatgagagggcagtcagtttagcacaaagcaatactaggctgaaggagagacctgagaactttcctaggtagatcaatccattgtatcattcagttcttctaaagcctacgttggttaggctgatggcagtattatagttgctaaattcagcactgtgttcctgttgtcgtggttcaagacccaccaggtattttcagattataaaacttttctttctttcttaacagtttcaacaggccactcactcttaagggtgagaagaataaccacaattgtatgtgcctgttttttactcttagcattagatgaattcaaatttggaaacagattgatagcaattttttctaaaaacattagacttttgttaacctttttttttttttttaaatttgcttcaacaagctctccaccagttgactttctttggctaattttactttgcatgatatgccttaatatgccttcataaataaccattttaagtcataatttgtccttaagctgcttttttcttctattaattggatcatagtaaagagtagtcaatagggtcttcagctattaattgtagaggtgattaaaaccaacaaggagtttcatgtgcaaaggagataaggaatgaatataaagattgctatttgggtggctcttattaaactgtgtattttgtacttatcactacacgtatcccccaaatgcttacatgggagtttgaggttagtattttcacttccttggtgttagtactctattcacattcttattgtaaccttcctcatttcacagataaggaatctttggggattaaccaacctcctttctgtaatggtaatcattaaaataag

SEQ ID NO: 649 - protein, 657 aa, Homo sapien
MPRYTVHVRGEWLAVPCQDAQLTVGWLGREAVRRYIKNKPDNGGFTSVDDAHFLVRRCKGLGLLDNEDRLEVALENNEFVEVVIEGDAMSPDFIPSQPEGVYLYSKYREPEKYIELDGDRLTTEDLVNLGKGRYKIKLTPTAEKRVQKSREVIDSIIKEKTVVYGITTGFGKFARTVIPINKLQELQVNLVRSHSSGVGKPLSPERCRMLLALRINVLAKGYSGISLETLKQVIEMFNASCLPYVPEKGTVGASGDLAPLSHLALGLVGEGKMWSPKSGWADAKYVLEAHGLKPVILKPKEGLALINGTQMITSLGCEAVERASAIARQADIVAALTLEVLKGTTKAFDTDIHALRPHRGQIEVAFRFRSLLDSDHHPSEIAESHRFCDRVQDAYTLRCCPQVHGVVNDTIAFVKNIITTELNSATDNPMVFANRGETVSGGNFHGEYPAKALDYLAIGIHELAAISERRIERLCNPSLSELPAFLVAEGGLNSGFMIAHCTAAALVSENKALCHPSSVDSLSTSAATEDHVSMGGWAARKALRVIEHVEQVLAIELLAACQGIEFLRPLKTTTPLEKVYDLVRSVVRPWIKDRFMAPDIEAAHRLLLEQKVWEVAAPYIEKYRMEHIPESRPLSPTAFSLQFLHKKSTKIPESEDL

SEQ ID NO: 650 - DNA, 2088 bp, Homo sapien
cttaactcctgatcttttgtaaaactattgctagtcataatggatttctataacctgaaagttgatataatacagcacgtggagcactttaaaaacaaagaaacttgaaaataattttattttttacctttacatggtgtgttctagactactgcattatgactacataaacctacctgagctcttacaagtacagaattgtgagacagaggttttgtgatggaaaacatacacatagggaaaaataccaaactgagcaatataaatttcacagctcacatcttagccagtacaaagaaactttcacatggggtgaatattataatacttgaatttgagacttaatactgtatatgaattaatcatcccactgtaataactgacatcttcaaatagttgggcttatgaaaaatttgactaagacattttattttatactttatgtaaatgtgaaataagttctggtcatataaatatgtagaatgcatgtgtgtgaactctatgaagtgaagtgtggtggccttttatgtttcagagtactcaagtgtacaattgatttatataaaaatgcaaaatgaactcaggtcattttgaaattaatattaatatttttgttgtttaactttaaagctagctcccctaactttatatattttttgggaaaaaatacctaaaaacctcagcctacaaagactctcagaaatgccaaagattttcaaggaaattcatattatatatttcaaaaatgatttatcaatgttatctaccaaaagaaataattttatttttcccctttggggagatattatcctctaatatgagaatcagatccctagattctatttctacctatactattaaactcaaccttgaacctgagcttggttgtttctgtgccttagtttctccactcgtaaacaatttcctataaaaattgtttaaacaccaaccaaaatttaccatatgtattcattctcttgccttaaagatcacttcttaacttacatttggctctcaccctctaaaaatttgtagtttggagagtaactgaaagcacaattttaagaaacatgttttcctcacaaaatatattgtaatctgattttcctatcttgtattcatgcagaaaattggagaaaatgtgtattgtcttgtgccattctgcaatatgaatttctcaggaaaaagatgtttcaatggcaatactttcttaaataattcaagatgggtgtgaggacctatcttattagtttagtgctgtgttaaccatttgtgaattacttcttgtttaaaggaagttgtcaaaaaattttaagattctaaatggaatacacgaataaagtaagccttagaatagaaacctcacaaaaagttgtcatttgcggttgataattaacataggtgttttattctctcaactccttagtaccagagccaaatacaatttagttttcagaaatcttatcaatattgttctatttacctacttataaatctgcagataaccacttgaaccaggcaaatacactgaagataaaggttatttctttttttagctttgaatttgtcatgaccattttagtcttgcagatagcagggcagccccttggggcaaggatttactctgggaggtaccgttaagagccttctttccccctttgaaagatccttttacaatgttaaagtatactagttgcaagaacaagcaggatttgcaggttgctttaccagcatgagtctcatttttctggcttaaaatctgggactgtgaaattattccataggaaagtgaatgttattttgcagaattagcctcttacataaaagtatttgttgaagtgtctttaaaattgctatcatgagcaaaactggttgctgtaatgcttgtttttctgtatttatttacacattaaattcttacaaaacaaaatgtgttcgtttgttttatagtaagatgttttattttgaacttatttaaatgtttatttgttagagaaaactaatttgttaatatagatcttaactagtaactattaagcagggatgtttgttccaaatattcttgaataaacaatcaccacaaacaac

SEQ ID NO: 651 - protein, 61 aa, Homo sapien [sequence omitted]

SEQ ID NO: 652 - DNA, 2166 bp, Homo sapien
tgcgggtgaggctggcgcccgtaccatgagcgaggcggacgggctgcgacagcgccggcccctgcggccgcaggtcgtcacagacgatgatggccaggccccggaggctaaggacggcagctcctttagcggcagagttttccgagtgaccttcttgatgctggctgtttctctcaccgttcccctgcttggagccatgatgctgctggaatctcctatagatccacagcctctcagcttcaaagaacccccgctcttgcttggtgttctgcatccaaatacgaagctgcgacaggcagaaaggctgtttgaaaatcaacttgttggaccggagtccatagcacatattggggatgtgatgtttactgggacagcagatggccgggtcgtaaaacttgaaaatggtgaaatagagaccattgcccggtttggttcgggcccttgcaaaacccgagatgatgagcctgtgtgtgggagacccctgggtatccgtgcagggcccaatgggactctctttgtggccgatgcatacaagggactatttgaagtaaatccctggaaacgtgaagtgaaactgctgctgtcctccgagacacccattgaggggaagaacatgtcctttgtgaatgatcttacagtcactcaggatgggaggaagatttatttcaccgattctagcagcaaatggcaaagacgagactacctgcttctggtgatggagggcacagatgacgggcgcctgctggagtatgatactgtgaccagggaagtaaaagttttattggaccagctgcggttcccgaatggagtccagctgtctcctgcagaagactttgtcctggtggcagaaacaaccatggccaggatacgaagagtctacgtttctggcctgatgaagggcggggctgatctgtttgtggagaacatgcctggatttccagacaacatccggcccagcagctctggggggtactgggtgggcatgtcgaccatccgccctaaccctgggttttccatgctggatttcttatctgagagaccctggattaaaaggatgatttttaagctctttagtcaagagacggtgatgaagtttgtgccgcggtacagcctcgtcctagaactcagcgacagcggtgccttccggagaagcctgcatgatcccgatgggctggtggccacctacatcagcgaggtgcacgaacacgatgggcacctgtacctgggctctttcaggtcccccttcctctgcagactcagcctccaggctgtttagccctcccagatagctgcccctgccacgcaggccaggagtcttcacactcaggcaccaggcctggtccaggaggagctgtggacacagtcgtggttcaagtgtccacatgcacctattagtccctgagaggtggtgggaatggctgcttcattcctcgaggatgcccgggccccacctgggcttgtctttctgtttagagggaagtgtaacatatctgccatgaggaacataaattcatgtaaagccattttctcttaaacaaaacaaaactttctaagtacagtcattctctaggatttgggaagctccttgcacttggaacagggctcaggtgggtggagcagtaaggcactacccagagagcttgctgctgcggccctgtcctgcggcctcaaagttcttctttactatatataacgtgcggtcatacctttcttcgttgtggtggggatggaagagcagagggagcatggcccaggggtgttgaggccagcggtgagagccgtgttagccaagacatggaactgtgttctcaagggttatgtggggcgtgggctctccatagtgtgtatgaaaagcttgttgactctagcggctcagagaggactttgctgggtttctttctgtgaatatctccgtgctgaccatgctggaattggatgattctgcaattcgggacctactgcaggggtccgtttagtaacgtcttgtctgtgatctttgttcttgacctctagaccccaagatgtgaacagtgcacgtgttaatgtcatctttgctcatgtgttataagccccaagttgctgtatattttcacaagtatgtctacacactggtcatgattttgataataaataacgataaatcgaaaaaaaaaaaaaaaaaaaaaa

SEQ ID NO: 653 - protein, 416 aa, Homo sapien
MSEADGLRQRRPLRPQVVTDDDGQAPEAKDGSSFSGRVFRVTFLMLAVSLTVPLLGAMMLLESPIDPQPLSFKEPPLLLGVLHPNTKLRQAERLFENQLVGPESIAHIGDVMFTGTADGRVVKLENGEIETIARFGSGPCKTRDDEPVCGRPLGIRAGPNGTLFVADAYKGLFEVNPWKREVKLLLSSETPIEGKNMSFVNDLTVTQDGRKIYFTDSSSKWQRRDYLLLVMEGTDDGRLLEYDTVTREVKVLLDQLRFPNGVQLSPAEDFVLVAETTMARIRRVYVSGLMKGGADLFVENMPGFPDNIRPSSSGGYWVGMSTIRPNPGFSMLDFLSERPWIKRMIFKLFSQETVMKFVPRYSLVLELSDSGAFRRSLHDPDGLVATYISEVHEHDGHLYLGSFRSPFLCRLSLQAV

SEQ ID NO: 654 - DNA, 2386 bp, Homo sapien
ggaggaggaagcaagcgagggggctggttcctgagcttcgcaattcctgtgtcgccttctgggctcccagcctgccgggtcgcatgatccctccggccggagctggtttttttgccagccaccgcgaggccggctgagttaccggcatccccgcagccacctcctctcccgacctgtgatacaaaagatcttccgggggctgcacctgcctgcctttgcctaaggcggatttgaatctctttctctcccttcagaatcttatcttggctttggatcttagaagagaatcactaaccagagacgagactcagtgagtgagcaggtgttttggacaatggactggttgagcccatccctattataaaaatgtctcagagcaaccgggagctggtggttgactttctctcctacaagctttcccagaaaggatacagctggagtcagtttagtgatgtggaagagaacaggactgaggccccagaagggactgaatcggagatggagacccccagtgccatcaatggcaacccatcctggcacctggcagacagccccgcggtgaatggagccactggccacagcagcagtttggatgcccgggaggtgatccccatggcagcagtaaagcaagcgctgagggaggcaggcgacgagtttgaactgcggtaccggcgggcattcagtgacctgacatcccagctccacatcaccccagggacagcatatcagagctttgaacaggatacttttgtggaactctatgggaacaatgcagcagccgagagccgaaagggccaggaacgcttcaaccgctggttcctgacgggcatgactgtggccggcgtggttctgctgggctcactcttcagtcggaaatgaccagacactgaccatccactctaccctcccacccccttctctgctccaccacatcctccgtccagccgccattgccaccaggagaaccactacatgcagcccatgcccacctgcccatcacagggttgggcccagatctggtcccttgcagctagttttctagaatttatcacacttctgtgagacccccacacctcagttcccttggcctcagaattcacaaaatttccacaaaatctgtccaaaggaggctggcaggtatggaagggtttgtggctgggggcaggagggccctacctgattggtgcaacccttaccccttagcctccctgaaaatgtttttctgccagggagcttgaaagttttcagaacctcttccccagaaaggagactagattgcctttgttttgatgtttgtggcctcagaattgatcattttccccccactctccccacactaacctgggttccctttccttccatccctaccccctaagagccatttaggggccacttttgactagggattcaggctgcttgggataaagatgcaaggaccaggactccctcctcacctctggactggctagagtcctcactcccagtccaaatgtcctccagaagcctctggctagaggccagccccacccaggagggagggggctatagctacaggaagcaccccatgccaaagctagggtggcccttgcagttcagcaccaccctagtcccttcccctccctggctcccatgaccatactgagggaccaactgggcccaagacagatgccccagagctgtttatggcctcagctgcctcacttcctacaagagcagcctgtggcatctttgccttgggctgctcctcatggtgggttcaggggactcagccctgaggtgaaagggagctatcaggaacagctatgggagccccagggtcttccctacctcaggcaggaagggcaggaaggagagcctgctgcatggggtggggtagggctgactagaagggccagtcctgcctggccaggcagatctgtgccccatgcctgtccagcctgggcagccaggctgccaaggccagagtggcctggccaggagctcttcaggcctccctctctcttctgctccacccttggcctgtctcatccccaggggtcccagccaccccgggctctctgctgtacatatttgagactagtttttattccttgtgaagatgatatactatttttgttaagcgtgtctgtatttatgtgtgaggagctgctggcttgcagtgcgcgtgcacgtggagagctggtgcccggagattggacggcctgatgctccctcccctgccctggtccagggaagctggccgagggtcctggctcctgaggggcatctgcccctcccccaacccccaccccacacttgttccagctctttgaaatagtctgtgtgaaggtgaaagtgcagttcagtaataaactgtgtttactcagtgaaaaaaaaaaaaaaaaaa

SEQ ID NO: 655 - protein, 233 aa, Homo sapien
MSQSNRELVVDFLSYKLSQKGYSWSQFSDVEENRTEAPEGTESEMETPSAINGNPSWHLADSPAVNGATGHSSSLDAREVIPMAAVKQALREAGDEFELRYRRAFSDLTSQLHITPGTAYQSFEQVVNELFRDGVNWGRIVAFFSFGGALCVESVDKEMQVLVSRIAAWMATYLNDHLEPWIQENGGWDTFVELYGNNAAAESRKGQERFNRWFLTGMTVAGVVLLGSLFSRK

SEQ ID NO: 656 - DNA, 3495 bp, Homo sapien
ccagtctgcggaccgttcggagcaacgtggcggcccttgcccgccagcaatgcctaggagcagccaagcagggacccgtcggaaacccttcatccagcctttctctggcgcatggagaacctgggggtcggcgaaggggcagaggcttgcagcaggttgagtcgctctcgcggccgccacagcatgaccagagccccgaagcacctgtggcggcaaccccggcgccccatccgcatccaacagcgcttctattcggatccggacaagtccgcgggctgccgcgagagggacctgagcccgcggccggagctcaggaagtcgcggctctcctggcccgtttcctcctgcaggcgctttgacctggaaaatgggctctcgtgtgggaggagggccctggaccctcagtccagccctggcctgggccggattatgcaggctccagtcccgcacagccagcggcgcgagtccttcctgtaccgctcagatagcgactatgaactctcgcccaaggccatgtctcggaactcctctgtggccagcgacctacatggagaggacatgattgtgacgccctttgcccaggtcctggccagtctgcggaccgttcggagcaacgtggcggcccttgcccgccagcaatgcctaggagcagccaagcagggacccgtcggaaacccttcatccagcaatcagctccctcctgcagaggacacggggcagaagctggcattggagacgctagacgagctggactggtgcctggatcagttggagacgctgcagacccggcactcggtgggggagatggcctccaacaagttcaagcggatcctgaaccgggagttgacccacctgtccgaaaccagccgctccgggaaccaggtgtccgagtacatctcccggaccttcctggaccagcagaccgaggtggagctgcccaaggtgaccgctgaggaggccccacagcccatgtcccggatcagtggcctacatgggctctgccacagtgccagcctctcctcagccactgtcccacgctttggggtccagactgaccaggaggagcaactggccaaggagctagaagacaccaacaagtggggacttgatgtgttcaaggtggcggacgtaagtgggaaccggcccctcacagctatcatattcagcatttttcaggagcgggacctgctgaagacattccagatcccagcagacacactggccacctacctgctgatgctggagggtcactaccacgccaatgtggcctaccacaacagcctacatgccgccgacgtggcccagtccacgcatgtgctgctggctacgcccgccctcgaggctgtgttcacagacttggaaatcctggctgccctctttgcaagcgccatccacgacgtggaccatcctggggtctccaaccagtttctgattaacaccaactcagacgtggcgcttatgtacaacgacgcctcggtgctggagaaccatcacctggctgtgggcttcaagctgctgcaggcagagaactgcgatatcttccagaacctcagcgccaagcagcgactgagtctgcgcaggatggtcattgacatggtgctggccacagacatgtccaaacacatgaacctcctggccgacctcaagaccatggtggagaccaagaaggtgacaagcctcggtgtcctcctcctggacaactattccgaccgaatccaggtcttgcagaacctggtgcactgtgctgatctgagcaaccccaccaagccgctgcccctgtaccgccagtggacggaccgcatcatggccgagttcttccagcagggagaccgcgagcgtgagtcgggcctggacatcagtcccatgtgtgacaagcatacggcctcagtggagaagtcccaggtgggtttcattgactacattgctcacccactgtgggagacttgggctgacctggtccacccagatgcacaggacctgctggacacgctggaggacaatcgagagtggtaccagagcaagatcccccgaagtccctcagacctcaccaaccccgagcgggacgggcctgacagattccagtttgaactgactctggaggaggcagaggaagaggatgaggaggaagaagaggagggggaagagacagctttagccaaagaggccttggagttgcctgacactgaactcctgtcccctgaagccggcccagaccctggggacttacccctcgacaaccagaggacttagggccagccctgcgtgaactgcaggggcaatggatggtaaagccctttggctcttggcaggcagactttccaggaagaggctccatgtggctcctgcttcactttcccacccatttagggagacaatcaagctcttagttataggtggctcccagggtctaattggaggcacctggctggggtccactctgaccctagacttgcctaaaagagctctctaaggggcagcctcttacgatgccctggtgtctttctcctgggcttctatccctgtgaggagaggtgctgtctgctggagcctctagtccaccctctccagtggtcactcttgagtcacatctgtcacttaattatttccttctttatcaaatatttattgctcatctacttcgggccagctttctgcctctgtagtagccctgcacaaagggtggggagtcaggagaccatcccaaaggcatctccctgtcttcctctaccaagcggctctctgcaagagcatggaaatgtgagtggggaaaattttcagcaccaaagcttcactcatacccagttttgtttctgaaactacggtagggggcaggaagaggagcagaaaagaagggctgggcaaggcatagtggcttatgcctgtaatcccggtactttgggaggctgaggtgggaggactgcttaagctcaggagtttgagaccagcctgggcaacatagcaagacccccaccatctctgaaaaaaaaaattagccaggcatggtggtgtgcacctgagaatcccagctactcagaaggttgagacaaaggggatcgcttgagcccaggagttggaggctgaagagagctatgactgcatcactgcactccagcctgggcaacacagcaagatcctgtctaaaaataaaaagaaaagagaaggaaaggaaagagacggggctctgaggccgagcacagtggcccatgcctataatcccagcactttgggaggctgaggcaggtggatcacctgaggttaggagttcgagaccagcctggccaacatggtgaaaccccatctctactaaaaatacaaaaattggctgggcatggtggcgggtgcctgtaatcccagctactggggaggctgaggcaggagaatcacttgaattcaggaggtggaggttgcagtgagccgacatcatgccactgcactccagcctggggctgacagagcaagacactgtctcaaaaaagaaaaaaaaaaaaaaaaaaa

SEQ ID NO: 657 - protein, 712 aa, Homo sapien
MENLGVGEGAEACSRLSRSRGRHSMTRAPKHLWRQPRRPIRIQQRFYSDPDKSAGCRERDLSPRPELRKSRLSWPVSSCRRFDLENGLSCGRRALDPQSSPGLGRIMQAPVPHSQRRESFLYRSDSDYELSPKAMSRNSSVASDLHGEDMIVTPFAQVLASLRTVRSNVAALARQQCLGAAKQGPVGNPSSSNQLPPAEDTGQKLALETLDELDWCLDQLETLQTRHSVGEMASNKFKRILNRELTHLSETSRSGNQVSEYISRTFLDQQTEVELPKVTAEEAPQPMSRISGLHGLCHSASLSSATVPRFGVQTDQEEQLAKELEDTNKWGLDVFKVADVSGNRPLTAIIFSIFQERDLLKTFQIPADTLATYLLMLEGHYHANVAYHNSLHAADVAQSTHVLLATPALEAVFTDLEILAALFASAIHDVDHPGVSNQFLINTNSDVALMYNDASVLENHHLAVGFKLLQAENCDIFQNLSAKQRLSLRRMVIDMVLATDMSKHMNLLADLKTMVETKKVTSLGVLLLDNYSDRIQVLQNLVHCADLSNPTKPLPLYRQWTDRIMAEFFQQGDRERESGLDISPMCDKHTASVEKSQVGFIDYIAHPLWETWADLVHPDAQDLLDTLEDNREWYQSKIPRSPSDLTNPERDGPDRFQFELTLEEAEEEDEEEEEEGEETALAKEALELPDTELLSPEAGPDPGDLPLDNQRT

SEQ ID NO: 658 - DNA, 444 bp, Homo sapien
aattctagaagtccaaatcactcattgtttgtgaaagctgagctcacagcaaaacaagccaccatgaagctgtcggtgtgtctcctgctggtcacgctggccctctgctgctaccaggccaatgccgagttctgcccagctcttgtttctgagctgttagacttcttcttcattagtgaacctctgttcaagttaagtcttgccaaatttgatgcccctccggaagctgttgcagccaagttaggagtgaagagatgcacggatcagatgtcccttcagaaacgaagcctcattgcggaagtcctggtgaaaatattgaagaaatgtagtgtgtgacatgtaaaaactttcatcctggtttccactgtctttcaatgacaccctgatcttcactgcagaatgtaaaggtttcaacgtcttgctttaataaatcacttgctctac

SEQ ID NO: 659 - protein, 90 aa, Homo sapien
MKLSVCLLLVTLALCCYQANAEFCPALVSELLDFFFISEPLFKLSLAKFDAPPEAVAAKLGVKRCTDQMSLQKRSLIAEVLVKILKKCSV

SEQ ID NO: 660 - DNA, 1608 bp, Homo sapien
agaactagtctcgagtttttttttgtctgtcctggattggagccgtccctataaccatctagttccgagtacaaactggagacagaaataaatattaaagaaatcatagaccgaccaggtaaaggcaaagggatgaattcctacttcactaacccttccttatcctgccacctcgccgggggccaggacgtcctccccaacgtcgccctcaattccaccgcctatgatccagtgaggcatttctcgacctatggagcggccgttgcccagaaccggatctactcgactcccttttattcgccacaggagaatgtcgtgttcagttccagccgggggccgtatgactatggatctaattccttttaccaggagaaagacatgctctcaaactgcagacaaaacaccttaggacataacacacagacctcaatcgctcaggattttagttctgagcagggcaggactgcgccccaggaccagaaagccagtatccagatttacccctggatgcagcgaatgaattcgcacagtggggtcggctacggagcggaccggaggcgcggccgccagatctactcgcggtaccagaccctggaactggagaaggaatttcacttcaatcgctacctaacgcggcgccggcgcatcgagatcgccaacgcgctttgcctgaccgagcgacagatcaaaatctggttccagaaccgccggatgaagtggaaaaaagaatctaatctcacatccactctctcggggggcggcggaggggccaccgccgacagcctgggcggaaaagaggaaaagcgggaagagacagaagaggagaagcagaaagagtgaccaggactgtccctgccacccctctctccctttctccctcgctccccaccaactctcccctaatcacacactctgtatttatcactggcacaattgatgtgttttgattccctaaaacaaaattagggagtcaaacgtggacctgaaagtcagctctggaccccctccctcaccgcacaactctctttctccacgcgcctcctcctcctcgctcccttgctagctcgttctcggcttgtctacaggcccttttccccgtccaggccttgggggctcggaccctgaactcagactctacagattgccctccaagtgaggacttggctcccccactccttcgacgcccccacccccgccccccgtgcagagagccggctcctgggcctgctggggcctctgctccagggcctcagggccggcctggcagccggggagggccggagcggagggcgcgccttggccccacaccaacccccagggcctccccgcagtccctgcctagcccctctgccccagcaaatgcccagcccaggcaaattgtatttaaagaatcctgggggtcattatggcattttacaaactgtgaccgtttctgtgtgaagatttttagctgtatttgtggtctctgtatttatatttatgtttagcaccgtcagtgttcctatccaatttcaaaaaaggaaaaaaaagagggaaaattacaaaaagagagaaaaaaagtgaatgacgtttgtttagccagtaggagaaaataaataaataaataaa

SEQ ID NO: 661 - protein, 235 aa, Homo sapien
MNSYFTNPSLSCHLAGGQDVLPNVALNSTAYDPVRHFSTYGAAVAQNRIYSTPFYSPQENVVFSSSRGPYDYGSNSFYQEKDMLSNCRQNTLGHNTQTSIAQDFSSEQGRTAPQDQKASIQIYPWMQRMNSHSGVGYGADRRRGRQIYSRYQTLELEKEFHFNRYLTRRRRIEIANALCLTERQIKIWFQNRRMKWKKESNLTSTLSGGGGGATADSLGGKEEKREETEEEKQKE

SEQ ID NO: 662 - DNA, 1316 bp, Homo sapien
aacaccatgagggccctggtgcttctgctgtccctgttcctgctgggtggccaggcccagcatgtgtctgactggacctactcagaaggggcactggacgaagcgcactggccacagcactaccccgcctgtgggggccagagacagtcgcctatcaacctacagaggacgaaggtgcggtacaacccctccttgaaggggctcaatatgacaggctatgagacccaggcaggggagttccccatggtcaacaatggccacacagtgcagatcggcctgccctccaccatgcgcatgacagtggctgacggcattgtatacatagcccagcagatgcactttcactggggaggtgcgtcctcggagatcagcggctctgagcacaccgtggacgggatcagacatgtgatcgagattcacattgttcactacaattctaaatacaagacgtatgatatagcccaagatgcgccggatggtttggctgtactggcagccttcgttgaggtgaagaattaccctgaaaacacttattacagcaacttcatttctcatctggccaacatcaagtacccaggacaaagaacaaccctgactggccttgacgttcaggacatgctgcccaggaacctccagcactactacacctaccatggctcactcaccacgcctccctgcactgagaacgtccactggtttgtgctggcagattttgtcaagctctccaggacacaggtttggaagctggagaattccttactggatcaccgcaacaagaccatccacaacgattaccgcaggacccagcccctgaaacacagagtggtggaatccaacttcccgaatcaggaatacactctaggctctgaattccagttttacctacataagattgaggaaattcttgactacttaagaagagcattgaactgaggaaagctaagaggaagattcaataatattaactagcttgaagcctgacctagccagaagtgcctgtccgctgcagccgcaccctaccttgtctaagaaaccatgtgtgtctggaacacgctgctcccctgggcagctgttgggattctgattaaagaggggaaacgatcatcctggacaggaagtgagatggcttcagttcatgagacgggatctgagttagacatcaccagtggaaattgattggaatagaaacttaaaggaaatggaaccctaactattctcccatcaaatcatatatgttgacctgtctgaattataaaccagcctgacctttcctttagcattagatgtaataaaataactttggaaatttgtcattt

SEQ ID NO: 663 - protein, 308 aa, Homo sapien
MRALVLLLSLFLLGGQAQHVSDWTYSEGALDEAHWPQHYPACGGQRQSPINLQRTKVRYNPSLKGLNMTGYETQAGEFPMVNNGHTVQIGLPSTMRMTVADGIVYIAQQMHFHWGGASSEISGSEHTVDGIRHVIEIHIVHYNSKYKTYDIAQDAPDGLAVLAAFVEVKNYPENTYYSNFISHLANIKYPGQRTTLTGLDVQDMLPRNLQHYYTYHGSLTTPPCTENVHWFVLADFVKLSRTQVWKLENSLLDHRNKTIHNDYRRTQPLKHRVVESNFPNQEYTLGSEFQFYLHKIEEILDYLRRALN

SEQ ID NO: 664 - DNA, 1002 bp, Homo sapien
cgccagagaggctccctcagccctgctccgcggggtccacagcgggctccacagcgggctccatagcgggctccacagcggtccggcggcggcagcgagcccgtgggcagtgggggttggtcccgtggctccggcccccggtgcagaatggcggcggcggttcggatgaacatccagatgctgctggaggcggccgactatctggagcggcgggagagagaagctgaacatggttatgcctccatgttaccatacaataacaaggacagagatgccttaaaacggaggaacaaatccaaaaagaataacagcagtagcagatcaactcacaatgaaatggagaagaatagacgggctcatcttcgcttgtgcctggagaagttgaaggggctggtgccactgggacccgaatcaagtcgacacactacgttgagtttattaacaaaagccaaattgcacataaagaaacttgaagattgtgacagaaaagccgttcaccaaatcgaccagcttcagcgagagcagcgacacctgaagaggcagctggagaagctgggcattgagaggatccggatggacagcatcggctccaccgtctcctcggagcgctccgactccgacagggaagaaatcgacgttgacgtggagagcacggactatctcacaggtgatctggactggagcagcagcagtgtgagcgactctgacgagcggggcagcatgcagagcctcggcagtgatgagggctattccagcaccagcatcaagagaataaagctgcaggacagtcacaaggcgtgtcttggtctctaagagagtgggcactgcggctgtctccttgaaggttctccctgttggttctgattaggtaacgtattggacctgcccacaactcccttgcacgtaaacttcagtgtcccaccttgaccaaaatcagctttgtaactgttttcaaggaggtgcttaggattgtgggtttctgattgcatcactagcttctcc

SEQ ID NO: 665 - protein, 221 aa, Homo sapien
MAAAVRMNIQMLLEAADYLERREREAEHGYASMLPYNNKDRDALKRRNKSKKNNSSSRSTHNEMEKNRRAHLRLCLEKLKGLVPLGPESSRHTTLSLLTKAKLHIKKLEDCDRKAVHQIDQLQREQRHLKRQLEKLGIERIRMDSIGSTVSSERSDSDREEIDVDVESTDYLTGDLDWSSSSVSDSDERGSMQSLGSDEGYSSTSIKRIKLQDSHKACLGL

SEQ ID NO: 666 - DNA, 2381 bp, Homo sapien
cactgaataaactctaggttcccatttctttcagccagatcctcccagggaatcactacaggctggttagccaaaaagtcctgattttctgctcaatagaggtccttactggaaggcagcatgtccaatgttaccttgagaaaaatgtctcccacaggaaatgagatgaagagcaccactcagggaaccacacggaagcagcaggattttcacgaggtgaacaaaagaagaactttcttacaggataacagttggataaagaaacgccctgaagaagaaaaagatgaaaattacggtagggtggtgctcaaccgacataattcccatgatgcattggacaggaaagtaaatgagagagatgtgccaaaagctacaattagtcggtacagttctgatgacactttggacaggatctcagacagaaatgatgctgctaaaacatataaggccaataccttggataaccaactaaccaataggagcatgtccatgtttagatcactggaagtaacaaagttgcaacctggcggttcattgaatgccaacacctccaacaccatagcatccacttctgctactactcctgtaaagaagaagaggcagtcctggtttccaccgccccctccaggttacaatgcctcttcgagcacaggaaccaggagacgggaaccaggtgttcaccctccaatacctccaaagcccagttctcctgtttcttctcctaaccagctgagacaggataataggcagatacatccacctaaaccaggtgtatatacagaaaccaacagatctgctgaaagaaatataagtgaagaattggataatctcatcaaaatgaacaaaagcttgaataggaatcaaggtcttgatagtctcttcagagcaaatccaaaggtagaagaaagagagaaaagagccaaaagccttgaaagtctcatctatatgagtacccggacagataaagatggcaaaggaatccaaagccttggaagtccgattaaagttaatcaaaggactgacaaaaatgagaaaggaagacaaaatctcgaatctgttgctaaagtgaatgccaggatgaataaaacgagcagaagaagtgaagaccttgataatgctactgaagtaaatcccaaaggacatgaaaataccactggaaaaaaagaccttgatgggcttattaaagtggatcctgaaacaaataaaaatattacgaggggccagagccttgataatctcatcaaagtgacccctgaagtaaagagaagtaaccaaggttccaaagaccttaataacttcatcaaagtgtatccaggaacagaaaaaagtactgaagggggccaaagtctcgacagcctcattaaagtgactcctgaaagaaacagaactaaccaagggaaccaagacttggaaaatcttatcaaagtgatcccttcagcaaacaaaagcagtgaacaaggtcttgatgaacatattaatgtcagccccaaagctgtcaaaaacactgatggaaaacaagatcttgataaactcatcaaggtgaatcctgaaattttcacaaacaaccaaagaaaccaagatcttgctaacctcatcaaagtaaatcctgcagtaatcagaaacaatcagagccaagacttggaaaatcttatcaaagtgatcccttcagctcttagaaacactaatcgagaccagaacctggaaaatttaattgaagtaaattctcatgtgtctgaaaacaagaatggaagctctaacactggagccaagcaggcaggaccacaggatactgttgtgtacacaaggacatatgtggagaatagtaaatcacccaaggatggatatcaggagaatatctctggaaaatacatacaaactgtttattcaacttctgataggtctgtcattgaaagagatatgtgcacttactgccgaaaacccttgggtgtagaaactaaaatgattttagatgaattacaaatttgctgccattctacttgctttaagtgtgaaatatgcaagcagcctttggaaaatctacaagcgggtgatagtatttggatttatagacagacaatacactgtgaaccttgctactctaaaattatggcaaagtggattccataactctggcacaaggaaatcaagatgaaaagcactcattaaggaattaaagttacaagttttatcttaataatatgtaatctagaaaagctttcacattgaagatcaactcttgtacaaaattaacaattctgttattgcataagtaatctaattgtcttcaataaggtcacacacataaaaagagccatctggtctctggctagagttagcaataaaaagttcaaatggttccagaaaaaaaaaaaaaaaaaaaa

SEQ ID NO: 667 - protein, 688 aa, Homo sapien
MSNVTLRKMSPTGNEMKSTTQGTTRKQQDFHEVNKRRTFLQDNSWIKKRPEEEKDENYGRVVLNRHNSHDALDRKVNERDVPKATISRYSSDDTLDRISDRNDAAKTYKANTLDNQLTNRSMSMFRSLEVTKLQPGGSLNANTSNTIASTSATTPVKKKRQSWFPPPPPGYNASSSTGTRRREPGVHPPIPPKPSSPVSSPNQLRQDNRQIHPPKPGVYTETNRSAERNIRSQDLDNIVKVATSLQRSDKGEELDNLIKMNKSLNRNQGLDSLFRANPKVEEREKRAKSLESLIYMSTRTDKDGKGIQSLGSPIKVNQRTDKNEKGRQNLESVAKVNARMNKTSRRSEDLDNATEVNPKGHENTTGKKDLDGLIKVDPETNKNITRGQSLDNLIKVTPEVKRSNQGSKDLNNFIKVYPGTEKSTEGGQSLDSLIKVTPERNRTNQGNQDLENLIKVIPSANKSSEQGLDEHINVSPKAVKNTDGKQDLDKLIKVNPEIFTNNQRNQDLANLIKVNPAVIRNNQSQDLENLIKVIPSALRNTNRDQNLENLIEVNSHVSENKNGSSNTGAKQAGPQDTVVYTRTYVENSKSPKDGYQENISGKYIQTVYSTSDRSVIERDMCTYCRKPLGVETKMILDELQICCHSTCFKCEICKQPLENLQAGDSIWIYRQTIHCEPCYSKIMAKWIP

SEQ ID NO: 668 - DNA, 2856 bp, Homo sapien
cattcagagacagaaggtggatagacaaatctccaccttcagactggtaggctcctccagaagccatcagacaggaagatgtgaaaatccccagcactcatcccagaatcactaagtggcacctgtcctgggccaaagtcccaggacagacctcattgttcctctgtgggaatacctccccaggagggcatcctggatttcccccttgcaacccaggtcagaagtttcatcgtcaaggttgtttcatcttttttttcctgtctaacagctctgactaccacccaaccttgaggcacagtgaagacatcggtggccactccaataacagcaggtcacagctgctcttctggaggtgtcctacaggtgaaaagcccagcgacccagtcaggatttaagtttacctcaaaaatggaagattttaacatggagagtgacagctttgaagatttctggaaaggtgaagatcttagtaattacagttacagctctaccctgcccccttttctactagatgccgccccatgtgaaccagaatccctggaaatcaacaagtattttgtggtcattatctatgccctggtattcctgctgagcctgctgggaaactccctcgtgatgctggtcatcttatacagcagggtcggccgctccgtcactgatgtctacctgctgaacctagccttggccgacctactctttgccctgaccttgcccatctgggccgcctccaaggtgaatggctggatttttggcacattcctgtgcaaggtggtctcactcctgaaggaagtcaacttctatagtggcatcctgctactggcctgcatcagtgtggaccgttacctggccattgtccatgccacacgcacactgacccagaagcgctacttggtcaaattcatatgtctcagcatctggggtctgtccttgctcctggccctgcctgtcttacttttccgaaggaccgtctactcatccaatgttagcccagcctgctatgaggacatgggcaacaatacagcaaactggcggatgctgttacggatcctgccccagtcctttggcttcatcgtgccactgctgatcatgctgttctgctacggattcaccctgcgtacgctgtttaaggcccacatggggcagaagcaccgggccatgcgggtcatctttgctgtcgtcctcatcttcctgctctgctggctgccctacaacctggtcctgctggcagacaccctcatgaggacccaggtgatccaggagacctgtgagcgccgcaatcacatcgaccgggctctggatgccaccgagattctgggcatccttcacagctgcctcaaccccctcatctacgccttcattggccagaagtttcgccatggactcctcaagattctagctatacatggcttgatcagcaaggactccctgcccaaagacagcaggccttcctttgttggctcttcttcagggcacacttccactactctctaagacctcctgcctaagtgcagcccgtggggttcctcccttctcttcacagtcacattccaagcctcatgtccactggttcttcttggtctcagtgtcaatgcagcccccattgtggtcacaggaagtagaggaggccacgttcttactagtttcccttgcatggtttagaaagcttgccctggtgcctcaccccttgccataattactatgtcatttgctggagctctgcccatcctgcccctgagcccatggcactctatgttctaagaagtgaaaatctacactccagtgagacagctctgcatactcattaggatggctagtatcaaaagaaagaaaatcaggctggccaacggggtgaaacctgtctctactaaaaatacaaaaaaaaaaaaaaattagccgggcgtggtggtgagtgcctgtaatcacagctacttgggaggctgagatgggagaatcacttgaacccgggagcagaggttgcagtgagccgagattgtgcccctgccatccagcctgagcgacagtgagactctgtctcagtccatgaagatgtagaggagaaactggaactctcgagcgttgctgggggggattgtaaaatggtgtgaccactgcagaagacagtatggcagctttcctcaaaacttcagacatagaattaacacatgatcctgcaattccacttataggaattgacccacaagaaatgaaagcagggacttgaacccatatttgtacaccaatattcatagcagcttattcacaagacccaaaaggcagaagcaacccaaatgttcatcaatgaatgaatgaatggctaagcaaaatgtgatatgtacctaacgaagtatccttcagcctgaaagaggaatgaagtactcatacatgttacaacacggacgaaccttgaaaactttatgctaagtgaaataagccagacatcaacagataaatagtttatgattccacctacatgaggtactgagagtgaacaaatttacagagacagaaagcagaacagtgattaccagggactgaggggaggggagcatgggaagtgacggtttaatgggcacagggtttatgtttaggatgttgaaaaagttctgcagataaacagtagtgatagttgtaccgcaatgtgacttaatgccactaaattgacacttaaaaatggtttaaatggtcaattttgttatgtatattttatatcaatttaaaaaaaaacctgagccccaaaaggtattttaatcaccaaggctgattaaaccaaggctagaaccacctgcctatattttttgttaaatgatttcattcaatatcttttttttaataaaccatttttacttgggtgtttat

SEQ ID NO: 669 - protein, 360 aa, Homo sapien
MEDFNMESDSFEDFWKGEDLSNYSYSSTLPPFLLDAAPCEPESLEINKYFVVIIYALVFLLSLLGNSLVMLVILYSRVGRSVTDVYLLNLALADLLFALTLPIWAASKVNGWIFGTFLCKVVSLLKEVNFYSGILLLACISVDRYLAIVHATRTLTQKRYLVKFICLSIWGLSLLLALPVLLFRRTVYSSNVSPACYEDMGNNTANWRMLLRILPQSFGFIVPLLIMLFCYGFTLRTLFKAHMGQKHRAMRVIFAVVLIFLLCWLPYNLVLLADTLMRTQVIQETCERRNHIDRALDATEILGILHSCLNPLIYAFIGQKFRHGLLKILAIHGLISKDSLPKDSRPSFVGSSSGHTSTTL

SEQ ID NO: 670 - DNA, 2104 bp, Homo sapien
ggaaacttctgcctcaggtggggagaggagtccatagatcagggaaacttatgtcttggtgaaatggaagaccatgtttctaaacacctgtcgccaggttacttgaatttccactagaggagcagaaatgccaccaatgccaagtgccccacctgtgcatccacctccagatggaggatggggttggattgtggttggagcagcttttatctccattggattttcctatgcattccccaaagctgtcaccgtattcttcaaagaaattcagcaaatattccacactacctacagtgaaatagcatggatttcatccattatgctggctgttatgtacgcaggaggtcctgtaagtagtgttttggtgaataaatacggcagccggccggtggtgatagcaggaggcttattatgctgtcttggaatggtgttggcctcctttagtagcagcgtggtacagctgtacctcactatgggattcattacaggtttaggtttagccttcaacctgcaacccgccttaaccataattggcaaatacttctataggaagcgacccatggcaaatggattggccatggcaggaagtcctgttttcttaagttcattggctcctttcaatcagtacctttttaatacttttggctggaaaggaagcttcctgattttgggaagtctacttttgaatgcctgtgtggctggttccctcatgagaccccttggacccaatcaaaccacttctaagtctaaaaataagactggcaaaacagaagatgattcaagcccaaagaaaatcaaaacgaagaaatcaacttgggaaaaagttaataagtatttagatttctccctttttaagcatagaggatttctgatatatctgtctggaaatgtcattatgttcctaggtttttttgcccccattatattcttggctccatatgctaaagaccaaggaattgatgagtactcggcagcttttctgctatctgttatggctttcgttgatatgtttgctaggccttctgtaggattaattgcaaactccaaatatattcgacctcgaattcagtacttcttcagttttgcaatcatgttcaatggagtgtgtcacctcttgtgcccactggcacaggactacacaagcctggtattatatgctgtattttttggccttggatttgggagtgttagcagtgttctctttgaaactctcatggacctcgtgggtgcaccaagattttccagtgccgtcggacttgtcacaattgtggagtgtggcccagttcttcttggccctcctcttgcaggtaaattggtggatttaactggagaatataaatacatgtacatgtcctgtggggctattgtggtagcagcaagcgtgtggctgctcattggcaatgctatcaactatagattgcttgcaaaggaaaggaaggaggaaaatgcaaggcagaagtccagagaatctgaacccttgagcaaatctaaacattcggaagatgttaacgtcaaagtttcaaatgcacagagtgtaacctcagaaagagaaactaacatttaacaagaatcacatctctgatttcagtgtttatgactttatctaggagtttgtttttcattttgtttttttaaagtattagaaaaggttttagctgaaatgaggagtcacaattdaaggatggaggtgatattttcctcaatggcaaattttaaattagtttttaaaaacttacttatttgggtagttaaattttgagattatgcatagaaagaatccatgctataggtttatttccatacctgactctgggtgtggtggttaaaatactaattttaaagtcttccagtgactttcggtcttggttatatggagaattctgaatcccaaacccctggtttaagtaggtagaaggaggatgcctaatcctacaaagtgaccctttatacatttcattttttatttgatattaaagtatgagatagagttgagagacaattaattatcccctcttacacacaaacacacatactcccacatacttacccacatgtacacagagtatctggagaataaaacccaaattcaaaaaaaaaaaaaaaa

SEQ ID NO: 671 - protein, 478 aa, Homo sapien
MPPMPSAPPVHPPPDGGWGWIVVGAAFISIGFSYAFPKAVTVFFKEIQQIFHTTYSEIAWISSIMLAVMYAGGPVSSVLVNKYGSRPVVIAGGLLCCLGMVLASFSSSVVQLYLTMGFITGLGLAFNLQPALTIIGKYFYRKRPMANGLAMAGSPVFLSSLAPFNQYLFNTFGWKGSFLILGSLLLNACVAGSLMRPLGPNQTTSKSKNKTGKTEDDSSPKKIKTKKSTWEKVNKYLDFSLFKHRGFLIYLSGNVIMFLGFFAPIIFLAPYAKDQGIDEYSAAFLLSVMAFVDMFARPSVGLIANSKYIRPRIQYFFSFAIMFNGVCHLLCPLAQDYTSLVLYAVFFGLGFGSVSSVLFETLMDLVGAPRFSSAVGLVTIVECGPVLLGPPLAGKLVDLTGEYKYMYMSCGAIVVAASVWLLIGNAINYRLLAKERKEENARQKSRESEPLSKSKHSEDVNVKVSNAQSVTSERETNI

SEQ ID NO: 672 - DNA, 3498 bp, Homo sapien
gggctcgaacgcgcagcgcacgggaaccggtcccgctgcttgggtcaggttcgccggtcgcgggagccccgccgtgcagtcggaggaacacgtggccatcagtaatcatgagcaacccattcgcacaccttgctgagccattggatcctgtacaaccaggaaagaaattcttcaatttgaataaattggaggattcaagatatgggcgcttaccattttcgatcagagttcttctggaagcagccattcggaattgtgatgagtttttggtgaagaaacaggatattgaaaatattctacattggaatgtcactcagcacaagaacatagaagtgccatttaagcctgctcgtgtcatcctgcaggactttacgggtgtgcccgctgtggttgactttgctgcaatgcgtgatgctgtgaaaaagttaggaggagatccagagaaaataaaccctgtctgccctgctgatcttgtaatagatcattccatccaggttgatttcaacagaagggcagacagtttacagaagaatcaagacctggaatttgaaagaaatagagagcgatttgaatttttaaagtggggttcccaggcttttcacaacatgcggattattccccctggctcaggaatcatccaccaggtgaatttggaatatttggcaagagtggtatttgatcaggatggatattattacccagacagcctcgtgggcacagactcgcacactaccatgattgatggcttgggcattcttggttggggtgtcggtggtattgaagcagaagctgtcatgctgggtcagccaatcagtatggtgcttcctcaggtgattggctacaggctgatggggaagccccaccctctggtaacatccactgacatcgtgctcaccattaccaagcacctccgccaggttggggtagtgggcaaatttgtcgagttcttcgggcctggagtagcccagttgtccattgctgaccgagctacgattgctaacatgtgtccagagtacggagcaactgctgcctttttcccagttgatgaagttagtatcacgtacctggtgcaaacaggtcgtgatgaagaaaaattaaagtatattaaaaaatatcttcaggctgtaggaatgtttcgagatttcaatgacccttctcaagacccagacttcacccaggttgtggaattagatttgaaaacagtagtgccttgctgtagtggacccaaaaggcctcaggacaaagttgctgtgtccgacatgaaaaaggactttgagagctgccttggagccaagcaaggatttaaaggattccaagttgctcctgaacatcataatgaccataagacctttatctatgataacactgaattcacccttgctcatggttctgtggtcattgctgccattactagctgcacaaacaccagtaatccgtctgtgatgttaggggcaggattgttagcaaagaaagctgtggatgctggcctgaacgtgatgccttacatcaaaactagcctgtctcctgggagtggcgtggtcacctactacctacaagaaagcggagtcatgccttatctgtctcagcttgggtttgacgtggtgggctatggctgcatgacctgcattggcaacagtgggcctttacctgaacctgtggtagaagccatcacacagggagaccttgtagctgttggagtactatctggaaacaggaattttgaaggtcgagttcaccccaacacccgggccaactatttagcctctccccccttagtaatagcatatgcaattgctggaaccatcagaatcgactttgagaaagagccattgggagtaaatgcaaagggacagcaggtatttctgaaagatatctggccgactagagacgagatccaggcagtggagcgtcagtatgtcatcccggggatgtttaaggaagtctatcagaaaatagagactgtgaatgaaagctggaatgccttagcaaccccatcagataagctgtttttctggaattccaaatctacgtatatcaaatcaccaccattctttgaaaacctgactttggatcttcagccccctaaatctatagtggatgcctatgtgctgctaaatttgggagattcggtaacaactgaccacatctccccagctggaaatattgcaagaaacagtcctgctgctcgctacttaactaacagaggcctaactccacgagaattcaactcctatggctcccgccgaggtaatgacgccgtcatggcacggggaacatttgccaacattcgcttgttaaacagatttttgaacaagcaggcaccacagactatccatctgccttctggggaaatccttgatgtgtttgatgctgctgagcggtaccagcaggcaggccttcccctgatcgttctggctggcaaagagtacggtgcaggcagctcccgagactgggcagctaagggccctttcctgctgggaatcaaagccgtcctggccgagagctacgagcgcattcaccgcagtaacctggttgggatgggtgtgatcccacttgaatatctccctggtgagaatgcagatgccctggggctcacagggcaagaacgatacactatcattattccagaaaacctcaaaccacaaatgaaagtccaggtcaagctggatactggcaagaccttccaggctgtcatgaggtttgacactgatgtggagctcacttatttcctcaacgggggcatcctcaactacatgatccgcaagatggccaagtaggagacgtgcacttggtcgtgcgcccagggaggaagccgcaccaccagccagcgcaggccctggtggagaggcctccctggctgcctctgggaggggtgctgccttgtagatggagcaagtgagcactgagggtctggtgccaatcctgtaggcacaaaaccagaagtttctacattctctatttttgttaatcatcttctctttttccagaatttggaagctagaatggtgggaatgtcagtagtgccagaaagagagaaccaagcttgtctttaaagttactgatcacaggacgttgctttttcactgtttcctattaatcttcagctgaacacaagcaaaccttctcaggaggtgtctcctaccctcttattgttcctcttacgctctgctcaatgaaaccttcctcttgagggtcattttcctttctgtattaattataccagtgttaagtgacatagataagaactttgcacacttcaaatcagagcagtgattctctcttctctccccttttccttcagagtgaatcatccagactcctcatggataggtcgggtgttaaagttgttttgattatgtaccttttgatagatccacataaaaagaaatgtgaagttttcttttactatcttttcatttatcaagcagagacctttgttgggaggcggtttgggagaacacatttctaatttgaatgaaatgaaatctattttcagtg

SEQ ID NO: 673 - protein, 889 aa, Homo sapien
MSNPFAHLAEPLDPVQPGKKFFNLNKLEDSRYGRLPFSIRVLLEAAIRNCDEFLVKKQDIENILHWNVTQHKNIEVPFKPARVILQDFTGVPAVVDFAAMRDAVKKLGGDPEKINPVCPADLVIDHSIQVDFNRRADSLQKNQDLEFERNRERFEFLKWGSQAFHNMRIIPPGSGIIHQVNLEYLARVVFDQDGYYYPDSLVGTDSHTTMIDGLGILGWGVGGIEAEAVMLGQPISMVLPQVIGYRLMGKPHPLVTSTDIVLTITKHLRQVGVVGKFVEFFGPGVAQLSIADRATIANMCPEYGATAAFFPVDEVSITYLVQTGRDEEKLKYIKKYLQAVGMFRDFNDPSQDPDFTQVVELDLKTVVPCCSGPKRPQDKVAVSDMKKDFESCLGAKQGFKGFQVAPEHHNDHKTFIYDNTEFTLAHGSVVIAAITSCTNTSNPSVMLGAGLLAKKAVDAGLNVMPYIKTSLSPGSGVVTYYLQESGVMPYLSQLGFDVVGYGCMTCIGNSGPLPEPVVEAITQGDLVAVGVLSGNRNFEGRVHPNTRANYLASPPLVIAYAIAGTIRIDFEKEPLGVNAKGQQVFLKDIWPTRDEIQAVERQYVIPGMFKEVYQKIETVNESWNALATPSDKLFFWNSKSTYIKSPPFFENLTLDLQPPKSIVDAYVLLNLGDSVTTDHISPAGNIARNSPAARYLTNRGLTPREFNSYGSRRGNDAVMARGTFANIRLLNRFLNKQAPQTIHLPSGEILDVFDAAERYQQAGLPLIVLAGKEYGAGSSRDWAAKGPFLLGIKAVLAESYERIHRSNLVGMGVIPLEYLPGENADALGLTGQERYTIIIPENLKPQMKVQVKLDTGKTFQAVMRFDTDVELTYFLNGGILNYMIRKMAK

SEQ ID NO: 674 - DNA, 4193 bp, Homo sapien
catggcggcgactgcggcaaagcgagagcctcggagacgccgctgccgccagcacagccggagatctgagccgacactgggggcagtccgcgagccccgcactctctcgatgagtcggagaagtcccgttgtatcagagtaagatggacggtagctttgattgtgattgtggtgagctggagccacctgatcactaacaaaagacatcttctgttaaccaacagccgccaggcttcctgttgaaataaatatatagcaacaaaggaaaaaaagaagcaaaacggaaatagtgcttaccagcaccttagaatgatgctgctcaggaccagtccaacactgaatgtatctgcactgtgaggagaatgttcatagaagcctgttgtgtgcatatttattcactttttgttaaatgttaaatcgtttagcacggtaatctgagtgcacagtatgtcatttcattccgtttgagtttcttgttttcgttaaatgtctgcagagttgctgcccctttcttgaactatgagtactgcaatctttttaattctcaatatgaatagagctttttgagctttaaatctaaggggaactcgacaggcctgtttggcatatgcaatgaacatcaagaaaccatcttgctgtggaagcataattatttttcttctccctttttgaaagatctttccttttgatgccagttttcttccttgtttacacaagttcaatttgaaaggaaaaggcaatagtaagggtttcaaaatggcagagaaatttgaaagtctcatgaacattcatggttttgatctgggttctaggtatatggacttaaaaccattgggttgtggaggcaatggcttggttttttctgctgtagacaatgactgtgacaaaagagtagccatcaagaaaattgtccttactgatccccagagtgtcaaacatgctctacgtgaaatcaaaattattagaagacttgaccatgataacattgtgaaagtgtttgagattcttggtcccagtggaagccaattaacagacgatgtgggctctcttacggaactgaacagtgtttacattgttcaggagtacatggagacagacttggctaatgtgctggagcagggccctttactggaagagcatgccaggcttttcatgtatcagctgctacgggggctcaagtatattcactctgcaaatgtactgcacagagatctcaaaccagctaatcttttcattaatacggaagacttggtgctgaagataggtgactttggtcttgcacggatcatggatcctcattattcccataagggtcatctttctgaaggattggttactaaatggtacagatctccacgtcttttactttctcctaataattatactaaagccattgacatgtgggctgcaggctgcatctttgctgaaatgctgactggtaaaaccctttttgcaggtgcacatgaacttgaacagatgcagctgattttagaatctattcctgttgtacatgaggaagatcgtcaggagcttctcagcgtaattccagtttacattagaaatgacatgactgagccacacaaacctttaactcagctgcttccaggaattagtcgagaagcactggatttcctggaacaaattttgacatttagccccatggatcggttaacagcagaagaagcactctcccatccttacatgagcatatattcttttccaatggatgagccaatttcaagccatccttttcatattgaagatgaagttgatgatattttgcttatggatgaaactcacagtcacatttataactgggaaaggtatcatgattgtcagttttcagagcatgattggcctgtacataacaactttgatattgatgaagttcagcttgatccaagagctctgtccgatgtcactgatgaagaagaagtacaagttgatccccgaaaatatttggatggagatcgggaaaagtatctggaggatcctgcttttgataccaattactctactgagccttgttggcaatactcagatcatcatgaaaacaaatattgtgatctggagtgtagccatacttgtaactacaaaacgaggtcatcatcatatttagataacttagtttggagagagagtgaagttaaccattactatgaacccaagcttattatagatctttccaattggaaagaacaaagcaaagaaaaatctgataagaaaggcaaatcaaaatgtgaaaggaatggattggttaaagcccagatagcgctagaggaagcatcacagcaactggctggaaaagaaagggaaaagaatcagggatttgattttgattcctttattgcaggaactattcagcttagttcccagcatgagcctactgatgttgttgataaattaaatgacttgaatagctcagtgtcccaactagaattgaaaagtttgatatcaaagtcagtaagccaagaaaaacaggaaaaaggaatggcaaatctggctcaattagaagccttgtaccagtcttcttgggacagccagtttgtgagtggtggggaggactgttttttcataaatcagttttgtgaggtaaggaaggatgaacaagttgagaaggaaaacacttacactagttacttggacaagttctttagcaggaaagaagatactgaaatgctagaaactgagccagtagaggatgggaagcttggggagagaggacatgaggaaggatttctgaacaacagtggggagttcctctttaacaagcagctcgagtccataggcatcccacagtttcacagtccagttgggtcaccacttaagtcaatacaggccacattaacaccttctgctatgaaatcttcccctcaaattcctcatcaaacatacagcagcattctgaaacatctgaactaaaacactcagcagacatttatctttgtattcttcatgaaatgtgttttgtctttttttattactagtgtttaagtcattttttacttgaatcagatggtgtcatttagtaaggattttatgagttcttgttttttaaaatccagactttctttttctacatgtgagatagttttcattttaactggcatgtcatttgcacacaaaaataaagactagagcaaaataatgcaacgcaggaggagaaaagaaatgcactaagacaagaacattctctcatagaacattgatctgttttacaggaaacaaaccttgccttgaaatttacacagtgagactgtacataattgcatgaaaatagctatttttttcctaagacatttttcattcatgaatattttcaagtttttcatactgtacacatttcttaaaacacatgataccagcagcaactgaaaatgaatgccgaatttggtacacatgtgttatctacctcaaggtaacaagagtatgtggcaaaacatataccacccatagtgcttcacaaaatgcacttctatttagccagcgtttattgtagtaaactattcttaataaaactcactcactgtttataaatgttctggtatgcattctttatagtgaagtgttaatacatcacatcttatttattttagcaaatcagtatattttctgtatttaattataaaaaattaacttagtttttaaaatttatttgcaaatatactttttccatttggcactatggtttgttgcctacctagctgcatctataatgtcagcttatcctaaggctgtccacgtacttaatttacttaagtgttcattttaagtaacgtgctcactgtgtataggaatttgtattttggaggtgcttgatctatctacaaagaaaaattaattaggaattactttattataaaatgctcctagaagtcttaattgtgtttattttttaaaaaaacaaatgttagacttgtgtgcatggaagtaattaaggtacatcattattgtagtttgaaagttgtacatgataagacattttgtttttactgtatgtttttactgaatgatctattccccatcccaaggcaagcatgaataaaattaggttaaacgtagcatgtggcatcgcagtctcttagaatttgtttcatctattttattttattgaatactgtctgtatctttggttatcctgtttgaagaaaaaggacaaataaaacatggccagcaaatacaaaaaaaaaaaa

SEQ ID NO: 675 - protein, 721 aa, Homo sapien
MAEKFESLMNIHGFDLGSRYMDLKPLGCGGNGLVFSAVDNDCDKRVAIKKIVLTDPQSVKHALREIKIIRRLDHDNIVKVFEILGPSGSQLTDDVGSLTELNSVYIVQEYMETDLANVLEQGPLLEEHARLFMYQLLRGLKYIHSANVLHRDLKPANLFINTEDLVLKIGDFGLARIMDPHYSHKGHLSEGLVTKWYRSPRLLLSPNNYTKAIDMWAAGCIFAEMLTGKTLFAGAHELEQMQLILESIPVVHEEDRQELLSVIPVYIRNDMTEPHKPLTQLLPGISREALDFLEQILTFSPMDRLTAEEALSHPYMSIYSFPMDEPISSHPFHIEDEVDDILLMDETHSHIYNWERYHDCQFSEHDWPVHNNFDIDEVQLDPRALSDVTDEEEVQVDPRKYLDGDREKYLEDPAFDTNYSTEPCWQYSDHHENKYCDLECSHTCNYKTRSSSYLDNLVWRESEVNHYYEPKLIIDLSNWKEQSKEKSDKKGKSKCERNGLVKAQIALEEASQQLAGKEREKNQGFDFDSFIAGTIQLSSQHEPTDVVDKLNDLNSSVSQLELKSLISKSVSQEKQEKGMANLAQLEALYQSSWDSQFVSGGEDCFFINQFCEVRKDEQVEKENTYTSYLDKFFSRKEDTEMLETEPVEDGKLGERGHEEGFLNNSGEFLFNKQLESIGIPQFHSPVGSPLKSIQATLTPSAMKSSPQIPHQTYSSILKHLN

SEQ ID NO: 676 - DNA, 2118 bp, Homo sapien
ctgtgaagatggcgctctccagggtgtgctgggctcggtcggctgtgtggggctcggcagtcacccctggacattttgtcacccggaggctgcaacttggtcgctctggcctggcttggggggcccctcggtcttcaaagcttcacctttctccaaaggcagatgtgaagaacttgatgtcttatgtggtaaccaagacaaaagcgattaatgggaaataccatcgtttcttgggtcgtcatttcccccgcttctatatcctgtacacaatcttcatgaaaggattgcagatgttatgggctgatgccaaaaaggctagaagaataaagacaaatatgtggaagcacaatataaagtttcatcaacttccataccgggagatggagcatttgagacagttccgccaagacgtcaccaagtgtcttttcctaggtattatttccattccaccttttgccaactacctggtcttcttgctaatgtacctgtttcccaggcaactactgatcaggcatttctggaccccaaaacaacaaactgatttcttagatatctatcatgctttccggaagcagtcccacccagaaattattagttatttagaaaaggtcatccctctcatttctgatgcaggactccggtggcgtctgacagatctgtgcaccaagatacagcgtggtacccacccagcaatacatgatatcttggctctgagagagtgtttctctaaccatcctctgggcatgaaccaactccaggctttgcacgtgaaagccttgagccgggccatgcttctcacatcttacctgcctcctcccttgttgagacatcgtttgaagactcatacaactgtgattcaccaactggacaaggctttggcaaagctggggattggccagctgactgctcaggaagtaaaatcggcttgttatctccgtggcctgaattctacgcatattggtgaagataggtgtcgaacttggctgggagaatggctgcagatttcctgcagcctgaaagaagctgagctgtctctcttgctgcacaacgtggtcctgctctccaccaactaccttgggacaaggcgctgaatgaaccatggagcggatggcattgtcctgcagtcgtatagtatagcagtgcaggaacaaacagcacttgccagcaaagtctgtgtgtactgttaagtgtgtgggaggcagagagaggagcaggggccatgggcttcacagcatggcacacctgtgggaactgcagacattcctctcacagctagaactgaaacaaaccctcttgctaggggtggtccgtgtgaggtgtcatcctgtccccctcataattactaatagctggaactggcagcagcctctactgggcttttactgtgatgtgttcagttcatgtcctaggaagtcagcttttgccccaggtgggaatccttatttggcttaggactgatccacttccatgttacttacatctgtgggtttttgttgttgctgttagaaaatttttggctggtgaaaacagcactcctttggctggagcacttgtgtccatgcatgtacttgggtgtttccctccatcctttctgatatgaccaaaaatcaagttgttttgttttttgtcaccttcactggcatgggctaaccacttctttttcaaaccctctgaacacctttttctgatgggtaacttgcaggaatattctattggaaaagataacaggaagtacaagtgcttcttgaccccttcctcaatgtttctagccttcactctccattgtcttttctgggctgtattacagccctctgtggatcttcaactctgctgcctccactgtgatgcagcagtccaactgtaactgacagtggctgccttctctgggccatggatcacacctgtaaggtactaattactgcccagcctggggagatcaggagaggtctgcatagttagtaagttgggtttagcttttgtgtgtgcatcagtgacttagagttctgtaataacttattgtaaatgcatgaagcactgtttttaaacccaagtaaagactgcttgaaacctgttgatggaaaaaaaaaaaaaaaaaaaaaaaaaaaaaaaaaaaaaaaa

SEQ ID NO: 677 - protein, 360 aa, Homo sapien
MALSRVCWARSAVWGSAVTPGHFVTRRLQLGRSGLAWGAPRSSKLHLSPKADVKNLMSYVVTKTKAINGKYHRFLGRHFPRFYILYTIFMKGLQMLWADAKKARRIKTNMWKHNIKFHQLPYREMEHLRQFRQDVTKCLFLGIISIPPFANYLVFLLMYLFPRQLLIRHFWTPKQQTDFLDIYHAFRKQSHPEIISYLEKVIPLISDAGLRWRLTDLCTKIQRGTHPAIHDILALRECFSNHPLGMNQLQALHVKALSRAMLLTSYLPPPLLRHRLKTHTTVIHQLDKALAKLGIGQLTAQEVKSACYLRGLNSTHIGEDRCRTWLGEWLQISCSLKEAELSLLLHNVVLLSTNYLGTRR

SEQ ID NO: 678 - DNA, 336 bp, Homo sapien
agactcagctcctggtgaagctcccagccatcagccatgagggtcttgtatctcctcttctcgttcctcttcatattcctgatgcctcttccaggtgtttttggtggtataggcgatcctgttacctgccttaagagtggagccatatgtcatccagtcttttgccctagaaggtataaacaaattggcacctgtggtctccctggaacaaaatgctgcaaaaagccatgaggaggccaagaagctgctgtggctgatgcggattcagaaagggctccctcatcagagacgtgcgacatgtaaaccaaattaaactatggtgtccaaagatacgca

SEQ ID NO: 679 - protein, 64 aa, Homo sapien
MRVLYLLFSFLFIFLMPLPGVFGGIGDPVTCLKSGAICHPVFCPRRYKQIGTCGLPGTKCCKKP

SEQ ID NO: 680 - DNA, 5842 bp, Homo sapien
attctcttgctccccgccccgtcgggatcagtcagtgtgatccgaagcgggggagggggggggcggcggccgaacgatgtgcgagaactgcgcagacctggtggaggtgttaaatgaaatatcagatgtagaaggtggtgatggactgcagctcagaaaggaacatactctcaaaatatttacttacatcaattcctggacacagaggcaatgtctatgctgcttcaaggaatataagcatttggagatttttaatcaagtagtgtgtgcacttattaacttagtgattgcccaagttcaagtgctccgggaccagctttgtaaacattgtactaccattaacatagattccacgtggcaagatgagagtaatcaagcagaagaaccactgaatatagatagagagtgtaatgaaggaagtacagaaagacaaaaatcaatagaaaaaaaatcaaactctacaagaatttgtaatctgactgaggaggaatcttcaaagagttctgatccttttagtttatggagtacagatgagaaggaaaaactcttactatgtgtggcaaaaaatttttcaaattcagtttcccttatatactgcttacaagcataatactcaccctactattgaggatatatcaactcaagaaagtaacatattaggggcattctgtgatatgaatgatgtagaagtaccattgcatttgcttcgttatgtatgtttgttttgtgggaaaaatggcctttctctcatgaaggattgctttgaatatggaactcctgaaactttgccatttcttatagcacatgcgtttattacagttgtgtctaatattagaatatggctacatattcccgctgtcatgcagcacattataccttttaggacctatgttattaggtatttatgcaagctctcggatcaggagttacgacagagtgcagctcgtaacatggctgacttaatgtggagcacagtcaaagaaccattggatacaacattatgctttgataaagaaagcctagatcttgcatttaagtactttatgtcacctactttgactatgaggttggctggattgagtcagataacaaatcaactccataccttcaatgatgtgtgcaataatgaatcattagtatcggacacagaaacgtccattgcaaaagaacttgcagactggcttattagcaacaatgtggtggagcatatatttggaccaaatttacatattgagattatcaaacagtgccaagtgattttgaattttttggcagcagaagggcgactgagtactcaacatattgactgtatttgggctgcagcacagttgaaacattgtagtcggtatatacatgacttatttccttcactcatcaagaatttggatcccgtaccacttagacatctacttaatctggtctcagctcttgagccaagtgttcatactgaacagacactgtacttggcatccatgttaattaaagcactgtggaataacgcactagcagctaaggctcagttatctaaacagagttcttttgcatctttattaaatactaatattcccattggaaataagaaagaggaagaagagcttagaagaacagctccatcaccttggtcacctgcagctagtcctcaaagcagtgataatagcgatacacatcaaagtggaggtagtgacattgaaatggatgagcaacttattaatagaaccaaacatgtgcaacaacgactttcagacacagaggaatccatgcagggaagttctgacgaaactgccaacagtggtgaagatggaagcagtggtcctggtagcagtagtgggcatagtgatggatctagcaatgaggttaattctagccacgcaagccagtcagctgggagccctggcagtgaggtacagtcagaagacattgcagatattgaagccctcaaagaggaagatgaagacgatgatcatggtcataatcctcccaaaagcagttgtggtacagatcttcggaatagaaagttagagagtcaagcaggcatttgcctgggggactcccaaggcacgtcagaaagaaatgggacaagcagcggaacaggaaaggacctggtttttaacactgaatcattgccatcagtagataatcgaatgcgaatgctggatgcttgttcacactctgaagacccagaacatgatatttcaggggaaatgaatgctactcatatagcacaagggtctcaggagtcttgtatcacacgaactggggacttccttggggagactattgggaatgaattatttaattgtcgacaatttattggtccacagcatcaccaccaccaccaccaccatcaccaccaccacgatgggcatatggttgatgatatgctaagtgcagatgatgtcagttgtagtagctcccaggttagtgcaaaatcagaaaaaaatatggctgattttgatggtgaagaatctggatgtgaagaggagctagttcagattaattcacatgcggaactgacatctcacctccaacaacatcttcccaatttagcttccatttaccatgaacatcttagtcaaggacctgtagttcataaacatcaattcaacagtaatgctgttacagacattaatttggataatgtttgcaagaaaggaaatactttgttgtgggatatagtccaagatgaagatgcagttaatctttctgaaggattaataaatgaagcagagaaacttctttgttcgttagtatgttggtttacagatagacaaattcgaatgagattcattgaaggttgccttgaaaacttgggaaacaacagatcagtagtaatttcacttcgtcttcttccaaaactatttggtacttttcagcagtttgggagcagttacgatacacactggataacaatgtgggcagaaaaagaactgaacatgatgaagcttttctttgataatttggtatactacattcaaactgtgagagaaggaagacaaaaacatgcactgtacagccatagtgctgaagttcaagttcgtcttcaattcttgacttgtgtattttcaactctgggatcacctgatcatttcaggttaagtttagagcaagttgacatcttatggcattgtttagtagaagattctgaatgttatgatgatgcactccattggtttttaaatcaagttcgaagtaaagatcaacatgctatgggtatggaaacctacaaacatcttttcctggagaagatgccccagctaaaacctgaaacaattagcatgactggcttaaacctgtttcagcatctctgtaacttggctcgattggctaccagtgcctatgatggttgttcaaattctgagctgtgtggtatggaccaattttggggcattgctttaagagcacaatctggtgatgtcagtcgagcagctatccagtatattaactcctattatattaatggtaaaacaggtttggagaaggagcaagaatttattagtaagtgcatggagagtcttatgatagcttctagcagtcttgaacaggaatcacactcaagtctcatggttatagaaagaggactccttatgctgaagacacatctggaagcgtttaggagaaggtttgcatatcatctgagacagtggcaaattgaaggcactggtattagtagtcatttgaaagcactgagtgacaaacagtctctgccgctaagggttgtatgccagccagctggacttcctgacaagatgactattgaaatgtatcctagtgaccaggtagcagatcttagggctgaagtaactcattggtatgaaaatttacagaaagaacaaataaatcaacaagctcagcttcaggagtttggtcaaagcaaccgaaaaggagagtttcctggaggcctcatgggacctgtcaggatgatttcatctggacacgagttaacaacagattatgatgaaaaagcacttcatgagcttggttttaaggatatgcagatggtatttgtatctttgggtgcaccaaggagagagcggaaaggggaaggtgttcagctgccagcatcttgcctcccaccccctcagaaggacaacattccaatgcttttgcttttacaagagcctcatttaactactctttttgatttattagagatgcttgcatcatttaaaccaccctcaggaaaagtggcagtggatgatagtgagagcttacgatgtgaagaacttcatcttcatgcagaaaatctgtctaggcgggtctgggagctactgatgcttcttcctacatgtcctaatatgttgatggcattccagaatatctcagatgagcagagttttaaaagctcagtctgatcacaggtctagacatgaagtttcacattattcaatgtggctcttggtgagttgggctcattgctgttctttagtgaaatctagccttgctgatagcgatcatttacaagattggctaaagaaattgactctccttattcctgagactgcagtttgtcatgaatcatgcagtggtctctataagttatccctgtcagggctggatggaggagactcaatcaatcgttcttttctgctattggctgcctcaacattattgaaatttcttcctgatgctcaagcactcaaacctattaggatagatgattatgaggaagaaccaatattaaaaccaggatgtaaagagtatttttggttgttatgcaaattagttgacaacatacatataaaggacgctagtcagacaacgctcctcgacttagatgccttggcaagacatttggctgactgtattcgaagtagggagatccttgatcatcaggatggtaatgtagaagatgatgggcttacaggactcctaaggcttgcaacaagtgttgttaaacacaaaccaccctttaaattttcaagggaaggacaggtaagtgttaagataatcaaatgtttctatgaaatgtgattgaaattttttgttgttacattgtgtattagtccgtttttacactgctcataaaggcatacccgagactgggcagtttacaaaagaaaagggtttaattcgactcagagttccatgtggctggggaggcctcacaatcgtgccggaaggcaagtccgggcaagtccgagcaagtcgcatcttatgtgaatggcggcaggcaaaaaaagaatgagaaccaagcgaaagcggtttctccttataaaaccatcagatctcaagagacttattcacttatcacaagaacagtatgggggaaaccgccgccatgattcagtcatctcccaccaggtccctcccacaacaatgggaattataggcaatataattcaagatgagatttgggtggagacacggccaaactgtatcacattgtatgtggatatgttaatttttttaaacatacagacataaaaattgctagaaattaccgacaagaaaagcaaattttgaataaattgaattctggaaatataaaacgggcttgtttttagaatacaaaatcagatgttaattcctgtgactgactgaatatagaaaggtaacctaaggctgggcacggtggctcgtgcctatagtcctggcactttgagtggctgaggtgggtggattgcttgaaaccaggagttcgagaccagccaaggcaacatggtgaaacctcatccctacagaaaatacaaaaatttgctgggtgtggtggcacacacctgtagtctcagctactcgggaggctgaggtgggaggattgcttgagctcaggaggtcgaggcttcagtgagccatgatcacaccactgcactgtagcctaggtgacagaaggagaacgtgtctc

SEQ ID NO: 681 - protein, 1273 aa, Homo sapien
MRRKNSYYVWQKIFQIQFPLYTAYKHNTHPTIEDISTQESNILGAFCDMNDVEVPLHLLRYVCLFCGKNGLSLMKDCFEYGTPETLPFLIAHAFITVVSNIRIWLHIPAVMQHIIPFRTYVIRYLCKLSDQELRQSAARNMADLMWSTVKEPLDTTLCFDKESLDLAFKYFMSPTLTMRLAGLSQITNQLHTFNDVCNNESLVSDTETSIAKELADWLISNNVVEHIFGPNLHIEIIKQCQVILNFLAAEGRLSTQHIDCIWAAAQLKHCSRYIHDLFPSLIKNLDPVPLRHLLNLVSALEPSVHTEQTLYLASMLIKALWNNALAAKAQLSKQSSFASLLNTNIPIGNKKEEEELRRTAPSPWSPAASPQSSDNSDTHQSGGSDIEMDEQLINRTKHVQQRLSDTEESMQGSSDETANSGEDGSSGPGSSSGHSDGSSNEVNSSHASQSAGSPGSEVQSEDIADIEALKEEDEDDDHGHNPPKSSCGTDLRNRKLESQAGICLGDSQGTSERNGTSSGTGKDLVFNTESLPSVDNRMRMLDACSHSEDPEHDISGEMNATHIAQGSQESCITRTGDFLGETIGNELFNCRQFIGPQHHHHHHHHHHHHDGHMVDDMLSADDVSCSSSQVSAKSEKNMADFDGEESGCEEELVQINSHAELTSHLQQHLPNLASIYHEHLSQGPVVHKHQFNSNAVTDINLDNVCKKGNTLLWDIVQDEDAVNLSEGLINEAEKLLCSLVCWFTDRQIRMRFIEGCLENLGNNRSVVISLRLLPKLFGTFQQFGSSYDTHWITMWAEKELNMMKLFFDNLVYYIQTVREGRQKHALYSHSAEVQVRLQFLTCVFSTLGSPDHFRLSLEQVDILWHCLVEDSECYDDALHWFLNQVRSKDQHAMGMETYKHLFLEKMPQLKPETISMTGLNLFQHLCNLARLATSAYDGCSNSELCGMDQFWGIALRAQSGDVSRAAIQYINSYYINGKTGLEKEQEFISKCMESLMIASSSLEQESHSSLMVIERGLLMLKTHLEAFRRRFAYHLRQWQIEGTGISSHLKALSDKQSLPLRVVCQPAGLPDKMTIEMYPSDQVADLRAEVTHWYENLQKEQINQQAQLQEFGQSNRKGEFPGGLMGPVRMISSGHELTTDYDEKALHELGFKDMQMVFVSLGAPRRERKGEGVQLPASCLPPPQKDNIPMLLLLQEPHLTTLFDLLEMLASFKPPSGKVAVDDSESLRCEELHLHAENLSRRVWELLMLLPTCPNMLMAFQNISDEQSFKSSV

SEQ ID NO: 682 - DNA, 3573 bp, Homo sapien
ccggtgcagcggctggcgatcggccgcggaggtgcgtgcagggcccgcgccgccgccggtatctccaccgccaacacctcagccactgccactgccacagccacacgaggccccccaccgtgcgctccgccgctgcggtcccggatccgcgctccacgcccgcagcccgcggcgccaccagcccagcatgcaccagctctttcagaaaaccccagaaatttactccgtggagctcagcggaactaaggacatcgtgaaaacagacaagggggatggcaaggagaagtataggggtctgaagaacaactgcctggaactcaaaaagaaaaatcacaaagaggagtttcagaaagaactccatctggatgaccacaaactcagcaatagggaattggaagagaaatatggcacagacatcattatgggtctctccagcaccagagctgccgagctcctggcccgggatgggcccaactccctcacccctcccaagcagacgcctgagatcgtcaagttcctcaagcagatggtgggggggttctctatcctcctgtgggtgggcgcctttctctgttggattgcatatgggattcagtactccagcgacaagtctgcatccctgaacaacgtgtacttgggctgtgtgcttggtctggtggtcattttaacggggatctttgcttattaccaagaggcaaaaagcaccaacatcatgtccagcttcaataagatgatccctcagcaagctctcgtcatccgagattccgagaagaagaccatcccttcagagcagctggtggtgggggacattgtggaggtcaaaggaggagaccagatccctgcagacatcagggtgctgtcttctcaggggtgtcgggtggataactcatctctcacgggggagtctgagccccagccccgctcctctgagtttacccatgaaaaccccctggaaacaaagaacatctgcttctattccacaacgtgtctggaaggcactgtcaccggcatggttatcaacacgggtgaccgcaccatcattggccatattgcctcattggcctcaggagttggaaatgagaagacgcccattgccattgagatcgagcactttgttcacattgtggcaggagtggctgtctccatcggcatccttttcttcatcatcgctgtgtccctgaagtatcaagtcctggactccatcatcttcctcattggcatcattgtggccaatgtgcccgagggcctcctggccactgtcactgtgaccctgtcgctgacagcaaaacggatggccaagaagaactgcctggtgaagaacctggaggctgtggagaccctcggctccacctccatcatctgctcggacaagactgggacactgacccagaacaggatgacagtggcccatctgtggttcgacaatcagatctttgtggctgacaccagtgaggaccattcaaaccaagtctttgaccaaagctctaggacttgggcctccttatccaagataataacattgtgtaaccgagcagagttcaagccaggacaggaaaatgtccccatcatgaagaaagctgtgattggagatgcctcagaaactgctcttttaaaattctcagaggtcattttgggtgatgtgatggaaattagaaaaagaaaccgcaaagtagctgaaatcccttttaactctactaataaatttcagctctccatccacgagatggatgacccccacggcaagcgcttcctcatggtgatgaagggggcccctgagcgcattctagagaaatgcagcaccatcatgatcaacggcgaggagcacccactggacaagagcactgccaagaccttccacacagcctacatggagctgggcgggttgggcgagcgtgtgctgggtttctgtcatctctacctgccagcagacgagtttccagaaacctactcatttgacatagacgctatgaactttccgacctccaacctctgttttgtgggactcttgtcaatgatcgatccccctcggtccaccgtgccagatgcagtcaccaaatgccggagtgcagggatcaaggttattatggttactggtgatcatcccatcacagccaaagctattgccaagagtgtggggatcatttcagccaacagtgaaacagtggaagacattgcacatcgcctcaacattgctgtggagcaagttaacaaacgggatgccaaggccgctgtggtgactggcatggagctgaaggacatgagctcagaacagctggatgagatcttagccaactaccaggagattgtctttgcccggacatccccccagcagaagctgatcattgtggagggctgtcagaggcaggatgctgttgttgctgtgaccggggatggagttaatgactctccggctctaaagaaggcagacattgggattgccatggggatagcaggttctgatgcagccaaaaatgcagccgacatggtcttgctggacgacaacttcgcatccatcgtcacaggggtggaggaaggtcgcctgatctttgacaacctcaagaagactattgcttattccctgaccaagaacattgccgagctgtgcccctttctgatctacatcattgtcgggctccccctgcccattggcaccatcaccattctgttcattgacttggggacagacattatcccctccattgccttggcgtacgagaaagctgaaagtgacatcatgaacaggaagcctcgccacaagaataaggacaggctggtgaaccagccgctcgctgtgtactcatacctgcacattggcctcatgcaagccctgggagctttccttgtgtatttcaccgtctatgcacaagagggctttctgccccgcactctcattaacctgcgggtagaatgggagaaggactacgtgaatgacttgaaagacagctatgggcaggaatggacaaggtaccagagggaatacctagaatggacgggctacacggctttctttgttggcatcctagtccagcaaatagcagatctgatcatcaggaaaacccggaggaattccatcttccagcagggtctcttcagaaataaagtcatctgggtggggatcacctcacagatcatcattggtctgatcctctcctatggcctcggaagtgtcacagccttgagtttcaccatgcttagggctcagtactggtttgtggctgtgccgcacgccatcctgatctgggtgtatgatgaggtgcggaagctcttcatcaggctctaccctggaagctggtgggataagaacatgtattattaagaccacctcccttcctatgtctctcagcagcacgttggggcacacttgttcatcttctgaccgtttgctgggctattcccctgcagtgcagacatcgtcaaaattcatacaagaggaaattttcatgcagaaagctgtatgcaggatgctcactgatgttttgcactttaaaactgaaattcaactctttatataggattttcttttctatctccatctcctcattaaaaaatacgtacatttcgaggtaatggtat

SEQ ID NO: 683 - protein, 1042 aa, Homo sapien
MHQLFQKTPEIYSVELSGTKDIVKTDKGDGKEKYRGLKNNCLELKKKNHKEEFQKELHLDDHKLSNRELEEKYGTDIIMGLSSTRAAELLARDGPNSLTPPKQTPEIVKFLKQMVGGFSILLWVGAFLCWIAYGIQYSSDKSASLNNVYLGCVLGLVVILTGIFAYYQEAKSTNIMSSFNKMIPQQALVIRDSEKKTIPSEQLVVGDIVEVKGGDQIPADIRVLSSQGCRVDNSSLTGESEPQPRSSEFTHENPLETKNICFYSTTCLEGTVTGMVINTGDRTIIGHIASLASGVGNEKTPIAIEIEHFVHIVAGVAVSIGILFFIIAVSLKYQVLDSIIFLIGIIVANVPEGLLATVTVTLSLTAKRMAKKNCLVKNLEAVETLGSTSIICSDKTGTLTQNRMTVAHLWFDNQIFVADTSEDHSNQVFDQSSRTWASLSKIITLCNRAEFKPGQENVPIMKKAVIGDASETALLKFSEVILGDVMEIRKRNRKVAEIPFNSTNKFQLSIHEMDDPHGKRFLMVMKGAPERILEKCSTIMINGEEHPLDKSTAKTFHTAYMELGGLGERVLGFCHLYLPADEFPETYSFDIDAMNFPTSNLCFVGLLSMIDPPRSTVPDAVTKCRSAGIKVIMVTGDHPITAKAIAKSVGIISANSETVEDIAHRLNIAVEQVNKRDAKAAVVTGMELKDMSSEQLDEILANYQEIVFARTSPQQKLIIVEGCQRQDAVVAVTGDGVNDSPALKKADIGIAMGIAGSDAAKNAADMVLLDDNFASIVTGVEEGRLIFDNLKKTIAYSLTKNIAELCPFLIYIIVGLPLPIGTITILFIDLGTDIIPSIALAYEKAESDIMNRKPRHKNKDRLVNQPLAVYSYLHIGLMQALGAFLVYFTVYAQEGFLPRTLINLRVEWEKDYVNDLKDSYGQEWTRYQREYLEWTGYTAFFVGILVQQIADLIIRKTRRNSIFQQGLFRNKVIWVGITSQIIIGLILSYGLGSVTALSFTMLRAQYWFVAVPHAILIWVYDEVRKLFIRLYPGSWWDKNMYY

SEQ ID NO: 684 - DNA, 2469 bp, Homo sapien
cccagacacctgctcactcaccaccagctgggctccgctgggcctgcccggcacccaccccggccaccaagggcagcagcttttccagaatttggctggcaggcctagtcaccccacctcgccacctcaccactgcacctcggaggccagccctgtccactccactctgtgcctggcttctcttgcctgccttgggccttcgtgtggccctccacggtgtctgggactgagtgcccctcttgcctcctgaagagcagccatggccacctacaaagtcagggtggccacaggcaccgacctcttgtcgggaacacgggactccatctcactgaccattgtggggacacaaggagagagccataagcagctgctgaaccactttgggagagactttgcaactggggcggtgggccagtacaccgtgcagtgccctcaggacctgggtgagctcatcatcatccgcctgcacaaagagcggtacgccttcttccccaaggacccttggtactgcaactatgtgcagatctgtgcccccaacggccgtatctaccacttccccgcctaccagtggatggatggctacgagaccctggcactccgggaggccacaggaaagacaacagcagatgactcgctccccgtcctcctggagcacagaaaagaggagatcagagccaagcaggacttctaccactggcgagtctttcttcctggcctgcccagctatgtgcacattcccagttaccgccctccggtgcggaggcatcgcaaccccaaccggcctgagtggaatggctatattccgggattcccaattctcatcaactttaaggccaccaagttcctgaacttaaatctccgctactccttcctcaagacggcctccttcttcgtccgcctggggcccatggcactggctttcaaagtccgcggcctgttggactgcaaacattcgtggaagaggctgaaggacattaggaaaattttccctggcaagaaatctgtcgtctccgagtacgtggccgagcactgggcagaggacaccttctttgggtaccagtacctcaacggcgtcaaccccggcctgatccgccgctgcacgcggatcccagacaagttccccgtcacagacgacatggtggctccgttcctgggcgagggaacgtgcttgcaagcggagctggagaaggggaacatttacctggccgactaccgcatcatggagggcatccccaccgtggagctcagcggccggaagcagcaccactgcgcccccctctgcctgctgcactttggacccgagggcaagatgatgcccatcgccatccagctcagccagacccctgggccagattgccccatcttcctgcccagtgattctgagtgggactggctgctagccaagacgtgggtacgctatgcggagttctacagccacgaggccatcgcccacctgctggagacacacctcattgctgaggccttctgcctggccttgctgaggaacctgcccatgtgccaccccctctacaagctcctcatcccccatacccgatacaccgtccagatcaacagcattggccgggccgttctcctcaatgagggggggctctctgccaagggcatgtccctgggcgtggaaggctttgctggggtgatggtacgggctctgtcggagctcacctatgacagcctctacctccccaatgactttgtggagcgtggggtccaggacctgcctggatattactaccgcgatgacagcttggcggtgtggaatgcactggagaagtatgtgacggagatcatcacctattattacccgagtgacgcagccgtggagggtgatccggaattgcagtcttgggtgcaggaaatatttaaagagtgcctcctggggcgggagagctcaggcttccctaggtgcttgcgaaccgtgcctgagctgatccgatatgtcactatagtcatctacacctgctctgccaagcacgctgctgtcaacacaggccagatggagttcaccgcctggatgcccaacttcccagcgtccatgcggaatccaccgattcagactaaggggctgaccactctggagaccttcatggacacgttgccggatgtgaagaccacgtgcatcacgctgctggtgctctggaccctcagccgagagcctgacgacaggcggcccctgggacacttcccggacattcacttcgtggaggaggccccgcggaggagcatagaggcgttccgccagcgcctgaaccagatctcacacgacatccgccagcgcaacaagtgccttcccatcccctactactacctggacccggtgctgattgagaacagcatttctatttaggagcgcgcttcccgtctctcctctccccattctgtgccctactattttcaacaaaacaaaacaaacaagcaaaaaacacaaaaacctcagagaccaaaacacca

SEQ ID NO: 685 - protein, 701 aa, Homo sapien
MATYKVRVATGTDLLSGTRDSISLTIVGTQGESHKQLLNHFGRDFATGAVGQYTVQCPQDLGELIIIRLHKERYAFFPKDPWYCNYVQICAPNGRIYHFPAYQWMDGYETLALREATGKTTADDSLPVLLEHRKEEIRAKQDFYHWRVFLPGLPSYVHIPSYRPPVRRHRNPNRPEWNGYIPGFPILINFKATKFLNLNLRYSFLKTASFFVRLGPMALAFKVRGLLDCKHSWKRLKDIRKIFPGKKSVVSEYVAEHWAEDTFFGYQYLNGVNPGLIRRCTRIPDKFPVTDDMVAPFLGEGTCLQAELEKGNIYLADYRIMEGIPTVELSGRKQHHCAPLCLLHFGPEGKMMPIAIQLSQTPGPDCPIFLPSDSEWDWLLAKTWVRYAEFYSHEAIAHLLETHLIAEAFCLALLRNLPMCHPLYKLLIPHTRYTVQINSIGRAVLLNEGGLSAKGMSLGVEGFAGVMVRALSELTYDSLYLPNDFVERGVQDLPGYYYRDDSLAVWNALEKYVTEIITYYYPSDAAVEGDPELQSWVQEIFKECLLGRESSGFPRCLRTVPELIRYVTIVIYTCSAKHAAVNTGQMEFTAWMPNFPASMRNPPIQTKGLTTLETFMDTLPDVKTTCITLLVLWTLSREPDDRRPLGHFPDIHFVEEAPRRSIEAFRQRLNQISHDIRQRNKCLPIPYYYLDPVLIENSISI

SEQ ID NO: 686 - DNA, 2068 bp, Homo sapien
ttgaactcctggagcccgtcacccaggaaaccggccgcaatcgccggccgacctgaagctggtttcatggcagcctcaaagaaggcagttttggggccattggtgggggcggtggaccagggcaccagttcgacgcgctttttggttttcaattcaaaaacagctgaactacttagtcatcatcaagtagaaataaaacaagagttcccaagagaaggatgggtggaacaggaccctaaggaaattctacattctgtctatgagtgtatagagaaaacatgtgagaaacttggacagctcaatattgatatttccaacataaaagctattggtgtcagcaaccagagggaaaccactgtagtctgggacaagataactggagagcctctctacaatgctgtggtgtggcttgatctaagaacccagtctaccgttgagagtcttagtaaaagaattccaggaaataataactttgtcaagtccaagacaggccttccacttagcacttacttcagtgcagtgaaacttcgttggctccttgacaatgtgagaaaagttcaaaaggccgttgaagaaaaacgagctctttttgggactattgattcatggcttatttggagtttgacaggaggagtcaatggaggtgtccactgtacagatgtaacaaatgcaagtaggactatgcttttcaacattcattctttggaatgggataaacaactctgcgaattttttggaattccaatggaaattcttccaaatgtccggagttcttctgagatctatggcctaatgaaagctggggccttggaaggtgtgccaatatctgggtgtttaggggaccagtctgctgcattggtgggacaaatgtgcttccagattggacaagccaaaaatacgtatggaacaggatgtttcttactatgtaatacaggccataagtgtgtattttctgatcatggccttctcaccacagtggcttacaaacttggcagagacaaaccagtatattatgctttggaaggttctgtagctatagctggtgctgttattcgctggctaagagacaatcttggaattataaagacctcagaagaaattgaaaaacttgctaaagaagtaggtacttcttatggctgctacttcgtcccagcattttcggggttatatgcaccttattgggagcccagcgcaagagggataatctgtggactcactcagttcaccaataaatgccatattgcttttgctgcattagaagctgtttgtttccaaactcgagagattttggatgccatgaatcgagactgtggaattccactcagtcatttgcaggtagatggaggaatgaccagcaacaaaattcttatgcagctacaagcagacattctgtatataccagtagtgaagccctcaatgcccgaaaccactgcactgggtgcggctatggcggcaggggctgcagaaggagtcggcgtatggagtctcgaacccgaggatttgtctgccgtcacgatggagcggtttgaacctcagattaatgcggaggaaagtgaaattcgttattctacatggaagaaagctgtgatgaagtcaatgggttgggttacaactcaatctccagaaagtggtattccataaaacctaccaactcatggattcccaagatgtgagctttttacataatgaaagaacccagcaattctgtctcttaatgcaatgacactattcatagactttgattttatttataagccacttgctgcatgaccctccaagtagacctgtggcttaaaataaagaaaatgcagcaaaaagaatgctatagaaatatttggtggtttttttttttttaaacatccacagttaaggttgggccagctacctttgggggtgaccccccccattgccataacatcctgctccattccctctaagatgtaggaagaattcggatccttaccattggaatcttccatcgaacatactcaaacacttttgggccaggatttgagtctctgcatgacatatacttgattaaaaggttattactaacctgttaaaaatc

SEQ ID NO: 687 - protein, 524 aa, Homo sapien
MAASKKAVLGPLVGAVDQGTSSTRFLVFNSKTAELLSHHQVEIKQEFPREGWVEQDPKEILHSVYECIEKTCEKLGQLNIDISNIKAIGVSNQRETTVVWDKITGEPLYNAVVWLDLRTQSTVESLSKRIPGNNNFVKSKTGLPLSTYFSAVKLRWLLDNVRKVQKAVEEKRALFGTIDSWLIWSLTGGVNGGVHCTDVTNASRTMLFNIHSLEWDKQLCEFFGIPMEILPNVRSSSEIYGLMKAGALEGVPISGCLGDQSAALVGQMCFQIGQAKNTYGTGCFLLCNTGHKCVFSDHGLLTTVAYKLGRDKPVYYALEGSVAIAGAVIRWLRDNLGIIKTSEEIEKLAKEVGTSYGCYFVPAFSGLYAPYWEPSARGIICGLTQFTNKCHIAFAALEAVCFQTREILDAMNRDCGIPLSHLQVDGGMTSNKILMQLQADILYIPVVKPSMPETTALGAAMAAGAAEGVGVWSLEPEDLSAVTMERFEPQINAEESEIRYSTWKKAVMKSMGWVTTQSPESGIP

SEQ ID NO: 688 - DNA, 572 bp, Homo sapien
gtacctgtctataaggagtcctgcttatcacaatgaatgttctcctgggcagcgttgtgatctttgccaccttcgtgactttatgcaatgcatcatgctatttcatacctaatgagggagttccaggagattcaaccaggaaatgcatggatctcaaaggaaacaaacacccaataaactcggagtggcagactgacaactgtgagacatgcacttgctacgaaacagaaatttcatgttgcacccttgtttctacacctgtgggttatgacaaagacaactgccaaagaatcttcaagaaggaggactgcaagtatatcgtggtggagaagaaggacccaaaaaagacctgttctgtcagtgaatggataatctaatgtgcttctagtaggcacagggctcccaggccaggcctcattctcctctggcctctaatagtcaatgattgtgtagccatgcctatcagtaaaaagatttttgagcaaacacttgaatatgtgtgtccttttaatttataatttatgtatgcattgatttaatacacattataaagaatacaaaacatttaaaaa

SEQ ID NO: 689 - protein, 77 aa, Homo sapien
MNVLLGSVVIFATFVTLCNASCYFIPNEGVPGDSTRMFLHLWVMTKTTAKESSRRRTASISWWRRRTQKRPVLSVNG

SEQ ID NO: 690 - DNA, 807 bp, Homo sapien
acactctaccaccatgaatccattcctgatccttgcctttgtgggagctgctgttgctgtcccctttgacgatgatgacaagattgttgggggctacacctgtgaggagaattctctcccctaccaggtgtccctgaattctggctcccacttctgcggtggctccctcatcagcgaacagtgggtggtatcagcagctcactgctacaagacccgcatccaggtgagactgggagagcacaacatcaaagtcctggaggggaatgagcagttcatcaatgcggccaagatcatccgccaccctaaatacaacagggacactctggacaatgacatcatgctgatcaaactctcctcacctgccgtcatcaatgcccgcgtgtccaccatctctctgcccaccgcccctccagctgctggcactgagtgcctcatctccggctggggcaacactctgagctttggtgctgactacccagacgagctgaagtgcctggatgctccggtgctgacccaggctgagtgtaaagcctcctaccctggaaagattaccaacagcatgttctgtgtgggcttccttgagggaggcaaggattcctgccagcgtgactctggtggccctgtggtctgcaacggacagctccaaggagttgtctcctggggccatggctgtgcctggaagaacaggcctggagtctacaccaaggtctacaactatgtggactggattaaggacaccatcgctgccaacagctaaagcccccggtccctctgcagtctctataccaataaagtggccctgctctc

SEQ ID NO: 691 - protein, 247 aa, Homo sapien
MNPFLILAFVGAAVAVPFDDDDKIVGGYTCEENSLPYQVSLNSGSHFCGGSLISEQWVVSAAHCYKTRIQVRLGEHNIKVLEGNEQFINAAKIIRHPKYNRDTLDNDIMLIKLSSPAVINARVSTISLPTAPPAAGTECLISGWGNTLSFGADYPDELKCLDAPVLTQAECKASYPGKITNSMFCVGFLEGGKDSCQRDSGGPVVCNGQLQGVVSWGHGCAWKNRPGVYTKVYNYVDWIKDTIAANS

SEQ ID NO: 692 - DNA, 1500 bp, Homo sapien
gagtgggaatctcaaagcagttgagtaggcagaaaaaagaacctcttcattaaggattaaaatgtataggccagcacgtgtaacttcgacttcaagatttctgaatccatatgtagtatgtttcattgtcgtcgcaggggtagtgatcctggcagtcaccatagctctacttgtttactttttagcttttgatcaaaaatcttacttttataggagcagttttcaactcctaaatgttgaatataatagtcagttaaattcaccagctacacaggaatacaggactttgagtggaagaattgaatctctgattactaaaacattcaaagaatcaaatttaagaaatcagttcatcagagctcatgttgccaaactgaggcaagatggtagtggtgtgagagcggatgttgtcatgaaatttcaattcactagaaataacaatggagcatcaatgaaaagcagaattgagtctgttttacgacaaatgctgaataactctggaaacctggaaataaacccttcaactgagataacatcacttactgaccaggctgcagcaaattggcttattaatgaatgtggggccggtccagacctaataacattgtctgagcagagaatccttggaggcactgaggctgaggagggaagctggccgtggcaagtcagtctgcggctcaataatgcccaccactgtggaggcagcctgatcaataacatgtggatcctgacagcagctcactgcttcagaagcaactctaatcctcgtgactggattgccacgtctggtatttccacaacatttcctaaactaagaatgagagtaagaaatattttaattcataacaattataaatctgcaactcatgaaaatgacattgcacttgtgagacttgagaacagtgtcacctttaccaaagatatccatagtgtgtgtctcccagctgctacccagaatattccacctggctctactgcttatgtaacaggatggggcgctcaagaatatgctggccacacagttccagagctaaggcaaggacaggtcagaataataagtaatgatgtatgtaatgcaccacatagttataatggagccatcttgtctggaatgctgtgtgctggagtacctcaaggtggagtggacgcatgtcagggtgactctggtggcccactagtacaagaagactcacggcggctttggtttattgtggggatagtaagctggggagatcagtgtggcctgccggataagccaggagtgtatactcgagtgacagcctaccttgactggattaggcaacaaactgggatctagtgcaacaagtgcatccctgttgcaaagtctgtatgcaggtgtgcctgtcttaaattccaaagctttacatttcaactgaaaaagaaactagaaatgtcctaatttaacatcttgttacataaatatggtttaacaaacactgtttaacctttctttattattaaaggttttctattttctcc

SEQ ID NO: 693 - protein, 418 aa, Homo sapien
MYRPARVTSTSRFLNPYVVCFIVVAGVVILAVTIALLVYFLAFDQKSYFYRSSFQLLNVEYNSQLNSPATQEYRTLSGRIESLITKTFKESNLRNQFIRAHVAKLRQDGSGVRADVVMKFQFTRNNNGASMKSRIESVLRQMLNNSGNLEINPSTEITSLTDQAAANWLINECGAGPDLITLSEQRILGGTEAEEGSWPWQVSLRLNNAHHCGGSLINNMWILTAAHCFRSNSNPRDWIATSGISTTFPKLRMRVRNILIHNNYKSATHENDIALVRLENSVTFTKDIHSVCLPAATQNIPPGSTAYVTGWGAQEYAGHTVPELRQGQVRIISNDVCNAPHSYNGAILSGMLCAGVPQGGVDACQGDSGGPLVQEDSRRLWFIVGIVSWGDQCGLPDKPGVYTRVTAYLDWIRQQTGI

SEQ ID NO: 694 - DNA, 1375 bp, Homo sapien
tcgaattccggaagccgctcccgacaccctttgcctggctctgtccatattagttcccaggcggccgtcgcgttccagcagcggcacgcagcgcaggcggagcggcagcggggcctcggctctatagagccgagccgctggtacccgcccggtaccgcgcgagccagtgcccctggatcttgcctctgctccgacgccgttccccaccagttagcgacagcgcccgcccctctgaggagacacgaaggtggttccccagccgctcaaatttccggaccaccgcgctttcccctcctcagcctgggctgtgctctctctagaatcctcgggcccccactttcttcccaaactcatcctaaatctctcacacacgcgagtgttcccagccctcaagccagctgctcctcctccgttcattttctgcccctcttcgcaaagcacccccgggatcatcctccgagggcgactttttgagaaatctcggtggagtagtggaccagagcaggggagtttttaaaagccggggcgcgagaaacaggaaggtactatggcttcctcgtctggcaacgatgatgatctcactatccccagagctgctatcaataaaatgatcaaagagactcttcctaatgtccgggtggccaacgatgctcgagagctggtggtgaactgctgcactgaattcattcaccttatatcttctgaagccaatgagatttgtaacaaatcggaaaagaagaccatctcaccagagcatgtcatacaagcactagaaagtttgggatttggctcttacatcagtgaagtaaaagaagtcttgcaagagtgtaaaacagtagcattaaaaagaagaaaggccagttctcgtttggaaaaccttggcattcctgaagaagagttattgagacagcaacaagaattatttgcaaaagctagacagcaacaagcagaattggcccaacaggaatggcttcaaatgcagcaagctgcccaacaagcccagcttgctgctgcctcagccagtgcatctaatcaggcgggatcttctcaggatgaagaagatgatgatgatatctgaaattcaccagctgagtttctatttcttctataaatgtttttccctgcacaacaaaaacagtgaaagaaatgcttatctgtaattttgtatgcatcttggtggacttgtcattggtattctagagatgtctgctataagtttcatctgttgtgtgctatacatgtaaaaactgtctctttgaactattgaaaatttaaggttcagtataatatcaattttgaatttttcctggtgtttatgaaattttagatagcagcaagtcttcgtttgatcataaacagtgtacagataactcaa

SEQ ID NO: 695 - protein, 176 aa, Homo sapien
MASSSGNDDDLTIPRAAINKMIKETLPNVRVANDARELVVNCCTEFIHLISSEANEICNKSEKKTISPEHVIQALESLGFGSYISEVKEVLQECKTVALKRRKASSRLENLGIPEEELLRQQQELFAKARQQQAELAQQEWLQMQQAAQQAQLAAASASASNQAGSSQDEEDDDDI

SEQ ID NO: 696 - DNA, 1865 bp, Homo sapien
actggttttgcgagtggaggatgcagtctctttgtggttcctggtcctgtttgagaacctggggtcttgaggtggcctgtctgtgcctctcctttgtttcggcctgggctgggtggtgcttgtgagcatttgctccaggatccgcagacgtttcggtggtgacacctgccacgcacacgtgccgcactggggaccaggaacagggatgagtcaggcacagtccttgccttctgggagctcatggtccagaattgaggattcactcaacagatgtcccttgagcgcagaggatctggcagccccttctcagggggccggggcccaccgatgttgcatgctgagggtattttactttaacacccatggtgtgtctaggagactgaggtttccctggtttcatacttgctatctttcctcacgctgtgcctgtccccagcctggaaggataggtcagaaatccttcaaggtagctgtttcaggagatctttttctggccccaggtcaagttctctttggttccgtcctgagctcattacctcctggtgaatcatcacaccatatttattggacacctacagcttgctaagcattatatagaggcctgtctttgaggaaaggaaattaaacaagccctgtacagatcccccaagatgagaagtagctttagttgaggccactgctgctcttagcttctctggcccatctatgcttctagatggaacgtgtgtttaagatgcagattacaggtgtgagccaccacacccagcccaggctcattcttttaacagccttagcgcaactactaatgccaccaagagcggacaggaaggcctgggtcccatccccttgcgaagccagtaggtgaaacatggcagcttggcctggttccacttgcatcgccttttggtcctcacagtaatcctcagagtggcccaggtgggtagttggttggttggtttttttttttcagacggtgtctcgctctctcgcccaggctggagtgcagtggtgcgacctcggctcactgcaacctctgtctcctgggtttaagtgattcttcttctgcctcagcctcccaagtagctgggactacagtcatgtgccaccacgcccggctaattttttgtatttttagtagagacgggtttcaccatattgaccaggctggtctcgaactcctgacctcatgatctgcccgcctcagcctcccaaagtgctgggattacaggcgtgagccaccgcggcccaacagcgggaagtattttttccattgagtagatgagcagaatgagactcaaggggttgctcagatgggccgggcatggtggctcacgcctgtaacctcagcactgtgggaggccaagggggcagatcacttcaggtcgggagttccagaccagcctgttcaacatggcgaaaccccattctaccaaaactacaaaaattagccgggctcacgcctgaaatcccagcactttgggagactgaggaggggtcacctgaggtcaggatgtcaagatcagactggccaacagaatgaaaccctgtctctacaaaaatacaaaaattaggccgggtgccgtggctcatgcctgtaatcccagcactttgggaggccgaggcgggcagatcacaaggtcaggtgatcgagaccatcctggctaacttggtgaaaccctgtctctactaaaaaaaaaatacagaaagttagccgggcgtggcacctgtagtcccagctactctggaggctgaagcaggagaatggcatgaacccgggtggcggcgcttgcagtgagctgagctcccaccactgcactccagcctgggcgacacagcgagatttcccatctaaaaaaaaaaaaaaa

SEQ ID NO: 697 - protein, 126 aa, Homo sapien
MSQAQSLPSGSSWSRIEDSLNRCPLSAEDLAAPSQGAGAHRCCMLRVFYFNTHGVSRRLRFPWFHTCYLSSRCACPQPGRIGQKSFKVAVSGDLFLAPGQVLFGSVLSSLPPGESSHHIYWTPTAC

SEQ ID NO: 698 - DNA, 8561 bp, Homo sapien
catgtcgggctccacacagcttgtggcacagacgtggagggccactgagccccgctacccgccccacagcctttcctacccagtgcagatcgcccggacgcacacggacgtcgggctcctggagtaccagcaccactcccgcgactatgcctcccacctgtcgccgggctccatcatccagccccagcggcggaggccctccctgctgtctgagttccagcccgggaatgaacggtcccaggagctccacctgcggccagagtcccactcatacctgcccgagctggggaagtcagagatggagttcattgaaagcaagcgccctcggctagagctgctgcctgaccccctgctgcgaccgtcacccctgctggccacgggccagcctgcgggatctgaagacctcaccaaggaccgtagcctgacgggcaagctggaaccggtgtctccccccagccccccgcacactgaccctgagctggagctggtgccgccacggctgtccaaggaggagctgatccagaacatggaccgcgtggaccgagagatcaccatggtagagcagcagatctctaagctgaagaagaagcagcaacagctggaggaggaggctgccaagccgcccgagcctgagaagcccgtgtcaccgccgcccatcgagtcgaagcaccgcagcctggtgcagatcatctacgacgagaaccggaagaaggctgaagctgcacatcggattctggaaggcctggggccccaggtggagctgccgctgtacaaccagccctccgacacccggcagtatcatgagaacatcaaaataaaccaggcgatgcggaagaagctaatcttgtacttcaagaggaggaatcacgctcggaaacaatggaagcagaagttctgccagcgctatgaccagctcatggaggccttggaaaaaaaggtggagcgcatcgaaaacaacccgcgccggcgggccaaggagagcaaggtgcgcgagtactacgaaaagcagttccctgagatccgcaagcagcgcgagctgcaggagcgcatgcagagcagggtgggccagcggggcagtgggctgtccatgtcggccgcccgcagcgagcacgaggtgtcagagatcatcgatggcctctcagagcaggagaacctggagaagcagatgcgccagctggccgtgatcccgcccatgctgtacgacgctgaccagcagcgcatcaagttcatcaacatgaacgggcttatggccgaccccatgaaggtgtacaaagaccgccaggtcatgaacatgtggagtgagcaggagaaggagaccttccgggagaagttcatgcagcatcccaagaactttggcctgatcgcatcattcctggagaggaagacagtggctgagtgcgtcctctattactacctgactaagaagaatgagaactataagagcctggtgagacggagctatcggcgccgcggcaagagccagcagcaacaacagcagcagcagcagcagcagcagcagcagcagcagcagcccatgccccgcagcagccaggaggagaaagatgagaaggagaaggaaaaggaggcggagaaggaggaggagaagccggaggtggagaacgacaaggaagacctcctcaaggagaagacagacgacacctcaggggaggacaacgacgagaaggaggctgtggcctccaaaggccgcaaaactgccaacagccagggaagacgcaaaggccgcatcacccgctcaatggctaatgaggccaacagcgaggaggccatcaccccccagcagagcgccgagctggcctccatggagctgaatgagagttctcgctggacagaagaagaaatggaaacagccaagaaaggtctcctggaacacggccgcaactggtcggccatcgcccggatggtgggctccaagactgtgtcgcagtgtaagaacttctacttcaactacaagaagaggcagaacctcgatgagatcttgcagcagcacaagctgaagatggagaaggagaggaacgcgcggaggaagaagaagaaagcgccggcggcggccagcgaggaggctgcattcccgcccgtggtggaggatgaggagatggaggcgtcgggcgtgagcggaaatgaggaggagatggtggaggaggctgaagccttacatgcctctgggaatgaggtgcccagaggggaatgcagtggcccagccactgtcaacaacagctcagacaccgagagcatcccctctcctcacactgaggccgccaaggacacagggcagaatgggcccaagcccccagccaccctgggcgccgacgggccacccccaggcccacccaccccaccacggaggacatcccgggcccccattgagcccaccccggcctctgaagccaccggagcccctacgcccccaccagcacccccatcgccctctgcacctcctcctgtggtccccaaggaggagaaggaggaggagaccgcagcagcgcccccagtggaggagggggaggagcagaagccccccgcggctgaggagctggcagtggacacagggaaggccgaggagcccgtcaagagcgagtgcacggaggaagccgaggaggggccggccaagggcaaggacgcggaggccgctgaggccacggccgagggggcgctcaaggcagagaagaaggagggcgggagcggcagggccaccactgccaagagctcgggcgccccccaggacagcgactccagtgctacctgcagtgcagacgaggtggatgaggccgagggcggcgacaagaaccggctgctgtccccaaggcccagcctcctcaccccgactggcgacccccgggccaatgcctcaccccagaagccactggacctgaagcagctgaagcagcgagcggctgccatcccccccatccaggtcaccaaagtccatgagcccccccgggaggacgcagctcccaccaagccagctcccccagccccaccgccaccgcaaaacctgcagccggagagcgacgcccctcagcagcctggcagcagcccccggggcaagagcaggagcccggcaccccccgccgacaaggaggccttcgcagccgaggcccagaagctgcctggggaccccccttgctggacttccggcctgcccttccccgtgcccccccgtgaggtgatcaaggcctccccgcatgccccggacccctcagccttctcctacgctccacctggtcacccactgcccctgggcctccatgacactgcccggcccgtcctgccgcgcccacccaccatctccaacccgcctcccctcatctcctctgccaagcaccccagcgtcctcgagaggcaaataggtgccatctcccaaggaatgtcggtccagctccacgtcccgtactcagagcatgccaaggccccggtgggccctgtcaccatggggctgcccctgcccatggaccccaaaaagctggcacccttcagcggagtgaagcaggagcagctgtccccacggggccaggctgggccaccggagagcctgggggtgcccacagcccaggaggcgtccgtgctgagagggacagctctgggctcagttccgggcggaagcatcaccaaaggcattcccagcacacgggtgccctcggacagcgccatcacataccgcggctccatcacccacggcacgccagctgacgtcctgtacaagggcaccatcaccaggatcatcggcgaggacagcccgagtcgcttggaccgcggccgggaggacagcctgcccaagggccacgtcatctacgaaggcaagaagggccacgtcttgtcctatgagggtggcatgtctgtgacccagtgctccaaggaggacggcagaagcagctcaggacccccccatgagacggccgcccccaagcgcacctatgacatgatggagggccgcgtgggcagagccatctcctcagccagcatcgaaggtctcatgggccgtgccatcccgccggagcgacacagcccccaccacctcaaagagcagcaccacatccgcgggtccatcacacaagggatccctcggtcctacgtggaggcacaggaggactacctgcgtcgggaggccaagctcctaaagcgggagggcacgcctccgcccccaccgccctcacgggacctgaccgaggcctacaagacgcaggccctgggccccctgaagctgaagccggcccatgagggcctggtggccacggtgaaggaggcgggccgctccatccatgagatcccgcgcgaggagctgcggcacacgcccgagctgcccctggccccgcggccgctcaaggagggctccatcacgcagggcaccccgctcaagtacgacaccggcgcgtccaccactggctccaaaaagcacgacgtacgctccctcatcggcagccccggccggacgttcccacccgtgcacccgctggatgtgatggccgacgcccgggcactggaacgtgcctgctacgaggagagcctgaagagccggccagggaccgccagcagctcggggggctccattgcgcgcggcgccccggtcattgtgcctgagctgggtaagccgcggcagagccccctgacctatgaggaccacggggcaccctttgccggccacctcccacgaggttcgcccgtgaccatgcgggagcccacgccgcgcctgcaggagggcagcctttcgtccagcaaggcatcccaggaccgaaagctgacgtcgacgcctcgtgagatcgccaagtccccgcacagcaccgtgcccgagcaccacccacaccccatctcgccctatgagcacctgcttcggggcgtgagtggcgtggacctgtatcgcagccacatccccctggccttcgaccccacctccataccccgcggcatccctctggacgcagccgctgcctactacctgccccgacacctggcccccaaccccacctacccgcacctgtacccaccctacctcatccgcggctaccccgacacggcggcgctggagaaccggcagaccatcatcaatgactacatcacctcgcagcagatgcaccacaacacggccaccgccatggcccagcgagctgatatgctgaggggcctctcgccccgcgagtcctcgctggcactcaactacgctgcgggtccccgaggcatcatcgacctgtcccaagtgccacacctgcctgtgctcgtgcccccgacaccaggcaccccagccaccgccatggaccgccttgcctacctccccaccgcgccccagcccttcagcagccgccacagcagctccccactctccccaggaggtccaacacacttgacaaaaccaaccaccacgtcctcgtccgagcgggagcgagaccgggatcgagagcgggaccgggatcgggagcgggaaaagtccatcctcacgtccaccacgacggtggagcacgcacccatctggagacctggtacagagcagagcagcggcagcagcggcagcagcggcgggggtgggggcagcagcagccgccccgcctcccactcccatgcccaccagcactcgcccatctcccctcggacccaggatgccctccagcagagacccagtgtgcttcacaacacaggcatgaagggtatcatcaccgctgtggagcccagcaagcccacggtcctgaggtccacctccacctcctcacccgttcgcccagctgccacattcccacctgccacccactgcccactgggcggcaccctcgatggggtctaccctaccctcatggagcccgtcttgctgcccaaggaggccccccgggtcgcccggccagagcggccccgagcagacaccggccatgccttcctcgccaagcccccagcccgctccgggctggagcccgcctcctcccccagcaagggctcggagccccggcccctagtgcctcctgtctctggccacgccaccatcgcccgcacccctgcgaagaacctcgcacctcaccacgccagcccggacccgccggcgccacctgcctcggcctcggacccgcaccgggaaaagactcaaagtaaacccttttccatccaggaactggaactccgttctctgggttaccacggcagcagctacagccccgaaggggtggagcccgtcagccctgtgagctcacccagtctgacccacgacaaggggctccccaagcacctggaagagctcgacaagagccacctggagggggagctgcggcccaagcagccaggccccgtgaagcttggcggggaggccgcccacctcccacacctgcggccgctgcctgagagccagccctcgtccagcccgctgctccagaccgccccaggggtcaaaggtcaccagcgggtggtcaccctggcccagcacatcagtgaggtcatcacacaggactacacccggcaccacccacagcagctcagcgcacccctgcccgcccccctctactccttccctggggccagctgccccgtcctggacctccgccgcccacccagtgacctctacctcccgcccccggaccatggtgccccggcccgtggctccccccacagcgaagggggcaagaggtctccagagccaaacaagacgtcggtcttgggtggtggtgaggacggtattgaacctgtgtccccaccggagggcatgacggagccagggcactcccggagtgctgtgtacccgctgctgtaccgggatggggaacagacggagcccagcaggatgggctccaagtctccaggcaacaccagccagccgccagccttcttcagcaagctgaccgagagcaactccgccatggtcaagtccaagaagcaagagatcaacaagaagctgaacacccacaaccggaatgagcctgaatacaatatcagccagcctgggacggagatcttcaatatgcccgccatcaccggaacaggccttatgacctatagaagccaggcggtgcaggaacatgccagcaccaacatggggctggaggccataattagaaaggcactcatgggtaaatatgaccagtgggaagagtccccgccgctcagcgccaatgcttttaaccctctgaatgccagtgccagcctgcccgctgctatgcccataaccgctgctgacggacggagtgaccacacactcacctcgccaggtggcggcgggaaggccaaggtctctggcagacccagcagccgaaaagccaagtccccggccccgggcctggcatctggggaccggccaccctctgtctcctcagtgcactcggagggagactgcaaccgccggacgccgctcaccaaccgcgtgtgggaggacaggccctcgtccgcaggttccacgccattcccctacaaccccctgatcatgcggctgcaggcgggtgtcatggcttccccacccccaccgggcctccccgcgggcagcgggcccctcgctggcccccaccacgcctgggacgaggagcccaagccactgctctgctcgcagtacgagacactctccgacagcgagtgactcagaacagggcgggggggggcgggcggtgtcaggtcccagcgagccacaggaacggccctgcaggagcggggcggctgccgactcccccaaccaaggaaggagcccctgagtccgcctgcgcctccatccatctgtccgtccagagccggcatccttgcctgtctaaagccttaactaagactcccgccccgggctggccctgtgcagaccttactcaggggatgtttacctggtgctcgggaagggaggggaaggggccggggagggggcacggcaggcgtgtggcagccacacacaggcggccagggcggccagggacccaaagcaggatgaccacgcacctccacgccactgcctcccccgaatgcatttggaaccaaagtctaaactgagctcgcagcccccgcgccctccctccgcctcccatcccgcttagcgctctggacagatggacgcaggccctgtccagcccccagtgcgctcgttccggtccccacagactgccccagccaacgagattgctggaaaccaagtcaggccaggtgggcggacaaaagggccaggtgcggcctggggggaacggatgctccgaggactggactgtttttttcacacatcgttgccgcagcggtgggaaggaaaggcagatgtaaatgatgtgttggtttacagggtatatttttgataccttcaatgaattaattcagatgttttacgcaaggaaggacttacccagtattactgctgctgtgcttttgatctctgcttaccgttcaagaggcgtgtgcaggccgacagtcggtgaccccatcactcgcaggaccaagggggcggggactgctcgtcacgccccgctgtgtcctccctccctcccttccttgggcagaatgaattcgatgcgtattctgtggccgccatttgcgcagggtggtggtattctgtcatttacacacgtcgttctaattaaaaagcgaattatactccaaaaaaaaaaaaaaaaaaa

SEQ ID NO: 699 - protein, 2000 aa, Homo sapien
MSGSTQLVAQTWRATEPRYPPHSLSYPVQIARTHTDVGLLEYQHHSRDYASHLSPGSIIQPQRRRPSLLSEFQPGNERSQELHLRPESHSYLPELGKSEMEFIESKRPRLELLPDPLLRPSPLLATGQPAGSEDLTKDRSLTGKLEPVSPPSPPHTDPELELVPPRLSKEELIQNMDRVDREITMVEQQISKLKKKQQQLEEEAAKPPEPEKPVSPPPIESKHRSLVQIIYDENRKKAEAAHRILEGLGPQVELPLYNQPSDTRQYHENIKINQAMRKKLILYFKRRNHARKQWKQKFCQRYDQLMEALEKKVERIENNPRRRAKESKVREYYEKQFPEIRKQRELQERMQSRVGQRGSGLSMSAARSEHEVSEIIDGLSEQENLEKQMRQLAVIPPMLYDADQQRIKFINMNGLMADPMKVYKDRQVMNMWSEQEKETFREKFMQHPKNFGLIASFLERKTVAECVLYYYLTKKNENYKSLVRRSYRRRGKSQQQQQQQQQQQQQQQQQPMPRSSQEEKDEKEKEKEAEKEEEKPEVENDKEDLLKEKTDDTSGEDNDEKEAVASKGRKTANSQGRRKGRITRSMANEANSEEAITPQQSAELASMELNESSRWTEEEMETAKKGLLEHGRNWSAIARMVGSKTVSQCKNFYFNYKKRQNLDEILQQHKLKMEKERNARRKKKKAPAAASEEAAFPPVVEDEEMEASGVSGNEEEMVEEAEALHASGNEVPRGECSGPATVNNSSDTESIPSPHTEAAKDTGQNGPKPPATLGADGPPPGPPTPPRRTSRAPIEPTPASEATGAPTPPPAPPSPSAPPPVVPKEEKEEETAAAPPVEEGEEQKPPAAEELAVDTGKAEEPVKSECTEEAEEGPAKGKDAEAAEATAEGALKAEKKEGGSGRATTAKSSGAPQDSDSSATCSADEVDEAEGGDKNRLLSPRPSLLTPTGDPRANASPQKPLDLKQLKQRAAAIPPIQVTKVHEPPREDAAPTKPAPPAPPPPQNLQPESDAPQQPGSSPRGKSRSPAPPADKEAFAAEAQKLPGDPPCWTSGLPFPVPPREVIKASPHAPDPSAFSYAPPGHPLPLGLHDTARPVLPRPPTISNPPPLISSAKHPSVLERQIGAISQGMSVQLHVPYSEHAKAPVGPVTMGLPLPMDPKKLAPFSGVKQEQLSPRGQAGPPESLGVPTAQEASVLRGTALGSVPGGSITKGIPSTRVPSDSAITYRGSITHGTPADVLYKGTITRIIGEDSPSRLDRGREDSLPKGHVIYEGKKGHVLSYEGGMSVTQCSKEDGRSSSGPPHETAAPKRTYDMMEGRVGRAISSASIEGLMGRAIPPERHSPHHLKEQHHIRGSITQGIPRSYVEAQEDYLRREAKLLKREGTPPPPPPSRDLTEAYKTQALGPLKLKPAHEGLVATVKEAGRSIHEIPREELRHTPELPLAPRPLKEGSITQGTPLKYDTGASTTGSKKHDVRSLIGSPGRTFPPVHPLDVMADARALERACYEESLKSRPGTASSSGGSIARGAPVIVPELGKPRQSPLTYEDHGAPFAGHLPRGSPVTMREPTPRLQEGSLSSSKASQDRKLTSTPREIAKSPHSTVPEHHPHPISPYEHLLRGVSGVDLYRSHIPLAFDPTSIPRGIPLDAAAAYYLPRHLAPNPTYPHLYPPYLIRGYPDTAALENRQTIINDYITSQQMHHNTATAMAQRADMLRGLSPRESSLALNYAAGPRGIIDLSQVPHLPVLVPPTPGTPATAMDRLAYLPTAPQPFSSRHSSSPLSPGGPTHLTKPTTTSSSERERDRDRERDRDREREKSILTSTTTVEHAPIWRPGTEQSSGSSGSSGGGGGSSSRPASHSHAHQHSPISPRTQDALQQRPSVLHNTGMKGIITAVEPSKPTVLRSTSTSSPVRPAATFPPATHCPLGGTLDGVYPTLMEPVLLPKEAPRVARPERPRADTGHAFLAKPPARSGLEPASSPSKGSEPRPLVPPVSGHATIARTPAK

SEQ ID NO: 700 - DNA, 716 bp, Homo sapien
atggcagagcagtcggacgaggccgtgaagtactacaccctagaggagattcagaagcacaaccacagcaagagcacctggctgatcctgcaccacaaggtgtacgatttgaccaaatttctggaagagcatcctggtggggaagaagttttaagggaacaagctggaggtgacgctactgagaactttgaggatgtcgggcactctacagatgccagggaaatgtccaaaacattcatcattggggagctccatccagatgacagaccaaagttaaacaagcctccagaaccttaaaggcggtgtttcaaggaaactcttatcactactattgattctagttccagttggtggaccaactgggtgatccctgccatctctgcagtggccgtcgccttgatgtatcgcctatacatggcagaggactgaacacctcctcagaagtcagcgcaggaagagcctgctttggacacgggagaaaagaagccattgctaactacttcaactgacagaaaccttcacttgaaaacaatgattttaatatatctctttctttttcttccgacattagaaacaaaacaaaaagaactgtcctttctgcgctcaaatttttcgagtgtgcctttttattcatctactttattttgatgtttccttaatgtgtaatttacttattataagcatgatcttttaaaaatatatttggcttttaaagt

SEQ ID NO: 701 - protein, 98 aa, Homo sapien
MAEQSDEAVKYYTLEEIQKHNHSKSTWLILHHKVYDLTKFLEEHPGGEEVLREQAGGDATENFEDVGHSTDAREMSKTFIIGELHPDDRPKLNKPPEP

SEQ ID NO: 702 - DNA, 2427 bp, Homo sapien
agcctgtgactttcctccctggacaaaggcatcatgagttgtcagatctcttgcaaatctcgaggaagaggaggaggtggaggaggattccggggcttcagcagcggctcagctgtggtgtctggtggaagccggagatcaacttccagcttctcctgcttgagccgccatggtggtggtggcgggggcttcggtggaggcggctttggcagtcggagtcttgttggccttggagggaccaagagcatctccattagtgtggctggaggaggtggtggctttggcgccgctggtggatttggtggcagaggaggtggttttggaggcggcagcggctttggaggcggcagcggctttggaggtggcagcggcttcagtggtggtggtttcggtggaggcggctttggtggaggccgctttggaggttttgggggccctggtggtgttggaggtttagggggtcctggtggctttgggcctggaggataccctggtggcatccacgaagtctctgtcaaccagagcctcctgcagcctctcaacgtgaaagttgacccagagatccagaatgtgaaggcccaagagcgtgagcagatcaaaactctcaacaacaaatttgcctccttcattgacaaggtgcggttcttggagcagcagaaccaggtgttacagaccaaatgggagctgctacaacaaatgaatgttggcacccgccccatcaacctggagcccatcttccaggggtatatcgacagcctcaagagatatctggatgggctcactgcagaaagaacatcacagaattcagagctgaataacatgcaggatcttgtggaggattataagaagaagtatgaggatgaaatcaataagcgcacagctgctgagaatgattttgtgacgcttaaaaaggacgtggacaatgcctacatgataaaggtggagttgcagtccaaggtggacctgctgaaccaggaaattgagtttctgaaagttctctatgatgcggagatatcccagatacatcagagtgtcactgacaccaacgtcatcctctccatggacaacagccgcaacctggacttggatagcatcatcgccgaggtcaaggcccagtatgaggagatcgcccagaggagcaaggaagaagcggaggccctgtaccacagcaagtatgaggagctccaggtgactgtcgggagacatggagacagcctgaaagagatcaagatagagatcagcgagctgaaccgcgtgatccagaggctgcagggggagatcgcacatgtgaagaagcagtgtaagaatgtgcaagatgccatcgcagatgccgagcagcgtggggagcatgccctcaaggatgccaggaacaagttgaatgacctggaggaggccctgcagcaggccaaggaggacttggcgcggctgctgcgtgactaccaggagctgatgaacgtgaagctggccctagatgtggagatcgccacctaccgcaaactgctggagggcgaggagtgcaggatgtctggagacctcagcagcaatgtgactgtgtctgtgacaagcagcaccatttcatcaaatgtggcatccaaggctgcctttggaggttctggaggtagagggtccagttccggaggaggatacagctctggaagcagcagttatggctctggaggccgacagtctggctccagaggcggtagtggaggaggaggttctatctctggaggaggatatggctctggcggtggttctggaggaagatacggatctggtggtggctctaagggagggtccatctctggaggaggatatggctctggaggtggaaaacacagctctggaggtggctctagaggaggctccagctctggaggaggatatggctctggaggtgggggttctagctctgtaaagggtagctcaggtgaagcttttggttccagcgtgaccttctcttttagataaagatgagcccccaccaccaccgactctcccaacccagactctcccactccagaatgtagaagcctgtctctgtacctctaactggcagcaagttaaatttttgtcatttatctctgatggcactttgagggaaaagaatgtccacatacagtttttgaaagatcttctctccaaaccagttagttagagccagtgacgcctctgtgttctggggcggaatctgtgctgtctaggtttgtgcttctagccatgcccattcccgcccccaccatgcctctttgcattgcccattttccagatgtgtattctgttgaggacccaggcccatccagggatttcatctctaagcctggcagtgctggggggaaatgtgtttctgtgtatatagctcctcttgtccactctgctttcggaagtgctgtggtctgggggtcttcataataaacctcatttgca

SEQ ID NO: 703 - protein, 645 aa, Homo sapien
MSCQISCKSRGRGGGGGGFRGFSSGSAVVSGGSRRSTSSFSCLSRHGGGGGGFGGGGFGSRSLVGLGGTKSISISVAGGGGGFGAAGGFGGRGGGFGGGSGFGGGSGFGGGSGFSGGGFGGGGFGGGRFGGFGGPGGVGGLGGPGGFGPGGYPGGIHEVSVNQSLLQPLNVKVDPEIQNVKAQEREQIKTLNNKFASFIDKVRFLEQQNQVLQTKWELLQQMNVGTRPINLEPIFQGYIDSLKRYLDGLTAERTSQNSELNNMQDLVEDYKKKYEDEINKRTAAENDFVTLKKDVDNAYMIKVELQSKVDLLNQEIEFLKVLYDAEISQIHQSVTDTNVILSMDNSRNLDLDSIIAEVKAQYEEIAQRSKEEAEALYHSKYEELQVTVGRHGDSLKEIKIEISELNRVIQRLQGEIAHVKKQCKNVQDAIADAEQRGEHALKDARNKLNDLEEALQQAKEDLARLLRDYQELMNVKLALDVEIATYRKLLEGEECRMSGDLSSNVTVSVTSSTISSNVASKAAFGGSGGRGSSSGGGYSSGSSSYGSGGRQSGSRGGSGGGGSISGGGYGSGGGSGGRYGSGGGSKGGSISGGGYGSGGGKHSSGGGSRGGSSSGGGYGSGGGGSSSVKGSSGEAFGSSVTFSFR

SEQ ID NO: 704 - DNA, 469 bp, Homo sapien
cccagataaaaggtaggggaggaggagagagagagaaggaagagtctaggctgagcaacatgaaggggcccccaaccttctgcagcctcctgctgctgtcattgctcctgagcccagaccctacagcagcattcctactgccacccagcactgcctgctgtactcagctctaccgaaagccactctcagacaagctactgaggaaggtcatccaggtggaactgcaggaggctgacggggactgtcacctccaggctttcgtgcttcacctggctcaacgcagcatctgcatccacccccagaaccccagcctgtcacagtggtttgagcaccaagagagaaagctccatgggactctgcccaagctgaattttgggatgctaaggaaaatgggctgaagcccccaatagccaaataataaagcagcattggataataatttctgaaaaaaaaaaaaaaaaaaaaaaaa

SEQ ID NO: 705 - protein, 112 aa, Homo sapien
MKGPPTFCSLLLLSLLLSPDPTAAFLLPPSTACCTQLYRKPLSDKLLRKVIQVELQEADGDCHLQAFVLHLAQRSICIHPQNPSLSQWFEHQERKLHGTLPKLNFGMLRKMG

SEQ ID NO: 706 - DNA, 6019 bp, Homo sapien
gcggcggtggcggcgaccgtcagttttcgctgaggagaaacacgaaacggaccctttggctctcccccttccccttccccgtcctgaacccctctcctggtcaccgagaatcagtccccgtggagttccccctccacctcgccatcgtttcctcggtcctcggcccagtggaagtcactaccctcgaggaggaggcagcggcagccgccctcgcgtcgccgcccccggttcggtgcccgcggtcccggagaggaggtgccgccgccaccgccgctccccccctcccgctgccctcgggccgggctgggtcgagctgcgatgccctcggacttcatctcattgctcagcgcggacctagacctggaatcgcccaagtccctctactcgcgagaatctgtctatgatcttctcccaaaggagttacagttacctccatctagagaaacatctgtagcatcaatgagtcagacaagcggtggtgaggcaggctcgcctcctccagctgttgttgctgctgatgcttcttcagctccctcctcttcctccatgggcggtgcttgcagctcctttaccacctcttccagccctaccatttattctacctcagtcaccgacagcaaggctatgcaagtggagagctgctcctcagccgtgggggtaagtaacagaggggtaagtgaaaagcagttaaccagtaacacagttcagcagcatccatcaacaccgaagaggcacacagtcttgtacatctcaccaccacctgaggacttgctggataacagtcggatgtcctgccaggatgaggggtgtggattggaatctgagcagagctgcagtatgtggatggaggattccccctccaacttcagtaacatgagcaccagttcctacaatgataacactgaggtacctcgtaaatcacgaaaacgaaatccaaagcagaggccgggggtcaaacgacgagattgtgaagaatctaatatggatatatttgatgccgacagtgccaaagcacctcactatgtgctttctcagcttaccacggacaacaaaggcaactcaaaagcgggaaatggaacattggaaaaccaaaaaggaactggagtaaagaagagccctatgttgtgtggacaatatcctgttaaaagtgagggaaaggagctgaagatagttgtacaacctgagacacagcaccgagctcggtacctgactgagggcagccgtggctcagtgaaagatagaacacagcaaggctttcctacagtaaagctggaaggccataatgaacctgtagtgttgcaagtgtttgtgggcaacgactctggacgagtgaaaccacatggattttatcaggcctgcagagtaactggacgaaatacaactccttgcaaagaagtggacattgaaggcactactgttatagaagtcggccttgatcctagcaacaacatgacactggcggtggactgcgtagggatattgaaattgaggaatgctgatgtcgaagccagaataggaattgctggttccaagaagaaaagcactcgtgccagattggtttttcgagttaatatcatgaggaaagatggctccactttgacactgcaaacaccctcttctccaattttgtgtactcagccagcaggagtgccagaaatcttaaagaaaagcttgcatagctgttcagtgaaaggagaagaagaagtgtttttaatcggcaagaactttctgaaaggaactaaagttattttccaagaaaatgtttctgatgaaaactcttggaagtcagaagctgaaattgatatggaactatttcatcagaatcatcttattgtgaaggttcctccctatcatgaccaacatataactttgcctgtgtcagtgggaatatatgtagtgacaaatgctggaagatctcatgatgttcaaccattcacttacactccagacccagcagcagctggtgctttgaatgtaaatgtgaagaaggaaatatctagtccagcaagaccttgctcttttgaagaggccatgaaagcaatgaaaactactggatgtaatttagataaggtaaatattatccctaatgccctgatgactccactcataccaagcagtatgattaagagtgaagatgttactccaatggaagtaacagcagaaaaaagatcttccactatttttaagactacaaagtctgttggatcaactcagcaaacattagaaaacatctcaaacatagcaggaaatggctctttttcatcaccatcatcttcccacctaccttctgaaaatgaaaaacagcagcagattcagcccaaggcatacaacccagagaccctgacaactattcaaacccaggacatctcacagcctggtacttttccagcagtttctgcttctagtcagctgcccaacagcgatgcactattgcagcaggctacacagtttcagacaagagaaactcagtctagagagatattacagtcagatggtacagtggttaatttgtcacaactgactgaggcatcacaacaacagcagcagtcaccactacaagaacaagcacagactttacagcagcagatttcatcaaatatttttccatcaccaaatagtgtgagtcagcttcagaatactattcagcagctgcaagcagggagtttcacaggcagtactgctagtggcagcagtggaagtgttgacttggtccaacaagttttagaggcacagcagcagttatcttcagttttattttctgctccagatggtaatgagaatgttcaagagcagcttagtgcagatatttttcaacaagtcagtcaaattcagagtggtgtaagccctggaatgttttcctcaacagagccaacagtccataccagaccagataatttattacctggaagagctgaaagtgttcatccacagtctgaaaacacgttatctaatcaacagcagcagcagcagcagcaacagcaagtgatggaatcttcagccgcaatggtgatggagatgcaacagagtatctgccaggcagctgcccagattcagtcagagttattcccttcaactgcttcagcaaatggaaaccttcagcaatcgccagtttaccagcagacttctcacatgatgagtgcattgtctaccaatgaggatatgcaaatgcagtgtgaattgttttcttctcctcctgcagtttctggaaatgaaacttctacaactaccacacagcaggttgcaacccctggcactaccatgtttcagacatcaagttcaggagatggagaagaaactggaacacaagcaaaacagattcagaacagtgtctttcagaccatggtccaaatgcaacatagtggggacaatcaacctcaagttaaccttttttcatccacaaaaagtatgatgagtgttcagaatagtggtacccaacaacaaggtaatggtttattccagcaagggaatgagatgatgtcacttcaatctggaaattttttgcagcagtcttctcattcacaggcccaactttttcatcctcaaaatcctattgccgatgctcagaacctttcccaggaaactcaaggttctctctttcatagtccaaatcctattgtccacagtcagacttctacaacctcctctgaacaaatgcagcctccaatgtttcactctcaaagtaccattgctgtgttacagggctcttcagttcctcaagaccagcagtcaaccaacatatttctttcccagagtcccatgaataatcttcagactaacacagtagcccaagaagcattttttgcagcaccgaactcaatttctccacttcagtcaacatcaaacagtgaacaacaagctgctttccaacagcaagctccaatatcacacatccagactcctatgctttcccaagaacaggcacaacccccgcagcagggtttatttcagcctcaggtggccctgggctcccttccacctaatccaatgcctcaaagccaacaaggaaccatgttccagtcacagcactcaatagttgccatgcagagtaactctccatcccaggaacagcagcagcagcagcaacagcagcagcaacagcagcagcaacaacaacagagcattttattcagtaatcagaataccatggctacaatggcgtctccaaagcaaccaccaccaaacatgatattcaacccaaatcaaaatccaatggctaatcaggagcaacagaaccagtcaatttttcaccaacaaagtaacatggccccaatgaatcaagagcaacagcccatgcaatttcagagtcagtccacagtttcctcacttcagaacccaggtcctacccagtcggaatcatcacagacccccttgttccatagctctcctcagattcagttggtacaagggtcacctagttctcaagagcagcaagtaactctcttcttatctccagcatccatgtctgccttgcagaccagtataaatcaacaagatatgcaacagtctcctctttattcccctcagaacaacatgcctggaattcaaggagccacatcttcgcctcaaccacaggctactttatttcacaacacagcaggaggcacaatgaaccaactgcagaattctcctggctcatctcagcagacatcaggaatgttcttatttggcattcaaaataactgtagtcagcttttaacctctggaccagctacattgcctgatcagttgatggccataagtcagccaggccaaccacaaaacgagggccagccacctgtgacaacacttctttctcagcaaatgccagagaattctccactggcatcctctataaacaccaaccagaacatcgaaaagattgatttgcttgtttcattgcaaaaccaagggaacaacttgactggctccttttaactggatataaattccacgaagaaaatcctgattccaagatgtcctgagatcttgtggttccatgagaattattactttaaaaacaaaacaaaatataaaaaactgtgtttgagtaaactgatagattttactctgactgcaaaagagcacacctatgctgcttgttgcagtaactaaccaccaatgttaacatcttcatattttatattcctaataacagtgatgactgagaatctatttgagtttccagctggcagaattaattgttattattttcctaggcgcaatttccttaaacgtacagtttaaattcaaggctggaccactcagttattattgctattagaaaataatatatcatgtttacttttgttcttcattattttctttcctgcattgttttagtcaagtaatggcttttgaaaaagtaaagttcaataataactaaggctgtgatttttttcaatataaaaggcacagctgttggccaaagtgaaggaatcttttttcagttttattggagaaactgaagggtaacattctaacaagtaaactgtatgtgcagataaaagtactcttgatttaacacaaaggcagatgatacacttataaaactgggaacagctggaatgcttcttgattttattttttcagagagttgttagttctctgggtttctactaaggggtttagccataactgtgcatagaaaaataattatctgtaaaaaatgaaggggataatatatgataaattatgttctgatatcctcctacagtagtttaaattgacagaaaaatttgaatgttttcttcttaacccagtcttaggctggtattccctttttatatatatctatattacttttcacctctttttcactttactttagagaactattaatatactactggcttcatgaccctgtagcatctttggccactttaatctagggtgacctagcaatcctgcagcacagggcagagagtactgtcttaggaattattaggagttgattcctgagaaacaacacatttttccccatgaacggtgctgttctgaagtcttcaaatttttccctctaataggaaacagtataaatttt

SEQ ID NO: 707 - protein, 1531 aa, Homo sapien
MPSDFISLLSADLDLESPKSLYSRESVYDLLPKELQLPPSRETSVASMSQTSGGEAGSPPPAVVAADASSAPSSSSMGGACSSFTTSSSPTIYSTSVTDSKAMQVESCSSAVGVSNRGVSEKQLTSNTVQQHPSTPKRHTVLYISPPPEDLLDNSRMSCQDEGCGLESEQSCSMWMEDSPSNFSNMSTSSYNDNTEVPRKSRKRNPKQRPGVKRRDCEESNMDIFDADSAKAPHYVLSQLTTDNKGNSKAGNGTLENQKGTGVKKSPMLCGQYPVKSEGKELKIVVQPETQHRARYLTEGSRGSVKDRTQQGFPTVKLEGHNEPVVLQVFVGNDSGRVKPHGFYQACRVTGRNTTPCKEVDIEGTTVIEVGLDPSNNMTLAVDCVGILKLRNADVEARIGIAGSKKKSTRARLVFRVNIMRKDGSTLTLQTPSSPILCTQPAGVPEILKKSLHSCSVKGEEEVFLIGKNFLKGTKVIFQENVSDENSWKSEAEIDMELFHQNHLIVKVPPYHDQHITLPVSVGIYVVTNAGRSHDVQPFTYTPDPAAAGALNVNVKKEISSPARPCSFEEAMKAMKTTGCNLDKVNIIPNALMTPLIPSSMIKSEDVTPMEVTAEKRSSTIFKTTKSVGSTQQTLENISNIAGNGSFSSPSSSHLPSENEKQQQIQPKAYNPETLTTIQTQDISQPGTFPAVSASSQLPNSDALLQQATQFQTRETQSREILQSDGTVVNLSQLTEASQQQQQSPLQEQAQTLQQQISSNIFPSPNSVSQLQNTIQQLQAGSFTGSTASGSSGSVDLVQQVLEAQQQLSSVLFSAPDGNENVQEQLSADIFQQVSQIQSGVSPGMFSSTEPTVHTRPDNLLPGRAESVHPQSENTLSNQQQQQQQQQQVMESSAAMVMEMQQSICQAAAQIQSELFPSTASANGNLQQSPVYQQTSHMMSALSTNEDMQMQCELFSSPPAVSGNETSTTTTQQVATPGTTMFQTSSSGDGEETGTQAKQIQNSVFQTMVQMQHSGDNQPQVNLFSSTKSMMSVQNSGTQQQGNGLFQQGNEMMSLQSGNFLQQSSHSQAQLFHPQNPIADAQNLSQETQGSLFHSPNPIVHSQTSTTSSEQMQPPMFHSQSTIAVLQGSSVPQDQQSTNIFLSQSPMNNLQTNTVAQEAFFAAPNSISPLQSTSNSEQQAAFQQQAPISHIQTPMLSQEQAQPPQQGLFQPQVALGSLPPNPMPQSQQGTMFQSQHSIVAMQSNSPSQEQQQQQQQQQQQQQQQQQSILFSNQNTMATMASPKQPPPNMIFNPNQNPMANQEQQNQSIFHQQSNMAPMNQEQQPMQFQSQSTVSSLQNPGPTQSESSQTPLFHSSPQIQLVQGSPSSQEQQVTLFLSPASMSALQTSINQQDMQQSPLYSPQNNMPGIQGATSSPQPQATLFHNTAGGTMNQLQNSPGSSQQTSGMFLFGIQNNCSQLLTSGPATLPDQLMAISQPGQPQNEGQPPVTTLLSQQMPENSPLASSINTNQNIEKIDLLVSLQNQGNNLTGSF

SEQ ID NO: 708 - DNA, 667 bp, Homo sapien
cgtgcaccctgagccggagctgcccagtcgccgcgggaccggggccgctggggtctggacgggggtcgccatgatccgctttatcctcatccagaaccgggcaggcaagacgcgcctggccaagtggtacatgcagtttgatgatgatgagaaacagaagctgatcgaggaggtgcatgccgtggtcaccgtccgagacgccaaacacaccaactttgtggaggtcttaaacgaatatttccacaatgtctgtgaactggacctggtgttcaacttctacaaggtttacacggtcgtggacgagatgttcctggctggcgaaatccgagagaccagccagacgaaggtgctgaaacagctgctgatgctacagtccctggagtgagggcaggcgagcaccccaccccggccccggcccctcctggaatcgcctgctcgcttccccttcccaggcccgtggccaacccagcagtccttccctcaactgcctaggaggaagggacccagctgggtctgggccacaagggaggagacttcaccccacttcctctgggccctggctgtgggcagaggccaccgtgtgtgtcccgagtaaccgtgccgttgtcgtgtgattccataagcgtctgtgcgtggagtccccaataaacctgtggtcctgcctggc

SEQ ID NO: 709 - protein, 104 aa, Homo sapien
MIRFILIQNRAGKTRLAKWYMQFDDDEKQKLIEEVHAVVTVRDAKHTNFVEVLNEYFHNVCELDLVFNFYKVYTVVDEMFLAGEIRETSQTKVLKQLLMLQSLE

SEQ ID NO: 710 - DNA, 3250 bp, Homo sapien
ccaacttatttaaaacaaaacaattttgtaggtattattatacccatttcacagatgatgataaatgagaccaatagaagttaaataacttgccaaaggccacacagctggtgagtgatggagaacgaattaaaactcaagtgagcataattctaaaagccatcttctcgttagtgtttctcactatccaggtctgcctttgccttatttaactgaagttaagccatccttacctgtgatcacctagcctctcagtttggggggatcattacagcgggtttttaactcccaatgttctggtccagtttgctttacatgttcttatttatacattgtcaaggatgacctcaggacagtacagcaaggacacagtggcacttcacattttgttcccacgaaatgactggggcataatctcagatcatcttcctttagaatgtggaaacatcagcagaagaatattagtctttatacaagtcaaatccaaaatgacacatgtgaaaactaatagagctgactttcagccatgatagctttggcacacctcacatccctttgttcaacctctcttccctcaacggagagctgcattcctgggaatttctgttgtgcacttttcccacttgccctgctgtcatttaaaggtgaacattctagttttgctaagaaaaccctttccttcatttggaatgaacagcaattttattacttttgaccttaaaatgagtttgctgccttcaaatcttttcagcgccttcatcacgctctgcttcggggcgatcttcttcctgccagactcctccaagctgctcagcggggtcctgttccactccagccccgccttgcagccggccgccgaccacaagcccgggcccggggcgcgcgccgaggacgcggccgaggggcgagcccggcgccgcgaggagggggcacccggggacccggaggccgccctggaggacaacttggccaggatccgcgaaaaccacgagcgggctctcagggaagccaaggagaccctgcagaagctgcccgaggagatccaaagagacatcctactggagaagaagaaggtggcccaggaccagctgcgtgacaaggcgccgttcagaggcctgcccccggtggacttcgtgcccccaatcggggtggagagccgggagcccgccgacgccgccatccgcgagaaaagggcaaagatcaaagagatgatgaaacatgcttggaataattataaaggttatgcctggggattaaatgaactcaaacctatatcaaaaggaggccattcaagcagtttgtttggtaacatcaaaggagcaactatagtagatgccctggatacactttttattatggaaatgaaacatgaatttgaagaagcaaaatcatgggttgaagaaaatttagattttaatgtgaatgctgaaatttctgtctttgaagtaaatatacgctttgttggtggactactctcagcctactatctgtctggagaagagatttttcgaaagaaagcagtggaacttggggtaaaattgctacctgcatttcatactccctctggaataccttgggcattgctgaatatgaaaagtggtattggaaggaactggccctgggcctctggaggcagcagtattctggcagaatttggaaccctgcatttggagtttatgcacttgagccacttatcaggaaaccccatctttgctgaaaaggtaatgaatattcgaacagtactgaacaaactggaaaaaccacaaggcctttatcctaactatctgaatcccagtagtggacagtggggtcaacatcatgtatcagttggaggacttggagacagcttctatgagtatttgctgaaggcctggttaatgtctgacaagacagatctggaagctaagaagatgtattttgatgctgttcaggctatcgagactcatttgatccgcaagtctagcagcggactaacttatatcgcagagtggaaaaggggcctcctggagcacaagatgggccacctgacctgcttcgcggggggcatgttcgcactcggggctgatgcagctcccgaaggcatggcccaacactaccttgaactcggggctgaaattgcccgtacttgtcatgaatcatataatcgaacatttatgaaactgggaccagaagctttcagatttgatggtggtgttgaagccatcgctacaagacaaaatgaaaaatactacatcttacggccagaagttatggagacttacatgtatatgtggagactgactcatgatccaaagtacaggaaatgggcctgggaagccgtagaggccttggaaaaccattgcagagtgaatggaggctattcaggcctaagggatgtttaccttcttcatgagagttatgatgatgtgcagcagagtttcttcctggcagagacattgaaatatttgtacctaatattttctgacgacgatcttcttccactggagcattggatcttcaatagcgaggcacatcttctccctatcctccctaaagataaaaaggaagttgaaatcagagaggaataaaaaagacatttatattttattctgctccattcccttcactgtataccttaataattccttttctggtaatcaggcacatgatgaactttgattagtaggtctgtgattaagttcttaaattgttttgcagtcttttatgtttattatcataggtataggtggacctaaattccttatcatatctttattaattcagccagtgtatccaccagttttttgtttatgtttttaagtaacctattatctctggatttcatgaaggtgtaatatcgtttttgttaaactgaatagaattgtatagcgatgacctcttaattataatttgatttgactgcaaaactttttcctcctctaagaggagatgatgtctgctttaagctgtaatgttttgccatgttgcaaaaagccataataataagtataaaaaagctttttcctttacaatttcatgttaatctggtttgtctgtccaccagagacagatcttctgtgacagcctccttatgcaggtctatcattatttgatagaatgtcttctaaaatacttcactcacattgtaattcaaattagaaagtcattccaaaaggtcatgtcatgttgacctcatttcatcggaactgcagtatatttttgttggttaattatattagtgttttctattttgaaaaaaaaaaaaaaaaaa

SEQ ID NO: 711 - protein, 625 aa, Homo sapien [sequence omitted]

SEQ ID NO: 712 - DNA, 1156 bp, Homo sapien
atgagtgtggcaaagcctttggcaagcagtcaacacttattcaccatcaggcaattcatggtgtagggaaacttgactaatgtaatgattgtcacaaagtcttcagtaatgctacaacgattacaaatcattggagaatccataatgaagagagatcttacaagtgtaataaatgtggcaaatttttcagagatcgttcacatattgcaggtcatcggtgaactcatactggagagaaaccttacaaatgtcatgactgtgccaaggtcttcagtcaagcttcatcctatgcaaaacataggagaatttatacaggagagaaacctcacaagtgtgatgattgtggcaaagcctttgcttcacgttcacacgtcattagacatcagagaatctatactggacagaaatcttacaaatgtcatcagtgtggcaaggtcttcagtccaagatcactccatgcagaacatcagaaaattcatttttgagataaccgttcccaatgaaatgagtatagcaaaccatcaagcattaattgacattggagtcaattcagcattgacttgagtttgtgttgacttaacattgagttcaagcctttattgacattcaagtgtttatgttaagaggatggggccaggtgtggtggctccgacctgtaatcccagcacgtcgggaggccaaggcacataggtcacttgaggtcaggagtttgaaaccagcatggccaacagatgtgagccacttttctcagcctgttttttgtttcttattttctattatttttttgagccagtactttttaaagagatagtacttttttcagttagtactttttgaaagggatatatcatagtaatttttaaaagggatatgaggccaggcacggaggctcatgcctgtaatcccagcactttgggaggccgaggcaggcagatcacggggtcaggagatcgagactttcctggctaacagggtgaatccctgtctctactaaaaatacaaaaaattagctgggcatggtggctggcgcctgtagtcccagctactccagatgctgaggcaggagaatggcatgaacctgtgaggcggagcttgcagggagtcgagatcgcgccactgggctccagcctgggcgacagagtgagagtctgtctca

SEQ ID NO: 713 - protein, 151 aa, Homo sapien
MLQRLQIIGESIMKRDLTSVINVANFSEIVHILQVIGELILERNLTNVMTVPRSSVKLHPMQNIGEFIQERNLTSVMIVAKPLLHVHTSLDIRESILDRNLTNVISVARSSVQDHSMQNIRKFIFEITVPNEMSIANHQALIDIGVNSALT

SEQ ID NO: 714 - DNA, 1940 bp, Homo sapien
cctactggtagatcttcacagactggatgttaagcaagtggaaaggcagaacagcctccactcgcggtgcacggggaagagtgggcggcggacgtggttttgggcctgggacccaggtgttcctctaggcccagggcgggcatcgctgcccatccgtcccacaggtggttctgaggcgtctctcaacagccatatggcggacaccagaacccgggtgtaacagtgacccgtttctgtgtgggtccccactcccagggagggcaggagagcgccgggggcgtaacccccctcccccacgctggcaccagagtgtgagcagaatcggcttaaggcagctcccagtccccatcgcccccaaggtcgaaagaatcgggacaggaaatgggtcgggggaccgagtttgggccggaatgttcagagcgtgtccgtcctgctctttaaagcccctctctccatcccagaaccaaagccgggcgcccccagcgctcgctgcggtctcgcgcccgggtaacggccgatggccgcccccgccccagccgcagccggggaggaaatcccgcgcctcggaagaggcgcttcgggctcgggcgggttccggaagccgaggggccgggagtaggtgggcgcataggggctcctgggaggcgggaccaagacgcgcgttaccgggaggccaggcccggcgctgcaccctccgcggcccggggcctgaggccgggctcccgcgacttcccggcccaaagcagcgcagcgcccgggcggcccagccccgcagcggccacagcagcatagccgggcgagcggatccagaggcccgggcttccttcctgtgcgagtcggcgcggacgactgctagtccagccgttgggcgccgcctggatctcggcgcctggcccttaaagagacccggtcgcatttcatctcagcgagaggagaaatactcgaagggagaggttcgccgctggcagccagaagccttaccactgctaggacgctggcagaacgcacccataacttggcaacactcggaggatggatggcaaataataccagcgactgaagggttaattaatgattgcagattaattgaacaccttccgtaatcagacacctggcacacactcatgatgtcacttattcctcccaacaaccctgcaaatagataactgtctctcccattctccgagcttgtcctcagagaattaggtaacttgttcaaaatggtcagaagcaacagatataactccttgctctactctttccccccttctcactactgcacttgactagtctttttaaaacataatttttttggccaggcacggtggctcacgcctgtaatcccagcactttgggaggccaaggaaggcagatcacctgaggccagaagttcgagaccagccttggccaacatggcgaaaccccatcgctactaaaaatgcaaaaattagctgggtgtggtggggggcacccgtattcccagctactcagaggctgaggcaggaaaatcgcttgaacctggaggcagagattgcagtgagccgagatcattgcattgcactccagcttgagcaacagagggacacttcgttccccccgccaaaaaaaaaattttttttttaatgatcagaagcggctgggcgcggtggctcgggcctgtaatcccagcactttcggaggccgaggaaggtagatcacttgaggtcatgagttcaagaccagcctgaccaacatggccaaaaactgtctctactaaaaatacaaaaattagccgggcgtggtagcgcacgcctgtaatcccagctactcaggaggctcaggcacgagaatcgcttgagtctgggaggcggaggttgcagtgagctgagatcgtggccactgcaatccagcctgggcgatagagtgagactacgtctcaaaaaaaaaaaaaaaaaaaaaaa

SEQ ID NO: 715 - protein, 230 aa, Homo sapien [sequence omitted]

SEQ ID NO: 716 - DNA, 3899 bp, Homo sapien
agcttgagcgcggcggcggcgttgttcagtcagagcgagaacattccagaggtcgcccagctccggcgctgacgggtgtggaccgcggacgtcgctgggacagcccctccccgctgctcggcggcggcatctggcccggccgctcctcgctgcgcttcgcctccgcctcctcggactcggactcgggtttatatcgcgcctcacttcatcccagtcccgggcgagcagcgttgggtttatgtctttatttgacgaaaacgagctgttgcgcagccattggtacctgtattggggaaacatagcatacaagcaagaagcttacagcctcagtggcgaaaattttttcatgtcagagaccgagaactcttgcagtcgtttatgtcatcccttcttctccagacagaagataccaaaaagttgcaatcaaagatctcttcatcttattgataaagccactaataagccaaaatgtctgtcaatgtcaaccgcagcgtgtcagaccagttctatcgctacaagatgccccgtctgattgccaaggttgagggcaaaggcaatggaatcaagacagttatagtcaacatggttgacgttgcaaaggcgcttaatcggcctccaacgtatcccaccaaatattttggttgtgagctgggagcacagacccagtttgatgttaagaatgaccgttacattgtcaatggatctcatgaggcgaataagctgcaagacatgttggatggattcattaaaaaatttgttctctgtcctgaatgtgagaatcctgaaacagatttgcatgtcaatccaaagaagcaaacaataggtaattcttgtaaagcctgtggctatcgaggcatgcttgacacacatcataaactctgcacattcattctcaaaaacccacctgagaatagtgacagtggtacaggaaagaaagaaaaagaaaagaaaaacagaaagggcaaagacaaggaaaatggctccgtatccagcagtgagacaccaccaccaccaccaccaccaaatgaaattaatcctcctccacatacaatggaagaagaggaggatgatgactggggagaagatacaactgaggaagctcaaaggcgtcgaatggatgaaatcagtgaccatgcaaaagttctgacactcagtgatgatttggaaagaacaattgaggagagggtcaatatcctctttgattttgttaagaaaaagaaagaagagggtgttattgattcatctgacaaagaaatcgttgctgaagcagaaagactggatgtaaaagccatgggccctcttgttctaactgaagttctttttaatgagaagattagagaacagattaagaaatacaggcgccatttcctacgattttgtcacaacaacaaaaaagcccaacggtaccttcttcatggtttggagtgtgtggtagcaatgcatcaagctcagcttatctccaagattccacatatcttgaaggagatgtacgatgcagaccttttagaagaagaggtcatcatcagctggtcggaaaaggcctctaagaaatatgtctccaaagaacttgccaaagagattcgtgtcaaagcagaaccatttataaaatggttgaaggaggcagaggaagaatcttctggtggcgaagaagaagatgaagatgagaacattgaggtggtgtattcgaaggctgccagtgtaccgaaagttgagactgtaaagtcagacaacaaggatgacgacatcgatattgatgccatttaaagggatggatgcaacctagcttaacagtataatgctgcaaattttcctccattatcagccagaagtgcaacatgtatgtgcaaaagctaaaatggcttaacatcatgctacactttacactaaaaatctattactgtgagtggtctgttattaagcccaatgagacatctagggagtccatacacatcagtgagcagatgtagtttgcttatttatagcatgtttctttttgaaaaactagtggtggacacatttggatcacatttatacagttataaaaataaaggtttgattttggtcgttcttcagatgtttggctctgaatgacttaagctgaagtaactggctccttactttaaatgttctgccatcatttcacctgatgagcattcttggagcctgccagatattgttaggtcctggggctgcaaagaggtcctcaacaggatgtaaagcaaacttaattgtaattaatttattcagcccattaagaaagtactaaagttttatctctgtagttcctcaaattggcatctggtaatgtacattgtgaggtagactgataatgaaatgacagtgcaacatcttaaccaagaagtaaatatgacctcagtgtcctataaataatgtaagagcaggatttgaaacttggagagctgttttctcatttcatgtacacttgccccaaattgtctttgaagtcgtgtgcattgcacgttggatgagccagggaaattattacattaacaagcattttgtgtgtgcgtagtagttactttgtactgagagaacttgctttggggtgcaattaaacaataaactgattttatttgggagaaacaaggaagggtgcacttaactagcaacctaagcatgatttttcagcttttgcccttagggtttaaattacaattccaaaatgttagacatactgtattttttcgttcagtgtggctttaattttcccctcttgcagtttgttctgtaatgccttttacatttggacacatagtttatgctttttagattttggttgctttcttgccaaaataagtgttaactgtgtttcaaacttgattttctttcttttttctttttttttcttccagaatgtcttatttaaaaagaaagctaaaagcatacttctaagtcagagcctctattttggtgtaagacttgggatattttttacttcacattgaatatagccaggcacccaagaagtctgatggccacctgagtgcaggtgacaaggacctgacagagcccatgcagggctttagatttggacacacaagagttgataacttcctcatgaactccttgcctgatctaaactcatattatgggttctgactgtttgagtaatcgtcttcaaggttaaacctcttggcagttacccttttcacaaagtgcacagtgggaatcgagaatcgatagggttaattttggagcagtggcttataccattcacctctgtttttttgtgattatttcacagataatgagaccttaataacaaataggcgtaaaaaaattttcacattgaaatgatagaaacatttgatgtaataaaacttggttggcttgatattttaaggaattgaaacctagcaatcttattggagagacaagaattggtctccagctgcctttgatcaagattcgggtgcaagtggagcaggagccatatacctggagggaatgtgctttgtcacaccaaagaggattttttttttcttcaaacttgtatgttgcctaggtttcaaattctttgccgcaaggctgatctgctttcattaactggaattctgtaggagatactggtgacctaagctaagttgcactcagcatactcagtgtcaagctaatgaggttctattataaaggttctacttttaatctgagggaaaacatgttcagggcttctagaacactaaaaaatttggcttaaaccagtgttcagtctggtgccaaacttcgaatggaatacaaattcacataatctgaactttgttcacaggttatcctaatagagtaattcttcactttgctctattgaactgtcttaaggatttgtttaaacagctaagttacttgattaaaataatgataaaattgtaaaaaaaaaaaaa

SEQ ID NO: 717 - protein, 431 aa, Homo sapien
MSVNVNRSVSDQFYRYKMPRLIAKVEGKGNGIKTVIVNMVDVAKALNRPPTYPTKYFGCELGAQTQFDVKNDRYIVNGSHEANKLQDMLDGFIKKFVLCPECENPETDLHVNPKKQTIGNSCKACGYRGMLDTHHKLCTFILKNPPENSDSGTGKKEKEKKNRKGKDKENGSVSSSETPPPPPPPNEINPPPHTMEEEEDDDWGEDTTEEAQRRRMDEISDHAKVLTLSDDLERTIEERVNILFDFVKKKKEEGVIDSSDKEIVAEAERLDVKAMGPLVLTEVLFNEKIREQIKKYRRHFLRFCHNNKKAQRYLLHGLECVVAMHQAQLISKIPHILKEMYDADLLEEEVIISWSEKASKKYVSKELAKEIRVKAEPFIKWLKEAEEESSGGEEEDEDENIEVVYSKAASVPKVETVKSDNKDDDIDIDAI

SEQ ID NO: 718 - DNA, 2828 bp, Homo sapien
ggggcggggagcggacttcctcctctgagggccgtgccgcgctgccagatttgttcttccgcccctgcctccgcggctcggaggcgagcggaaggtgccccggggccgaggcccgtgacggggcgggcgggagccccggcagtccggggtcgccggcgagggccatgtcgctgttgggggacccgctacaggccctgccgccctcggccgcccccacggggccgctgctcgcccctccggccggcgcgaccctcaaccgcctgcgggagccgctgctgcggaggctcagcgagctcctggatcaggcgcccgagggccggggctggaggagactggcggagctggcggggagtcgcgggcgcctccgcctcagttgcctagacctggagcagtgttctcttaaggtactggagcctgaaggaagccccagcctgtgtctgctgaagttaatgggtgaaaaaggttgcacagtcacagaattgagtgatttcctgcaggctatggaacacactgaagttcttcagcttctcagccccccaggaataaagattactgtaaacccagagtcaaaggcagtcttggctggacagtttgtgaaactgtgttgccgggcaactggacatccttttgttcaatatcagtggttcaaaatgaataaagagattccaaatggaaatacatcagagcttatttttaatgcagtgcatgtaaaagatgcaggcttttatgtctgtcgagttaataacaatttcacctttgaattcagccagtggtcacagctggatgtttgcgacatcccagagagcttccagagaagtgttgatggcgtctctgaatccaagttgcaaatctgtgttgaaccaacttcccaaaagctgatgccaggcagcacattggttttacagtgtgttgctgttggaagccctattcctcactaccagtggttcaaaaatgaattaccattaacacatgagaccaaaaagctatacatggtgccttatgtggatttggaacaccaaggaacctactggtgtcatgtatataatgatcgagacagtcaagatagcaagaaggtagaaatcatcataggaagaacagatgaggcagtggagtgcactgaagatgaattaaataatcttggtcatcctgataataaagagcaaacaactgaccagcctttggcgaaggacaaggttgcccttttgataggaaatatgaattaccgggagcaccccaagctcaaagctcctttggtggatgtgtacgaattgactaacttactgagacagctggacttcaaagtggtttcactgttggatcttactgaatatgagatgcgtaatgctgtggatgagtttttactccttttagacaagggagtatatgggttattatattatgcaggacatggttatgaaaattttgggaacagcttcatggtccccgttgatgctccaaatccatataggtctgaaaattgtctgtgtgtacaaaatatactgaaattgatgcaagaaaaagaaactggacttaatgtgttcttattggatatgtgtaggaaaagaaatgactacgatgataccattccaatcttggatgcactaaaagtcaccgccaatattgtgtttggatatgccacgtgtcaaggagcagaagcttttgaaatccagcattctggattggcaaatggaatctttatgaaatttttaaaagacagattattagaagataagaaaatcactgtgttactggatgaagttgcagaagatatgggtaagtgtcaccttaccaaaggcaaacaggctctagagattcgaagtagtttatctgagaagagagcacttactgatccaatacagggaacagaatattctgctgaatctcttgtgcggaatctacagtgggccaaggctcatgaacttccagaaagtatgtgtcttaagtttgactgtggtgttcagattcaattaggatttgcagctgagttttccaatgtcatgatcatctatacaagtatagtttacaaaccaccggagataataatgtgtgatgcctacgttactgattttccacttgatctagatattgatccaaaagatgcaaataaaggcacacctgaagaaactggcagctacttggtatcaaaggatcttcccaagcattgcctctataccagactcagttcactgcaaaaattaaaggaacatctagtcttcacagtatgtttatcatatcagtactcaggattggaagatactgtagaggacaagcaggaagtgaatgttgggaaacctctcattgctaaattagacatgcatcgaggtttgggaaggaagacttgctttcaaacttgtcttatgtctaatggtccttaccagagttctgcagccacctcaggaggagcagggcattatcactcattgcaagacccattccatggtgtttaccattcacatcctggtaatccaagtaatgttacaccagcagatagctgtcattgcagccggactccagatgcatttatttcaagtttcgctcaccatgcttcatgtcattttagtagaagtaatgtgccagtagagacaactgatgaaataccatttagtttctctgacaggctcagaatttctgaaaaatgacctccttgtttttgaaagttagcataattttagatgcctgtgaaatagtactgcacttacataaagtgagacattgtgaaaaggcaaatttgtatatgtagagaaagaatagtagtaactgtttcatagcaaacttcaggactttgagatgttgaaattacattatttaattacagacttcctctttct

SEQ ID NO: 719 - protein, 824 aa, Homo sapien
MSLLGDPLQALPPSAAPTGPLLAPPAGATLNRLREPLLRRLSELLDQAPEGRGWRRLAELAGSRGRLRLSCLDLEQCSLKVLEPEGSPSLCLLKLMGEKGCTVTELSDFLQAMEHTEVLQLLSPPGIKITVNPESKAVLAGQFVKLCCRATGHPFVQYQWFKMNKEIPNGNTSELIFNAVHVKDAGFYVCRVNNNFTFEFSQWSQLDVCDIPESFQRSVDGVSESKLQICVEPTSQKLMPGSTLVLQCVAVGSPIPHYQWFKNELPLTHETKKLYMVPYVDLEHQGTYWCHVYNDRDSQDSKKVEIIIGRTDEAVECTEDELNNLGHPDNKEQTTDQPLAKDKVALLIGNMNYREHPKLKAPLVDVYELTNLLRQLDFKVVSLLDLTEYEMRNAVDEFLLLLDKGVYGLLYYAGHGYENFGNSFMVPVDAPNPYRSENCLCVQNILKLMQEKETGLNVFLLDMCRKRNDYDDTIPILDALKVTANIVFGYATCQGAEAFEIQHSGLANGIFMKFLKDRLLEDKKITVLLDEVAEDMGKCHLTKGKQALEIRSSLSEKRALTDPIQGTEYSAESLVRNLQWAKAHELPESMCLKFDCGVQIQLGFAAEFSNVMIIYTSIVYKPPEIIMCDAYVTDFPLDLDIDPKDANKGTPEETGSYLVSKDLPKHCLYTRLSSLQKLKEHLVFTVCLSYQYSGLEDTVEDKQEVNVGKPLIAKLDMHRGLGRKTCFQTCLMSNGPYQSSAATSGGAGHYHSLQDPFHGVYHSHPGNPSNVTPADSCHCSRTPDAFISSFAHHASCHFSRSNVPVETTDEIPFSFSDRLRISEK

SEQ ID NO: 720 - DNA, 1940 bp, Homo sapien
acccagggtccggcctgcgccttcccgccaggcctggacactggttcaacacctgtgacttcatgtgtgcgcgccggccacacctgcagtcacacctgtagccccctctgccaagagatccataccgaggcagcgtcggtggctacaagccctcagtccacacctgtggacacctgtgacacctggccacacgacctgtggccgcggcctggcgtctgctgcgacaggagcccttacctcccctgttataacacctgacagccacctaactgcccctgcagaaggagcaatggccttggctcctgagaggtaagagcccggcccaccctctccagatgccagtccccgagcgccctgcagccggccctgactctccgcggccgggcacccgcagggcagccccacgcgtgctgttcggagagtggctccttggagagatcagcagcggctgctatgaggggctgcagtggctggacgaggcccgcacctgtttccgcgtgccctggaagcacttcgcgcgcaaggacctgagcgaggccgacgcgcgcatcttcaaggcctgggctgtggcccgcggcaggtggccgcctagcagcaggggaggtggcccgccccccgaggctgagactgcggagcgcgccggctggaaaaccaacttccgctgcgcactgcgcagcacgcgtcgcttcgtgatgctgcgagataactcgggggacccggccgacccgcacaaggtgtacgcgctcagccgggagctgtgctggcgagaaggcccaggcacggaccagactgaggcagaggcccccgcagctgtcccaccaccacagggtgggcccccagggccattcctggcacacacacatgctggactccaagccccaggccccctccctgccccagctggtgacgagggggacctcctgctccaggcagtgcaacagagctgcctggcagaccatctgctgacagcgtcatggggggcagatccagtcccaaccaaggctcctggagagggacaagaagggcttcccctgactggggcctgtgctggaggcccagggctccctgctggggagctgtacgggtgggcagtagagacgacccccagccccgggccccagcccgcggcactaacgacaggcgaggccgcggccccagagtccccgcaccaggcagagccgtacctgtcaccctccccaagcgcctgcaccgcggtgcaagagcccagcccaggggcgctggacgtgaccatcatgtacaagggccgcacggtgctgcagaaggtggtgggacacccgagctgcacgttcctatacggccccccagacccagctgtccgggccacagacccccagcaggtagcattccccagccctgccgagctcccggaccagaagcagctgcgctacacggaggaactgctgcggcacgtggcccctgggttgcacctggagcttcgggggccacagctgtgggcccggcgcatgggcaagtgcaaggtgtactgggaggtgggcggccccccaggctccgccagcccctccaccccagcctgcctgctgcctcggaactgtgacacccccatcttcgacttcagagtcttcttccgagagctggtggaattccgggcacggcagcgccgtggctccccacgctataccatctacctgggcttcgggcaggacctgtcagctgggaggcccaaggagaagagcctggtcctggtgaagctggaaccctggctgtgccgagtgcacctagagggcacgcagcgtgagggtgtgtcttccctggatagcagcagcctcagcctctgcctgtccagcgccaacagcctctatgacgacatcgagtgcttccttatggagctggagcagcccgcctagaacccagtctaatgagaactccagaaagctggagcagcccacctagagctggcc

SEQ ID NO: 721 - protein, 516 aa, Homo sapien
MPVPERPAAGPDSPRPGTRRAAPRVLFGEWLLGEISSGCYEGLQWLDEARTCFRVPWKHFARKDLSEADARIFKAWAVARGRWPPSSRGGGPPPEAETAERAGWKTNFRCALRSTRRFVMLRDNSGDPADPHKVYALSRELCWREGPGTDQTEAEAPAAVPPPQGGPPGPFLAHTHAGLQAPGPLPAPAGDEGDLLLQAVQQSCLADHLLTASWGADPVPTKAPGEGQEGLPLTGACAGGPGLPAGELYGWAVETTPSPGPQPAALTTGEAAAPESPHQAEPYLSPSPSACTAVQEPSPGALDVTIMYKGRTVLQKVVGHPSCTFLYGPPDPAVRATDPQQVAFPSPAELPDQKQLRYTEELLRHVAPGLHLELRGPQLWARRMGKCKVYWEVGGPPGSASPSTPACLLPRNCDTPIFDFRVFFRELVEFRARQRRGSPRYTIYLGFGQDLSAGRPKEKSLVLVKLEPWLCRVHLEGTQREGVSSLDSSSLSLCLSSANSLYDDIECFLMELEQPA

SEQ ID NO: 722 - DNA, 1749 bp, Homo sapien
tctgcagccacgagaagcaaagttgacatttctggatcactctccccagacgcgtcacttgcccacaagcgggacacggcagtctcgctgagccagctgtgcagagggacagatggaagaaagctagagatgctgcttcgtgggcgctgaagttgcagaacttgggctggttttctttcttcccatcccccctcctcctgacaaaccacatcttgactcagatggtcgaaagaaaaactctttcagttatttgatatttgggaaccctccaggagaccataacttatttttgagggaggctccttctctccctttgctgggaacacacacacacacacacacacacacacacacacacacacacacacacacacacacagctgtacaccatggtggttcaggctgcagtggctccgaatagatcccaaagacttttactgaaaattccttatggatctctgagaaggcgcagcgttgaaaggatgacggagggccgccgatgtcaagtacatcttcttgatgacaggaagctggaactcctagtacagcccaagctgttggccaaggagcttcttgaccttgtggcttctcacttcaatctgaaggaaaaggagtactttggaatagcattcacagatgaaacgggacacttaaactggcttcagctagatcgaagagtattggaacatgacttccctaaaaagtcaggacccgtggttttatacttttgtgtcaggttctatatagaaagcatttcatacctgaaggataatgctaccattgagcttttctttctgaacgcgaagtcctgcatctacaaggagcttattgacgttgacagcgaagtggtgtttgaattagcttcctatattttacaggaggcaaagggagatttttctagcaatgaagttgtgaggagtgacttgaagaagctgccagcccttcccacccaagccctgaaggagcacccttccctggcctactgtgaagacagagtcattgagcactacaagaaactgaacggtcagacaagaggtcaagcaatcgtaaactacatgagcatcgtggggtctctcccaacctacggggttcactattatgcagtgaaggacaagcagggcataccatggtggctgggcctgagctacaaagggatcttccagtatgactaccatgataaagtgaagccaagaaagatattccaatggagacagttggaaaacctgtacttcagagaaaagaagttttccgtggaagttcatgacccacgcagggcttcagtgacaaggaggacgtttgggcacagcggcattgcagtgcacacgtggtatgcatgtccggcattgatcaagtccatctgggctatggccataagccaacaccagttctatctggacagaaagcagagtaagtccaaaatccatgcagcacgcagcctgagtgagatcgccatcgacctgaccgagacggggacgctgaagacctcgaagctggccaacatgggtagcaaggggaagatcatcagcggcagcagcggcagcctgctgtcttcaggtaggcagaggccagctggagggacgccccctgagcatggctgggaccccagaggggacccaggaaggtggggagagctgcagctggggagactgcagggcaagctgctccaaagctggctttgctttccagaccaaggttgggatccaaatgcgaatctgagaaaactgctcccaggaatcaaatagtggaagg

SEQ ID NO: 723 - protein, 450 aa, Homo sapien
MVVQAAVAPNRSQRLLLKIPYGSLRRRSVERMTEGRRCQVHLLDDRKLELLVQPKLLAKELLDLVASHFNLKEKEYFGIAFTDETGHLNWLQLDRRVLEHDFPKKSGPVVLYFCVRFYIESISYLKDNATIELFFLNAKSCIYKELIDVDSEVVFELASYILQEAKGDFSSNEVVRSDLKKLPALPTQALKEHPSLAYCEDRVIEHYKKLNGQTRGQAIVNYMSIVGSLPTYGVHYYAVKDKQGIPWWLGLSYKGIFQYDYHDKVKPRKIFQWRQLENLYFREKKFSVEVHDPRRASVTRRTFGHSGIAVHTWYACPALIKSIWAMAISQHQFYLDRKQSKSKIHAARSLSEIAIDLTETGTLKTSKLANMGSKGKIISGSSGSLLSSGRQRPAGGTPPEHGWDPRGDPGRWGELQLGRLQGKLLQSWLCFPDQGWDPNANLRKLLPGIK

SEQ ID NO: 724 - DNA, 1652 bp, Homo sapien
aaagagaacacagctagatactgggcatgtgcaactgaatgggagtagttttacatacaggatactttggaagctgggaagtaggagaagcaccatctctaattatagggaagcaccacaattgtcagacaatttgtcacgttctacaattgccactggcatgaggaacctgagataatgtcccaagtgaatcactgtgcacttatcctgctggggaggatcatggactaggaattttgtgataccagcatggattacatgcaagtggtattttggttgggaaataagcacatcatgctagtcctgggctgttccctgtgtagggctgcctgccccttataaaaggactctccaccacactgatgctatcttcttgccattcagttgtagatctttgaagactctggtgagtacaaatattagaagcttttcttgcacttggatggtgttagggtctaacctgggtacagaaatgcctgtttattttaaccaatttatcctcatggataggaaaaagaagataatgaggtcttgaaggtaaattttagctggtatttggtagataaacatgaaggtgatgaggaacctggagtcaaatatataaaatcttaaactgaaggagagtgagagacacaagatgctgttctgtctcctgcttcacatctgttccaaatacatctctcttggagtgcaatctccttgggtgatgggtgcaagtttttgcaattctcttaaaaaactcatggctcagcaccacagccagctcattaaaactggtaactagggcctcatggaagataagatcacagatttgtttggtattggctagacttttaatatctgagtttttcttcttcagatagtgtttgtattcagacaacatttgttgctgtctcataggcaattttattttcagaaaatggtagaatgagagaacagccagaaagacggaagaactgagggtaagaggtcctaaaagtgaagtgtgaagaaggttcacaaagtcataaagactgtattagggatcaaagttggtccctagatactggagatttgatgtcctagctaattgctccaccaacaggactgtctctcttatgagcactgtttcgtgtgtatctttcagattctctgagactgaggagagatgtcttaccagcagcagcagtgcaagcagccctgccagccacctcctgtgtgccccacgccaaagtgcccagagccatgtccacccccgaagtgccctgagccttacctgcctcctccttgtccacctgagcattgcccacctccaccatgccaggataaatgccctcctgtgcaaccatacccaccctgccagcagaagtatccacccaagagcaagtaacatcactagaattcatcaggaccatgaaacaacaagatccagtggctcttcttattcccaggactccatcatcttcccttcagctgtagtgggaggctgcatcttccctaacctctgtctggcttgagcgttgacagagaaaaggcttagttctgaaaaccgatatgttgttggaagatgagcagccagatcattgcctaatctcgctttgctgtctgtgatgtagatggtggttcctatcctgagagcaagtgtgtttattcttttgcttctccccaataaa

SEQ ID NO: 725 - protein, 73 aa, Homo sapien
MSYQQQQCKQPCQPPPVCPTPKCPEPCPPPKCPEPYLPPPCPPEHCPPPPCQDKCPPVQPYPPCQQKYPPKSK

SEQ ID NO: 726 - DNA, 7787 bp, Homo sapien
gaattcggggaacggtgtggagcggaggccgcggaggctcctcggtccttcagcacccctcggcccgacgcacccacgcccctcaccccccgagagccgaaaatggacccaagtggggtcaaagtgctggaaacagcagaggacatccaggagaggcggcagcaggtcctagaccgataccaccgcttcaaggaactctcaacccttaggcgtcagaagctggaagattcctatcgattccagttctttcaaagagatgctgaagagctggagaaatggatacaggaaaaacttcagattgcatctgatgagaattataaagacccaaccaacttgcagggaaagcttcagaagcatcaagcatttgaagctgaagtgcaggccaactcaggagccattgttaagctggatgaaactggaaacctgatgatctcagaagggcattttgcatctgaaaccatacggacccgtttgatggagctgcaccgccagtgggaattacttttggagaagatgcgagaaaaaggaatcaaattgctgcaggcccagaacttggtgcagtacttacgagaatgtgaggacgtgatggactggatcaatgacaaggaagcaattgttacttctgaagagctgggccaggatctggagcatgtagaggttttacagaagaaatttgaagagtttcaaacagatatggctgctcatgaagaaagagttaatgaagtgaaccagtttgctgccaaactcatacaggagcagcaccctgaggaggaactgatcaagactaagcaggatgaagtcaatgcagcctggcagcggctgaagggcctggctctgcagaggcaggggaagctctttggggcagcagaagttcagcgctttaacagggatgtggatgagactatcagttggattaaggaaaaggagcagttaatggcctctgatgattttggccgagacctggcaagtgttcaggctctgcttcggaagcacgagggtctggagagagatcttgctgctctagaagacaaggtcaaagccctgtgtgctgaggctgaccgcctgcaacagtcccaccctctgagtgcaacacagattcaagtgaagcgagaggaactgattacaaactgggagcagatccgcaccttggcggcagagagacatgcacggctcaatgattcatacaggcttcaacgcttccttgctgacttccgtgacctcaccagctgggtgactgagatgaaagccctcatcaatgcagatgagcttgccagtgatgtggctggggctgaagccctgctagatagacaccaagagcacaagggtgaaattgatgcccatgaagacagcttcaaatctgcagatgaatctggacaggcactgcttgctgctggtcactatgcctcagatgaagtgagggagaagctgaccgtcctttccgaggagagagcggcgctgctggagctgtgggagctgcgcaggcagcagtacgagcagtgcatggacctgcagctcttctaccgggacactgagcaggtggacaactggatgagcaagcaggaggcgttcctgttgaatgaagacttgggagatttcttggatagtgtggaagcgcttcttaagaagcacgaagactttgagaaatcccttagtgcccaggaggaaaagattacagcattagatgaatttgcaaccaagctaattcagaacaaccactatgcaatggaagatgtggccactcgccgagacgctctgttgagccgccgcaatgcccttcacgagagagccatgcgtcgccgggcccagctagccgattctttccatctgcagcagtttttccgtgattctgatgagctcaagagttgggtgaatgagaagatgaaaactgccacagatgaagcttataaagatccatccaacctacaaggaaaagtacagaagcatcaggcttttgaggctgagctctcagcaaaccagagccgaattgatgccttggagaaagctggccaaaagctgattgatgtcaaccactatgccaaggatgaagtggcagctcgtatgaatgaggtgatcagtttgtggaagaaactgctagaggccactgaactgaaaggaataaagcttcgtgaagccaaccagcaacagcaatttaatcgcaatgttgaggatattgaattgtggctatatgaagtagaaggtcacttggcttcggatgattacggcaaagatcttaccaatgtgcagaacctccagaagaaacatgccctgctagaggcagatgtggctgctcaccaggaccgaattgatggcgtcaccattcaggcccgccagttccaagatgctggccattttgatgcagaaaacatcaagaagaaacaggaagccctcgtggctcgctatgaggcactcaaggagcccatggttgcccggaagcagaagctggccgattctctgcggttgcagcagctcttccgggatgttgaggatgaggagacgtggattcgagagaaagagcccattgccgcatctaccaacagaggtaaggatttaattggggtccagaatctgctaaagaaacatcaagccttacaagcagaaattgctggacatgaaccacgcatcaaagcagttacacagaaggggaatgccatggtggaggaaggccattttgctgcagaggatgtgaaggccaagcttcacgagctgaaccaaaagtgggaggcactgaaagcaaaagcttcccagcgtcggcaggacctggaggactctctgcaggcccagcagtactttgctgatgctaacgaggctgaatcctggatgcgggagaaggaacccattgtgggcagcactgactatggcaaggacgaagactctgctgaggctctactgaagaaacacgaagctttgatgtcagatctcagtgcctacggcagcagcatccaggctttgcgagaacaagcacagtcctgccggcaacaagtggcccccacggatgatgagactgggaaggagctggtcttggctctctacgactatcaggagaagagtccccgagaggtcaccatgaagaagggagatatccttaccttactcaacagcaccaacaaggattggtggaaagtggaagtgaacgatcgtcagggttttgtgccggctgcgtacgtgaagaaattggaccccgcccagtcagcctcccgggagaatctcctggaggagcaaggcagcatagcactgcggcaggagcagattgacaatcagacacgcataactaaggaggccggcagtgtatctctgcgtatgaagcaggtggaagaactatatcattctctgctggaactgggtgagaagcgtaaaggcatgttggagaagagttgcaagaagtttatgttgttccgtgaagcgaatgaactacagcaatggatcaatgagaaggaagccgctctgacaagtgaggaggtcggagcagacttggagcaggttgaggtgctccagaagaagtttgatgacttccagaaggacctgaaggccaatgagtcacggttgaaggacattaacaaggtagctgaagacctggagtctgaaggtcttatggcagaggaggtgcaggctgtgcaacaacaggaagtgtatggcatgatgcccagggatgaaactgattccaagacagcctccccgtggaagtctgctcgtctgatggttcacaccgtggccacctttaattccatcaaggagctgaatgagcgctggcggtccctacagcagctggccgaggaacggagccagctcttgggcagcgcccatgaagtacagaggttccacagagatgctgatgaaaccaaagaatggattgaagagaagaatcaagctctaaacacagacaattatggacatgatctcgccagtgtccaggccctgcaacgcaagcatgagggcttcgagagggaccttgcggctctcggtgacaaggtaaactcccttggtgaaacagcagagcgcctgacccagtcccatcccgagtcagcagaagacctgcaggaaaagtgcacagagttaaaccaggcctggagcagcctggggaaacgtgcagatcagcgcaaggcaaagttgggtgactcccacgacctgcagcgcttccttagcgatttccgggacctcatgtcttggatcaatggaatacgggggttggtgtcctcagatgagctagccaaggatgtcaccggagctgaggcattgctggagcgacaccaggaacaccggacagaaatcgatgccagggctggcactttccaggcatttgagcagtttggacagcagctgttggctcacggacactatgccagccctgagatcaagcagaaacttgatattcttgaccaggagcgtgcagacctggagaaggcctgggttcagcgcaggatgatgctggatcagtgccttgaactgcagctgttccatcgggactgtgagcaagctgagaactggatggctgcccgggaggccttcttgaataccgaagacaaaggagactcactggacagcgtagaggctctgatcaaaaaacatgaagactttgacaaagcgattaacgtccaggaagagaagattgctgctctgcaggcctttgccgaccagctcatcgctgccggccattatgccaagggagacatttctagccggcgcaatgaggtcttggacaggtggcgacgtctgaaagcccagatgattgagaaaaggtcaaagctaggagaatctcaaaccctccaacagttcagccgggatgtggatgagattgaggcttggatcagtgaaaaattgcaaacagcgagtgatgagtcgtacaaggatcccaccaacatccagagcaagcaccagaagcaccaggcttttgaagcagagctgcatgccaacgctgaccggatccgtggggttatcgacatgggcaactccctcattgaacgtggagcctgtgccggcaatgaggatgctgtcaaggcccgcctggctgccttagctgaccagtggcaattcttggtgcaaaagtcagcggaaaagagccagaaactgaaagaagccaacaagcagcagaacttcaacacagggatcaaggacattgcattctggctgtctgaggtggaggccctgctggcatccgaagattatggcaaagacctggcttctgtgaacaacctgctgaaaaagcatcaactgctggaagcagatatatctgcccatgaggatcgcctgaaggacctgaacagccaggcagacagcctgatgaccagcagtgccttcgacacctcccaagtaaaggacaagagggacaccatcaacgggcgcttccagaagatcaagagcatggcggcctcccggcgagccaagctgaatgaatcccatcgcctgcaccagttcttccgggacatggatgacgaggagtcctggatcaaggagaagaagctgctggtgggctcagaggactacggccgggacctaactggcgtgcagaacctgaggaagaagcacaagcggctggaagcagaactggctgcgcatgagccggctattcagggtgtcctggacactggcaagaagctgtccgatgacaacaccatcgggaaagaggagatccagcagcggctggcgcagtttgtggagcactggaaagagctgaagcagctggcagctgcccggggtcagcggctggaagagtccttggaatatcagcagtttgtagccaatgtggaagaggaagaagcctggatcaatgagaaaatgaccctggtggccagcgaagattatggcgacactcttgccgccatccagggcttactgaagaaacatgaagcttttgagacagccttcaccgtccacaaggatcgcgtgaatgatgtctgcaccaatggacaagacctcattaagaagaacaatcaccatgaggagaacatctcttcaaagatgaagggcctgaacgggaaagtgtcagacctggagaaagctgcagcccagagaaaggcgaacgtggatgagaactcggccttccttcagttcaactggaaggcggacgtggtggagtcctggatcggtgaaaaggagaacagcttgaagacagatgattatggccgagacctgtcttctgtgcagacgctcctcaccaaacaggaaacttttgacgctgggctgcaggccttccagcaggaaggcattgccaacatcactgccctcaaagatcagcttctcgccgccaaacacgttcagtccaaggccatcgaggcccggcacgcctccctcatgaagaggtggagccagcttctggccaactcagccgcccgcaagaagaagcttctggaggctcagagtcacttccgcaaggtggaggacctcttcctgaccttcgccaaaaaggcttctgccttcaacagctggtttgaaaatgcagaggaggacttaacagaccccgtgcgctgcaactccttggaagaaatcaaagctttgcgcgaggcccacgacgccttccgctcctccctcagctctgcccaggctgacttcaaccagctggccgagctggaccgccagatcaagagcttccgcgtagcctccaacccctacacctggtttaccatggaggccctggaggagacctggaggaacctacagaaaatcatcaaggagagggagctggagctgcagaaggaacagcggcggcaggaggagaacgacaagctgcgccaggagtttgcccagcacgccaacgccttccaccagtggatccaagagaccaggacatacctcctcgatgggtcctgtatggtggaagagtcggggaccctcgaatcccagcttgaagctaccaaacgcaagcaccaggaaatccgagccatgagaagtcagctcaaaaagatcgaggacctgggggccgccatggaggaggccctcatcctggacaacaagtacacggagcacagcaccgtgggcctcgcccagcagtgggaccagctggaccagctgggcatgcgcatgcagcacaacctggagcagcagatccaggccaggaacacaacaggtgtgactgaggaggccctcaaagaattcagcatgatgtttaaacactttgacaaggacaagtctggcaggctgaaccatcaggatggcaaatcttgcctgcgctccctgggctatgacctgcccatggtggaggaaggggaacctgaccctgagttcgaggcaatcctggacacggtggatccgaacagagatggccatgtctccttgcaagaatacatggctttcatgatcagccgcgaaactgagaacgtcaagtccagcgaggagattgagagcgccttccgggccctcagctcagagggaaagccttacgtgaccaaggaggagctctaccagaacctgacccgggaacaagccgactactgcgtctcccacatgaagcccatcgtggacggcaagggccgcgagctccccaccgcgttcgactacgtggagttcacccgctcgcttttcgtgaactgagccactccctgggtcacccacccctcgctgcttgccctgcgtcgccttgctgcatgtccgctcctctgtgtgctctcactttccactgtaaccttaagcctgcttagcttggaataagacttaggagaaaatggtgcttcactaacccgcttccggtccagtcacaatcatcatgtcactgtgggacccagatctgtgtcttgaagcagctgccctcattccgacttcagaaaatcgaagcagctggcgcctccccttcggaattc

SEQ ID NO: 727 - protein, 2000 aa, Homo sapien
MDPSGVKVLETAEDIQERRQQVLDRYHRFKELSTLRRQKLEDSYRFQFFQRDAEELEKWIQEKLQIASDENYKDPTNLQGKLQKHQAFEAEVQANSGAIVKLDETGNLMISEGHFASETIRTRLMELHRQWELLLEKMREKGIKLLQAQNLVQYLRECEDVMDWINDKEAIVTSEELGQDLEHVEVLQKKFEEFQTDMAAHEERVNEVNQFAAKLIQEQHPEEELIKTKQDEVNAAWQRLKGLALQRQGKLFGAAEVQRFNRDVDETISWIKEKEQLMASDDFGRDLASVQALLRKHEGLERDLAALEDKVKALCAEADRLQQSHPLSATQIQVKREELITNWEQIRTLAAERHARLNDSYRLQRFLADFRDLTSWVTEMKALINADELASDVAGAEALLDRHQEHKGEIDAHEDSFKSADESGQALLAAGHYASDEVREKLTVLSEERAALLELWELRRQQYEQCMDLQLFYRDTEQVDNWMSKQEAFLLNEDLGDFLDSVEALLKKHEDFEKSLSAQEEKITALDEFATKLIQNNHYAMEDVATRRDALLSRRNALHERAMRRRAQLADSFHLQQFFRDSDELKSWVNEKMKTATDEAYKDPSNLQGKVQKHQAFEAELSANQSRIDALEKAGQKLIDVNHYAKDEVAARMNEVISLWKKLLEATELKGIKLREANQQQQFNRNVEDIELWLYEVEGHLASDDYGKDLTNVQNLQKKHALLEADVAAHQDRIDGVTIQARQFQDAGHFDAENIKKKQEALVARYEALKEPMVARKQKLADSLRLQQLFRDVEDEETWIREKEPIAASTNRGKDLIGVQNLLKKHQALQAEIAGHEPRIKAVTQKGNAMVEEGHFAAEDVKAKLHELNQKWEALKAKASQRRQDLEDSLQAQQYFADANEAESWMREKEPIVGSTDYGKDEDSAEALLKKHEALMSDLSAYGSSIQALREQAQSCRQQVAPTDDETGKELVLALYDYQEKSPREVTMKKGDILTLLNSTNKDWWKVEVNDRQGFVPAAYVKKLDPAQSASRENLLEEQGSIALRQEQIDNQTRITKEAGSVSLRMKQVEELYHSLLELGEKRKGMLEKSCKKFMLFREANELQQWINEKEAALTSEEVGADLEQVEVLQKKFDDFQKDLKANESRLKDINKVAEDLESEGLMAEEVQAVQQQEVYGMMPRDETDSKTASPWKSARLMVHTVATFNSIKELNERWRSLQQLAEERSQLLGSAHEVQRFHRDADETKEWIEEKNQALNTDNYGHDLASVQALQRKHEGFERDLAALGDKVNSLGETAERLTQSHPESAEDLQEKCTELNQAWSSLGKRADQRKAKLGDSHDLQRFLSDFRDLMSWINGIRGLVSSDELAKDVTGAEALLERHQEHRTEIDARAGTFQAFEQFGQQLLAHGHYASPEIKQKLDILDQERADLEKAWVQRRMMLDQCLELQLFHRDCEQAENWMAAREAFLNTEDKGDSLDSVEALIKKHEDFDKAINVQEEKIAALQAFADQLIAAGHYAKGDISSRRNEVLDRWRRLKAQMIEKRSKLGESQTLQQFSRDVDEIEAWISEKLQTASDESYKDPTNIQSKHQKHQAFEAELHANADRIRGVIDMGNSLIERGACAGNEDAVKARLAALADQWQFLVQKSAEKSQKLKEANKQQNFNTGIKDIAFWLSEVEALLASEDYGKDLASVNNLLKKHQLLEADISAHEDRLKDLNSQADSLMTSSAFDTSQVKDKRDTINGRFQKIKSMAASRRAKLNESHRLHQFFRDMDDEESWIKEKKLLVGSEDYGRDLTGVQNLRKKHKRLEAELAAHEPAIQGVLDTGKKLSDDNTIGKEEIQQRLAQFVEHWKELKQLAAARGQRLEESLEYQQFVANVEEEEAWINEKMTLVASEDYGDTLAAIQGLLKKHEAFETAFTVHKDRVNDVCTNGQDLIKKNNHHEENISSKMKGLNGKVSDLEKAAAQRKANVDENSAFLQFNWKADVVESWIGEKENSLK

SEQ ID NO: 728 - DNA, 9432 bp, Homo sapien
gccgtggctccggtagcagcaagttcgaaccccgctcccgctccgcttcggttctcgctccttcggcccttgggcctccaaacaccagtccccggcagctcgttgcgcattgcgctctccccgccaccaggatgccggtaaccgagaaggatctagctgaggacgcgccttggaagaagatccagcagaacacgttcacacgctggtgcaacgagcacctcaagtgcgtgaacaaacgcatcggcaacctgcagaccgacctgagcgacgggctgcggctcatcgcgctgctcgaggtgctcagccagaagcgcatgtaccgcaagtaccatcagcggcccacctttcgccagatgcagctcgagaatgtgtccgtggcgctcgagttcctggaccgtgagagcatcaagctcgtgtccatcgatagcaaagccattgtggatgggaacctgaagctcatcttgggtctggtgtggacgctgatcctccactactccatctccatgcccgtgtgggaggatgaaggggatgatgatgccaagaagcagacgccaaagcagaggctgctggggtggattcagaacaagatcccctacttgcccatcaccaactttaaccagaactggcaagacggcaaagccctgggagccctggtagacagctgtgctccaggtctgtgcccagactgggaatcctgggacccgcagaagcctgtggataatgcacgagaagccatgcagcaggcagatgactggctgggtgtcccacaggtcatcactcctgaagaaatcattcacccggatgtggacgagcactcagttatgacttacctgtcccagttccccaaagccaagctcaagccgggggctcctctcaaacccaaactcaacccgaagaaagccagggcctatggcagaggaatcgagcccactggaaacatggtgaagcagccagccaagttcactgtggacaccatcagcgccgggcaaggagacgtgatggtgtttgttgaggacccagaagggaacaaagaggaggcacaagtgacccctgacagcgacaagaacaagacatactctgtggagtatctgcccaaggtcaccgggctacacaaagtcacagtcctctttgcaggacagcacatctccaagagcccatttgaagtgagtgttgacaaggcccagggagatgccagtaaagtcactgcaaaaggtccagggttggaagctgtagggaacatcgccaataagcccacctactttgacatctatacggcaggagctggtgtgggtgacattggtgtggaggtggaagatccccaggggaagaacaccgtggagttgctcgtggaagacaaaggaaaccaggtgtatcgatgtgtgtacaaacccatgcagcctggccctcacgtggtcaagatcttctttgctggggacactattcctaagagtcccttcgttgtgcaggttggggaagcctgcaatccaaatgcctgccgggccagtggccgaggcctacaacccaaaggcgtccgtatccgggagaccacagatttcaaggttgacaccaaagctgcaggaagtggggagctcggggtaaccatgaagggtcctaagggtctggaggagctggtgaagcagaaagactttctggatggggtctacgcattcgagtattaccccagcaccccggggagatacagcattgccatcacatgggggggacaccacattccaaagagcccctttgaagttcaagttggccctgaagcgggtatgcagaaagtccgtgcttggggccctgggctccatggtgggattgtcgggcggtcagcggacttcgtggtagaatccattggctctgaagtggggtctctggggtttgccattgaaggcccctctcaggcaaagattgagtacaacgaccagaatgatggatcgtgtgatgtcaaatactggcccaaggagcctggcgaatatgctgttcacatcatgtgtgacgacgaagacatcaaggacagcccgtacatggccttcatccacccagccacgggaggctacaaccctgatctggttcgagcatacgggccaggtttggagaaatctggatgcattgtcaacaacctggccgagttcactgtggatcctaaggatgctggaaaagctcccttaaagatatttgctcaggatggggaaggccaacgcattgacatccagatgaagaaccggatggacggcacatatgcatgctcatacaccccggtgaaggccatcaagcacaccattgctgtggtctggggaggcgtgaacatcccgcacagcccctacagggtcaacatcgggcaaggtagccatcctcagaaggtcaaagtgtttgggccaggtgtggagagaagtggtctgaaggcaaatgaacctacacacttcacggtggactgtactgaggctggggaaggtgatgtcagtgttggcattaagtgtgatgcccgggtgttaagtgaagatgaggaagacgtggattttgacattattcacaatgccaatgatacgttcacagtcaaatatgtgcctcctgctgctgggcgatacactatcaaagttctctttgcatctcaggaaatccccgccagccctttcagagtcaaagttgacccttcccacgatgccagcaaagtgaaggcagaaggcccagggctcagcaaagcaggtgtggaaaatgggaaaccgacccacttcactgtctacaccaagggggctgggaaagccccgctcaacgtgcagttcaacagccctcttcctggcgatgcagtgaaggatttggatatcatcgataattatgactactctcacacggttaaatatacacccacccaacagggcaacatgcaggttctggtgacttacggtggcgatcccatccctaaaagccctttcactgtgggtgttgctgcaccgctggatctgagcaagataaaactcaatgggctggaaaacagggtggaagttgggaaggatcaggagttcaccgttgataccaggggggcaggaggccaggggaagctggacgtgacaatcctcagcccctctcggaaggtcgtgccatgcctagtgacacctgtgacaggccgggagaacagcacggccaagttcatccctcgggaggaggggctgtatgctgtagacgtgacctacgatggacaccctgtgcccgggagcccctacacagtggaggcctcgctgccaccagatcccagcaaggtgaaggcccacggtcccggcctcgaaggtggtctcgtgggcaagcctgccgagttcaccatcgataccaaaggagctggtactggaggtctgggcttaacggtggaaggtccgtgcgaggccaaaatcgagtgctccgacaatggtgatgggacctgctccgtctcttaccttcccacaaaacccggggagtacttcgtcaacatcctctttgaagaagtccacatacctgggtctcccttcaaagctgacattgaaatgccctttgacccctctaaagtcgtggcatcggggccaggtctcgagcacgggaaggtgggtgaagctggcctccttagcgtcaactgctcggaagcgggaccgggggccctgggcctggaagctgtctcggactcgggaacaaaagccgaagtcagtattcagaacaacaaagatggcacctacgcggtgacctacgtgcccctgacggccggcatgtacacgttgaccatgaagtatggtggcgaactcgtgccacacttccccgcccgggtcaaggtggagcccgccgtggacaccagcaggatcaaagtctttggaccaggaatagaagggaaagatgtgttccgggaagctaccaccgactttacagttgactctcggccgctgacccaggttgggggtgaccacatcaaggcccacattgccaacccctcaggggcctccaccgagtgctttgtcacagacaatgcggatgggacctaccaggtggaatacacaccctttgagaaaggtctccatgtagtggaggtgacatatgatgacgtgcctatcccaaacagtcccttcaaggtggctgtcactgaaggctgccagccatctagggtgcaagcccaaggacctggattgaaagaggcctttaccaacaagcccaatgtcttcaccgtggttaccagaggcgcaggaattggtgggcttggcataactgttgagggaccatcagagtcgaagataaattgcagagacaacaaggatggcagctgcagtgctgagtacattcctttcgcgccgggggattacgatgttaatatcacatatggaggagcccacatccctggcagccccttcagggttcctgtgaaggatgttgtggaccccagcaaggtcaagattgccggccccgggctgggctcaggcgtccgagcccgtgtcctgcagtccttcacggtggacagcagcaaggctggcctggctccgctggaagtgagggttctgggcccacgaggcttggtggagccagtgaacatggtggacaatggagatggcacacacacagtaacctacaccccatctcaggagggaccttacatggtctcagttaaatatgctgatgaagagattcctcgcagtcccttcaaggtcaaggtccttcccacatatgatgccagcaaagtgactgccagtggccccggccttagttcctatggtgtgcctgccagtctacctgtggactttgcaattgatgcccgagatgccggggaaggcctgcttgctgttcaaataacggaccaagaaggaaaacccaaaagagccattgtccatgacaataaagatggcacgtatgctgtcacctacatccccgacaagactgggcgctatatgattggagtcacctacgggggtgacgacatcccactttctccttatcgcatccgagccacacagacgggtgatgccagcaagtgcctggccacgggtcctggaatcgcctccactgtgaaaactggcgaagaagtaggctttgtggttgatgccaagactgccgggaagggtaaagtgacctgcacggttctgaccccagatggcactgaggccgaggccgatgtcattgagaatgaagatggaacctatgacatcttctacacagctgccaagccgggcacatatgtgatctatgtgcgcttcggtggtgttgatattcctaacagccccttcactgtcatggccacagatggggaagtcacagccgtggaggaggcaccggtaaatgcatgtccccctggattcaggccctgggtgaccgaagaggcctatgtcccagtgagtgacatgaacggcctgggatttaagccttttgacctggtcattccgtttgctgtcaggaaaggagaaatcactggagaggtccacatgccttctgggaagacagccacacctgagattgtggacaacaaggacggcacggtcactgttagatatgcccccactgaggtcgggctccatgagatgcacatcaaatacatgggcagccacatccctgagagcccactccagttctacgtgaactaccccaacagtggaagtgtttctgcatacggtccaggcctcgtgtatggagtggccaacaaaactgccaccttcaccatcgtcacagaggatgcaggagaaggtggtctggacttggctattgagggcccctcaaaagcagaaatcagctgcattgacaataaagatgggacatgcacagtgacctacctgccgactctgccaggcgactacagcattctggtcaagtacaatgacaagcacatccctggcagccccttcacagccaagatcacagatgacagcaggcggtgctcccaggtgaagttgggctcagccgctgacttcctgctcgacatcagtgagactgacctcagcagcctgacggccagcattaaggccccatctggccgagacgagccctgtctcctgaagaggctgcccaacaaccacattggcatctccttcatcccccgggaagtgggcgaacatctggtcagcatcaagaaaaatggcaaccatgtggccaacagccccgtgtctatcatggtggtccagtcggagattggtgacgcccgccgagccaaagtctatggccgcggcctgtcagaaggccggactttcgagatgtctgacttcatcgtggacacaagggatgcaggttatggtggcatatccttggcggtggaaggccccagcaaagtggacatccagacggaggacctggaagatggcacctgcaaagtctcctacttccctaccgtgcctggggtttatatcgtctccaccaaattcgctgacgagcacgtgcctgggagcccatttaccgtgaagatcagtggggagggaagagtcaaagagagcatcacccgcaccagtcgggccccgtccgtggccactgtcgggagcatttgtgacctgaacctgaaaatcccagaaatcaacagcagtgatatgtcggcccacgtcaccagcccctctggccgtgtgactgaggcagagattgtgcccatggggaagaactcacactgcgtccggtttgtgccccaggagatgggcgtgcacacggtcagcgtcaagtaccgtgggcagcacgtcaccggcagccccttccagttcaccgtggggccacttggtgaaggaggcgcccacaaggtgcgggcaggaggccctggcctggagagaggagaagcgggagtcccagctgagttcagcatttggacccgggaagcaggcgctggaggcctctccatcgctgttgagggccccagtaaggccgagattacattcgatgaccataaaaatgggtcgtgcggtgtatcttatattgcccaagagcctggtaactacgaggtgtccatcaagttcaatgatgagcacatcccggaaagcccctacctggtgccggtcatcgcaccctccgacgacgcccgccgcctcactgttatgagccttcaggaatcgggattaaaagttaaccagccagcatcctttgctataaggttgaatggcgcaaaaggcaagattgatgcaaaggtgcacagcccctctggagccgtggaggagtgccacgtgtctgagctggagccagataagtatgctgttcgcttcatccctcatgagaatggtgtccacaccatcgatgtcaagttcaatgggagccacgtggttggaagccccttcaaagtgcgcgttggggagcctggacaagcggggaaccctgccctggtgtccgcctatggcacgggactcgaagggggcaccacaggtatccagtcggaattctttattaacaccacccgagcaggtccagggacattatccgtcaccatcgaaggcccatccaaggttaaaatggattgccaggaaacacctgaagggtacaaagtcatgtacacccccatggctcctggtaactacctgatcagtgtcaaatacggtgggcccaaccacatcgtgggcagtcccttcaaggccaaggtgacaggccagcgtctagttagccctggctcagccaacgagacctcatccatcctggtggagtcagtgaccaggtcgtctacagagacctgctatagcgccattcccaaggcatcctcggacgccagcaaggtgacctctaagggggcagggctctcaaaggcctttgtgggccagaagagttccttcctggtggactgcagcaaagctggctccaacatgctgctgatcggggtccatgggcccaccaccccctgcgaggaggtctccatgaagcatgtaggcaaccagcaatacaacgtcacatacgtcgtcaaggagaggggcgattatgtgctggctgtgaagtggggggaggaacacatccctggcagcccttttcatgtcacagtgccttaaaacagttttctcaaatcctggagagagttcttgtggttgcttttgttgcttgtttgtaattcattttatacaaagccctccagcctgtttgtggggctgaaaccccatccctaaaatattgctgttgtaaaatgccttcagaaataagtcctagactggactcttgagggacatattggagaatcttaagaaatgcaagcttgttcagggggctgagaagatcctgagtacactaggtgcaaaccagaactcttggtggaacagaccagccactgcagcagacagaccaggaacacaatgagactgacatttcaaaaaaacaaaactggctagcctgagctgctggttcactcttcagcatttatgaaacaaggctaggggaagatgggcagagaaaaaggggacacctagtttggttgtcatttggcaaaggagatgacttaaaatccgcttaatctcttccagtgtccgtgttaatgtatttggctattagatcactagcactgctttaccgctcctcatcgccaacacccccatgctctgtggccttcttacacttctcagagggcagagtggcagccgggcaccctacagaaactcagagggcagagtggcagccaggcccacatgtctctcaagtacctgtcccctcgctctggtgattatttcttgcagaatcaccacacgagaccatcccggcagtcatggttttgctttagttttccaagtccgtttcagtcccttccttggtctgaagaaattctgcagtggcgagcagtttcccacttgccaaagatcccttttaaccaacactagcccttgtttttaacacacgctccagcccttcatcagcctgggcagtcttaccaaaatgtttaaagtgatctcagaggggcccatggattaacgccctcatcccaaggtccgtcccatgacataacactccacacccgccccagccaacttcatgggtcactttttctggaaaataatgatctgtacagacaggacagaatgaaactcctgcggctctttggcctgaaagttgggaatggttgggggagagaagggcagcagcttattggtggtcttttcaccattggcagaaacagtgagagctgtgtggtgcagaaatccagaaatgaggtgtagggaattttgcctgccttcctgcagacctgagctggctttggaatgaggttaaagtgtcagggacgttgcctgagcccaaatgtgtagtgtggtctgggcaggcagacctttaggttttgctgcttagtcctgaggaagtggccactcttgtggcaggtgtagtatctggggcgagtgttgggggtaaaagcccaccctacagaaagtggaacagcccggacctgatgtgaaaggaccacgggtgttgtaagctgggaccggaaccaaactggaatcaaacgcgactgtaaattgtatcttataacttattaaataaaacattgctccgtaaaaaaaaaaa

SEQ ID NO: 729 - protein, 2000 aa, Homo sapien
MPVTEKDLAEDAPWKKIQQNTFTRWCNEHLKCVNKRIGNLQTDLSDGLRLIALLEVLSQKRMYRKYHQRPTFRQMQLENVSVALEFLDRESIKLVSIDSKAIVDGNLKLILGLVWTLILHYSISMPVWEDEGDDDAKKQTPKQRLLGWIQNKIPYLPITNFNQNWQDGKALGALVDSCAPGLCPDWESWDPQKPVDNAREAMQQADDWLGVPQVITPEEIIHPDVDEHSVMTYLSQFPKAKLKPGAPLKPKLNPKKARAYGRGIEPTGNMVKQPAKFTVDTISAGQGDVMVFVEDPEGNKEEAQVTPDSDKNKTYSVEYLPKVTGLHKVTVLFAGQHISKSPFEVSVDKAQGDASKVTAKGPGLEAVGNIANKPTYFDIYTAGAGVGDIGVEVEDPQGKNTVELLVEDKGNQVYRCVYKPMQPGPHVVKIFFAGDTIPKSPFVVQVGEACNPNACRASGRGLQPKGVRIRETTDFKVDTKAAGSGELGVTMKGPKGLEELVKQKDFLDGVYAFEYYPSTPGRYSIAITWGGHHIPKSPFEVQVGPEAGMQKVRAWGPGLHGGIVGRSADFVVESIGSEVGSLGFAIEGPSQAKIEYNDQNDGSCDVKYWPKEPGEYAVHIMCDDEDIKDSPYMAFIHPATGGYNPDLVRAYGPGLEKSGCIVNNLAEFTVDPKDAGKAPLKIFAQDGEGQRIDIQMKNRMDGTYACSYTPVKAIKHTIAVVWGGVNIPHSPYRVNIGQGSHPQKVKVFGPGVERSGLKANEPTHFTVDCTEAGEGDVSVGIKCDARVLSEDEEDVDFDIIHNANDTFTVKYVPPAAGRYTIKVLFASQEIPASPFRVKVDPSHDASKVKAEGPGLSKAGVENGKPTHFTVYTKGAGKAPLNVQFNSPLPGDAVKDLDIIDNYDYSHTVKYTPTQQGNMQVLVTYGGDPIPKSPFTVGVAAPLDLSKIKLNGLENRVEVGKDQEFTVDTRGAGGQGKLDVTILSPSRKVVPCLVTPVTGRENSTAKFIPREEGLYAVDVTYDGHPVPGSPYTVEASLPPDPSKVKAHGPGLEGGLVGKPAEFTIDTKGAGTGGLGLTVEGPCEAKIECSDNGDGTCSVSYLPTKPGEYFVNILFEEVHIPGSPFKADIEMPFDPSKVVASGPGLEHGKVGEAGLLSVNCSEAGPGALGLEAVSDSGTKAEVSIQNNKDGTYAVTYVPLTAGMYTLTMKYGGELVPHFPARVKVEPAVDTSRIKVFGPGIEGKDVFREATTDFTVDSRPLTQVGGDHIKAHIANPSGASTECFVTDNADGTYQVEYTPFEKGLHVVEVTYDDVPIPNSPFKVAVTEGCQPSRVQAQGPGLKEAFTNKPNVFTVVTRGAGIGGLGITVEGPSESKINCRDNKDGSCSAEYIPFAPGDYDVNITYGGAHIPGSPFRVPVKDVVDPSKVKIAGPGLGSGVRARVLQSFTVDSSKAGLAPLEVRVLGPRGLVEPVNMVDNGDGTHTVTYTPSQEGPYMVSVKYADEEIPRSPFKVKVLPTYDASKVTASGPGLSSYGVPASLPVDFAIDARDAGEGLLAVQITDQEGKPKRAIVHDNKDGTYAVTYIPDKTGRYMIGVTYGGDDIPLSPYRIRATQTGDASKCLATGPGIASTVKTGEEVGFVVDAKTAGKGKVTCTVLTPDGTEAEADVIENEDGTYDIFYTAAKPGTYVIYVRFGGVDIPNSPFTVMATDGEVTAVEEAPVNACPPGFRPWVTEEAYVPVSDMNGLGFKPFDLVIPFAVRKGEITGEVHMPSGKTATPEIVDNKDGTVTVRYAPTEVGLHEMHIKYMGSHIPESPLQFYVNYPNSGSVSAYGPGLVYGVANKTATFTIVTEDAGEGGLDLAIEGPSKAEISCIDNKDGTCTVTYLPTLPGDYSILVKYNDKHIPGSPFTAKITDDSRRCSQVKLGSAADFLLDISETDLSSLTASIKAPSGRDEPCLLKRLPNNHIGISFIPREVGEHLVSIKKNGNHVANSPVSIMVVQSEIG

SEQ ID NO: 730 - DNA, 9078 bp, Homo sapien
ctgaactagttgccagtgatcttgaaacgtgacagtaaccaagagataaataggtgacaatgacaggaaaattagatgtagtaaaagagagtgtttgagagcagaagctatggcaactaaagactggatttgaatccttcctagcttggtgacatgagcaaattacttgatttaagtgagcattttcccatctgtacagtggagataacgataattgtgcctgctaagaagaattgctgtgaagattagtgaaataatgcatgtaaaacatttggtacagtatgtgacacatagtacaaatagtttgctaggaagattgttattattcttcacttgtgatattgtgaagttttcatacagcaaattggacatcatgagatggattgattaaataaatagatttgaacttcaaggactggtagtgttcttgctttggaaagaagaaacttggtttatcctaataatagtaggataataatggtgaagtgataggtacaagtaatagtgtttatgatgcgctggtgatgataggaaaagaaagccattatatgggcaagagctagaagtaataaaatggtgcatttttcagtgatgtttggcctatgtagctattctctgataactataaaaatccttattattgaagattcttcaggaaaaaaaaacccttagtctgaaactttagcaccaatcccccttgccccccattgaaatacgtatttttaaaacatggcttttgataatgtgagggttttttcctttttgcgatttagcagtgctgattgtgtattgcagtagttgtgagagcattagaagcagcagtcgataggaggatggaaggtctggatgccgccttggggagttaggagattggcagacttaccctgtaccactctagccctactcctttgcccaagacagaaacacactgagatggataggagaatatgagcagttgataggaaagttctcagtggagtcaggatttaggttaggccaggagattgagaatataacagtttgtgtatgatgaaatggcatatttcacagaatgcagtaaaagcaggtagggtacaagtgcagcaacaggaagatgtcttttcttcattcagcaaacacttatttgagagcttaccatgtgctaggcacatacaaagataaataagatgcccttgatgatcctctatttaaaggagacatgtaaacaggttaacttagagtagagatggtgaatatgtgaacctgaggaaaggaagaaatagattaaattatctggagagagaggaaaagtcagcagaatggggacgagaatctttcggagctcagtgttctgataggagttatttccttgggcataggttccaagtatttttctaatataccatagaagccaggaaaactttcttctgttatctcaaatgatttaattactgacttgagtttgtgttgtctccttagacttgtgcaccatggacaattttgctgagggagatttcactgtggcggattatgccttgttagaagattgccctcacgtggatgattgtgtctttgctgctgaatttatgagcaatgattatgttcgtgtgactcagctttactgtgatggggtgggtgtgcaatataaagattatatccaaagtgagaggaatttggaatttgacatctgcagtatatggtgtagtaaaccaatttctgtcctgcaagattattgcgatgccattaaaataaacatcttctggccacttctgtttcaacatcaaaacagttccgtaatatcacgattgcatccctgtgtggacgccaacaattcacgtgcttctgagataaatttgaagaaactacaacatcttgagttgatggaagatattgtggatttggcaaagaaagttgctaatgattcattccttattggaggcttattgagaattggttgtaaaatagaaaataaaatcttggcaatggaagaagctctgaattggataaaatatgcaggcgatgtaacaattctaactaaattaggatcaattgacaattgttggcctatgttaagtattttctttactgaatacaagtaccacataactaaaattgtaatggaagactgcaatttgcttgaagaacttaaaactcaaagttgtatggattgtatagaggaaggagaactaatgaaaatgaaaggaaatgaagagttttccaaagaaagatttgatatagctattatctattacaccagagccattgaatatagacctgaaaactaccttctttatggtaaccgagctctttgttttcttcgtactggacagtttagaaatgcactcggtgatggaaagagagccactattctgaagaacacttggccaaagggtcattatcgttattgtgatgctctttctatgctgggggaatatgactgggccctgcaagcaaacataaaagctcaaaaactctgtaaaaatgaccctgagggaatcaaggatctaattcagcagcatgtaaagttacaaaaacaaatagaagacctacaaggtcgaacagcaaataaggatccaattaaagccttttatgaaaacagggcctacacacctaggagtttatcagcacctatatttactacttcacttaactttgtggagaaggaaagagatttcagaaaaattaatcacgaaatggccaacggtggtaatcagaatctaaaggtggcggatgaggcgttgaaggtagatgattgtgactgtcatcctgaattttcaccaccatcaagtcagcctccaaaacataaaggaaaacaaaaatctcgaaacaatgaatcagaaaagttcagttctagttcaccattgactttaccagcagatttgaagaacatcttggagaaacagttttctaaatcttccagagctgcacaccaggattttgctaatataatgaaaatgctgagaagcttaattcaagatggctatatggccttattggagcagcgttgccgcagcgctgcacaggcctttacagagttgctgaacggtttagatcctcaaaaaataaagcaattgaacctggccatgattaactatgttttggtcgtctatggacttgccatttctctccttggaataggacagcctgaggaattatctgaagccgaaaaccagtttaagaggattattgaacactaccccagtgagggccttgattgcttggcctactgtggaattggaaaagtgtatttgaaaaaaaacagatttctagaagctctcaatcactttgagaaagcaagaaccttgatttatcgtcttcctggagtgttaacttggcccacgagtaatgtgattattgaagagtctcagccacaaaaaataaagatgctgttagagaaatttgttgaagaatgcaagttccctccagtgccagatgccatttgttgctatcagaagtgccatggatattctaagatccagatatacataactgatccagactttaagggttttatacgcatcagctgttgccagtactgtaaaatagaatttcacatgaattgctggaagaagttaaaaactacaacctttaatgataaaattgacaaggattttctacaaggaatatgtcttacccctgactgtgaaggtgtcatttctaagattatcatcttcagcagtggtggtgaagttaaatgtgaatttgaacacaaggtcataaaagaaaaggttcctccaagacctattctgaaacagaaatgttctagcctagagaaactaagactgaaagaagacaaaaaattgaagagaaagatccaaaaaaaagaagcaaaaaagttagcacaagaaagaatggaggaggacttaagagaaagtaatccacccaaaaatgaagagcagaaagaaactgtagacaatgttcagcgttgtcagttccttgatgacagaattctacagtgtataaagcagtatgctgacaagattaaatccggcatacagaatacagccatgcttctcaaagaattgctttcttggaaagttttgagcacagaagactatacaacctgtttttctagcagaaattttctaaatgaagcagtggactatgttattcgccacttgattcaagaaaataacagagtaaagacaagaatatttctgcatgttttgagtgagcttaaagaagtggagcccaaattagccgcctggatccaaaaacttaatagctttggcttagatgccacaggaactttcttttctcgttatggagcatctcttaaactgcttgattttagtatcatgactttcctctggaatgagaaatatggtcacaaactagactctatagaaggaaagcaacttgattatttctctgagccagcatcattgaaggaagcccgttgtttaatatggctgctagaagaacacagagacaagttcccagcattgcatagtgctttagatgaattctttgatataatggacagccgctgtactgtgttaaggaaacaagatagtggtgaagcaccgtttagttcaaccaaggtgaaaaacaaaagcaagaaaaagaagccaaaggattcaaagcctatgttagttgggtctggaacaacttcagtaacttcaaataatgagatcatcacttcaagtgaagaccatagcaatcgaaattcagattctgcaggcccatttgcagtgcctgaccatcttcggcaagatgtagaagaattcgaagctctctatgaccaacacagtaacgaatatgttgtccgcaataagaagctatgggacatgaacccaaaacaaaaatgttcaactctatatgattacttctctcagtttttggaggaacatggtcccttggacatgagtaacaagatgttctctgcagaatatgagtttttcccagaagaaactcgacagatactagaaaaagcaggaggtttaaaaccttttctcttgggatgccctcgttttgttgtgattgacaactgtattgcactgaagaaggttgcatcacggctcaagaaaaaaaggaagaagaaaaacattaaaacaaaagtagaagaaatttcaaaagcaggggagtatgtacgagttaaactacaactgaatccagctgctagggaatttaaaccagatgtaaagtctaaaccagtgtcagattcatcttcagcaccagcttttgaaaatgtgaaacccaaacctgtgtctgcaaattctcccaagccagcttgtgaagatgtgaaggccaaaccagtatccgacaattcttctagacaagtttctgaggatgggcaacccaaaggggtctcttctaattctcctaaaccaggctctgaggatgcaaattacaagcgagtctcctgtaattcccccaaaccggttcttgaggatgtgaaaccaacttattgggctcaatcccatttggtcacaggatactgtacgtatcttcctttccagagatttgatatcacccagacaccgccagcatacataaacgtgttaccaggtttgccccagtacaccagcatatatacacccttggccagcctttctcctgaatatcagctaccaagatcagtaccagtggtgccgtcttttgtagccaatgacagagcagataaaaatgctgctgcctattttgagggtcatcatttgaatgctgagaatgttgctggtcaccagattgcctctgaaacacagatccttgagggctctttgggaatatctgtaaagtcacactgcagcacaggtgatgctcatacagtcctgagtgagtctaacagaaatgatgagcactgtggaaattctaacaacaaatgtgaagtaattccagaaagcaccagtgcagtaacaaacattccacacgtgcagatggttgccatacaggtatcttggaacataatacaccaagaagtcaatactgagccatataatccttttgaggaacgacaaggggaaatttcacggattgaaaaggagcaccaagtattacaagaccaacttcaagaagtgtatgaaaattatgagcagataaaacttaagggcttagaagagaccagggacctggaagagaagttgaaaaggcacttagaagaaaacaagatctcaaagacggaattagattggttccttcaagatttggaaagagaaattaaaaaatggcaacaggaaaaaaaagaaatccaagaaagactaaaatcactgaagaagaaaattaaaaaggtttcaaatgccagtgaaatgtatacccagaaaaatgatggaaaggaaaaggaacatgaattacatctggatcagtcccttgaaatcagcaacacacttacaaatgagaaaatgaaaatagaagagtatataaagaaagggaaagaggattatgaagagagtcatcagagagctgtggctgcagaggtatccgtacttgaaaactggaaggagagtgaagtgtataagctacagatcatggagtcacaagcagaagcctttctgaagaagctggggctgattagccgtgatcctgcagcatatcctgacatggagtctgatatacgttcatgggaattgtttctttctaatgttacaaaagaaattgagaaagcaaagtctcagtttgaagaacaaattaaggcaattaaaaatggttctcggctcagtgaactttctaaagtgcagatttctgagctttcatttcctgcctgtaacacggttcatcccgagttactccctgagtcttcaggccacgatggccaagggcttgtgacttctgcaagcgacgtgactggaaaccacgcagcacttcacagggatcctagtgtgttctctgctggtgattccccaggggaggctccttctgcgctgttgccagggccaccccctggtcagcctgaagccactcagctgacagggccaaaacgggctggccaggcagctctgtcagaacgaagccctgtggctgatcggaagcagcctgttcctccaggacgtgctgcgcgttcaagccagtctccaaaaaagccgttcaatagtattattgagcacctgtcagtggtattcccatgttacaacagcactgagcttgctggttttattaaaaaagtgcgaagcaaaaacaagaactcactctcaggattgagtattgatgaaattgtccaaagagtgacagaacacattctagatgaacagaaaaagaaaaagccaaacccaggaaaggacaagaggacttatgagcccagctctgccacccccgtgaccaggtcctcccagggctcaccctcggtggttgttgcaccatcacccaaaaccaaggggcagaaagcagaagatgtccctgtgaggattgcactgggtgcaagttcctgtgaaatatgccacgaggtgttcaaatcaaaaaacgtgcgtgtgctcaaatgtgggcacaagtatcacaaagggtgctttaagcagtggcttaaagggcagagcgcttgcccggcctgccagggtcgtgatctcctgacagaagagtcaccttctggaagaggctggcccagtcagaatcaggagctgccttcctgctcttctaggtagtcacacttcactaaagtgtcatccaccagtgtgttgaatccgaagaatgacaattttctaccactggtgtaaaaaacaaacatttgaagacccttgtgcattgtgtgtcacaaagctaaatacatggaaatcgttaatatcgctgatattaagtaatttccccactctgagtgaatactttgatgattgccaacagtggctaataaaatgacggctaccacactcatgggtcactggggctgcgcagggctctttgaggtgggtggcttcttttggaaagtactatgaacgtctcgaagcagtattctagtgataagaattcttaacatagccaagcgccccacgtttgttccccacgtttgttccccttttctgtttgaaaaacctgttctggtagctccacaagagagatgatactgactttttaaattttttacaagagtctgtattcctgatatgcctatatttttcctcaaagattctgcattttaaggatgggcataagcaaactatattttaataatttatagttaatgttaaaatattggctgatttagaccaaaagattcaaatctcctctttgtgaaatcccatctgcatttgattttttattattttatgttcccccgttagattgttttaagtgtttgcttttcatcttttatagatgtaatctgattttcaaaaatcattaacactttttaattagtatcgactaagactttttccccctggaatcgaggctgtgtgtccgtcatcccagcccccggttggagcctgctctttgaactccgctgccttccttagcagcttctgtcctcttctgtgagtcagtcagcgagtgcttgggatccgcatccagccgtgctgagcacacaacaggctgtgtgtggaaatggccaccaccattctccttccccaccccaccacaaaaagagaagctgtgtctttagacaaccctgaggtatctgtgttacaatcgttctgtgtttgatatttgtgtaaagtatgcatgcagtcttgtactgtgacctaagaacaaaactgtaactgcattagaaaccatgaaaaaattagatattgttttgtgacttttagacagtggtaaatatagaaccatgaattctggtcacattccatttctctccaacatgaaggatcaaaaaatgtttttcaatgtgttctttgttccactggaaacttagagtcatgagtttatgagctgatttggtcaccttcctctgcctttgttcactgtgagttctgatgtcttagtgacttagttcttagaagctcacgccttagtttgaaacagattctccacggtggtccccaaaacactgtctgcatatccataagaattgagcgctatgggtgttaacgtgcatgaggatcagtttgcagcagcaagtacaaaaggagaagaggaacatccgttgaatgagtgtgttttgtacataacttcagatacttgtgaacatgccttatatttgtccaacaactgtcagaataaagaacattctaaaatgag

SEQ ID NO: 731 - protein, 2000 aa, Homo sapien
MDNFAEGDFTVADYALLEDCPHVDDCVFAAEFMSNDYVRVTQLYCDGVGVQYKDYIQSERNLEFDICSIWCSKPISVLQDYCDAIKINIFWPLLFQHQNSSVISRLHPCVDANNSRASEINLKKLQHLELMEDIVDLAKKVANDSFLIGGLLRIGCKIENKILAMEEALNWIKYAGDVTILTKLGSIDNCWPMLSIFFTEYKYHITKIVMEDCNLLEELKTQSCMDCIEEGELMKMKGNEEFSKERFDIAIIYYTRAIEYRPENYLLYGNRALCFLRTGQFRNALGDGKRATILKNTWPKGHYRYCDALSMLGEYDWALQANIKAQKLCKNDPEGIKDLIQQHVKLQKQIEDLQGRTANKDPIKAFYENRAYTPRSLSAPIFTTSLNFVEKERDFRKINHEMANGGNQNLKVADEALKVDDCDCHPEFSPPSSQPPKHKGKQKSRNNESEKFSSSSPLTLPADLKNILEKQFSKSSRAAHQDFANIMKMLRSLIQDGYMALLEQRCRSAAQAFTELLNGLDPQKIKQLNLAMINYVLVVYGLAISLLGIGQPEELSEAENQFKRIIEHYPSEGLDCLAYCGIGKVYLKKNRFLEALNHFEKARTLIYRLPGVLTWPTSNVIIEESQPQKIKMLLEKFVEECKFPPVPDAICCYQKCHGYSKIQIYITDPDFKGFIRISCCQYCKIEFHMNCWKKLKTTTFNDKIDKDFLQGICLTPDCEGVISKIIIFSSGGEVKCEFEHKVIKEKVPPRPILKQKCSSLEKLRLKEDKKLKRKIQKKEAKKLAQERMEEDLRESNPPKNEEQKETVDNVQRCQFLDDRILQCIKQYADKIKSGIQNTAMLLKELLSWKVLSTEDYTTCFSSRNFLNEAVDYVIRHLIQENNRVKTRIFLHVLSELKEVEPKLAAWIQKLNSFGLDATGTFFSRYGASLKLLDFSIMTFLWNEKYGHKLDSIEGKQLDYFSEPASLKEARCLIWLLEEHRDKFPALHSALDEFFDIMDSRCTVLRKQDSGEAPFSSTKVKNKSKKKKPKDSKPMLVGSGTTSVTSNNEIITSSEDHSNRNSDSAGPFAVPDHLRQDVEEFEALYDQHSNEYVVRNKKLWDMNPKQKCSTLYDYFSQFLEEHGPLDMSNKMFSAEYEFFPEETRQILEKAGGLKPFLLGCPRFVVIDNCIALKKVASRLKKKRKKKNIKTKVEEISKAGEYVRVKLQLNPAAREFKPDVKSKPVSDSSSAPAFENVKPKPVSANSPKPACEDVKAKPVSDNSSRQVSEDGQPKGVSSNSPKPGSEDANYKRVSCNSPKPVLEDVKPTYWAQSHLVTGYCTYLPFQRFDITQTPPAYINVLPGLPQYTSIYTPLASLSPEYQLPRSVPVVPSFVANDRADKNAAAYFEGHHLNAENVAGHQIASETQILEGSLGISVKSHCSTGDAHTVLSESNRNDEHCGNSNNKCEVIPESTSAVTNIPHVQMVAIQVSWNIIHQEVNTEPYNPFEERQGEISRIEKEHQVLQDQLQEVYENYEQIKLKGLEETRDLEEKLKRHLEENKISKTELDWFLQDLEREIKKWQQEKKEIQERLKSLKKKIKKVSNASEMYTQKNDGKEKEHELHLDQSLEISNTLTNEKMKIEEYIKKGKEDYEESHQRAVAAEVSVLENWKESEVYKLQIMESQAEAFLKKLGLISRDPAAYPDMESDIRSWELFLSNVTKEIEKAKSQFEEQIKAIKNGSRLSELSKVQISELSFPACNTVHPELLPESSGHDGQGLVTSASDVTGNHAALHRDPSVFSAGDSPGEAPSALLPGPPPGQPEATQLTGPKRAGQAALSERSPVADRKQPVPPGRAARSSQSPKKPFNSIIEHLSVVFPCYNSTELAGFIKKVRSKNKNSLSGLSIDEIVQRVTEHILDEQKKKKPNPGKDKRTYEPSSATPVTRSSQGSPSVVVAPSPKTKGQKAEDVPVRIALGASSCEICHEVFKSKNVRVLKCGHKYHKGCFKQWLKGQSACPACQGRD

SEQ ID NO: 732 - DNA, 4306 bp, Homo sapien
cacacggactacaggggagttttgttgaagttgcaaagtcctggagcctccagagggctgtcggcgcagtagcagcgagcagcagagtccgcacgctccggcgaggggcagaagagcgcgagggagcgcggggcagcagaagcgagagccgagcgcggacccagccaggacccacagccctccccagctgcccaggaagagccccagccatggaacaccagctcctgtgctgcgaagtggaaaccatccgccgcgcgtaccccgatgccaacctcctcaacgaccgggtgctgcgggccatgctgaaggcggaggagacctgcgcgccctcggtgtcctacttcaaatgtgtgcagaaggaggtcctgccgtccatgcggaagatcgtcgccacctggatgctggaggtctgcgaggaacagaagtgcgaggaggaggtcttcccgctggccatgaactacctggaccgcttcctgtcgctggagcccgtgaaaaagagccgcctgcagctgctgggggccacttgcatgttcgtggcctctaagatgaaggagaccatccccctgacggccgagaagctgtgcatctacaccgacaactccatccggcccgaggagctgctgcaaatggagctgctcctggtgaacaagctcaagtggaacctggccgcaatgaccccgcacgatttcattgaacacttcctctccaaaatgccagaggcggaggagaacaaacagatcatccgcaaacacgcgcagaccttcgttgccctctgtgccacagatgtgaagttcatttccaatccgccctccatggtggcagcggggagcgtggtggccgcagtgcaaggcctgaacctgaggagccccaacaacttcctgtcctactaccgcctcacacgcttcctctccagagtgatcaagtgtgacccagactgcctccgggcctgccaggagcagatcgaagccctgctggagtcaagcctgcgccaggcccagcagaacatggaccccaaggccgccgaggaggaggaagaggaggaggaggaggtggacctggcttgcacacccaccgacgtgcgggacgtggacatctgagggcgccaggcaggcgggcgccaccgccacccgcagcgagggcggagccggccccaggtgctcccctgacagtccctcctctccggagcattttgataccagaagggaaagcttcattctccttgttgttggttgttttttcctttgctctttcccccttccatctctgacttaagcaaaagaaaaagattacccaaaaactgtctttaaaagagagagagagaaaaaaaaaatagtatttgcataaccctgagcggtgggggaggagggttgtgctacagatgatagaggattttataccccaataatcaactcgtttttatattaatgtacttgtttctctgttgtaagaataggcattaacacaaaggaggcgtctcgggagaggattaggttccatcctttacgtgtttaaaaaaaagcataaaaacattttaaaaacatagaaaaattcagcaaaccatttttaaagtagaagagggttttaggtagaaaaacatattcttgtgcttttcctgataaagcacagctgtagtggggttctaggcatctctgtactttgcttgctcatatgcatgtagtcactttataagtcattgtatgttattatattccgtaggtagatgtgtaacctcttcaccttattcatggctgaagtcacctcttggttacagtagcgtagcgtggccgtgtgcatgtcctttgcgcctgtgaccaccaccccaacaaaccatccagtgacaaaccatccagtggaggtttgtcgggcaccagccagcgtagcagggtcgggaaaggccacctgtcccactcctacgatacgctactataaagagaagacgaaatagtgacataatatattctatttttatactcttcctatttttgtagtgacctgtttatgagatgctggttttctacccaacggccctgcagccagctcacgtccaggttcaacccacagctacttggtttgtgttcttcttcatattctaaaaccattccatttccaagcactttcagtccaataggtgtaggaaatagcgctgtttttgttgtgtgtgcagggagggcagttttctaatggaatggtttgggaatatccatgtacttgtttgcaagcaggactttgaggcaagtgtgggccactgtggtggcagtggaggtggggtgtttgggaggctgcgtgccagtcaagaagaaaaaggtttgcattctcacattgccaggatgataagttcctttccttttctttaaagaagttgaagtttaggaatcctttggtgccaactggtgtttgaaagtagggacctcagaggtttacctagagaacaggtggtttttaagggttatcttagatgtttcacaccggaaggtttttaaacactaaaatatataatttatagttaaggctaaaaagtatatttattgcagaggatgttcataaggccagtatgatttataaatgcaatctccccttgatttaaacacacagatacacacacacacacacacacacacacaaaccttctgcctttgatgttacagatttaatacagtttatttttaaagatagatccttttataggtgagaaaaaaacaatctggaagaaaaaaaccacacaaagacattgattcagcctgtttggcgtttcccagagtcatctgattggacaggcatgggtgcaaggaaaattagggtactcaacctaagttcggttccgatgaattcttatcccctgccccttcctttaaaaaacttagtgacaaaatagacaatttgcacatcttggctatgtaattcttgtaatttttatttaggaagtgttgaagggaggtggcaagagtgtggaggctgacgtgtgagggaggacaggcgggaggaggtgtgaggaggaggctcccgaggggaaggggcggtgcccacaccggggacaggccgcagctccattttcttattgcgctgctaccgttgacttccaggcacggtttggaaatattcacatcgcttctgtgtatctctttcacattgtttgctgctattggaggatcagttttttgttttacaatgtcatatactgccatgtactagttttagttttctcttagaacattgtattacagatgccttttttgtagttttttttttttttatgtgatcaattttgacttaatgtgattactgctctattccaaaaaggttgctgtttcacaatacctcatgcttcacttagccatggtggacccagcgggcaggttctgcctgctttggcgggcagacacgcgggcgcgatcccacacaggctggcgggggccggccccgaggccgcgtgcgtgagaaccgcgccggtgtccccagagaccaggctgtgtccctcttctcttccctgcgcctgtgatgctgggcacttcatctgatcgggggcgtagcatcatagtagtttttacagctgtgttattctttgcgtgtagctatggaagttgcataattattattattattattataacaagtgtgtcttacgtgccaccacggcgttgtacctgtaggactctcattcgggatgattggaatagcttctggaatttgttcaagttttgggtatgtttaatctgttatgtactagtgttctgtttgttattgttttgttaattacaccataatgctaatttaaagagactccaaatctcaatgaagccagctcacagtgctgtgtgccccggtcacctagcaagctgccgaaccaaaagaatttgcaccccgctgcgggcccacgtggttggggccctgccctggcagggtcatcctgtgctcggaggccatctcgggcacaggcccaccccgccccacccctccagaacacggctcacgcttacctcaaccatcctggctgcggcgtctgtctgaaccacgcgggggccttgagggacgctttgtctgtcgtgatggggcaagggcacaagtcctggatgttgtgtgtatcgagaggccaaaggctggtggcaagtgcacggggcacagcggagtctgtcctgtgacgcgcaagtctgagggtctgggcggcgggcggctgggtctgtgcatttctggttgcaccgcggcgcttcccagcaccaacatgtaaccggcatgtttccagcagaagacaaaaagacaaacatgaaagtctagaaataaaactggtaaaaccccaaaaaaaaaaaaaaaa

SEQ ID NO: 733 - protein, 295 aa, Homo sapien
MEHQLLCCEVETIRRAYPDANLLNDRVLRAMLKAEETCAPSVSYFKCVQKEVLPSMRKIVATWMLEVCEEQKCEEEVFPLAMNYLDRFLSLEPVKKSRLQLLGATCMFVASKMKETIPLTAEKLCIYTDNSIRPEELLQMELLLVNKLKWNLAAMTPHDFIEHFLSKMPEAEENKQIIRKHAQTFVALCATDVKFISNPPSMVAAGSVVAAVQGLNLRSPNNFLSYYRLTRFLSRVIKCDPDCLRACQEQIEALLESSLRQAQQNMDPKAAEEEEEEEEEVDLACTPTDVRDVDI

SEQ ID NO: 734 - DNA, 1946 bp, Homo sapien
aattcgggggccgtggagtttgtgacatacgaggtgacacccctcgagtcacttcccttcaactccagctggagcgcctgcttggctttgggttcgttctgcagccttcgccccgctcctagcctcagggccggactccagcgcagagcccagcccagcgcagcctgccagcagccacccagccgcccagccgcccagccccgcacgaaacccggccagagcttcctagcagcccgagccatgaacaccgaaatgtatcagacccccatggaggtggcggtctaccagctgcacaatttctccatctccttcttctcttctctgcttggaggggatgtggtttccgttaagctggacaacagtgcctccggagccagcgtggtggccatagacaacaagatcgaacaggccatggatctggtgaagaatcatctgatgtatgctgtgagagaggaggtggagatcctgaaggagcagatccgagagctggtggagaagaactcccagctagagcgtgagaacaccctgttgaagaccctggcaagcccagagcagctggagaagttccagtcctgtctgagccctgaagagccagctcccgaatccccacaagtgcccgaggcccctggtggttctgcggtgtaagtggctctgtcctcagggtgggcagagccactaaacttgttttacctagttctttccagtttgtttttggctccccaagcatcatctcacgaggagaactttacacctagcacagctggtgccaagagatgtcctaaggacatggccacctgggtccactccagcgacagacccctgacaagagcaggtctctggaggctgagttgcatggggcctagtaacaccaagccagtgagcctctaatgctactgcgccctgggggctcccagggcctgggcaacttagctgcaactggcaaaggagaagggtagtttgaggtgtgacaccagtttgctccagaaagtttaaggggtctgtttctcatctccatggacatcttcaacagcttcacctgacaacgactgttcctatgaagaagccacttgtgttttaagcagaggcaacctctctcttctcctctgtttcgtgaaggcaggggacacagatgggagagattgagccaagtcagccttctgttggttaatatggtataatgcatggctttgtgcacagcccagtgtgggattacagctttgggatgaccgcttacaaagttctgtttggttagtattggcatagtttttctatatagccataaatgcgtatatatacccatagggctagatctgtatcttagtgtagcgatgtatacatatacacatccacctacatgttgaagggcctaaccagccttgggagtattgactggtcccttacctcttatggctaagtctttgactgtgttcatttaccaagttgacccagtttgtcttttaggttaagtaagaactcgagagtaaaggcaaggaggggggccagcctctgaatgcggccacggatgccttgctgctgcaaccctttccccagctgtccactgaaacgtgaagtcctgttttgaatgccaaacccaccattcactggtgctgactacatagaatgggttgagagaagatcagtttgggcttcacagtgtcatttgaaaaagcgtttttgttttgttttgaattattgtggaaaactttcaagtgaacagaaggatggtgtcctactgtggatgagggatgaacaaggggatggctttgatccaatggagcctgggaggtgtgcccagaaagcttgtctgtagcgggttttgtgagagtgaacactttccactttttgacaccttatcctgatgtatggttccaggatttggattttgattttccaaatgtagcttgaaatttcaataaactttgctctgtttttctaaaaaataaaaa

SEQ ID NO: 735 - protein, 134 aa, Homo sapien
MNTEMYQTPMEVAVYQLHNFSISFFSSLLGGDVVSVKLDNSASGASVVAIDNKIEQAMDLVKNHLMYAVREEVEILKEQIRELVEKNSQLERENTLLKTLASPEQLEKFQSCLSPEEPAPESPQVPEAPGGSAV

SEQ ID NO: 736 - DNA, 2091 bp, Homo sapien
gaattccacctgcttcagtttgtgctgacaatcatccagaccagctgcggggtcatctggccgtgcacattccctcttggttggttgtatttccagattggatacatgatttccctgattgctctcttcacaaacttctacattcagacctacaacaagaaaggggcctcccgaaggaaagaccacctgaaggaccaccagaatgggtccatggctgctgtgaatggacacaccaacagcttttcacccctggaaaacaatgtgaagccaaggaagctgcggaaggattgaagtcaaagaattgaaaccctccaaaccacgtcatctgattgtaagcacaatatgagttgtgccccaatgctcgttaacagctgctgtaactagtctggcctacaatagtgtgattcatgtaggacttctttcatcaattcaaaacccctagaaaacgtatacagattatataagtagggataagatttctaacatttctgggctctctgacccctgcgctagactgtggaaagggagtattattatagtatacaacactgctgttgccttattagttataacatgataggtgctgaattgtgattcacaatttaaaaacactgtaatccaaacttttttttttaactgtagatcatgcatgtgattgtaaatgtaaacttgtacaatgttgttatggtagagaaacacacatgccttaaaatttaaaaagcagggcccaaagcttattagtttaaattagggtatgtttcaagtttgtattaatttgtaatagctctgtttagaaaaaatcaaagaccatgatttatgaaactaatgtgacataatttccagtgacttgttgatgtgaaatcagacacggcaccttcagttttgtactattggctttgaatcaagcaggctcaaatctagtggaacagtcagtttaactttttaacagatcttatttttttattttgagtgccactattaatgtaaaaaggggggggctctacagcagtcgtgatgaaacttaaatatatattctttgtcctcgagattttaggaagggtgtagggtgagtaggccatttttaatttctgaagtgctaagtgtttttatacagcaaacaaaaagtcaattttgctttccaccagtgcgagagaggatgtatacttttcaagagagatgattgcctatttaccgtttgacagagtcccgtagatgagcaatggggaactggttgccagggtctaaatttggattgatttatgcactgttatctgttttgacacagatttccttgtaaaatgtgcctagtttaccaaaattaacaaagggggggaaaggaccttagaactttttaaggtaaaatcaaatatagctacagcataagagaatcgagaaatttgatagaggtaacttgtttaatgtaaatctaatagtacttgtaatttctttctgcttagaatctaaagatgtgtttagaacctcttgtttaaaaataatagactgcttatcataaaatcacatctcacacatttgaggcagtggtcaaacaggtaaagcctatgatgtgtgtcattttaaagtgtcggaatttagcctctgaataccttctccattgggggaaagatattcttggaaccactcatgacatatcttagaaggtcattgacaatgtataaactaattgttggtttgatatttatgtaaatatcagtttaccatgctttaattttgcacattcgtactatagggagcctattggttctctattagtcttgtgggttttctgtttgaaaaggagtcatggcatctgtttacatttaccttatcaaacctagaatgtgtatatttataaatgtatgtcttcattgctaggtactaatttgcagatgtctttacatatttcaatacagaaactataacattcaatagtgtgctgtcaaagtgtgcttagctcacctggatatacctacattgttaaatgtctaaacagtaatcattaaaacatttttgattaaaaaaaaaaaaaaaaaaaaaaaaaaaaaaaaaaaaaaaaaaaaaaaaaaaaaaaaaaaaaaaaaaaaaaaaaaaaaa

SEQ ID NO: 737 - protein, 61 aa, Homo sapien
MISLIALFTNFYIQTYNKKGASRRKDHLKDHQNGSMAAVNGHTNSFSPLENNVKPRKLRKD

SEQ ID NO: 738 - DNA, 1485 bp, Homo sapien
tcctggagctgtgaggagattcgggccgtcaccctgcctcccctgcgtcccgccaccggccgcttctgtcctcggacccattccaacaatctcgtaaaacatggtggattactatgaagttctaggcgtgcagagacatgcctcacccgaggatattaaaaaggcatatcggaaactggcactgaagtggcatccagataaaaatcctgagaataaagaagaagcagagagaaaattcaagcaagtagcggaggcatatgaagtgctgtcggatgctaagaaacgggacatctatgacaaatatggcaaagaaggattaaatggtggaggaggaggtggaagtcattttgacagtccatttgaatttggcttcacattccgtaacccagatgatgtcttcagggaattttttggtggaagggacccattttcatttgacttctttgaagacccttttgaggacttctttgggaatcgaaggggtccccgaggaagcagaagccgagggacggggtcgtttttctctgcgttcagtggatttccgtcttttggaagtggattttcttcttttgatacaggatttacttcatttgggtcactaggtcacgggggcctcacttcattctcttccacgtcatttggtggtagtggcatgggcaacttcaaatcgatatcaacttcaactaaaatggttaatggcagaaaaatcactacaaagagaattgtcgagaacggtcaagaaagagtagaagttgaagaagatggccagttaaagtccttaacaataaatggtaaggagcagctgctgcgcttggataacaagtaattcaacgcacgcacttaacagaaatgttaaactataacaagcaccatttgaggattaacaggaacatttttttgaagatttcaaacgaactcgactttcagtataattgtacctaaagtatttataaacagctcatcggagcctctatttgtcatagacttttgagttgattgttgggaccacataataggaccattttttttttgtctttaaaattgttgtaaatctctgtatgcactttgcttttttattaaacgtactccaaggtgagtcttgactctttagtgtaggacaagattgtacactaacaccagcatggacctgcttttcattgtgtctgaaatgtgagccacgtagtgtcggcctgctgtgaagttaacattgccaggacgattcttctacagaaataatttcaatttttttcagtatttagtagtgaaagatattaatacattaatggtaatacatttctggtttaatataaattaaggatgttttctagttgtgcatgaatgctggcaacttagtaagttttgacaattgtttaaatatgtaatgttaagcttaggtttaaaaaagtaaagctggtaaactgggtctttgtcatttgctttaaaaaaaaaaaaaaagaaaataaatgcgaatgtgttggtgcattc

SEQ ID NO: 739 - protein, 241 aa, Homo sapien
MVDYYEVLGVQRHASPEDIKKAYRKLALKWHPDKNPENKEEAERKFKQVAEAYEVLSDAKKRDIYDKYGKEGLNGGGGGGSHFDSPFEFGFTFRNPDDVFREFFGGRDPFSFDFFEDPFEDFFGNRRGPRGSRSRGTGSFFSAFSGFPSFGSGFSSFDTGFTSFGSLGHGGLTSFSSTSFGGSGMGNFKSISTSTKMVNGRKITTKRIVENGQERVEVEEDGQLKSLTINGKEQLLRLDNK

SEQ ID NO: 740 - DNA, 2503 bp, Homo sapien
ggcacgagggagaaaggagagaaaggaaagcgcgaggagccgccgccaccaccagcgcagcagtcctggagctgtgaggagattcgggccgtcaccctgcctcccctgcgtcccgccaccggccgcttctgtcctcggacccattccaacaatctcgtaaaacatggtggattactatgaagttctaggcgtgcagagacatgcctcacccgaggatattaaaaaggcatatcggaaactggcactgaagtggcatccagataaaaatcctgagaataaagaagaagcagagagaaaattcaagcaagtagcggaggcatatgaagtgctgtcggatgctaagaaacgggacatctatgacaaatatggcaaagaaggattaaatggtggaggaggaggtggaagtcattttgacagtccatttgaatttggcttcacattccgtaacccagatgatgtcttcagggaattttttggtggaagggacccattttcatttgacttctttgaagacccttttgaggacttctttgggaatcgaaggggtccccgaggaagcagaagccgagggacggggtcgtttttctctgcgttcagtggatttccgtcttttggaagtggattttcttcttttgatacaggatttacttcatttgggtcactaggtcacgggggcctcacttcattctcttccacgtcatttggtggtagtggcatgggcaacttcaaatcgatatcaacttcaactaaaatggttaatggcagaaaaatcactacaaagagaattgtcgagaacggtcaagaaagagtagaagttgaagaagatggccagttaaagtccttaacaataaatggtgtggccgacgacgatgccctcgctgaggagcgcatgcggagaggccagaacgccctgccagcccagcctgccggcctccgcccgccgaagccgccccggcctgcctcgctgctgagacacgcgcctcactgtctctctgaggaggagggcgagcaggaccgacctcgggcacccgggccctgggaccccctcgcgtccgcagcaggattgaaagaaggtggcaagaggaagaagcagaagcagagagaggagtcgaagaagaagaagtcgaccaaaggcaatcactagaccggacttgaggcacgcggtgcacccccagacgctggcgctccaccgtgctcggcatgcggtcgtgcacacgcgctaggtagcagcgtcggtcaggactgtctcgaggccacactcgctcggcaggattatgcgatcacggatcagtcagagcagggtcaggagacggggctgacggcacgggtggcggggacagacgtttgggacttggccgcgactctctgcttctctccagctctcaatctgctgcattttcctctagtgcttccggatcctcttcattcttttcggctactcaaccactccgcatgctgctggaatatttctggctttagaagtacaggagggcgcagatggctaactgagtaacattcatgaaatgaggctttctgtggcggcgtagtgtttggaattagaaggtaattcagtagagtgtaacttagagaatattgcaagtgacacattgaatcctgcccgtcagggcaccttttcctcagagcaatccggccacacgaatagaaggctgtcgtgaatcacatcagatgtaaaatcattccttctgtttactcttttaattttcatcctttgcaggtagtgcaaattcaacttcaaatatggtgtaggttttgctagattccatatttttttcttggatttttgctaattatttttagcaaaaaatttttgctcagtggcaccctccctagtgtccatgggttagggccatgctggggaaaacgggccggtatttacacacgcgcaaaacacccagagacggcacaaggaggttgaactcatgtttcagttcgcgaacattgactccttacgaaagtcacttcattctaactagatgcgcccacttccggtcattatttcgtttgcatgatgtattgcttcttcacgttttgtttttattgagcacggagtagaattccagggctgccttgacttcttccctgcatgctccctcccagtgactttccttccctttcacatgaggatctgccgttcatgttgctttctcctttgtcctcttggacttgagggcattgtgaaaagctttgctgtgatttaaaaatgccagcaattttaatctagcagtgttgaagctgggaattttttggcgcaatccatgtagcagtgacccaggcttgggagccagaaacaagtgtgacctgggattttatttaacacaactgttgccaaagagttggctttgtttatttggttttggcggggagaggagtggtatttgatgctttctgtggacaatgtaaccctaaacacatcatgtattttaaatgccacctacataaataaaacataagcatattgaatacaaaaaaaaaaaaaaaaaaa

SEQ ID NO: 741 - protein, 326 aa, Homo sapien
MVDYYEVLGVQRHASPEDIKKAYRKLALKWHPDKNPENKEEAERKFKQVAEAYEVLSDAKKRDIYDKYGKEGLNGGGGGGSHFDSPFEFGFTFRNPDDVFREFFGGRDPFSFDFFEDPFEDFFGNRRGPRGSRSRGTGSFFSAFSGFPSFGSGFSSFDTGFTSFGSLGHGGLTSFSSTSFGGSGMGNFKSISTSTKMVNGRKITTKRIVENGQERVEVEEDGQLKSLTINGVADDDALAEERMRRGQNALPAQPAGLRPPKPPRPASLLRHAPHCLSEEEGEQDRPRAPGPWDPLASAAGLKEGGKRKKQKQREESKKKKSTKGNH

SEQ ID NO: 742 - DNA, 2839 bp, Homo sapien
gcacgagctgcggctccgctctcgtcgcaacgagatctttcgagatcttctccgcccccgctaccggcgcctcctctgcggccactgagccggagccggcctgagcagcgctctcggttgcagtacccactggaaggacttaggcgctcgcgtggacaccgcaagcccctcagtagcctcggcccaagaggcctgctttccactcgctagccccgccggggtccgtgtcctgtctcggtggccggacccgggcccgagcccgagcagtagccggcgccatgtcggtggtgggcatagacctgggcttccagagctgctacgtcgctgtggcccgcgccggcggcatcgagactatcgctaatgagtatagcgaccgctgcacgccggcttgcatttcttttggtcctaagaatcgttcaattggagcagcagctaaaagccaggtaatttctaatgcaaagaacacagtccaaggatttaaaagattccatggccgagcattctctgatccatttgtggaggcagaaaaatctaaccttgcatatgatattgtgcagttgcctacaggattaacaggtataaaggtgacatatatggaggaagagcgaaattttaccactgagcaagtgactgccatgcttttgtccaaactgaaggagacagccgaaagtgttcttaagaagcctgtagttgactgtgttgtttcggttccttgtttctatactgatgcagaaagacgatcagtgatggatgcaacacagattgctggtcttaattgcttgcgattaatgaatgaaaccactgcagttgctcttgcatatggaatctataagcaggatcttcctgccttagaagagaaaccaagaaatgtagtttttgtagacatgggccactctgcttatcaagtttctgtatgtgcatttaatagaggaaaactgaaagttctggccactgcatttgacacgacattgggaggtagaaaatttgatgaagtgttagtaaatcacttctgtgaagaatttgggaagaaatacaagctagacattaagtccaaaatccgtgcattattacgactctctcaggagtgtgagaaactcaagaaattgatgagtgcaaatgcttcagatctccctttgagcattgaatgttttatgaatgatgttgatgtatctggaactatgaatagaggcaaatttctggagatgtgcaatgatctcttagctagagtggagccaccacttcgtagtgttttggaacaaaccaagttaaagaaagaagatatttatgcagtggagatagttggtggtgctacacgaatccctgcggtaaaagagaagatcagcaaatttttcggtaaagaacttagtacaacattaaatgctgatgaagctgtcactcgaggctgtgcattgcagtgtgccatcttatcgcctgctttcaaagtcagagaattttctatcactgatgtagtaccatatccaatatctctgagatggaattctccagctgaagaagggtcaagtgactgtgaagtcttttccaaaaatcatgctgctcctttctctaaagttcttacattttatagaaaggaacctttcactcttgaggcctactacagctctcctcaggatttgccctatccagatcctgctatagctcagttttcagttcagaaagtcactcctcagtctgatggctccagttcaaaagtgaaagtcaaagttcgagtaaatgtccatggcattttcagtgtgtccagtgcatctttagtggaggttcacaagtctgaggaaaatgaggagccaatggaaacagatcagaatgcaaaggaggaagagaagatgcaagtggaccaggaggaaccacatgttgaagagcaacagcagcagacaccagcagaaaataaggcagagtctgaagaaatggagacctctcaagctggatccaaggataaaaagatggaccaaccaccccaagccaagaaggcaaaagtgaagaccagtactgtggacctgccaatcgagaatcagctattatggcagatagacagagagatgctcaacttgtacattgaaaatgagggtaagatgatcatgcaggataaactggagaaggagcggaatgatgctaagaacgcagtgagggaatatgtgtatgaaatgagagacaagcttagtggtgaatatgagaagtttgtgagtgaagatggtcgtaacagttttactttgaaactggaagatactgaaaattggttgtatgaggatggagaagaccagccaaagcaagtttatgttgataagttggctgaattaaaaaatctaggtcaacctattaagatacgtttccaggaatctgaagaacgaccaaaattatttgaagaactagggaaacagatccaacagtatatgaaaataatcagctctttcaaaaacaaggaggaccagtatgatcatttggatgctgctgacatgacaaaggtagaaaaaagcacaaatgaagcaatggagtggatgaataacaagctaaatctgcagaacaagcagagtttgaccatggatccagttgtcaagtcaaaagagattgaagctaaaattaaggagctgacaagtacttgtagccctataatttcaaagcccaaacccaaagtggaacctccaaaagaggaacaaaaaaatgcagagcagaatggaccagtggatggacaaggagacaacccaggcccccaggctgctgagcagggtacagacacagctgtgccttcggattcagacaagaagcttcctgaaatggacattgattgattccaacacttgtttctattaaaacagactattataaa

SEQ ID NO: 743 - protein, 840 aa, Homo sapien
MSVVGIDLGFQSCYVAVARAGGIETIANEYSDRCTPACISFGPKNRSIGAAAKSQVISNAKNTVQGFKRFHGRAFSDPFVEAEKSNLAYDIVQLPTGLTGIKVTYMEEERNFTTEQVTAMLLSKLKETAESVLKKPVVDCVVSVPCFYTDAERRSVMDATQIAGLNCLRLMNETTAVALAYGIYKQDLPALEEKPRNVVFVDMGHSAYQVSVCAFNRGKLKVLATAFDTTLGGRKFDEVLVNHFCEEFGKKYKLDIKSKIRALLRLSQECEKLKKLMSANASDLPLSIECFMNDVDVSGTMNRGKFLEMCNDLLARVEPPLRSVLEQTKLKKEDIYAVEIVGGATRIPAVKEKISKFFGKELSTTLNADEAVTRGCALQCAILSPAFKVREFSITDVVPYPISLRWNSPAEEGSSDCEVFSKNHAAPFSKVLTFYRKEPFTLEAYYSSPQDLPYPDPAIAQFSVQKVTPQSDGSSSKVKVKVRVNVHGIFSVSSASLVEVHKSEENEEPMETDQNAKEEEKMQVDQEEPHVEEQQQQTPAENKAESEEMETSQAGSKDKKMDQPPQAKKAKVKTSTVDLPIENQLLWQIDREMLNLYIENEGKMIMQDKLEKERNDAKNAVREYVYEMRDKLSGEYEKFVSEDGRNSFTLKLEDTENWLYEDGEDQPKQVYVDKLAELKNLGQPIKIRFQESEERPKLFEELGKQIQQYMKIISSFKNKEDQYDHLDAADMTKVEKSTNEAMEWMNNKLNLQNKQSLTMDPVVKSKEIEAKIKELTSTCSPIISKPKPKVEPPKEEQKNAEQNGPVDGQGDNPGPQAAEQGTDTAVPSDSDKKLPEMDID

SEQ ID NO: 744 - DNA, 4117 bp, Homo sapien
tccgcctctctctttactgcggcgcggggcaaggtgtgcgggcgggaaggggcacgggcacccccgcggtccccgggaggctagagatcatggaagggaagtggttgctgtgtatgttactggtgcttggaactgctattgttgaggctcatgatggacatgatgatgatgtgattgatattgaggatgaccttgacgatgtcattgaagaggtagaagactcaaaaccagataccactgctcctccttcatctcccaaggttacttacaaagctccagttccaacaggggaagtatattttgctgattcttttgacagaggaactctgtcagggtggattttatccaaagccaagaaagacgataccgatgatgaaattgccaaatatgatggaaagtgggaggtagaggaaatgaaggagtcaaagcttccaggtgataaaggacttgtgttgatgtctcgggccaagcatcatgcgatctctgctaaactgaacaagcccttcctgtttgacaccaagcctctcattgttcagtatgaggttaatttccaaaatggaatagaatgtggtggtgcctatgtgaaactgctttctaaaacaccagaactcaacctggatcagttccatgacaagaccccttatacgattatgtttggtccagataaatgtggagaggactataaactgcacttcatcttccgacacaaaaaccccaaaacgggtatctatgaagaaaaacatgctaagaggccagatgcagatctgaagacctattttactgataagaaaacacatctttacacactaatcttgaatccagataatagttttgaaatactggttgaccaatctgtggtgaatagtggaaatctgctcaatgacatgactcctcctgtaaatccttcacgtgaaattgaggacccagaagaccggaagcccgaggattgggatgaaagaccaaaaatcccagatccagaagctgtcaagccagatgactgggatgaagatgcccctgctaagattccagatgaagaggccacaaaacccgaaggctggttagatgatgagcctgagtacgtacctgatccagacgcagagaaacctgaggattgggatgaagacatggatggagaatgggaggctcctcagattgccaaccctagatgtgagtcagctcctggatgtggtgtctggcagcgacctgtgattgacaaccccaattataaaggcaaatggaagcctcctatgattgacaatcccagttaccagggaatctggaaacccaggaaaataccaaatccagatttctttgaagatctggaacctttcagaatgactccttttagtgctattggtttggagctgtggtccatgacctctgacattttttttgacaactttatcatttgtgctgatcgaagaatagttgatgattgggccaatgatggatggggcctgaagaaagctgctgatggggctgctgagccaggcgttgtggggcagatgatcgaggcagctgaagagcgcccgtggctgtgggtagtctatattctaactgtagcccttcctgtgttcctggttatcctcttctgctgttctggaaagaaacagaccagtggtatggagtataagaaaactgatgcacctcaaccggatgtgaaggaagaggaagaagagaaggaagaggaaaaggacaagggagatgaggaggaggaaggagaagagaaacttgaagagaaacagaaaagtgatgctgaagaagatggtggcactgtcagtcaagaggaggaagacagaaaacctaaagcagaggaggatgaaattttgaacagatcaccaagaaacagaaagccacgaagagagtgaaacaatcttaagagcttgatctgtgatttcttctccctcctcccctgcaagagtggtcctaggagaggacctggcacaccttaggttgacattcagaaaacttcaagacatcaccatcagcaggctccagttgaacactagtctgtgtaactttaaacatctagcagtaaatacttgcagttgtgatataaaggaccctgtttctgtagaaaagaaaacatttaacataatggttgtgaaatgtaacatgaagcaaactaacttttttttttttaacatctttgtttttaaaatagaatgatagaactttgccagtctttaagatcttggcttaatttaatgtattaatctgtttgtgcaaacataataccaccatttaaaaatgttagggagatgagttgcagtttttataatagattttttttaaagtttggtattgtaaaacattcacacctctgtccctcaaaattgataattacgtttaaagtgcagtcatttgtggttagaatcttgttttgtttgcttccattattgagttcctcctaaggaaattgaggagagggactgaatagaagcccaaattcatataaaagttgcgtttaagttgtattaaaaatagatatataagaaaaaattctttcacttgatgtttgttagaccagaaagtgtgtgtgttctgtagctcagttcccagacagctttttaggtagtggaggaggtggcttcatgtggcacttgggcatttatattccacttgggagggtcaggcctgtggcttctggagcaggtggcttgttaaggaacgctagcagggcatggcacgtgagctccggaatagatgtcttcatcacttcttccactgtgtgttgacactgttttccttacctatttcctcagatccccagctttctcctcgctatgcattttcttcacagtgcagcttgcagtccgttgctgaaaatgattataagccctgcataatgttaagctttattgtgattacgtgtatgtttcttctttcttttaagcagacccatacctttccagggtcaaagtacagaatagaatacattgatacaaagtacagaaaaatactttgatttttatccatttcttttactctgtgtaaagactttagaagtctaattcacaggcaaaccaatacagaattgactgcagttgaacagactagaagtatttgtgggaggagtgacatgaagcatgagttatctgattttttttgtagctgctatatattttaagccttcatttgcaattcatgtaacagttgtgtcataaattacacaataaagcagtcctgttcaaatttttttttaacgtggcttgtagaatttttaaaaaagtgatcttaggtttgttttttcatgcgggatgcagatgggtgctatcagagcctctcccacaccactatagtgtaataatgttattattactctacactgaaacgtattcagagttagatattattttagcttcagttgttctttagaggctttcaaatgtaccgatgatactgtttcttgcactgaatatataaacactccacagtgtttatattgggaagatattgggaaggaaatatatttgtaaaagatgaaggctgtatctatttttttttctttttaaactggttcacttaaattcttttgaggatgggatgtatttttcttgctgttcagtgctttttccttttcatctgttgttctgtggtcacagtgaccttagctacatagcagactttcccaaatgtattgattacaaataaacagttgttacttagcaagacctgaaaatatgtctgcaggtttctccttgaagcaaatgtgtgggatcattgcatttccagaaatctgcctccttcacccaccgttgacagtatatgtcatgcctcactttcttgtagctgagctttaaatcattagagcttaaattgtcagatcgttcattgcctttccagggttatttagtaaagtttgttgaaaacaaaaacgccttttcttggttcttttttcagttattttgaaggtccagcatcctgattaaatgtctgacacttaatgaatgaccagcagcagctttcagctcttaaaaagacacttatattttgattttacatgctggttacctgttccattgttgtcaaatgcccagtgtccatcagatgtgttcctccattttcttatccacaaagtactcctcacttttcaatttgtcatgttactaaaccc

SEQ ID NO: 745 - protein, 592 aa, Homo sapien
MEGKWLLCMLLVLGTAIVEAHDGHDDDVIDIEDDLDDVIEEVEDSKPDTTAPPSSPKVTYKAPVPTGEVYFADSFDRGTLSGWILSKAKKDDTDDEIAKYDGKWEVEEMKESKLPGDKGLVLMSRAKHHAISAKLNKPFLFDTKPLIVQYEVNFQNGIECGGAYVKLLSKTPELNLDQFHDKTPYTIMFGPDKCGEDYKLHFIFRHKNPKTGIYEEKHAKRPDADLKTYFTDKKTHLYTLILNPDNSFEILVDQSVVNSGNLLNDMTPPVNPSREIEDPEDRKPEDWDERPKIPDPEAVKPDDWDEDAPAKIPDEEATKPEGWLDDEPEYVPDPDAEKPEDWDEDMDGEWEAPQIANPRCESAPGCGVWQRPVIDNPNYKGKWKPPMIDNPSYQGIWKPRKIPNPDFFEDLEPFRMTPFSAIGLELWSMTSDIFFDNFIICADRRIVDDWANDGWGLKKAADGAAEPGVVGQMIEAAEERPWLWVVYILTVALPVFLVILFCCSGKKQTSGMEYKKTDAPQPDVKEEEEEKEEEKDKGDEEEEGEEKLEEKQKSDAEEDGGTVSQEEEDRKPKAEEDEILNRSPRNRKPRRE

SEQ ID NO: 746 - DNA, 1020 bp, Homo sapien
ggggagagagtggggacgtccggcttcggagcgggagtgttcgttgtgccagcgactaaaaagagaattaaatatgggtgatgttgagaaaggcaagaagatttttattatgaagtgttcccagtaccacaccgttgaaaagggaggcaagcacaagactgggccaaatctccatggtctctttgggcggaagacaggtcaggcccctggatactcttacacagccgccaataagaacaaaggcatcatctggggagaggatacactgatggagtatttggagaatcccaagaagtacatccctggaacaaaaatgatctttgtcggcattaagaagaaggaagaaagggcagacttaatagcttatctcaaaaaagctactaatgagtaataattggccactgccttatttattacaaaacagaaatgtctcatgacttttttatgtgtaccatcctttaatagatctcatacaccagaattcagatcatgaatgactgacagaatattttgttgggcagtcctgatttaaaactaagactggcttgtggttaaatgaatatgttcagtttttgaattttaatagtaactccaattcagtaaatggtatcactgtttaccccttttaaagatatgattagacttcgttagtaatgttcaacttttcacaaagatggtgagtgccatcttaaaacttactggagattggttttatatttagatttatataactggttatgtgaatatatttaaatactggggaaattgcttcactgtcttagaaccaagcaagattcacctgtgttttgtgttcatgttcatttgcctcttaaaggcaagggttgaagataaataaggtagcaatgtctatagttttggccttaactatgccaatctaattataattccctgtatttaaaatggtttcttttacttattgaaaggcattttagtgtggtttatgtgtaatattaaagattattcaacaccccaaaaaaaaaaaaaaaaaaaaaaaaaaaa

SEQ ID NO: 747 - protein, 105 aa, Homo sapien
MGDVEKGKKIFIMKCSQYHTVEKGGKHKTGPNLHGLFGRKTGQAPGYSYTAANKNKGIIWGEDTLMEYLENPKKYIPGTKMIFVGIKKKEERADLIAYLKKATNE

SEQ ID NO: 748 - DNA, 1332 bp, Homo sapien
ccggcggcgcctcaggtcgcggggcgcctaggcctgggttgtcctttgcatctgcacgtgttcgcagtcgtttccgcgatgctgcctctgctgcgctgcgtgccccgtgtgctgggctcctccgtcgccggcctccgcgctgccgcgcccgcctcgcctttccggcagctcctgcagccggcaccccggctgtgcacccggcccttcgggctgctcagcgtgcgcgcaggttccgagcggcggccgggcctcctgcggcctcgcggaccctgcgcctgtggctgtggctgcggctcgctgcacaccgacggagacaaagcttttgttgatttcctgagtgatgaaattaaggaggaaagaaaaattcagaagcataaaaccctccctaagatgtctggaggttgggagctggaactgaatgggacagaagcgaaattagtgcggaaagttgccggggaaaaaatcacggtcactttcaacattaacaacagcatcccaccaacatttgatggtgaggaggaaccctcgcaagggcagaaggttgaagaacaggagcctgaactgacatcaactcccaatttcgtggttgaagttataaagaatgatgatggcaagaaggcccttgtgttggactgtcattatccagaggatgaggttggacaagaagacgaggctgagagtgacatcttctctatcagggaagttagctttcagtccactggcgagtctgaatggaaggatactaattatacactcaacacagattccttggactgggccttatatgaccacctaatggatttccttgccgaccgaggggtggacaacacttttgcagatgagctggtggagctcagcacagccctggagcaccaggagtacattacttttcttgaagacctcaagagttttgtcaagagccagtagagcagacagatgctgaaagccatagtttcatggcaggctttggccagtgaacaaatcctactctgaagctagacatgtgctttgaaatgattatcatcctaatatcatgggggaaaaaataccaaatttaaattatatgttttgtgttctcatttattatcatttttttctgtacaaatctattatttctagatttttgtataacatgatagacataaaattggtttatctcctccgctgagtcttcctagaagtacctgctgggttctcagttccagttcccatcctttgattgatcactctccctgacatccacctgtatgactttgtcaccaaatgctgtcttctctttctccaatcaagaaataataatccctcgagtttacaaaacaaaaaaaaaaaaaa

SEQ ID NO: 749 - protein, 282 aa, Homo sapien
MLPLLRCVPRVLGSSVAGLRAAAPASPFRQLLQPAPRLCTRPFGLLSVRAGSERRPGLLRPRGPCACGCGCGSLHTDGDKAFVDFLSDEIKEERKIQKHKTLPKMSGGWELELNGTEAKLVRKVAGEKITVTFNINNSIPPTFDGEEEPSQGQKVEEQEPELTSTPNFVVEVIKNDDGKKALVLDCHYPEDEVGQEDEAESDIFSIREVSFQSTGESEWKDTNYTLNTDSLDWALYDHLMDFLADRGVDNTFADELVELSTALEHQEYITFLEDLKSFVKSQ

SEQ ID NO: 750 - DNA, 2593 bp, Homo sapien
tggacttggatccgaggcagacgaggaagctgagaaaaccctggcgttgaccccgtggacctgggcgccccgggaaggtccagcgcttggtccaggcaggcggggatgtgcggtgaccaccctggtcctgaaaagtccagccccgaatctccctccctcctagacctggaggcctggaacagccagccgcccacggacgccagagccgggaaccctgacggcacttagctgctgacaaacaacctgctccgtggacgcctgaaacaccagtctttggggccagtgcctcagtttcaatccaggtaacctttaaatgaaacttgcctaaaatcttaggtcatacacagaagagactccaatcgacaagaagctggaaaagaatgatgttgtccttaaacaacctacagaatatcatctataacccggtaatcccgtatgttggcaccattcccgatcagctggatcctggaactttgattgtgatatgtgggcatgttcctagtgacgcagacagattccaggtggatctgcagaatggcagcagtgtgaaacctcgagccgatgtggcctttcatttcaatcctcgtttcaaaagggccggctgcattgtttgcaatactttgataaatgaaaaatggggacgggaagagatcacctatgacacgcctttcaaaagagaaaagtcttttgagatcgtgattatggtgctaaaggacaaattccaggtggctgtaaatggaaaacatactctgctctatggccacaggatcggcccagagaaaatagacactctgggcatttatggcaaagtgaatattcactcaattggttttagcttcagctcggacttacaaagtacccaagcatctagtctggaactgacagagataagtagagaaaatgttccaaagtctggcacgccccagcttcagactgtctctccctcctgggatttacagggtcatggctctgaaacattctgtagtgttctttggacacgagttttcctggagatcgctttctgcaggcctattggtctgactgtggcttcttttcagagcctgccattcgctgcaaggttgaacacccccatgggccctggacgaactgtcgtcgttaaaggagaagtgaatgcaaatgccaaaagctttaatgttgacctactagcaggaaaatcaaaggatattgctctacacttgaacccacgcctgaatattaaagcatttgtaagaaattcttttcttcaggagtcctggggagaagaagagagaaatattacctctttcccatttagtcctgggatgtactttgagatgataatttactgtgatgttagagaattcaaggttgcagtaaatggcgtacacagcctggagtacaaacacagatttaaagagctcagcagtattgacacgctggaaattaatggagacatccacttactggaagtaaggagctggtagcctacctacacagctgctacaaaaaccaaaatacagaatggcttctgtgatactggccttgctgaaacgcatctcactgtcattctattgtttatattgttaaaatgagcttgtgcaccattagatcctgctgggtgttctcagtccttgccatgaagtatggtggtgtctagcactgaatggggaaactgggggcagcaacacttatagccagttaaagccactctgccctctctcctactttggctgactcttcaagaatgccattcaacaagtatttatggagtacctactataatacagtagctaacatgtattgagcacagattttttttggtaaaactgtgaggagctaggatatatacttggtgaaacaaaccagtatgttccctgttctcttgagcttcgactcttctgtgctctattgctgcgcactgctttttctacaggcattacatcaactcctaaggggtcctctgggattagttaagcagctattaaatcacccgaagacactaatttacagaagacacaactccttccccagtgatcactgtcataaccagtgctctaccgtatcccatcactgaggactgatgttgactgacatcattttatcgtaataaacatgtggctctattagctgcaagctttaccaagtaattggcatgacatctgagcacagaaattaaggcaaaaaaccaaagcaaaacaaatacatggtgctgaaattaacttgatgccaagcccaaggcagctgatttctgtgtatttgaacttagggcaaatcagagtctacacagacgcctacagaaagtttcaggaagaggcaagatgcattcaatttgaaagatatttatgggcaacaaagtaaggtcaggattagacttcaggcattcataaggcaggcactatcagaaagtgtacgccaactaagggacccacaaagcaggcagaggtaatgcagaaatctgttttgttcccatgaaatcaccaatcaaggcctccgttcttctaaagattagtccatcatcattagcaactgagatcaaagcactcttccactttacgtgattaaaatcaaacctgtatcagcaaaaaaaaaaaaaaaaaaaaaaaaaaaaaaaaaa

SEQ ID NO: 751 - protein, 359 aa, Homo sapien
MLSLNNLQNIIYNPVIPYVGTIPDQLDPGTLIVICGHVPSDADRFQVDLQNGSSVKPRADVAFHFNPRFKRAGCIVCNTLINEKWGREEITYDTPFKREKSFEIVIMVLKDKFQVAVNGKHTLLYGHRIGPEKIDTLGIYGKVNIHSIGFSFSSDLQSTQASSLELTEISRENVPKSGTPQLQTVSPSWDLQGHGSETFCSVLWTRVFLEIAFCRPIGLTVASFQSLPFAARLNTPMGPGRTVVVKGEVNANAKSFNVDLLAGKSKDIALHLNPRLNIKAFVRNSFLQESWGEEERNITSFPFSPGMYFEMIIYCDVREFKVAVNGVHSLEYKHRFKELSSIDTLEINGDIHLLEVRSW

SEQ ID NO: 752 - DNA, 926 bp, Homo sapien
ggggcccattctgtttcagccagtcgccaagaatcatgaaagtcgccagtggcagcaccgccaccgccgccgcgggccccagctgcgcgctgaaggccggcaagacagcgagcggtgcgggcgaggtggtgcgctgtctgtctgagcagagcgtggccatctcgcgctgccggggcgccggggcgcgcctgcctgccctgctggacgagcagcaggtaaacgtgctgctctacgacatgaacggctgttactcacgcctcaaggagctggtgcccaccctgccccagaaccgcaaggtgagcaaggtggagattctccagcacgtcatcgactacatcagggaccttcagttggagctgaactcggaatccgaagttgggacccccgggggccgagggctgccggtccgggctccgctcagcaccctcaacggcgagatcagcgccctgacggccgaggcggcatgcgttcctgcggacgatcgcatcttgtgtcgctgaagcgcctcccccagggaccggcggaccccagccatccagggggcaagaggaattacgtgctctgtgggtctcccccaacgcgcctcgccggatctgagggagaacaagaccgatcggcggccactgcgcccttaactgcatccagcctggggctgaggctgaggcactggcgaggagagggcgctcctctctgcacacctactagtcaccagagactttagggggtgggattccactcgtgtgtttctattttttgaaaagcagacattttaaaaaatggtcacgtttggtgcttctcagatttctgaggaaattgctttgtattgtatattacaatgatcaccgactgagaatattgttttacaatagttctgtggggctgtttttttgttattaaacaaataatttagatggtgaaaaaaaaaa

SEQ ID NO: 753 - protein, 154 aa, Homo sapien [sequence omitted]

SEQ ID NO: 754 - DNA, 1809 bp, Homo sapien
cctgctccaaggtccagagagctttctggtctttgcagcaggcctgccgccttcatgtccactctcctcatcaatcagccccagtatgcgtggctgaaagagctggggctccgcgaggaaaacgagggcgtgtataatggaagctggggaggccggggagaggttattacgacctattgccccgctaacaacgagccaatagcaagagtccgacaggccagtgtggcagactatgaagaaactgtaaagaaagcaagagaagcatggaaaatctgggcagatattcctgctccaaaacgaggagaaatagtaagacagattggcgatgccttgcgggagaagatccaagtactaggaagcttggtgtctttggagatggggaaaatcttagtggaaggtgtgggtgaagttcaggagtatgtggatatctgtgactatgctgttggtttatcaaggatgattggaggacctatcttgccttctgaaagatctggccatgcactgattgagcagtggaatcccgtaggcctggttggaatcatcacggcattcaatttccctgtggcagtgtatggttggaacaacgccatcgccatgatctgtggaaatgtctgcctctggaaaggagctccaaccacttccctcattagtgtggctgtcacaaagataatagccaaggttctggaggacaacaagctgcctggtgcaatttgttccttgacttgtggtggagcagatattggcacagcaatggccaaagatgaacgagtgaacctgctgtccttcactgggagcactcaggtgggaaaacaggtgggcctgatggtgcaggagaggtttgggagaagtctgttggaacttggaggaaacaatgccattattgcctttgaagatgcagacctcagcttagttgttccatcagctctcttcgctgctgtgggaacagctggccagaggtgtaccactgcgaggcgactgtttatacatgaaagcatccatgatgaggttgtaaacagacttaaaaaggcctatgcacagatccgagttgggaacccatgggaccctaatgttctctatgggccactccacaccaagcaggcagtgagcatgtttcttggagcagtggaagaagcaaagaaagaaggtggcacagtggtctatgggggcaaggttatggatcgccctggaaattatgtagaaccgacaattgtgacaggtcttggccacgatgcgtccattgcacacacagagactttcgctccgattctctatgtctttaaattcaagaatgaagaagaggtctttgcatggaataatgaagtaaaacagggactttcaagtagcatctttaccaaagatctgggcagaatctttcgctggcttggacctaaaggatcagactgtggcattgtaaatgtcaacattccaacaagtggggctgagattggaggtgcctttggaggagaaaagcacactggtggtggcagggagtctggcagtgatgcctggaaacagtacatgagaaggtctacttgtactatcaactacagtaaagaccttcctctggcccaaggaatcaagtttcagtaaaggtgttttagatgaacatcccttaatttgaggtgttccagcagctgtttttggagaagacaaagaagattaaagttttccctgaataaatgcattattatgactgtgacagtgactaatccccctatgaccccaaagccctgattaaatcaagagattccttttttaaaaatcaaaataaaattgttacaacatagccatagttactaaaaaaaaaaa

SEQ ID NO: 755 - protein, 511 aa, Homo sapien
MSTLLINQPQYAWLKELGLREENEGVYNGSWGGRGEVITTYCPANNEPIARVRQASVADYEETVKKAREAWKIWADIPAPKRGEIVRQIGDALREKIQVLGSLVSLEMGKILVEGVGEVQEYVDICDYAVGLSRMIGGPILPSERSGHALIEQWNPVGLVGIITAFNFPVAVYGWNNAIAMICGNVCLWKGAPTTSLISVAVTKIIAKVLEDNKLPGAICSLTCGGADIGTAMAKDERVNLLSFTGSTQVGKQVGLMVQERFGRSLLELGGNNAIIAFEDADLSLVVPSALFAAVGTAGQRCTTARRLFIHESIHDEVVNRLKKAYAQIRVGNPWDPNVLYGPLHTKQAVSMFLGAVEEAKKEGGTVVYGGKVMDRPGNYVEPTIVTGLGHDASIAHTETFAPILYVFKFKNEEEVFAWNNEVKQGLSSSIFTKDLGRIFRWLGPKGSDCGIVNVNIPTSGAEIGGAFGGEKHTGGGRESGSDAWKQYMRRSTCTINYSKDLPLAQGIKFQ

SEQ ID NO: 756 - DNA, 4213 bp, Homo sapien
tccactcctggagcccgcggaccccgagcacgcgcctgacagcccctgctggcccggcgcgcggcgtcgccaggccagctatggcccccgacccggtggccgccgagaccgcggctcagggacctaccccgcgctacttcacctgggacgaggtggcccagcgctcagggtgcgaggagcggtggctagtgatcgaccgtaaggtgtacaacatcagcgagttcacccgccggcatccagggggctcccgggtcatcagccactacgccgggcaggatgccacggatccctttgtggccttccacatcaacaagggccttgtgaagaagtatatgaactctctcctgattggagaactgtctccagagcagcccagctttgagcccaccaagaataaagagctgacagatgagttccgggagctgcgggccacagtggagcggatggggctcatgaaggccaaccatgtcttcttcctgctgtacctgctgcacatcttgctgctggatggtgcagcctggctcaccctttgggtctttgggacgtcctttttgcccttcctcctctgtgcggtgctgctcagtgcagttcaggcccaggctggctggctgcagcatgactttgggcacctgtcggtcttcagcacctcaaagtggaaccatctgctacatcattttgtgattggccacctgaagggggcccccgccagttggtggaaccacatgcacttccagcaccatgccaagcccaactgcttccgcaaagacccagacatcaacatgcatcccttcttctttgccttggggaagatcctctctgtggagcttgggaaacagaagaaaaaatatatgccgtacaaccaccagcacaaatacttcttcctaattgggcccccagccttgctgcctctctacttccagtggtatattttctattttgttatccagcgaaagaagtgggtggacttggcctggatgattaccttctacgtccgcttcttcctcacttatgtgccactattggggctgaaagccttcctgggccttttcttcatagtcaggttcctggaaagcaactggtttgtgtgggtgacacagatgaaccatattcccatgcacattgatcatgaccggaacatggactgggtttccacccagctccaggccacatgcaatgtccacaagtctgccttcaatgactggttcagtggacacctcaacttccagattgagcaccatctttttcccacgatgcctcgacacaattaccacaaagtggctcccctggtgcagtccttgtgtgccaagcatggcatagagtaccagtccaagcccctgctgtcagccttcgccgacatcatccactcactaaaggagtcagggcagctctggctagatgcctatcttcaccaataacaacagccaccctgcccagtctggaagaagaggaggaagactctggagccaaggcagaggggagcttgagggacaatgccactatagtttaatactcagagggggttgggtttggggacataaagcctctgactcaaactcctcccttttatcttctagccacagttctaagacccaaagtggggggtggacacagaagtccctaggagggaaggagctgttggggcaggggtgtaaattatttcctttttctagtttggcacatgcaggtagttggtgaacagagagaaccaggagggtaacagaagaggagggacctactgaacccagagtcaggaagagatttaacactaaaattccactcatgccgggcgtggtggcacgcgcctgtaatcccagctacccaggaggctgaggcaggagaatcgcttgaaccggggaggtggaggttgcagtgagctgagatcacgccattgtactccagcctgggcgacagagcaagactccatttcaaaaaaaaaaaaaaaatccactcatataaaaggtgagctcagctcactggtccatttctcagtggcttctccatcctcatttgcaaacctcagagggataaggcagttgaacctgatgagcaagaattataacagcaaggaaacattaatgcttagaattctgagatccagcacaactcagtctgtgggagctcagctcgctgcccagggataggtatgacctatgtctgccttaggctgctgggagatgccattctccagtttcagaagcaggcagggcaaaggtcaagactgtggtattggggtcttttggctctgaaggatcctggaaccactgattttggtttattccctccagggtctaaagagaacaagaggtgctagctcttaccaaaacagatggtagagagagttgctggctatttaaaaagctctttcatcttttaattcacctcttcttttcacctctttaaccactcctcaggaacagaacacttctaggactgggggtcttttagctccataagcaagtgagcagatgggacaagttagtcttttctccctagaaacaaaggggatgcccagtggtttccctttgcttcccaacctaaaatttcaagtttaataaaatagcaattagcagaagtgaccaaattgggagataattatcagtcatgaggaaagacacagatttcggtcataaagaatgtaagggctataagtagaaactttctataacctaaatgatgttatagaattatttttgagcaggagcagaaagattaaatatgatcacttcatacttctaaatcagaaataggaagattaaaaccacagaacagtttgtgatttctattgctgtagctaggtatcttactctgtccactcttgttcaagtatctaactcttctggaaaccaaataggctttagaagagattatcctatattcctatcagtataatactaaaatgtaactttttaatcatctggtttttaaaagataaacagtttagcccatctctccagagagcaaacataggaatatgactcaggagcctcctagggcttatcatcagccctcacacccgcttccccctccaacccacagcctttgcttccaggtggcaggattactactttgcctcttcagcagcatctactctaggcatattgatcattttagacactgggagaagagaacctcaaactaggaggaaaagacagagcctccacttagttttgggaggggatggcagacagtcaaggagatgagcgtcctaaggcatgttgggatagggtcagatgcaccacccatggagaggtttgtcaacacaaagacatggaaggttagaggtttgtcaacaaaaagacatggaaggttaggtttgtcaacacaaagacatggaagattagaggtttgtcaacacaaagacacaggaagaatgggctgcagaagatttagatgttttccatttgggcacattttacttagctggagaactaggtttaaaacagcctgggtaggaaaattagaagcaagctggatgcagtggctcatgcctgtaatcccaacacttttgggaggtccaggcaggaggatcacttgggcccaggaggtcaagcctgcagcgagctgagatcacaccactgcactccagcctggggtgatagaacaagaccctgtctcaaaaaaaaaaaaaaacaacaaaaacttagaattgaggagttgtacctccattggcttcctcactccaaaataggtgctgatccttcctattcctattctttgccaccttttgggtgtggtgtcaccagcctgtttagccaagtagctttgggcataggctgcccaatctgagcaaacaccagtgaggctctattgagccaagaccaagtcctcaaagcacctgaaccactgtggccttctcagcctacagcagtgtggtctcttacatggccacaaagggacacacagtgacaaaaggctcggaatgttacaatggtaaaatgagtgatctcaaatccactgacagatataaaataggcttagagaggaaaagctgcctctggtcaagtagatcatggcagcatgaattccaactcacttttttacaactccaacttctatgtttatctttgttactttcacttttttacaacctggccagaggcattttttaaatcaggcccaatatcagtattctttttgtgtgtgccaattttgttatcacatccctatgaagttgaaaaataaagttaattttgaccaaaaaaaaaaaaaaaag

SEQ ID NO: 757 - protein, 444 aa, Homo sapien
MAPDPVAAETAAQGPTPRYFTWDEVAQRSGCEERWLVIDRKVYNISEFTRRHPGGSRVISHYAGQDATDPFVAFHINKGLVKKYMNSLLIGELSPEQPSFEPTKNKELTDEFRELRATVERMGLMKANHVFFLLYLLHILLLDGAAWLTLWVFGTSFLPFLLCAVLLSAVQAQAGWLQHDFGHLSVFSTSKWNHLLHHFVIGHLKGAPASWWNHMHFQHHAKPNCFRKDPDINMHPFFFALGKILSVELGKQKKKYMPYNHQHKYFFLIGPPALLPLYFQWYIFYFVIQRKKWVDLAWMITFYVRFFLTYVPLLGLKAFLGLFFIVRFLESNWFVWVTQMNHIPMHIDHDRNMDWVSTQLQATCNVHKSAFNDWFSGHLNFQIEHHLFPTMPRHNYHKVAPLVQSLCAKHGIEYQSKPLLSAFADIIHSLKESGQLWLDAYLHQ

SEQ ID NO: 758 - DNA, 3430 bp, Homo sapien
ggtttccggagctgcggcggcgcagactgggagggggagccgggggttccgacgtcgcagccgagggaacaagccccaaccggatcctggacaggcaccccggcttggcgctgtctctccccctcggctcggagaggcccttcggcctgagggagcctcgccgcccgtccccggcacacgcgcagccccggcctctcggcctctgccggagaaacaggatggcccaatggaatcagctacagcagcttgacacacggtacctggagcagctccatcagctctacagtgacagcttcccaatggagctgcggcagtttctggccccttggattgagagtcaagattgggcatatgcggccagcaaagaatcacatgccactttggtgtttcataatctcctgggagagattgaccagcagtatagccgcttcctgcaagagtcgaatgttctctatcagcacaatctacgaagaatcaagcagtttcttcagagcaggtatcttgagaagccaatggagattgcccggattgtggcccggtgcctgtgggaagaatcacgccttctacagactgcagccactgcggcccagcaagggggccaggccaaccaccccacagcagccgtggtgacggagaagcagcagatgctggagcagcaccttcaggatgtccggaagagagtgcaggatctagaacagaaaatgaaagtggtagagaatctccaggatgactttgatttcaactataaaaccctcaagagtcaaggagacatgcaagatctgaatggaaacaaccagtcagtgaccaggcagaagatgcagcagctggaacagatgctcactgcgctggaccagatgcggagaagcatcgtgagtgagctggcggggcttttgtcagcgatggagtacgtgcagaaaactctcacggacgaggagctggctgactggaagaggcggcaacagattgcctgcattggaggcccgcccaacatctgcctagatcggctagaaaactggataacgtcattagcagaatctcaacttcagacccgtcaacaaattaagaaactggaggagttgcagcaaaaagtttcctacaaaggggaccccattgtacagcaccggccgatgctggaggagagaatcgtggagctgtttagaaacttaatgaaaagtgcctttgtggtggagcggcagccctgcatgcccatgcatcctgaccggcccctcgtcatcaagaccggcgtccagttcactactaaagtcaggttgctggtcaaattccctgagttgaattatcagcttaaaattaaagtgtgcattgacaaagactctggggacgttgcagctctcagaggatcccggaaatttaacattctgggcacaaacacaaaagtgatgaacatggaagaatccaacaacggcagcctctctgcagaattcaaacacttgaccctgagggagcagagatgtgggaatgggggccgagccaattgtgatgcttccctgattgtgactgaggagctgcacctgatcacctttgagaccgaggtgtatcaccaaggcctcaagattgacctagagacccactccttgccagttgtggtgatctccaacatctgtcagatgccaaatgcctgggcgtccatcctgtggtacaacatgctgaccaacaatcccaagaatgtaaacttttttaccaagcccccaattggaacctgggatcaagtggccgaggtcctgagctggcagttctcctccaccaccaagcgaggactgagcatcgagcagctgactacactggcagagaaactcttgggacctggtgtgaattattcagggtgtcagatcacatgggctaaattttgcaaagaaaacatggctggcaagggcttctccttctgggtctggctggacaatatcattgaccttgtgaaaaagtacatcctggccctttggaacgaagggtacatcatgggctttatcagtaaggagcgggagcgggccatcttgagcactaagcctccaggcaccttcctgctaagattcagtgaaagcagcaaagaaggaggcgtcactttcacttgggtggagaaggacatcagcggtaagacccagatccagtccgtggaaccatacacaaagcagcagctgaacaacatgtcatttgctgaaatcatcatgggctataagatcatggatgctaccaatatcctggtgtctccactggtctatctctatcctgacattcccaaggaggaggcattcggaaagtattgtcggccagagagccaggagcatcctgaagctgacccaggcgctgccccatacctgaagaccaagtttatctgtgtgacaccaacgacctgcagcaataccattgacctgccgatgtccccccgcactttagattcattgatgcagtttggaaataatggtgaaggtgctgaaccctcagcaggagggcagtttgagtccctcacctttgacatggagttgacctcggagtgcgctacctcccccatgtgaggagctgagaacggaagctgcagaaagatacgactgaggcgcctacctgcattctgccacccctcacacagccaaaccccagatcatctgaaactactaactttgtggttccagattttttttaatctcctacttctgctatctttgagcaatctgggcacttttaaaaatagagaaatgagtgaatgtgggtgatctgcttttatctaaatgcaaataaggatgtgttctctgagacccatgatcaggggatgtggcggggggtggctagagggagaaaaaggaaatgtcttgtgttgttttgttcccctgccctcctttctcagcagctttttgttattgttgttgttgttcttagacaagtgcctcctggtgcctgcggcatccttctgcctgtttctgtaagcaaatgccacaggccacctatagctacatactcctggcattgcactttttaaccttgctgacatccaaatagaagataggactatctaagccctaggtttctttttaaattaagaaataataacaattaaagggcaaaaaacactgtatcagcatagcctttctgtatttaagaaacttaagcagccgggcatggtggctcacgcctgtaatcccagcactttgggaggccgaggcggatcataaggtcaggagatcaagaccatcctggctaacacggtgaaaccccgtctctactaaaagtacaaaaaattagctgggtgtggtggtgggcgcctgtagtcccagctactcgggaggctgaggcaggagaatcgcttgaacctgagaggcggaggttgcagtgagccaaaattgcaccactgcacactgcactccatcctgggcgacagtctgagactctgtctcaaaaaaaaaaaaaaaaaaaaaaaaaaaaa

SEQ ID NO: 759 - protein, 770 aa, Homo sapien
MAQWNQLQQLDTRYLEQLHQLYSDSFPMELRQFLAPWIESQDWAYAASKESHATLVFHNLLGEIDQQYSRFLQESNVLYQHNLRRIKQFLQSRYLEKPMEIARIVARCLWEESRLLQTAATAAQQGGQANHPTAAVVTEKQQMLEQHLQDVRKRVQDLEQKMKVVENLQDDFDFNYKTLKSQGDMQDLNGNNQSVTRQKMQQLEQMLTALDQMRRSIVSELAGLLSAMEYVQKTLTDEELADWKRRQQIACIGGPPNICLDRLENWITSLAESQLQTRQQIKKLEELQQKVSYKGDPIVQHRPMLEERIVELFRNLMKSAFVVERQPCMPMHPDRPLVIKTGVQFTTKVRLLVKFPELNYQLKIKVCIDKDSGDVAALRGSRKFNILGTNTKVMNMEESNNGSLSAEFKHLTLREQRCGNGGRANCDASLIVTEELHLITFETEVYHQGLKIDLETHSLPVVVISNICQMPNAWASILWYNMLTNNPKNVNFFTKPPIGTWDQVAEVLSWQFSSTTKRGLSIEQLTTLAEKLLGPGVNYSGCQITWAKFCKENMAGKGFSFWVWLDNIIDLVKKYILALWNEGYIMGFISKERERAILSTKPPGTFLLRFSESSKEGGVTFTWVEKDISGKTQIQSVEPYTKQQLNNMSFAEIIMGYKIMDATNILVSPLVYLYPDIPKEEAFGKYCRPESQEHPEADPGSAAPYLKTKFICVTPTTCSNTIDLPMSPRTLDSLMQFGNNGEGAEPSAGGQFESLTFDMELTSECATSPM

SEQ ID NO: 760 - DNA, 1620 bp, Homo sapien
gactacatcgatgcgcagtttgaaaattatctgcaggaggagctgaagatccgccgctcgctcttcgactaccatgacacaaggatccacgtttgcctctacttcatcacgcccacagggcactccctgaagtctctagatctagtgaccatgaagaaactagacagcaaggtgaacattattcccatcatcgccaaggctgacaccatctccaagagcgagctccacaagttcaagatcaagatcatgggcgagttggtcagcaacggggtccagatctaccagttccccacggatgatgaggctgttgcagagattaacgcagtcatgaatgcacatctgccctttgccgtggtgggcagcaccgaggaggtgaaggtggggaacaagctggtccgagcacggcagtacccctggggagtggtgcaggtggagaatgagaatcactgcgacttcgtgaagctgcgggagatgttgatccgggtgaacatggaagacctccgcgagcagacccacagccggcactacgagctctaccggcgctgcaagttggaggagatgggctttcaggacagcgatggtgacagccagcccttcagcctacaagagacatacgaggccaagaggaaggagttcctaagtgagctgcagaggaaggaggaagagatgaggcagatgtttgtcaacaaagtgaaggagacagagctggagctgaaggagaaggaaagggagctccatgagaagtttgagcacctgaagcgggtccaccaggaggagaagcgcaaggtggaggaaaagcgccgggaactggaggaggagaccaacgccttcaatcgccggaaggctgcggtggaggccctgcagtcgcaggccttgcacgccacctcgcagcagcccctgaggaaggacaaggacaagaagaattaacgcacgcacagacttacatgtcaagagtggactttagactttcatgtgttaagttgcttgagttacaccttgtgacccttctcccataacatggtgtgaggacggactgggagccggtacagactccagtgtttacagccttgctttcctcccaccgaccctggccccaggctgccccgggcctggcgggccacccctctctatgcaaacacgtaaaagccatgaatgctggaatccaaaactgacgaggtttatttttttcagagccagtggctggtcttccatttacagtgtcactattccctgacggagctgttatgtgccgctctagcgaaggccccagccgggatgctaggcctaattgttcagcgtggagatggcaactcacgtggtgccctaggtgcagctgcgtggtctggtatacatgctgcaaaattcacccagttcccctcattttaatttttctaacctacagcttaattttaataactttaaaacacttctaaatatttattttggcaccagcgtcaagacaaataatatcctctcccattattttcataagtaacacagattccctgatttttaaaaactaaaaatacagctaaacctttcttatgtataaagtatgcctatcatatacagggagaggtgggtaataaacttcctgtaatgacaaaaaaaaaaaaaaaa

SEQ ID NO: 761 - protein, 258 aa, Homo sapien
MKKLDSKVNIIPIIAKADTISKSELHKFKIKIMGELVSNGVQIYQFPTDDEAVAEINAVMNAHLPFAVVGSTEEVKVGNKLVRARQYPWGVVQVENENHCDFVKLREMLIRVNMEDLREQTHSRHYELYRRCKLEEMGFQDSDGDSQPFSLQETYEAKRKEFLSELQRKEEEMRQMFVNKVKETELELKEKERELHEKFEHLKRVHQEEKRKVEEKRRELEEETNAFNRRKAAVEALQSQALHATSQQPLRKDKDKKN

SEQ ID NO: 762 - DNA, 2932 bp, Homo sapien
agagaggagccgactcggcagggactgggggaccgggccgagagtgcgagcgagcgagggagggagtgagggagcgtgcgagccagaaggggaaaggcggccactcgtgcctgagcgaccgcagaggggagtgggagcagtggggtaaaggagcggggggcgggaataagaaaggccgagagaaggcggacagaggctagtggtggtggtggtggtagggggagaaggaggagctggaggagggcaggggctgagggagtgagtgaagcggacgcgcgagggaggggagggaagggaagggaagggaagggggggtcacgcgggggcgcgcgcgcgcaccgggagcgcgctcggaggcgagtggaactggatcgggtttgctgccagcggcgtgagcttcggccgccattttacaacagctccactcgcgccggacacagggagcagcgagcacgcgtttcccgcaacccgataccatcggacaggatttctccgcctcagcccaacggggagatctctggaaacatggctacagaacatgttaatggaaatggtactgaagagcccatggatactacttctgcagttatccattcagaaaattttcagacattgcttgatgctggtttaccacagaaagttgctgaaaaactagatgaaatttacgttgcagggctagttgcacatagtgatttagatgaaagagctattgaagctttaaaagaattcaatgaagacggtgcattggcagttcttcaacagtttaaagacagtgatctctctcatgttcagaacaaaagtgcctttttatgtggagtcatgaagacttacaggcagagagaaaaacaagggaccaaagtagcagattctagtaaaggaccagatgaggcaaaaattaaggcactcttggaaagaacaggctacacacttgatgtgaccactggacagaggaagtatggaggaccacctccagattccgtttattcaggtcagcagccttctgttggcactgagatatttgtgggaaagatcccaagagatctatttgaggatgaacttgttccattatttgagaaagctggacctatatgggatcttcgtctaatgatggatccactcactggtctcaatagaggttatgcgtttgtcactttttgtacaaaagaagcagctcaggaggctgttaaactgtataataatcatgaaattcgttctggaaaacatattggtgtctgcatctcagttgccaacaataggctttttgtgggctctattcctaagagtaaaaccaaggaacagattcttgaagaatttagcaaagtaacagagggtcttacagacgtcattttataccaccaaccggatgacaagaaaaaaaacaggagcttttgctttcttgaatatgaagatcacaaaacagctgcccaggcaaggcgtaggttaatgagtggtaaagtcaaggtctgggggaatgttggaactgttgaatgggctgatcctatagaagatcctgatcctgaggttatggcaaaggtaaaagtgctgtttgtacgcaaccttgccaatactgtaacagaagagattttagaaaaggcatttagtcagtttgggaaactggaacgagtgaagaagttaaaagattatgcgttcattcattttgatgagcgagatggtgctgtcaaggctatggaagaaatgaatggcaaagacttggagggagaaaatattgaaattgtttttgccaagccaccagatcagaaaaggaaagaaagaaaagctcagaggcaagcagcaaaaaatcaaatgtatgacgattactactattatggtccacctcatatgccccctccaacaagaggtcgagggcgtggaggtagaggtggttatggatatcctccagattattatggatatgaagattattatgattattatggttatgattaccataactatcgtggtggatatgaagatccatactatggttatgaagattttcaagttggagctagaggaaggggtggtagaggagcaaggggtgctgctccatccagaggtcgtggggctgctcctccccgcggtagagccggttattcacagagaggaggtcctggatcagcaagaggcgttcgaggtgcgagaggaggtgcccaacaacaaagaggccgcggggtacgtggtgcgaggggtggccgcggtggaaatgtaggaggaaagcgcaaagctgatgggtacaaccagccagattccaagcggcgccagaccaataatcagaactggggctcccaacccattgctcagcaaccgctccaaggtggtgatcattctggtaactatggttacaaatctgaaaaccaggagttttatcaggatacttttgggcaacagtggaagtagaaacagtagggcctctgtaaaattggagactgataggttgatcagaaactcaccctaaatctgaacgggtgccgctataatttgtgacatctggcaagatttccctttatgtatatattttaacaatccgcttggacacgaacaaagccacacttctaactgcttctggcgaactgattttatttttaatttttttcaataaagatattcttagatactgaaagaaatagttaatgagtttgcatttgtgcttgagaaaatttggctcaagtccatttggctgtagtgtcaacgatgtttccagtagtgtttagatttggtgtcttcaaaggtagttgattaaaaccaagtgtgtctttaatatcttgtatcagaataactttgtatgttaccaacttaaattgctagaataaggtaaattgatacacaactgctatttttaatttagaactttgacctaatttgggttttcaaaaccattttggctacttgtattctttatgctgttgtttatttcaataaaaaattcacacct

SEQ ID NO: 763 - protein, 623 aa, Homo sapien
MATEHVNGNGTEEPMDTTSAVIHSENFQTLLDAGLPQKVAEKLDEIYVAGLVAHSDLDERAIEALKEFNEDGALAVLQQFKDSDLSHVQNKSAFLCGVMKTYRQREKQGTKVADSSKGPDEAKIKALLERTGYTLDVTTGQRKYGGPPPDSVYSGQQPSVGTEIFVGKIPRDLFEDELVPLFEKAGPIWDLRLMMDPLTGLNRGYAFVTFCTKEAAQEAVKLYNNHEIRSGKHIGVCISVANNRLFVGSIPKSKTKEQILEEFSKVTEGLTDVILYHQPDDKKKNRSFCFLEYEDHKTAAQARRRLMSGKVKVWGNVGTVEWADPIEDPDPEVMAKVKVLFVRNLANTVTEEILEKAFSQFGKLERVKKLKDYAFIHFDERDGAVKAMEEMNGKDLEGENIEIVFAKPPDQKRKERKAQRQAAKNQMYDDYYYYGPPHMPPPTRGRGRGGRGGYGYPPDYYGYEDYYDYYGYDYHNYRGGYEDPYYGYEDFQVGARGRGGRGARGAAPSRGRGAAPPRGRAGYSQRGGPGSARGVRGARGGAQQQRGRGVRGARGGRGGNVGGKRKADGYNQPDSKRRQTNNQNWGSQPIAQQPLQGGDHSGNYGYKSENQEFYQDTFGQQWK

SEQ ID NO: 764 - DNA, 1942 bp, Homo sapien
gagcatggaggcgggggcggctgaggcagctgtagcggccgtggaggaggtcggctcagccgggcagtttgaggagctgctgcgcctcaaagccaagtccctccttgtggtccatttctgggcaccatgggctccacagtgtgcacagatgaacgaagttatggcagagttagctaaagaactccctcaagtttcatttgtgaagttggaagctgaaggtgttcctgaagtatctgaaaaatatgaaattagctctgttcccacttttctgtttttcaagaattctcagaaaatcgaccgattagatggtgcacatgccccagagttgaccaaaaaagttcagcgacatgcatctagtggctccttcctacccagcgctaatgaacatcttaaagaagatctcaaccttcgcttgaagaaattgactcatgctgccccctgcatgctgtttatgaaaggaactcctcaagaaccacgctgtggtttcagcaagcagatggtggaaattcttcacaaacataatattcagtttagcagttttgatatcttctcagatgaagaggttcgacagggactcaaagcctattccagttggcctacctatcctcagctctatgtttctggagagctcataggaggacttgatataattaaggagctagaagcatctgaagaactagatacaatttgtcccaaagctcccaaattagaggaaaggctcaaagtgctgacaaataaagcttctgtgatgctctttatgaaaggaaacaaacaggaagcaaaatgtggattcagcaaacaaattctggaaatactaaatagtactggtgttgaatatgaaacattcgatatattggaggatgaagaagttcggcaaggattaaaagcttactcaaattggccaacataccctcagctgtatgtgaaaggggagctggtgggaggattggatattgtgaaggaactgaaagaaaatggtgaattgctgcctatactgagaggagaaaattaataaatcttaaacttggtgcccaactattacggggtctggctctgtcacccaggctggagtgcagtggcacgattatggctcattgcagcctcgacttctcggggccaagcgatcctcctgcctcagccttctgagtagctgggaccacaggcgtgcaccaccatgcccacctaattttttatttcttgtagagatgaggtctcctgcctcagcctcccaaagtgctggaatttacaggagtgtcggctgtgccccttgtgatggatgaggaaaggtatccacctttctgaatcagacacaagctgcagtagcttcctgatgcctcattcaccaggatgggtaactttaaagacaagttttataactggcatcccatctggtttcagagtcttgggggcttttttcatacagctttgtctgatatttagagacattcagattcagaagccatgagttcagttagctcatgggccgggcacgtgcactgactcactggctgcagcagaacacattgagggagtcttggtgcacttaggtcactgtaaggttctagggctgggagctgggatttgaaccaggatctgtcagcgcagccccagtgctgtgcttgaagcctcgtgccacactggctttgaggtagcacgctgcaagttagtgagtggagttgcccaagtctggggcttctgaaatgacctggtatttttatgttcctgttagaaatggtgtggctttcacaaattaagtgccaggctgggcacaatggctcgtgcttgtaatcccagcactttgggaggcggaggcaggcgggttgcttgagctccggagcttgagaccagcctgagcaacatggcgaaacctcatatctacaaaaaataaaaaattaactggtcaaaaaaaaaaaaaaaaaaaaaaaaaaaaaaaaaaaaaaaa

SEQ ID NO: 765 - protein, 335 aa, Homo sapien
MEAGAAEAAVAAVEEVGSAGQFEELLRLKAKSLLVVHFWAPWAPQCAQMNEVMAELAKELPQVSFVKLEAEGVPEVSEKYEISSVPTFLFFKNSQKIDRLDGAHAPELTKKVQRHASSGSFLPSANEHLKEDLNLRLKKLTHAAPCMLFMKGTPQEPRCGFSKQMVEILHKHNIQFSSFDIFSDEEVRQGLKAYSSWPTYPQLYVSGELIGGLDIIKELEASEELDTICPKAPKLEERLKVLTNKASVMLFMKGNKQEAKCGFSKQILEILNSTGVEYETFDILEDEEVRQGLKAYSNWPTYPQLYVKGELVGGLDIVKELKENGELLPILRGEN

SEQ ID NO: 766 - DNA, 2275 bp, Homo sapien
  Unsure 2005: Unknown base
gctaacctagtgcctatagctaaggcaggtacctgcatccttgtttttgtttagtggatcctctatccttcagagactctggaacccctgtggtcttctcttcatctaatgaccctgaggggatggagttttcaagtccttccagagaggaatgtcccaagcctttgagtagggtaagcatcatggctggcagcctcacaggtttgcttctacttcaggcagtgtcgtgggcatcaggtgcccgcccctgcatccctaaaagcttcggctacagctcggtggtgtgtgtctgcaatgccacatactgtgactcctttgaccccccgacctttcctgcccttggtaccttcagccgctatgagagtacacgcagtgggcgacggatggagctgagtatggggcccatccaggctaatcacacgggcacaggcctgctactgaccctgcagccagaacagaagttccagaaagtgaagggatttggaggggccatgacagatgctgctgctctcaacatccttgccctgtcaccccctgcccaaaatttgctacttaaatcgtacttctctgaagaaggaatcggatataacatcatccgggtacccatggccagctgtgacttctccatccgcacctacacctatgcagacacccctgatgatttccagttgcacaacttcagcctcccagaggaagataccaagctcaagatacccctgattcaccgagccctgcagttggcccagcgtcccgtttcactccttgccagcccctggacatcacccacttggctcaagaccaatggagcggtgaatgggaaggggtcactcaagggacagcccggagacatctaccaccagacctgggccagatactttgtgaagttcctggatgcctatgctgagcacaagttacagttctgggcagtgacagctgaaaatgagccttctgctgggctgttgagtggataccccttccagtgcctgggcttcacccctgaacatcagcgagacttcattgcccgtgacctaggtcctaccctcgccaacagtactcaccacaatgtccgcctactcatgctggatgaccaacgcttgctgctgccccactgggcaaaggtggtactgacagacccagaagcagctaaatatgttcatggcattgctgtacattggtacctggactttctggctccagccaaagccaccctaggggagacacaccgcctgttccccaacaccatgctctttgcctcagaggcctgtgtgggctccaagttctgggagcagagtgtgcggctaggctcctgggatcgagggatgcagtacagccacagcatcatcacgaacctcctgtaccatgtggtcggctggaccgactggaaccttgccctgaaccccgaaggaggacccaattgggtgcgtaactttgtcgacagtcccatcattgtagacatcaccaaggacacgttttacaaacagcccatgttctaccaccttggccacttcagcaagttcattcctgagggctcccagagagtggggctggttgccagtcagaagaacgacctggacgcagtggcactgatgcatcccgatggctctgctgttgtggtcgtgctaaaccgctcctctaaggatgtgcctcttaccatcaaggatcctgctgtgggcttcctggagacaatctcacctggctactccattcacacctacctgtggcatcgccagtgatggagcagatactcaaggaggcactgggctcagcctgggcattaaagggacagagtcagctcacacgctgtctgtgactaaagagggcacagcagggccagtgtgagcttacagcgacgtaagcccaggggcaatggtttgggtgactcactttcccctctaggtggtgcccagggctggaggcccctagaaaaagatcagtaagccccagtgtccccccagcccccatgcttatgtgaacatgcgctgtgtgctgcttgctttggaaactngcctgggtccaggcctagggtgagctcactgtccgtacaaacacaagatcagggctgagggtaaggaaaagaagagactaggaaagctgggcccaaaactggagactgtttgtctttcctagagatgcagaactgggcccgtggagcagcagtgtcagcatcagggcggaagccttaaagcagcagcgggtgtgcccaggcacccagatgattcctatggcaccagccaggaaaaatggcagctcttaaaggagaaaatgtttgagccca

SEQ ID NO: 767 - protein, 536 aa, Homo sapien
  Unsure 2005: Unknown amino acid
MEFSSPSREECPKPLSRVSIMAGSLTGLLLLQAVSWASGARPCIPKSFGYSSVVCVCNATYCDSFDPPTFPALGTFSRYESTRSGRRMELSMGPIQANHTGTGLLLTLQPEQKFQKVKGFGGAMTDAAALNILALSPPAQNLLLKSYFSEEGIGYNIIRVPMASCDFSIRTYTYADTPDDFQLHNFSLPEEDTKLKIPLIHRALQLAQRPVSLLASPWTSPTWLKTNGAVNGKGSLKGQPGDIYHQTWARYFVKFLDAYAEHKLQFWAVTAENEPSAGLLSGYPFQCLGFTPEHQRDFIARDLGPTLANSTHHNVRLLMLDDQRLLLPHWAKVVLTDPEAAKYVHGIAVHWYLDFLAPAKATLGETHRLFPNTMLFASEACVGSKFWEQSVRLGSWDRGMQYSHSIITNLLYHVVGWTDWNLALNPEGGPNWVRNFVDSPIIVDITKDTFYKQPMFYHLGHFSKFIPEGSQRVGLVASQKNDLDAVALMHPDGSAVVVVLNRSSKDVPLTIKDPAVGFLETISPGYSIHTYLWHRQ

SEQ ID NO: 768 - DNA, 2632 bp, Homo sapien
tttttttttttttttttttttttttcacagtacaactcaacactttattccattgtgattggtatacatgtaagattgagacatcaagagactaaaaatcagtgcagaacttctctgaactaaagggccgtgaaaggcatgattggttttggcacacagagtggataaccatacattggctggaatgaggtggtcaggaaaataaaatgcacaaatctaacaccatgttgaaatcatgtctgagttctggagaaagttaaagtgtaaataattacaaagactgacatgcaactctttaccttacattattcatctacagactatttttctcccttagagatgaggagatggccttagtaatctgttcagagtagctgaaaagaccaatcaatacacattagaaagatctgcctgatttctatagcaattcattatagctgaagaaataatgctaaataatgtattttctctatatcatcctttaactaaattgaatcacatcacccaagtaattctgacttaacttttacttagttaaatataatttctcctgtcttttaatgtcaaaaagcagtttccgttagtttatccattggtgtatatcacaacagatgaggaaaacttatgtgatagtatctttccttttcaaaaataacattatgctaatgagaacatcaaagaagtaatactatgctgcaagtaatttaggttttcacatcatcaatcatatagggagtccaaagaagccagcctagcaggtaacatagcagagcagaatgcaatgtagaagaggcacacagagtctaagtgatttctccagacaaaagagaaggaaagacagaaagaagcaaaagaaaggaaaagtgaaaaacagccttctgcagaacaaattgttacaaagaaaaatctatttgcttgcaattgattaaacataatagagaagagttctttgatttgggatgatagaagtaaagatattaaaaattatatgctggtaagcctaaactggcagattgggccatttttcctgtggttgtatttgagatgttgagctctcacagggagaatttttgcttttgccaaggaagggccagatttaacccaaaaggacaaccttgagaacattttttctttgttaacttgggcatgtggctaacattcgttctctctctggtaaaaagatattattcatctctgatgagatggttcaaaatatgacagtgaccaagacgtggtttattcacaggatgcacataattggatatctgcatatggcatgaattaaaaaaaaagttaagcaacaaggaagagaaggaggagaaaaaaacttttgcaaatttctgacataaaataatcaaataaaagggaaagatagtggttaaggatgttttcattttctcagaggtttctccttccatctgctacgggggaaatgaaatgaatgaaagtaattctctttaggtcaccaacataaggaataatttgactgcaaacatagaagtgagcagagcaagatttgaagtgatacttcttaatctctttgattcttaatcttaaacaacaagccacaggcaatacaggaaaggtggagatgactaggaagtgtgataatgtgcctggatcagttaccattcattggaaagtaccgtttcccctgcctgttaataggctgattcctgcaggtttgagtaaaggaatcatctcttccttcagtgccgcattgttctttgtaagagatccgtgtcagttcaaagttgtgtaatttaaaggctagagaagaaagaagtttaaattggatcccacagtaaatattcacggatatttcaaagtagaattgtccactgtctggggttgggttcaagcatcaaggtgatcgcttcctgaacatgttcattgaccatgaggagctgtttactctggctcatattagactaccagtaattattttcagacatgatgtctcttttgaaagaaatgactttgctggactaggataactgcaggggtagaagactggaaatacggtgagtcagggtaggtggaaacagaaatgagtagaaggaaaaaaaaaaaaaagagttcctccaaggtcatatatggtcagtaatgaagcaaaaattcatggtatgtgacttaaagactttctaagacattgtacccatgggatgtttccaagcttcttgatctttaatcttttagcaaccttctgatactggatttaccttcctaggtgtggtgccctccttctggaatttagatctctggggcaaaccctgtcaggatgtgcctctgtgtagttaacactgccccagacagcagctctgatttcagtcacagttctgctgagaagcctgtctgcccctggcaggggtgaggggagggttgttggtggcagatgtagtcagaggcagaggagaccaatggcagacagggtggacctgcaggaaggtagccagaaggaaagaccttgggttttacccaaggtcaaggtggctgtgatagaagagcgaaaggcaaaagtaactaactgaatttcagaattcagaagtaaaagagaaaggaggaggatccctggaccagggactttcacaggaaccaaacatgattcatgaaaaaaaaaaaaaaaaaaaaa

SEQ ID NO: 769 - DNA, 2312 bp, Homo sapien
tccagtgacggagccgcccggccgacagccccgagacgacagcccggcgcgtcccggtccccacctccgaccaccgccagcgctccaggccccgcgctccccgctcgccgccaccgcgccctccgctccgcccgcagtgccaaccatgaccgccgccagtatgggccccgtccgcgtcgccttcgtggtcctcctcgccctctgcagccggccggccgtcggccagaactgcagcgggccgtgccggtgcccggacgagccggcgccgcgctgcccggcgggcgtgagcctcgtgctggacggctgcggctgctgccgcgtctgcgccaagcagctgggcgagctgtgcaccgagcgcgacccctgcgacccgcacaagggcctcttctgtgacttcggctccccggccaaccgcaagatcggcgtgtgcaccgccaaagatggtgctccctgcatcttcggtggtacggtgtaccgcagcggagagtccttccagagcagctgcaagtaccagtgcacgtgcctggacggggcggtgggctgcatgcccctgtgcagcatggacgttcgtctgcccagccctgactgccccttcccgaggagggtcaagctgcccgggaaatgctgcgaggagtgggtgtgtgacgagcccaaggaccaaaccgtggttgggcctgccctcgcggcttaccgactggaagacacgtttggcccagacccaactatgattagagccaactgcctggtccagaccacagagtggagcgcctgttccaagacctgtgggatgggcatctccacccgggttaccaatgacaacgcctcctgcaggctagagaagcagagccgcctgtgcatggtcaggccttgcgaagctgacctggaagagaacattaagaagggcaaaaagtgcatccgtactcccaaaatctccaagcctatcaagtttgagctttctggctgcaccagcatgaagacataccgagctaaattctgtggagtatgtaccgacggccgatgctgcaccccccacagaaccaccaccctgccggtggagttcaagtgccctgacggcgaggtcatgaagaagaacatgatgttcatcaagacctgtgcctgccattacaactgtcccggagacaatgacatctttgaatcgctgtactacaggaagatgtacggagacatggcatgaagccagagagtgagagacattaactcattagactggaacttgaactgattcacatctcatttttccgtaaaaatgatttcagtagcacaagttatttaaatctgtttttctaactgggggaaaagattcccacccaattcaaaacattgtgccatgtcaaacaaatagtctatcttccccagacactggtttgaagaatgttaagacttgacagtggaactacattagtacacagcaccagaatgtatattaaggtgtggctttaggagcagtgggagggtaccagcagaaaggttagtatcatcagatagctcttatacgagtaatatgcctgctatttgaagtgtaattgagaaggaaaattttagcgtgctcactgacctgcctgtagccccagtgacagctaggatgtgcattctccagccatcaagagactgagtcaagttgttccttaagtcagaacagcagactcagctctgacattctgattcgaatgacactgttcaggaatcggaatcctgtcgattagactggacagcttgtggcaagtgaatttcctgtaacaagccagattttttaaaatttatattgtaaatattgtgtgtgtgtgtgtgtgtgtatatatatatatatatgtacagttatctaagttaatttaaagttgtttgtgcctttttatttttgtttttaatgctttgatatttcaatgttagcctcaatttctgaacaccataggtagaatgtaaagcttgtctgatcgttcaaagcatgaaatggatacttatatggaaattctctcagatagaatgacagtccgtcaaaacagattgtttgcaaaggggaggcatcagtgtccttggcaggctgatttctaggtaggaaatgtggtagctcacgctcacttttaatgaacaaatggcctttattaaaaactgagtgactctatatagctgatcagttttttcacctggaagcatttgtttctactttgatatgactgtttttcggacagtttatttgttgagagtgtgaccaaaagttacatgtttgcacctttctagttgaaaataaagtatattttttctaaaaaaaaaaaaaaacgacagcaacggaattc

SEQ ID NO: 770 - protein, 349 aa, Homo sapien
MTAASMGPVRVAFVVLLALCSRPAVGQNCSGPCRCPDEPAPRCPAGVSLVLDGCGCCRVCAKQLGELCTERDPCDPHKGLFCDFGSPANRKIGVCTAKDGAPCIFGGTVYRSGESFQSSCKYQCTCLDGAVGCMPLCSMDVRLPSPDCPFPRRVKLPGKCCEEWVCDEPKDQTVVGPALAAYRLEDTFGPDPTMIRANCLVQTTEWSACSKTCGMGISTRVTNDNASCRLEKQSRLCMVRPCEADLEENIKKGKKCIRTPKISKPIKFELSGCTSMKTYRAKFCGVCTDGRCCTPHRTTTLPVEFKCPDGEVMKKNMMFIKTCACHYNCPGDNDIFESLYYRKMYGDMA

SEQ ID NO: 771 - DNA, 626 bp, Homo sapien
acatttgcttctgacacaactgtgttcactagcaacctcaaacagacaccatggtgcacctgactcctgaggagaagtctgccgttactgccctgtggggcaaggtgaacgtggatgaagttggtggtgaggccctgggcaggctgctggtggtctacccttggacccagaggttctttgagtcctttggggatctgtccactcctgatgctgttatgggcaaccctaaggtgaaggctcatggcaagaaagtgctcggtgcctttagtgatggcctggctcacctggacaacctcaagggcacctttgccacactgagtgagctgcactgtgacaagctgcacgtggatcctgagaacttcaggctcctgggcaacgtgctggtctgtgtgctggcccatcactttggcaaagaattcaccccaccagtgcaggctgcctatcagaaagtggtggctggtgtggctaatgccctggcccacaagtatcactaagctcgctttcttgctgtccaatttctattaaaggttcctttgttccctaagtccaactactaaactgggggatattatgaagggccttgagcatctggattctgcctaataaaaaacatttattttcattgc

SEQ ID NO: 772 - protein, 147 aa, Homo sapien
MVHLTPEEKSAVTALWGKVNVDEVGGEALGRLLVVYPWTQRFFESFGDLSTPDAVMGNPKVKAHGKKVLGAFSDGLAHLDNLKGTFATLSELHCDKLHVDPENFRLLGNVLVCVLAHHFGKEFTPPVQAAYQKVVAGVANALAHKYH

SEQ ID NO: 773 - DNA, 1314 bp, Homo sapien
atggcatccgttgcagttgatccacaaccgagtgtggtgactcgggtggtcaacctgcccttggtgagctccacgtatgacctcatgtcctcagcctatctcagtacaaaggaccagtatccctacctgaagtctgtgtgtgagatggcagagaacggtgtgaagaccatcacctccgtggccatgaccagtgctctgcccatcatccagaagctagagccgcaaattgcagttgccaatacctatgcctgtaaggggctagacaggattgaggagagactgcctattctgaatcagccatcaactcagattgttgccaatgccaaaggcgctgtgactggggcaaaagatgctgtgacgactactgtgactggggccaaggattctgtggccagcacgatcacaggggtgatggacaagaccaaaggggcagtgactggcagtgtggagaagaccaagtctgtggtcagtggcagcattaacacagtcttggggagtcggatgatgcagctcgtgagcagtggcgtagaaaatgcactcaccaaatcagagctgttggtagaacagtacctccctctcactgaggaagaactagaaaaagaagcaaaaaaagttgaaggatttgatctggttcagaagccaagttattatgttagactgggatccctgtctaccaagcttcactcccgtgcctaccagcaggctctcagcagggttaaagaagctaagcaaaaaagccaacagaccatttctcagctccattctactgttcacctgattgaatttgccaggaagaatgtgtatagtgccaatcagaaaattcaggatgctcaggataagctctacctctcatgggtagagtggaaaaggagcattggatatgatgatactgatgagtcccactgtgctgagcaatttgagtcacgtactcttgcaattgcccgcaacctgactcagcagctccagaccacgtgccacaccctcctgtccaacatccaaggtgtaccacagaacatccaagatcaagccaagcacatgggggtgatggcaggcgacatctactcagtgttccgcaatgctgcctcctttaaagaagtgtctgacagcctcctcacttctagcaaggggcagctgcagaaaatgaaggaatctttagatgacgtgatggattatcttgttaacaacacgcccctcaactggctggtaggtcccttttatcctcagctgactgagtctcagaatgctcaggaccaaggtgcagagatggacaagagcagccaggagacccagcgatctgagcataaaactcattaa

SEQ ID NO: 774 - protein, 437 aa, Homo sapien
MASVAVDPQPSVVTRVVNLPLVSSTYDLMSSAYLSTKDQYPYLKSVCEMAENGVKTITSVAMTSALPIIQKLEPQIAVANTYACKGLDRIEERLPILNQPSTQIVANAKGAVTGAKDAVTTTVTGAKDSVASTITGVMDKTKGAVTGSVEKTKSVVSGSINTVLGSRMMQLVSSGVENALTKSELLVEQYLPLTEEELEKEAKKVEGFDLVQKPSYYVRLGSLSTKLHSRAYQQALSRVKEAKQKSQQTISQLHSTVHLIEFARKNVYSANQKIQDAQDKLYLSWVEWKRSIGYDDTDESHCAEQFESRTLAIARNLTQQLQTTCHTLLSNIQGVPQNIQDQAKHMGVMAGDIYSVFRNAASFKEVSDSLLTSSKGQLQKMKESLDDVMDYLVNNTPLNWLVGPFYPQLTESQNAQDQGAEMDKSSQETQRSEHKTH

SEQ ID NO: 775 - DNA, 2222 bp, Homo sapien
catggccagcacatccaccaccatcaggagccacagcagcagccgccggggtttcagtgccaactcagccaggctccctggggtcagccgctctggcttcagcagcatctccgtgtcccgctccaggggcagtggtggcctgggtggtgcatgtggaggagctggctttggcagccgcagcttatatggcctggggggatccaagaggatctccattggagggggcagctgtgccatcagtggcggctatggcagcagagccagagcgagctatggctttggtggcgccgggagtggatttggtttcggtggtggagccggcattggctttgatctgggtggtggagccggccttgctggtggctttgggggccctggcttccctgtgtgcccccctggaggcatccaagaggtcactgtcaaccagagtctcctgactcccctcaacctgcaaattgaccccgccatccagcgggtgcgggccgaggagcgtgagcagatcaagaccctcaacaacaagtttgcctccttcatcgacaaggtgcggttcctggagcagcagaacaaggttctggaaacaaagtggaccctgctgcaggagcagggcaccaagactgtgaggcagaacctggagccgttgttcgagcagtacatcaacaacctcaggaggcagctggacagcattgtcggggaacggggccgcctggactcagagctcagaggcatgcaggacctggtggaggacttcaagaacaaatatgaggatgaaatcaacaagcgcacagcagcagagaatgaatttgtgactctgaagaaggatgtggatgctgcctacatgaacaaggttgaactgcaagccaaggcagacactctcacagacgagatcaacttcctgagagccttgtatgatgcagagctgtcccagatgcagacccacatctcagacacatctgtggtgctgtccatggacaacaaccgcaacctggacctggacagcatcatcgctgaggtcaaggcccaatatgaggagattgctcagagaagccgggctgaggctgagtcctggtaccagaccaagtacgaggagctgcaggtcacagcaggcagacatggggacgacctgcgcaacaccaagcaggagattgctgagatcaaccgcatgatccagaggctgagatctgagatcgaccacgtcaagaagcagtgcgccaacctgcaggccgccattgctgatgctgagcagcgtggggagatggccctcaaggatgccaagaacaagctggaagggctggaggatgccctgcagaaggccaagcaggacctggcccggctgctgaaggagtaccaggagctgatgaatgtcaagctggccctggacgtggagatcgccacctaccgcaagctgctggagggtgaggagtgcaggctgaatggcgaaggcgttggacaagtcaacatctctgtggtgcagtccaccgtctccagtggctatggcggtgccagtggtgtcggcagtggcttaggcctgggtggaggaagcagctactcctatggcagtggtcttggcgttggaggtggcttcagttccagcagtggcagagccattgggggtggcctcagctctgttggaggcggcagttccaccatcaagtacaccaccacctcctcctccagcaggaagagctataagcactaagtgcgtctgctagctctcggtcccacagtcctcaggcccctctctggctgcagagccctctcctcaggttgcctgtcctctcctggcctccagtctcccctgctgtcccaggtagagctggggatgaatgcttagtgccctcacttcttctctctctctctataccatctgagcacccattgctcaccatcagatcaacctctgattttacatcatgatgtaatcaccactggagcttcactgttactaaattattaatttcttgcctccagtgttctatctctgaggctgagcattataagaaaatgacctctgctccttttcattgcagaaaattgccaggggcttatttcagaacaacttccacttactttccactggctctcaaactctctaacttataagtgttgtgaacccccacccaggcagtatccatgaaagcacaagtgactagtcctatgatgtacaaagcctgtatctctgtgatgatttctgtgctcttcactctttgcaattgctaaataaa

SEQ ID NO: 776 - protein, 564 aa, Homo sapien
MASTSTTIRSHSSSRRGFSANSARLPGVSRSGFSSISVSRSRGSGGLGGACGGAGFGSRSLYGLGGSKRISIGGGSCAISGGYGSRARASYGFGGAGSGFGFGGGAGIGFDLGGGAGLAGGFGGPGFPVCPPGGIQEVTVNQSLLTPLNLQIDPAIQRVRAEEREQIKTLNNKFASFIDKVRFLEQQNKVLETKWTLLQEQGTKTVRQNLEPLFEQYINNLRRQLDSIVGERGRLDSELRGMQDLVEDFKNKYEDEINKRTAAENEFVTLKKDVDAAYMNKVELQAKADTLTDEINFLRALYDAELSQMQTHISDTSVVLSMDNNRNLDLDSIIAEVKAQYEEIAQRSRAEAESWYQTKYEELQVTAGRHGDDLRNTKQEIAEINRMIQRLRSEIDHVKKQCANLQAAIADAEQRGEMALKDAKNKLEGLEDALQKAKQDLARLLKEYQELMNVKLALDVEIATYRKLLEGEECRLNGEGVGQVNISVVQSTVSSGYGGASGVGSGLGLGGGSSYSYGSGLGVGGGFSSSSGRAIGGGLSSVGGGSSTIKYTTTSSSSRKSYKH

SEQ ID NO: 777 - DNA, 2218 bp, Homo sapien
catggccagcacatccaccaccatcaggagccacagcagcagccgccggggtttcagtgccagctcagccaggctccctggggtcagccgctctggcttcagcagcatctccgtgtcccgctccaggggcagtggtggcctgggtggcgcatgtggaggagctggctttggcagccgcagtctgtatggcctggggggctccaagaggatctccattggagggggcagctgtgccatcagtggcggctatggcagcagagccggaggcagctatggctttggtggcgccgggagtggatttggtttcggtggtggagccggcattggctttggtctgggtggtggagccggccttgctggtggctttgggggccctggcttccctgtgtgcccccctggaggcatccaagaggtcactgtcaaccagagtctcctgactcccctcaacctgcaaattgaccccgccatccagcgggtgcgggccgaggagcgtgagcagatcaagaccctcaacaacaagtttgcctccttcatcgacaaggtgcggttcctagagcagcagaacaaggttctggacaccaagtggaccctgctgcaggagcagggcaccaagactgtgaggcagaacctggagccgttgttcgagcagtacatcaacaacctcaggaggcagctggacagcatcgtgggggaacggggtcgtctggactcggagctgagaaacatgcaggacctggtggaggacctcaagaacaaatatgaggatgaaatcaacaagcgcacagcagcagagaatgaatttgtgactctgaagaaggatgtggatgctgcctacatgaacaaggttgaactgcaagccaaggcagacactcttacagatgagatcaacttcctgagagccttgtatgatgcagagctgtcccagatgcagacccacatctcagacacatccgtggtgctatccatggacaacaaccgcaacctggacctggacagcatcatcgctgaggtcaaggcccaatatgaggagattgctcagaggagcagggctgaggctgagtcctggtaccagacaaagtacgaggagctgcaggtcacagcaggcagacatggggacgacctgcgcaacaccaagcaggagattgctgagatcaaccgcatgatccagaggctgagatctgagatcgaccacgtcaagaagcagtgtgccaacctacaggctgccattgctgatgctgagcagcgtggggagatggccctcaaggatgctaagaacaagctggaagggctggaggatgccctgcagaaggccaagcaggacctggcccggctgctgaaggagtaccaggagctgatgaacgtcaagctggccctggacgtggagatcgccacctaccgcaagctgctggagggcgaggagtgcaggctgaatggcgaaggcgttggacaagtcaacatctctgtagtgcagtccaccgtctccagtggctatggcggtgccagcggtgtcggcagtggcttaggcctgggtggaggaagcagctactcctatggcagtggtcttggcgttggaggcggctttagttccagcagcggcagagccactgggggtggcctcagctctgttggaggcggcagttccaccatcaagtacaccaccacctcctcctccagcaggaagagctacaagcactgaagtcgtgccgccagctctcagtcccacagctctcaggcccctctctggcagcagagccctctcctcaggttgcttgtcctcccctggcctccagtctcccctgccctcccgggtagagctgggatgccctcacttttcttctcatcaatacctgttccactgagctcctgttgcttaccatcaagtcaacagttatcagcactcagacatgcgaatgtcctttttagttcccgtattattacaggtatctgagtctgccataattctgagaagaaaaatgacctatatccccataagaactgaaactcagtctaggtccagctgcagatgaggagtcctctctttaattgctaaccatcctgcccattatagctacactcaggagttctcatctgacaagtcagttgtcctgatcttctcttgcagtgtccctgaatggcaagtgatgtaccttctgatgcagtctgcattcctgcactgctttctctgctctctttgccttcttttgttctgttgaataaa

SEQ ID NO: 778 - protein, 564 aa, Homo sapien
MASTSTTIRSHSSSRRGFSASSARLPGVSRSGFSSISVSRSRGSGGLGGACGGAGFGSRSLYGLGGSKRISIGGGSCAISGGYGSRAGGSYGFGGAGSGFGFGGGAGIGFGLGGGAGLAGGFGGPGFPVCPPGGIQEVTVNQSLLTPLNLQIDPAIQRVRAEEREQIKTLNNKFASFIDKVRFLEQQNKVLDTKWTLLQEQGTKTVRQNLEPLFEQYINNLRRQLDSIVGERGRLDSELRNMQDLVEDLKNKYEDEINKRTAAENEFVTLKKDVDAAYMNKVELQAKADTLTDEINFLRALYDAELSQMQTHISDTSVVLSMDNNRNLDLDSIIAEVKAQYEEIAQRSRAEAESWYQTKYEELQVTAGRHGDDLRNTKQEIAEINRMIQRLRSEIDHVKKQCANLQAAIADAEQRGEMALKDAKNKLEGLEDALQKAKQDLARLLKEYQELMNVKLALDVEIATYRKLLEGEECRLNGEGVGQVNISVVQSTVSSGYGGASGVGSGLGLGGGSSYSYGSGLGVGGGFSSSSGRATGGGLSSVGGGSSTIKYTTTSSSSRKSYKH

SEQ ID NO: 779 - DNA, 1327 bp, Rattus norvegicus
ggcacgaggagcgaagtcccagtgcgcgccgcggcagcccgggcaccctccccttccgggcgtgagtcgctgtgaaaagagctgaagcgagcggactcgcaccggcagcgaggcgccgctcccgccgcctcagcccggccttcctcggctccggcgctccggtcgcggggcccgggttcctcggcacaccccgctccagccgcccccagagcctgtccccagcccttcggaagccccggcgccagcccgggccctcggcagggaggatgacggagctgcagtcggcactgctactgcgaagacagctggcagaactcaacaaaaatccagtggaaggcttttctgcaggtttaatagatgacaatgatctctaccgatgggaagtccttattattggccctccagatacactttatgaaggtggtgtttttaaggctcatcttactttcccaaaagattatcccctccgacctcctaaaatgaaattcattacagaaatctggcacccaaatgttgataaaaatggtgatgtgtgcatttctattcttcatgagcctggggaagataagtatggttatgaaaagccagaggaacgctggctccctatccacactgtggaaaccatcatgattagtgtcatttctatgctggcagaccctaatggagactcacctgctaatgttgatgctgcgaaagaatggagggaagatagaaatggagaatttaaaagaaaagttgcccgctgtgtaagaaaaagccaagagactgcttttgagtgacatttatttagcagctagtaacttcacttatttcagggtctccaattgagaaacatggcactgtttttcctgcactctacccacctattgctggacttctgttgtacaagttggcaaacactggctggaactgggctgcaataaaacatgccagttatcaatgctgacaagagcctaacaagtgccaacttacagatgattacgcattttgaattctaatgaactgttttaaccttcaggaagaattgtaaagacctgtacatagcacaacatgatccggataatatatatactgttcatgtacatccacaaatacaccttgtaccaaataatgctttcttgtagtagaataagaatcgtgtaaattctaagagattttagcaggttttctttcctattcattgtttcttatcagtttaaaaggattcctttaagcatgtcagatgaaaagcaattaggattaaaagtttccatttaatttcccttaaacccttgaggcttcattaaactcttttcacttactaaaaaaaaaaaaaaaaaaaaaaaaa

SEQ ID NO: 780 - protein, 170 aa, Rattus norvegicus
MTELQSALLLRRQLAELNKNPVEGFSAGLIDDNDLYRWEVLIIGPPDTLYEGGVFKAHLTFPKDYPLRPPKMKFITEIWHPNVDKNGDVCISILHEPGEDKYGYEKPEERWLPIHTVETIMISVISMLADPNGDSPANVDAAKEWREDRNGEFKRKVARCVRKSQETAFE

SEQ ID NO: 781 - DNA, 1944 bp, Homo sapien
aggctgtctgcagagatttgaaaaatggcaacaaatgaaagtgtcagcatctttagttcagcatccttggctgtggaatatgtagattcacttttacctgagaatcctctgcaagaaccatttaaaaatgcttggaactatatgttgaataattatacaaagttccagattgcaacatggggatcccttatagttcatgaagccctttatttcttattctgtttacctggatttttatttcaatttataccttatatgaaaaaatacaaaattcaaaaggataagccagagacatgggaaaaccaatggaagtgtttcaaagttcttctctttaatcacttctgtatccagctgcctttgatttgtggaacctattattttacagagtatttcaatattccttatgattgggaaagaatgccaagatggtattttcttttggcaagatgctttggttgtgcagtcattgaagatacttggcactattttctgcatagactcttacaccacaaaagaatatacaagtatattcataaagttcatcatgagtttcaggctccatttggaatggaagctgaatatgcacatcctttggagactctaattcttggaactggatttttcattggaatcgtgcttttgtgtgatcatgtaattcttctttgggcatgggtgaccattcgtttattagaaactattgatgtccatagtggttatgatattcctctcaaccctttaaatctgatccctttctatgctggttctcggcatcatgatttccaccacatgaacttcattggaaactatgcttcaacatttacatggtgggatcgaatttttggaacagactctcagtataatgcctataatgaaaagaggaagaagtttgagaaaaagactgaataaatatctcacgtaaaccttcctgaaagataaacgttttcctgaattcagaaactagtagctaacattgcttctggagagcagaaataagcatgtcttctggctactaagtgataaaaagaacattaacaacctttaattaccttcctagtgggaactttttctactttacctacaagttctatatatgtagaaatgaataaatatatatttaagtacagttttcatgaggaagttttaaaagaccatgttcctaagcttccaagaaggttttggatactagaagtattaatctatggcttttctcccagtaaaaccataggcctgaagttcacattgggtctttaaatcttttagatatatactggtcatttcagaaaattcttcatagtggtattggccttatatttaactttttttttattttttttttgagacaaagccacactctgtctccttggctggagtgtggtggcacagtctcagctcactgcaacctctgcctcccagttcaagcaattcttctgcctcagcctcccaagtagctgggattacaggcacccgccaccacgcccagctaatttttgtatttttgtagagatggggtttcacgatgttggccaggctggtctcaaacttctgacctcaagtgatctgcccaccttggcctcccaaagtgctgggattacaggtgtaagccactgcgcccggcctttttaactttaaacatgttttagaattcacctaaagatcaaaatatcatggattgaacctcatcaattgatagcagtgagtgactgaagcttccaaatcaagaaaagccggcaccaagaacttccattctaatctagagctgaccagtttgagctgattctctctttgaagagtccttcttgattgcagtgcagtactggcatttctgaatggatgtaagtggagtattttagtctaaaggcttttcaaattacttgaatttttttaaaaattgaggagctttatttctatttacccttccatttttgtgtgaaaaaaaaaaaaaaa

SEQ ID NO: 782 - protein, 293 aa, Homo sapien
MATNESVSIFSSASLAVEYVDSLLPENPLQEPFKNAWNYMLNNYTKFQIATWGSLIVHEALYFLFCLPGFLFQFIPYMKKYKIQKDKPETWENQWKCFKVLLFNHFCIQLPLICGTYYFTEYFNIPYDWERMPRWYFLLARCFGCAVIEDTWHYFLHRLLHHKRIYKYIHKVHHEFQAPFGMEAEYAHPLETLILGTGFFIGIVLLCDHVILLWAWVTIRLLETIDVHSGYDIPLNPLNLIPFYAGSRHHDFHHMNFIGNYASTFTWWDRIFGTDSQYNAYNEKRKKFEKKTE

SEQ ID NO: 783 - DNA, 1204 bp, Homo sapien
ctctgaggagaagcagcagcaaacatttgctagtcagacaagtgacagggaatggattccaaacagcagtgtgtaaagctaaatgatggccacttcatgcctgtattgggatttggcacctatgcacctccagaggttccgagaagtaaagctttggaggtcacaaaattagcaatagaagctgggttccgccatatagattctgctcatttatacaataatgaggagcaggttggactggccatccgaagcaagattgcagatggcagtgtgaagagagaagacatattctacacttcaaagctttggtccacttttcatcgaccagagttggtccgaccagccttggaaaactcactgaaaaaagctcaattggactatgttgacctctatcttattcattctccaatgtctctaaagccaggtgaggaactttcaccaacagatgaaaatggaaaagtaatatttgacatagtggatctctgtaccacctgggaggccatggagaagtgtaaggatgcaggattggccaagtccattggggtgtcaaacttcaaccgcaggcagctggagatgatcctcaacaagccaggactcaagtacaagcctgtctgcaaccaggtagaatgtcatccgtatttcaaccggagtaaattgctagatttctgcaagtcgaaagatattgttctggttgcctatagtgctctgggatctcaacgagacaaacgatgggtggacccgaactccccggtgctcttggaggacccagtcctttgtgccttggcaaaaaagcacaagcgaaccccagccctgattgccctgcgctaccagctgcagcgtggggttgtggtcctggccaagagctacaatgagcagcgcatcagacagaacgtgcaggtttttgagttccagttgactgcagaggacatgaaagccatagatggcctagacagaaatctccactattttaacagtgatagttttgctagccaccctaattatccatattcagatgaatattaacatggagagctttgcctgatgtctaccagaagccctgtgtgtggatggtgacgcagaggacgtctctatgccggtgactggacatatcacctctacttaaatccgtcctgtttagcgacttcagtcaactacagctgagtccataggccagaaagacaataaatttttatcattttgaaat

SEQ ID NO: 784 - protein, 323 aa, Homo sapien
MDSKQQCVKLNDGHFMPVLGFGTYAPPEVPRSKALEVTKLAIEAGFRHIDSAHLYNNEEQVGLAIRSKIADGSVKREDIFYTSKLWSTFHRPELVRPALENSLKKAQLDYVDLYLIHSPMSLKPGEELSPTDENGKVIFDIVDLCTTWEAMEKCKDAGLAKSIGVSNFNRRQLEMILNKPGLKYKPVCNQVECHPYFNRSKLLDFCKSKDIVLVAYSALGSQRDKRWVDPNSPVLLEDPVLCALAKKHKRTPALIALRYQLQRGVVVLAKSYNEQRIRQNVQVFEFQLTAEDMKAIDGLDRNLHYFNSDSFASHPNYPYSDEY

SEQ ID NO: 785 - DNA, 4860 bp, Homo sapien
gatcttaagaaagagagcaaggaggaagagcccggtggggagcaggtccttctcccccacccccctacccccaactcccactggagccgcattgagactgtaggcaccaccgggcgccgaatggctgttttctaactgggatcctcggtgacgtatggctgcctgccccttggcagctgtctttatggaccagtaggcagagcgaaattgacgctgacaagacttttgcatcttggaagggactgtaatctactgtagtgaagaacagagcctctcaatcagacgggtgtaaataagagacggaggggagtccaaaagaaaaggaagaggaggaaaaacaagtgtgtgttggggggaacagggggaaaagcatttttggtggatggtatgaagccagccatggaaactgcagccgaggaaaatactgaacaaagccaagagagaaaaggttcaggctgctttgaatgctgcatcaagtgtctgggaggagtcccctacgcctccctggtggccaccatcctctgcttctccggggtggccttattctgcggctgtgggcatgtggctctcgcaggcaccgtggcgattcttgagcaacacttctccaccaacgccagtgaccatgccttgctgagcgaggtgatacaactgatgcagtatgtcatctatggaattgcgtcctttttcttcttgtatgggatcattctgttggcagaaggcttttacaccacaagtgcagtgaaagaactgcacggtgagtttaaaacaaccgcttgtggccgatgcatcagtggaatgttcgttttcctcacctatgtgcttggagtggcctggctgggtgtgtttggtttctcagcggtgcccgtgtttatgttctacaacatatggtcaacttgtgaagtcatcaagtcaccgcagaccaacgggaccacgggtgtggagcagatctgtgtggatatccgacaatacggtatcattccttggaatgctttccccggaaaaatatgtggctctgccctggagaacatctgcaacacaaacgagttctacatgtcctatcacctgttcattgtggcctgtgcaggagctggtgccaccgtcattgccctgctgatctacatgatggctactacatataactatgcggttttgaagtttaagagtcgggaagattgctgcactaaattctaaattgcataaggagttttagagagctatgctctgtagcatgaaatatcactgacactccagactaaagcagagtctaggtttctgcaattttgttacagtaatttgtaaatagctttagtaaactcaccttgcatggtagattaataagatgacttactgtacatgaattacacaataatgagatctggtggctatttccacattttgaaaaggattcagttatttactgacagtggtgagcatcctttttaaaataatgttctcatacttaaacattagagagcagtatctttaaatgaattattaacactttggaatacttacattttctgttatttttgattgcctgataaccagtttcaatgatgaaaatgaaaacaagtgctgaagatgaaatggaagagaaccgttttaatctggattttgttttgtcacacctggaaaatactttgcaaatatgttctaaattgaaaacaatttttttatgatcacatggttcactaccaaatgaccctcaaataagccagatgaaaatttgaagaaaaaggtcacccagttctctggaaaaaaaaaaaaaaaaaaaaaaaaaaaaaggatttatatgtgggtagttttttttttggtacaacacaatcattctgttagagcccacaaaattggtaaccttaaattgtgtgttttggtaagtaataactaactgtttcctcatagctagttctcaagctgcatgtaagattttaacgggaagagaaaataggcctggacctgaaggtctcaaatatgttgagaagaaagtatgaactataaggaacttgagatgtagatttattttgcaggaaatacgaggaaaataggaaagaagtgtttgccgcatcaagtgtaaagaatgatactgaggatttttacattttatgaaatgaaataatggcatttacaaaatgaaaaatgtagtttcacaactaagttttgttaacagagactgcatgctttgcttatagttcttaattttggttttgacattcatttaattttttccatgttaaatatgtagtttaattatttactcaaaataaacattgttcatgcttttaggcctttgggggaattgatttttatccacaggtagaaaatggtctttgcacacactacacttatttcaaatatacaatgtgctcccgaactttcgcattagtctttaaaattactctcaaaatggtattaaaaaaaaaaaaaaaagcaccctctcgtatttcatttttgctttttcttaacaatacctttggccatttttttccagttcactatgtttgtatactaacttttcttcagccttttaatgcgaagccaactagtagagcatgctttcaggatctgacagctctgctagtagagcgagtatttattaatacagaattaaccttcgcccctttaaagtcaagtctgtctaatctaactagcgcctcgctttgccttctcacaatgctcactagccatcatgctcacccttctcttccagatccacttcctcatgatactgtcttctaactgggcttacttaaaggatgcgagcaaaatgcaggcttaccaggatatcaaagcaaaggaagaacaggaactgcaagatatccagtctcggtcaaaagaacaactcaattcttacacataaatgtttgccagagtgtttcggccgacgtatttacagctctgacaaatcatcagacagctgctctgcagtacagatgtgtatcccaccaaactaatgtagatgtacaaacacttcactgtctgtctcaagctgctgggatgtatctctaggaaaaccttccagtgggtaaatctttttctttagaacaaatattggaggtttcatgttagccattttaaaaggcaacactttgacaaaatgatcgttcatactttgggaatttgtggcatgttcacatttattgctagggcaattctaccaagacactcaatggaatatgtcacactccttaatagggacctgtgactccttaataaggacctgtgacatgcccagcatcaagggataagaccgtaaattcacatatatgccatctgtcctcaagtgttatctacataggaaataaaatggaattgatgtaaagttccatttctgacagctgacatttattaaactttggatcaaagataatgtgattcttatgattgatttctcaaactagcttttccctcccaagtccaggacccattaatttcctgagccaatcagaaatatatttttcaataatgctaaaattagctacaattctgctgaccctactattaaagaatctggatgctggactcactgacaagctttccagaagcaattttataacagatttcattttaacaaaatactgatccaattttcattattcttgagaaatgtcagctttgccttaatgagtatttgctttaaatttctaagaatttatatcataactagagacccaaatatctttcacagaattttgttccataaatgtttttcttaattattaagaagtgttaccttattaaaatgaccaccattctaaaccatttttcagtggtctggatacgaagtttacagtttcataccaactatctaaaacctaattgcaaattgaccacagacctctaacctcctacttttatagacttgaatacttaagtaatttaaattagggttggtatttcatttttttcttatctaaatcttagtttcctggaataataaagtttgatgttcagcaagagaactgcttgagtttaagccattttcaaaagaaacttgccttttacattattgtgttccagaacattaagtgactgtaggtactgggtattagtgatggtaaactttgtgttgctctttatgaaatgatccatataactgttgggtgcatcagtgcttttcaaaggggctgcttactatagggttaactatgtatattcattgttaagagttaacttgtggtttggctgtttcctggattttataacatacatgtgcagaaatgtattcaaatgaaaggaagcatacctttatcaagatgctattaaaattgaacatcaagtataatatttcatttggattctcttttttggttaatgcctaaaaatgcctatttgggatttttttttttttttaaattaagagaagctctcttctgtgtagaacagttgttccaaaatagcttagtgttttgttttcctgttgcatgacagatttaactattctttccagcagtggaggtgctgtcagagtccagtgttctagaagaggcagtgtctaaagcctaattttacttttctaattctggtagctattaccaggaatttttgaaagttttgtttaagtagtctaatatttttttatgtaaagagcattaaattttgctatgtataaatttttgtaacctaacagtgaatcaatattttctatcagtgccaagggcttcctgtagttctattcaagtgttacaataaatatttgtagataatagtcaatacttgtgtatgcttattttaaagatctatttaggtggaaatagttgtggatgtactaagagtaatgaaataaaattatagcttcattcacttgcctttttaccatacataaatcctatctttctttgttctcagtatggtttcactttt

SEQ ID NO: 786 - protein, 267 aa, Homo sapien
MKPAMETAAEENTEQSQERKGSGCFECCIKCLGGVPYASLVATILCFSGVALFCGCGHVALAGTVAILEQHFSTNASDHALLSEVIQLMQYVIYGIASFFFLYGIILLAEGFYTTSAVKELHGEFKTTACGRCISGMFVFLTYVLGVAWLGVFGFSAVPVFMFYNIWSTCEVIKSPQTNGTTGVEQICVDIRQYGIIPWNAFPGKICGSALENICNTNEFYMSYHLFIVACAGAGATVIALLIYMMATTYNYAVLKFKSREDCCTKF

SEQ ID NO: 787 - DNA, 1843 bp, Homo sapien
gggcacgagggcagagccagttcctagcgcagagccgcgcccgccatgagggagatcgtgcacatccaggcgggccagtgcgggaaccagatcggcaccaagttttgggaagtgatcagcgatgagcacggcatcgacccggccggaggctacgtgggagactcggcgctgcagctggagagaatcaacgtctactacaatgagtcatcgtctcagaaatatgtgcccagggccgccctggtggacttagagccaggcaccatggacagcgtgcggtctgggccttttgggcagcttttccggcctgacaacttcatctttggccagacgggtgcagggaacaactgggcgaaagggcactacacggagggcgcggagctggtggacgcagtgctggacgtggtgcggaaggagtgcgagcactgcgactgcctgcagggcttccagctcacgcactcgctgggcggcggcacgggctcaggcatgggcacgctgctcatcagcaagatccgtgaggagttcccggaccgcatcatgaacaccttcagcgtcatgccctcgcccaaggtgtcggacacggtggtggagccctacaatgccacactgtcggtgcaccagctggtggagaatacagacgagacctactgcatcgacaacgaggcgctctatgacatctgcttccgcactctgaagctgacaacgcccacctacggggacctcaaccacctggtgtccgccaccatgagtggggtcaccacctcgctgcgcttcccgggccagctcaatgctgacctgcgcaagctggcggtgaacatggtgcccttcccgcgcctgcacttcttcatgcctggcttcgcgccgctcaccagccgcggcagccagcagtaccgggccctgaccgtgcccgagctcacccagcagatgttcgacgccaggaacatgatggccgcctgcgatccgcgccatggccgctacctgaccgtggccaccgtgttccgcgggcccatgtccatgaaggaggtggacgagcagatgctggccatccagagtaagaacagcagctacttcgtggagtggattcccaacaacgtgaaggtggccgtgtgcgacatcccgccccgcggcctgaagatggcctccaccttcatcggcaacagcacggccatccaggagctgttcaagcgcatctccgagcagttctcagccatgttccggcgcaaggccttcctgcactggttcacgggtgagggcatggatgaaatggagttcaccgaggcggagagcaacatgaacgacctggtatccgagtaccagcagtaccaggatgccaccgccaatgacggggaggaagcttttgaggatgaggaagaggagatcgatggatagtcggaatagagccgccccaactcagatcctacaacacgcaagttccttcttgaaccctggtgcctcctaccctatggccctgaatggtgcactggtttaattgtgttggtgtcggcccctcacaaatgcagccaagtcatgtaattagtcatctggaacaaagactaaaaacagcagagaattgcgggttctacccagtcagaagatcacaccatggagactttctactagaggacttgaaagagaactgaggggccacaaaataaacttcaccttccattaagtgttcaagcatgtctgcaaattaggagggagttagaaacagtctttttcatcctttgtgatgaagcctgaaattgtgccgtgttgccttatatgaatatgcagtatgggactttgaaataatgattcataataaaatactaaacgtgtgtcttcaaaaaaaaaaaaaaaaaaa

SEQ ID NO: 788 - protein, 446 aa, Homo sapien
MREIVHIQAGQCGNQIGTKFWEVISDEHGIDPAGGYVGDSALQLERINVYYNESSSQKYVPRAALVDLEPGTMDSVRSGPFGQLFRPDNFIFGQTGAGNNWAKGHYTEGAELVDAVLDVVRKECEHCDCLQGFQLTHSLGGGTGSGMGTLLISKIREEFPDRIMNTFSVMPSPKVSDTVVEPYNATLSVHQLVENTDETYCIDNEALYDICFRTLKLTTPTYGDLNHLVSATMSGVTTSLRFPGQLNADLRKLAVNMVPFPRLHFFMPGFAPLTSRGSQQYRALTVPELTQQMFDARNMMAACDPRHGRYLTVATVFRGPMSMKEVDEQMLAIQSKNSSYFVEWIPNNVKVAVCDIPPRGLKMASTFIGNSTAIQELFKRISEQFSAMFRRKAFLHWFTGEGMDEMEFTEAESNMNDLVSEYQQYQDATANDGEEAFEDEEEEIDG

SEQ ID NO: 789 - DNA, 1410 bp, Homo sapien
gagctagctttgcaatatggcggccgaggcggacggaccgcttaaacggctgctcgtgccgattcttttacctgagaaatgctacgaccaacttttcgttcagtgggacttgcttcacgtcccctgcctcaagattctcctcagcaaaggcctggggctgggcattgtggctggctcacttctagtaaagctgccccaggtgtttaaaatccggggagccaagagtgctgaagggttgagtctccagtctgtaatgctggagctagtggcattgactgggaccatggtctacagcatcactaacaacttcccattcagctcttggggtgaagccttattcctgatgctccagacgatcaccatctgcttcctggtcatgcactacagaggacagactgtgaaaggtgtcgctttcctcgcttgctacggcctggtcctgctggtgcttctctcacctctgacgcccttgactgtagtcaccctgctccaggcctccaatgtgcctgctgtggtggtggggaggcttctccaggcagccaccaactaccacaacgggtacacaggccagctctcagccatcacagtcttcctgctgtttgggggctccctggcccgaatcttcacttccattcaggaaaccggagatcccctgatggctgggacctttgtggtctcctctctctgcaacggcctcatcgccgcccagctgctcttctactggaatgcaaagcctccccacaagcagaaaaaggcgcagtagagccagctactggagtcattccgtttccactcattcacccaacctcagggttctccccatctgagccagcctgctggtgtgacttactcatcctccattcctctgcacttgcagactttctgagccagggttttcttttagtggaaacaaatggttgatggatccagatccttagaaaaggagaggatgggggtagagtctcccaagccaaaattttgacatttgagtgctttcgtaagccctgtacatgtactattaattcagtcattcagccaagcctcctcctctagcagcaatttccagctgtttaacactatcctgggcaaatgttttaccctgtcctccagcctccctgcttcccttctggccctggaagactgagtctggacggcagagtggagggactgggaggctgtggctgcctccctccctcagcccggctgggactgtctcccggaccccagtgctggggtgggggaagggggacggagaatgactcaggcagggccccagggtggggtgaggaggttcctgctctggcaggtctaggcggaagggagtggagatggggctggttgctgctgcagtgaggggaacagatgggacaataaagactggagactcagttgaataatgcaaaaaaaaaaaaa

SEQ ID NO: 790 - protein, 247 aa, Homo sapien
MAAEADGPLKRLLVPILLPEKCYDQLFVQWDLLHVPCLKILLSKGLGLGIVAGSLLVKLPQVFKIRGAKSAEGLSLQSVMLELVALTGTMVYSITNNFPFSSWGEALFLMLQTITICFLVMHYRGQTVKGVAFLACYGLVLLVLLSPLTPLTVVTLLQASNVPAVVVGRLLQAATNYHNGYTGQLSAITVFLLFGGSLARIFTSIQETGDPLMAGTFVVSSLCNGLIAAQLLFYWNAKPPHKQKKAQ

SEQ ID NO: 791 - DNA, 1758 bp, Homo sapien
cgcccctttagggtgctcgccggctgtcgggtgtgggggtatgccaggccccggaggactcggcttccccgctaacccgacccgccgcaccccacccaggccaggtcagagcagcccaccatgggatggggagggggtggaggctgcaccccccgcccacccatccaccagcagccgccggagcgccgcgtggtcatcgttgtctttctcggcctcctgctggacctcctggccttcacgctgctgctgcccctgctgcccgggctgttggagagccacggccgtgcccacgaccccctctatggctcctggcagggcggggtggactggtttgccaccgccatcgggatgccagtggagaagaggtacaacagtgtcctgttcggaggtctcattggctcggcattctctgtcctgcagtttctgtgtgcgccactcactggggccacctctgactgcttggggaggcgcccggtgatgctgctgtgcctgatgggtgtggccacctcatatgcagtctgggccacctctcggagctttgcggccttcctggcctccaggctgattgggggcatcagcaaagggaacgtcagcctctccacggccatcgttgctgacctgggctcgcctctggcccgcagtcaaggcatggcggtcattggggtggccttctcactgggcttcaccctgggccctatgctcggagcctccctgcccctggaaatggcaccctggtttgccctgctcttcgcagcctccgacctgctgttcatcttctgcttcctgccagagacgctgcccctggagaaacgggcgccctctatcgccctggggttccgtgatgcggctgatctgctcagccccctggccctgctgcgcttctcggctgtcgctcgtggccaggacccaccctctggagacaggctcagcagcctgcgccgcctgggcctagtctacttcctctacctcttcctgttctcgggcctggagtacacgctgagcttcctcacacaccagcgcttccagttcagtagcctacagcaggggaagatgtttttcctcatcggcctcaccatggccaccatccagggtgcctatgcccggcggatccaccctggcggggaagttgctgccgtgaagcgggccctcctgctgctggtgcccgccttcctcctcatcggctggggacgttctctgcccgtgctgggcctggggctgctgctctactcctttgccgccgccgttgtggtgccctgcctgtcctccgtggtcgctggctatggctcaccagggcagaagggcacggtcatgggtacactgcgcagcctaggtgctctggccagggccgcggggcccctggtggccgcttcagtgtactggctggccggggcccaggcctgcttcaccacgtggtccgggctctttttgctccccttcttcctcctgcagaagctgagttacccggcacagacgctcaaggctgagtagctgagccactgtgcccaggctgtgggcaccaggcagagtgggagcctaggtcaggcccctgcccactgcctgacccccaccccccgccagtccagggagaccctgtgggtgggggccggcccctaagcaggaagctcaggcagctcctccagacttacttactccttcagtgactccgagctgcagcactccaaggctgtcagggcttctgtttgttttttaaactatgcaccaggtttctgatgatgaaataaagcacctgtttgtttt

SEQ ID NO: 792 - protein, 455 aa, Homo sapien
MGWGGGGGCTPRPPIHQQPPERRVVIVVFLGLLLDLLAFTLLLPLLPGLLESHGRAHDPLYGSWQGGVDWFATAIGMPVEKRYNSVLFGGLIGSAFSVLQFLCAPLTGATSDCLGRRPVMLLCLMGVATSYAVWATSRSFAAFLASRLIGGISKGNVSLSTAIVADLGSPLARSQGMAVIGVAFSLGFTLGPMLGASLPLEMAPWFALLFAASDLLFIFCFLPETLPLEKRAPSIALGFRDAADLLSPLALLRFSAVARGQDPPSGDRLSSLRRLGLVYFLYLFLFSGLEYTLSFLTHQRFQFSSLQQGKMFFLIGLTMATIQGAYARRIHPGGEVAAVKRALLLLVPAFLLIGWGRSLPVLGLGLLLYSFAAAVVVPCLSSVVAGYGSPGQKGTVMGTLRSLGALARAAGPLVAASVYWLAGAQACFTTWSGLFLLPFFLLQKLSYPAQTLKAE

SEQ ID NO: 793 - DNA, 2277 bp, Homo sapien
acgccctatacaacttggcttcacatacttttacactaactttatatgatttttaaaaactggtctgatcggacttctcgtcctgggacactgtttactggagtctggccggctctccgtgctcctcttggtacctcattttggggagaaccttaaacccactcgagcagataatctccgccttgaccggtgccaccaaagaagggttggaaccatgtggacttttctgggcattgccactttcacctatttttataagaagttcggggacttcatcactttggccaacagggaggtcctgttgtgcgtgctggtgttcctctcgctgggcctggtgctctcctaccgctgtcgccaccgaaacgggggtctcctcgggcgccagcggagcggctcccagttcgccctcttctcggatattctctcaggcctgcctttcattggcttcttctgggccaaatccccccctgaatcagaaaataaggagcagctcggggccaggaggcgcagaaaaggaaccaatatttcagaaacaagcttaataggaacagctgcctgtacatcaacatcttctcagaatgacccagaagttatcatcgtgggagctggcgtgcttggctctgctttggtagctgtgctttccagagatggaagaaaggtgacagtcattgagagagacttaaaagagcctgacagaatagttggagaattcctgcagccgggtggttatcatgttctcaaagaccttggtcttggagatacagtggaaggtcttgatgcccaggttgtaaatggttacatgattcatgatcaggaaagcaaatcagaggttcagattccttaccctctgtcagaaaacaatcaagtgcagagtggaagagctttccatcacggaagattcatcatgagtctccggaaagcagctatggcagagcccaatgcaaagtttattgaaggtgttgtgttacagttattagaggaagatgatgttgtgatgggagttcagtacaaggataaagagactggagatatcaaggaactccatgctccactgactgttgttgcagatgggcttttctccaagttcaggaaaagcctggtctccaataaagtttctgtatcatctcattttgttggctttcttatgaagaatgcaccacagtttaaagcaaatcatgctgaacttattttagctaacccgagtccagttctcatctaccggatttcatccagtgaaactcgagtacttgttgacattagaggagaaatgccaaggaatttaagagaatacatggttgaaaaaatttacccacaaatacctgatcacctgaaagaaccattcttagaagccactgacaattctcatctgaggtccatgctagcaagcttccttcctccttcatcagtgaagaaacgaggtgttcttcttttgggagacgcatataatatgaggcatccacttactggtggaggaatgactgttgcttttaaagatataaaactatggagaaaactgctaaagggtatccctgacctttatgatgatgcagctattttcgaggccaacaaatcattttactgggcaagaaaaacatctcattcctttgtcgtgaatatccttgctcaggctctttatgaattattttctgccacagatgattccctgcatcaactaagaaaagcctgttttctttatttcaaacttggtggcgaatgtgttgcgggtcctgttgggctgctttctgtattgtctcctaaccctctagctttaattggacacttctttgctgttgcaatctatgccgtgtatttttgctttaagtcagaaccttggattacaaaacctcgagcccttctcagtagtagtgctgtattgtacaaagcgtgttctgtaatatttcctctaatttactcagaaatgaagtatatggttcattaagcttaaaggggaaccatttgtgaatgaatatttggaacttaccaagtcctaagagacttttggaagaggatatatatagcatagtaccataccacttataaagtggaaactcttggaccaagatttggattaatttgtttttgaagttttttgtatataaatatgtaaatacatgctttaatttgcaatttaaaatgaaggggttaaataagttagacatttgaaagaaatgattgttaccataaattagtgctaatgctgaggagaactacagtttttcttttgaatttagtatttgagatgagttgttgggacatgcaaataaaatgaagaatgac

SEQ ID NO: 794 - protein, 574 aa, Homo sapien
MWTFLGIATFTYFYKKFGDFITLANREVLLCVLVFLSLGLVLSYRCRHRNGGLLGRQRSGSQFALFSDILSGLPFIGFFWAKSPPESENKEQLGARRRRKGTNISETSLIGTAACTSTSSQNDPEVIIVGAGVLGSALVAVLSRDGRKVTVIERDLKEPDRIVGEFLQPGGYHVLKDLGLGDTVEGLDAQVVNGYMIHDQESKSEVQIPYPLSENNQVQSGRAFHHGRFIMSLRKAAMAEPNAKFIEGVVLQLLEEDDVVMGVQYKDKETGDIKELHAPLTVVADGLFSKFRKSLVSNKVSVSSHFVGFLMKNAPQFKANHAELILANPSPVLIYRISSSETRVLVDIRGEMPRNLREYMVEKIYPQIPDHLKEPFLEATDNSHLRSMLASFLPPSSVKKRGVLLLGDAYNMRHPLTGGGMTVAFKDIKLWRKLLKGIPDLYDDAAIFEANKSFYWARKTSHSFVVNILAQALYELFSATDDSLHQLRKACFLYFKLGGECVAGPVGLLSVLSPNPLALIGHFFAVAIYAVYFCFKSEPWITKPRALLSSSAVLYKACSVIFPLIYSEMKYMVH

SEQ ID NO: 795 - DNA, 1450 bp, Homo sapien
ccaggcagcagttagcccgccgcccgcctgtgtgtccccagagccatggagagagccagtctgatccagaaggccaagctggcagagcaggccgaacgctatgaggacatggcagccttcccaggcagcagttagcccgccgcccgcctgtgtgtccccagagccatggagagagccagtctgatccagaaggccaagctggcagagcaggccgaacgctatgaggacatggcagccttcatgaaaggcgccgtggagaagggcgaggagctctcctgcgaagagcgaaacctgctctcagtagcctataagaacgtggtgggcggccagagggctgcctggagggtgctgtccagtattgagcagaaaagcaacgaggagggctcggaggagaaggggcccgaggtgcgtgagtaccgggagaaggtggagactgagctccagggcgtgtgcgacaccgtgctgggcctgctggacagccacctcatcaaggaggccggggacgccgagagccgggtcttctacctgaagatgaagggtgactactaccgctacctggccgaggtggccaccggtgacgacaagaagcgcatcattgactcagcccggtcagcctaccaggaggccatggacatcagcaagaaggagatgccgcccaccaaccccatccgcctgggcctggccctgaacttttccgtcttccactacgagatcgccaacagccccgaggaggccatctctctggccaagaccactttcgacgaggccatggctgatctgcacaccctcagcgaggactcctacaaagacagcaccctcatcatgcagctgctgcgagacaacctgacactgtggacggccgacaacgccggggaagaggggggcgaggctccccaggagccccagagctgagtgttgcccgccaccgccccgccctgccccctccagtccccgccctgccgagaggactagtatggggtgggaggccccacccttctcccctaggcgctgttcttgctccaaagggctccgtggagagggactggcagagctgaggccacctggggctggggatcccactcttcttgcagctgttgagcgcacctaaccactggtcatgcccccacccctgctctccgcacccgcttcctcccgaccccaggaccaggctacttctcccctcctcttgcctccctcctgcccctgctgcctcttgattcgtaggaattgaggagtgtctccgccttgtggctgagaactggacagtggcaggggctggagatgggtgtgtgtgtgtgtgtgtgtgtgtgtgtgtgcgcgcgcgccagtgcaagaccgagactgagggaaagcatgtctgctgggtgtgaccatgtttcctctcaataaagttcccctgtgacactcaaaaaaaaaaaaaaaaaaaaaaaaaaaaaaaaaaaaaaaaaaa

SEQ ID NO: 796 - protein, 248 aa, Homo sapien [sequence omitted]

SEQ ID NO: 797 - DNA, 3445 bp, Homo sapien
aagcacggccagcgcgctcggactgcaagagggttaaaagtgtagattggatttcacccctggaactctagcacgccgagtgaacttgaatctttggctatttaaggaggactgggtttgttgtgaagttgcggtgatccagcgcagagccccgtcctgattgatcgcatcgcgggggctcagatgactgtaaaatgaatagatgaaattcttgcttctcgaagattttcttgggcatctcccggaaagtgcgttttaaggcgaagtcatgatgtattctcccatctgtctcactcaggatgaatttcacccattcatcgaggcacttcttccacatgtccgtgcaattgcctatacttggttcaacctgcaggctcgaaaacgcaagtactttaaaaagcatgagaagcgaatgtcaaaggatgaagaaagagcagtcaaagatgagcttctcagtgaaaagcctgaaatcaaacagaagtgggcatccaggctccttgccaaactgcgcaaagatattcgccaggagtatcgagaggactttgtgctcaccgtgactggcaagaagcacccgtgctgtgtcttatccaatcccgaccagaagggtaagattaggagaatcgactgcctgcgacaggcagacaaagtctggcgtctggatctagtcatggtgatcctgttcaaaggcatccccttggaaagtaccgatggagagcggctcatgaaatccccacattgcacaaacccagcactttgtgtccagccacatcatatcacagtatcagttaaggagcttgatttgtttttggcatactacgtgcaggagcaagattctggacaatcaggaagtccaagccacaatgatcctgccaagaatcctccaggttaccttgaggatagttttgtaaaatctggagtcttcaatgtatcagaacttgtaagagtatccagaacgcccataacccagggaactggagtcaacttcccaattggagaaatcccaagccaaccatactatcatgacatgaactcgggggtcaatcttcagaggtctctgtcttctccaccaagcagcaaaagacccaaaactatatccatagatgaaaatatggaaccaagtcctacaggagacttttacccctctccaagttcaccagctgctggaagtcgaacatggcacgaaagagatcaagatatgtcttctccgactactatgaagaagcctgaaaagccattgttcagctctgcatctccacaggattcttccccaagactgagcactttcccccagcaccaccatcccggaatacctggagttgcacacagtgtcatctcaactcgaactccacctccaccttcaccgttgccatttccaacacaagctatccttcctccagccccatcgagctacttttctcatccaacaatcagatatcctccccacctgaatcctcaggatactctgaagaactatgtaccttcttatgacccatccagtccacaaaccagccagtcctggtacctgggctagcttggttcctttccaagtgtcaaataggacacccatcttaccggccaatgtccaaaattacggtttgaacataattggagaacctttccttcaagcagaaacaagcaactgagggaaaaagaaacacaacaatagtttaagaaattttttttttaaataaaaaaaaggaaaagaggaagactggacaaaacaacacaaaggcagaaaggaaagaaactgaagaaagaagataatagaccagcaattgcagcacttacaatcactaattcccttaaggttgaaactgtaatgacataaaaagggtcgatgatatttcactgatggtagatcgcagcccctgcaacgtagcctttgttacatgaagtccgctgggaaatagatgttctgtctctatgacaatatattttaactgactttctagatgccttaatatttgcatgataagctagttttattggtttagtattcttgttgtttacgcatggaatcactattcctggttatctcaccaacgaaggctaggaggcggcgtcagagatgctgggtgacagagccatgagccagccattttataagcactctgatttctaaaagttaaaaaaaatatatgaaatctctgtagcctttagttatcagtacagatttattaaatttcggcccttaacccagccttttccagtgtgtaacccagtttgaaatcttaaaaaaagaaaaatgaaaaaaaaaggaaaaaaagaaaaaaggaaaaaaacagtttgaacacaaaggctctatggaagaaatgcctctatgtaggtgaagtgttctctctgcatgcaacagtaaaaattaatataatattttccccacaaaagaaacacttaacagaggcaagtgcaatttataaatttatatctaaaggggaatcatgattataagtccttcagcccttggactctaaattgaggggattaaaaagaatttaaaataattttgaacgaatttattttcccctcagtttttgagggcattaaaaaggcattaaatcaagacaaatcatgtgcttgagaaaaataaaattaatgaaaacacagcacttatgttggtttagctgcagcctccttggaggtagaatttatttatttaaaattactggttgcatcaagaacccatagggtgtacaaaaggttctataaaatctgcattatagagacaaagaggcaggcaaatccatgtcacaagggtaaagcttacagtttacaaactgggaacgccagggtgtaggatataaaaacgcactcttgagaaaacaaatgtaatcagggtgctgaaaacttgcatggtgctttcagacattagccttgttcaacaaatttcttgtattgacagatccatagtgtgcatgggcagacacattttgcctctatgtctcttaaaattttaattaaaaatactctttccagtaatcctaatttgcacgaagatataatgtccacattacgtgccttgccttgaaatctaaaaaacaaaaaacaaaaaaaaaaaaacaaaaaaatacaacaaagtgacatcactacacttgttttgctgcatttattatcattttaaatctttaccatttttatgacaaaatattttgtactccagacgaagaaaaatgtgtgacatcatggattttttagacagttatacctttatctcacatttataaagcatatcatggctgtgtatagttgccgcttaaaaattgtaatcgaccagcaatattttcagtattttggtgtttttttctattaacctttcatgtttttcatcttccaattaatatttgggggggaggggtttcaaatttatacgaattatgcaataccaagttttgcctatgtaggtagtgcttttagctgtattggttattataggtaagtacacagattt

SEQ ID NO: 798 - protein, 420 aa, Homo sapien
MMYSPICLTQDEFHPFIEALLPHVRAIAYTWFNLQARKRKYFKKHEKRMSKDEERAVKDELLSEKPEIKQKWASRLLAKLRKDIRQEYREDFVLTVTGKKHPCCVLSNPDQKGKIRRIDCLRQADKVWRLDLVMVILFKGIPLESTDGERLMKSPHCTNPALCVQPHHITVSVKELDLFLAYYVQEQDSGQSGSPSHNDPAKNPPGYLEDSFVKSGVFNVSELVRVSRTPITQGTGVNFPIGEIPSQPYYHDMNSGVNLQRSLSSPPSSKRPKTISIDENMEPSPTGDFYPSPSSPAAGSRTWHERDQDMSSPTTMKKPEKPLFSSASPQDSSPRLSTFPQHHHPGIPGVAHSVISTRTPPPPSPLPFPTQAILPPAPSSYFSHPTIRYPPHLNPQDTLKNYVPSYDPSSPQTSQSWYLG

SEQ ID NO: 799 - DNA, 2424 bp, Homo sapien
cctggaactctagcacgccgagtgaacttgaatctttggctatttaaggaggactgggtttgttgtgaagttgcggtgatccagcgcagagccccgtcctgattgatcgcatcgcggggctcagatgactgtaaaatgaatagatgaaattcttgcttctcgaagattttcttgggcatctcccggaaagtgcgttttaaggcgaagtcatgatgtattctcccatctgtctcactcaggatgaatttcacccattcatggaagcacttcttccacatgtccgtgcaattgcctatacttggttcaacctgcaggctcgaaaacgcaagtactttaaaaagcatgagaagcgaatgtcaaaggatgaagaaagagcagtcaaagatgagcttctcagtgaaaagcctgaaatcaaacagaagtgggcatccaggctccttgccaaactgcgcaaagatattcgccaggagtatcgagaggactttgtgctcaccgtgactggcaagaagcacccgtgctgtgtcttatccaatcccgaccagaagggtaagattaggagaatcgactgcctgcgacaggcagacaaagtctggcgtctggatctagtcatggtgatcctgttcaaaggcatccccttggaaagtaccgatggagagcggctcatgaaatccccacattgcacaaacccagcactttgtgtccagccacatcatatcacagtatcagttaaggagcttgatttgtttttggcatactacgtgcaggagcaagattctggacaatcaggaagtccaagccacaatgatcctgccaagaatcctccaggttaccttgaggatagttttgtaaaatctggagtcttcaatgtatcagaacttgtaagagtatccagaacgcccataacccagggaactggagtcaacttcccaattggagaaatcccaagccaaccatactatcatgacatgaactcgggggtcaatcttcagaggtctctgtcttctccaccaagcagcaaaagacccaaaactatatccatagaygaaaatatggaaccaagtcctacaggagacttttacccctctccaagttcaccagctgctggaagtcgaacatggcacgaaagagatcaagatatgtcttctccgactactatgaagaagcctgaaaagccattgttcagctctgcatctccacaggattcttccccaagactgagcactttcccccagcaccaccatcccggaatacctggagttgcacacagtgtcatctcaactcgaactccacctccaccttcaccgttgccatttccaacacaagctatccttcctccagccccatcgagctacttttctcatccaacaatcagatatcctccccacctgaatcctcaggatactctgaagaactatgtaccttcttatgacccatccagtccacaaaccagccagtcctggtacctgggctagcttggttcctttccaagtgtcaaataggacacccatcttaccggccaatgtccaaaattacggtttgaacataattggagaacctttccttcaagcagaaacaagcaactgagggaaaaagaaacacaacaatagtttaagaaattttttttttaaataaaaaaaaggaaaagaggaagactggacaaaacaacacaaaggcagaaaggaaagaaactgaagaaagaagataatagaccagcaattgcagcacttacaatcactaattcccttaaggttaaactgtaatgacataaaaagggtcgatgatatttcactgatggtagatcgcagcccctgcaacgtagcctttgttacatgaagtccgctgggaaatagatgttctgtctctatgacaatatattttaactgactttctagatgccttaatatttgcatgataagctagttttattggtttagtattcttgttgtttacgcatggaatcactattcctggttatctcaccaacgaaggctaggaggcggcgtcagagatgctgggtgacagagccatgagccagccattttataagcactctgatttctaaaagttaaaaaaaatatatgaaatctctgtagcctttagttatcagtacagatttattaaatttcggcccttaacccagccttttccagtgtgtaacccagtttgaaatcttaaaaaaagaaaaaatgaaaaaaaaaggaaaaaaagaaaaaaggaaaaaaacagtttgaacacaaaggctctatggaagaaatgcctctatgtaggtgaagtgttctctctgcatgcaacagtaaaaattaatataatattttccccacaaaagaaacacttaacagagggcaagtgcaatttattaaatttatattcttaaagggggaattcatggattattaaggtccttcaggcccttggggactctta

SEQ ID NO: 800 - protein, 420 aa, Homo sapien
MMYSPICLTQDEFHPFMEALLPHVRAIAYTWFNLQARKRKYFKKHEKRMSKDEERAVKDELLSEKPEIKQKWASRLLAKLRKDIRQEYREDFVLTVTGKKHPCCVLSNPDQKGKIRRIDCLRQADKVWRLDLVMVILFKGIPLESTDGERLMKSPHCTNPALCVQPHHITVSVKELDLFLAYYVQEQDSGQSGSPSHNDPAKNPPGYLEDSFVKSGVFNVSELVRVSRTPITQGTGVNFPIGEIPSQPYYHDMNSGVNLQRSLSSPPSSKRPKTISIDENMEPSPTGDFYPSPSSPAAGSRTWHERDQDMSSPTTMKKPEKPLFSSASPQDSSPRLSTFPQHHHPGIPGVAHSVISTRTPPPPSPLPFPTQAILPPAPSSYFSHPTIRYPPHLNPQDTLKNYVPSYDPSSPQTSQSWYLG

SEQ ID NO: 801 - DNA, 2389 bp, Homo sapien
aggcgcggttgtgagtagtaccgggagtggggtgatcccgggctaggggagcgcggcggccgcgatcgggcttagtcggagctccgaagggagtgactaggacacccgggtgggctacttttcttccggtgcttttgctttttttttcctttgggctcgggctgagtgtcgcccactgagcaaagattccctcgtaaaacccagagcgaccctcccgtcaattgttgggctcgggagtgtcgcggtgccccgagcgcgccgggcgcggaggcaaagggagcggagccggccgcggacggggcccggagcttgcctgcctccctcgctcgccccagcgggttcgctcgcgtagagcgcagggcgcgcgcgatgaaggcggtgagcccggtgcgcccctcgggccgcaaggcgccgtcgggctgcggcggcggggagctggcgctgcgctgcctggccgagcacggccacagcctgggtggctccgcagccgcggcggcggcggcggcggcagcgcgctgtaaggcggccgaggcggcggccgacgagccggcgctgtgcctgcagtgcgatatgaacgactgctatagccgcctgcggaggctggtgcccaccatcccgcccaacaagaaagtcagcaaagtggagatcctgcagcacgttatcgactacatcctggacctgcagctggcgctggagacgcacccggccctgctgaggcagccaccaccgcccgcgccgccacaccacccggccgggacctgtccagccgcgccgccgcggaccccgctcactgcgctcaacaccgacccggccggcgcggtgaacaagcagggcgacagcattctgtgccgctgagccgcgctgtccaggtgtgcggccgcctgagcccgagccaggagcactagagagggagggggaagagcagaagttagagaaaaaaagccaccggaggaaaggaaaaaacatcggccaacctagaaacgttttcattcgtcattccaagagagagagaggaaagaaaaatacaactttcattctttctttgcacgttcataaacattctacatacgtattctcttttgtctcttcatttataactgctgtgaattgtacatttctgtgttttttggaggtgcagttaaacttttaagcttaagtgtgacaggactgataaatagaagatcaagagtagatccgactttagaagcctactttgtgaccaaggagctcaatttttgttttgaagctttactaatctaccagagcattgtagatattttttttttacatctattgtttaaaatagatgattataacggggcagagaactttcttttctctgcaagaatgttacatattgtatagataaatgagtgacatttcataccatgtatatatagagatgttctataagtgtgagaaagtatatgctttaatagatactgtaattataagatatttttaattaaatatttttttgtaaatattatgtgtgtgtttttttttaatctatgggaatatttcttttggaaaatcatttttcagctcaattacagagctcttgatatcttgaatgtcttttctgtttggcctggctcttaatttgcttttgttttgcccagtatagactcggaagtaacagttatagctagtggtcttgcatgattgcatgagatgtttaatcacaaattaaacttgttctgagtccattcaaatgtgtttttttaaatgtagattgaaatctttgtatttgaagcatacatgttgaaaatacaccttatcagtttttaagtacagggttttatagtgtaatatatacagagtaagtgtttgtttttgtttttcaactgaggtcaaaatggattctgaatgattttgcatatgggatgaggaaatgcttggatccttaaggagtttacgaaatctgctgttttatcaaagtgaaaaaaaattgcttattactcttcattttacactaaagcttaatgtcactaagtttcatgtctgtacagattatttaaatcatggaaatgaaaaaaatgttctctgcttgctaccaaaggacaaactcttggaaatgaacactttctgctttccttcctccaaagaattaataggcaacagtgggagaaaaaaaaggcataatggcaaatccttcaagcagggataaaagtcgatcttcaaacattaacttaagcagaccaaaaattctgatgaccgcatctagattatttttttataaaaatgattttcactatagctatgttacgctaagctactgtcccatctcttgtgatgtgtaacttttacatgtgaatattaaagtagatttctctgtcttgtaaaaaaaaaaaaaaaaaaaaaaaaaaaaaaaaaaaaaaaaaaaaaa

SEQ ID NO: 802 - protein, 161 aa, Homo sapien
MKAVSPVRPSGRKAPSGCGGGELALRCLAEHGHSLGGSAAAAAAAAAARCKAAEAAADEPALCLQCDMNDCYSRLRRLVPTIPPNKKVSKVEILQHVIDYILDLQLALETHPALLRQPPPPAPPHHPAGTCPAAPPRTPLTALNTDPAGAVNKQGDSILCR

SEQ ID NO: 803 - DNA, 3378 bp, Homo sapien
  Unsure 29, 1350, 3361, 3365: Unknown base
tagttctagatcgcgagcggccgacgagncggcgctgtgcctgcagtgcgatatgaacgactgctatagccgcctgcggaggctggtgcccaccatcccgcccaacaagaaagtcagcaaagtggagatcctgcagcacgttatcgactacatcctggacctgcagctggcgctggagacgcacccggccctgctgaggcagccaccaccgcccgcgccgccacaccacccggccgggacctgtccagccgcgccgccgcggaccccgctcactgcgctcaacaccgacccggccggcgcggtgaacaagcagggcgacagcattctgtgccgctgagccgcgctgtccaggtgtgcggtcgcctgagcccgagccaggagcactagagagggagggggaagagcagaagttagagaaaaaaagccaccggagaaaggaaaaaacatcggccaacctagaaacgttttcattcgtcattccaagagagagagaggaaagaaaaatacaactttcattctttctttgcacgttcataaacattctacatacgtattctcttttgtctcttcatttataactgctgtgaattgtacatttctgtgttttttggaggtgcagttaaacttttaagcttaagtgtgacaggactgataaatagaagatcaagagtagatccgactttagaagcctactttgtgaccaaggagctcaatttttgttttgaagctttactaatctaccagagcattgtagatattttttttttacatctattgtttaaaatagatgattataacggggcagagaactttcttttctctgcaagaatgttacatattgtatagataaatgagtgacatttcataccatgtatatatagagatgttctataagtgtgagaaagtatatgctttaatagatactgtaattataagatatttttaattaaatatttttttgtaaatattatgtgtgtgtttttttttaatctatgggaatatttcttttggaaaatcatttttcagctcaattacagagctcttgatatcttgaatgtcttttctgtttggcctggctcttaatttgcttttgttttgcccagtatagactcggaagtaacagttatagctagtggtcttgcatgattgcatgagatgtttaatcacaaattaaacttgttctgagtccattcaaatgtgtttttttaaatgtagattgaaatctttgtatttgaagcatacatgttgaaartacaccttatcagtttttaagtacagggttttatagtgtaatatatacagagtaagtgtttgtttttgtttttcaactgaggtcaaaatggattctgnaatgattttgcatatgggatgaggaaatgcttggatccttaaggagtttacgaaatctgctgttttatcaaagtgaaaaaaaattgcttattactcttcattttacactaaagcttaatgtcactaagtttcatgtctgtacagattatttaaatcatggaaatgaaaaaaatgttctctgcttgctaccaaaggacaaactcttggaaatgaacactttctgctttccttcctccaaagaattaataggcaacagtgggagaaaaaaaaggcataatggcaaatccttcaagcagggataaaagtcgatcttcaaacattaacttaagcagaccaaaaattctgatgaccgcatctagattatttttttataaaaatgattttcactatagctatgttacgctaagctactgtccaatctcttgtgatgtgtaacttttacatgtgaatattaaagtagatttctctgtcttgtactgtgatttctggtctcatttctttaaaaccttactcatttttcttttaaggctcttttttctccttaaggaaggtaatattttctaggttagataggactatcagggtttgtgaacattatgcatttaatgttatgggtactttacacacaagttagatggaatttttagagtgaaagaattaagtaggatttaattgggtgctttgtaaatagtcaactgtgtgtataacgtggtctgtttgatttttaaaaggaaaggatttgtttcagattatacaagaataaaagtattatagacccaagggacttcttatgaggtcaaattcagatatttatatgaatatgaaataccatggtccctagtagtcagttgaagtggcaatgtctaaacagaaatgaacaaaactaatgctagcaggttaaaatcaatcaaaatgtttaaaaattgattctgtcctcagcatgttayttcctcagctctgataatttactggtcttgagtattttgagaatttgatgttgaacgttataaagtcaaagaactgcttgtttagatgaggtttatttttatttttgatattattcattcttgtcacacatcaagaagaaaacactagagtgctgctggaattccaaatctgaagaattctaacgactgcattctttgttattaaaaagggcacaatccttcctttttatttggcagtttaatttcagtaggaagcatgtcacatgtgcactgttggttagaattatgcatctgtcatgcctgactgctgaaccctacctaagccttttggcgcagtttaaaacttatactggtggactgtgaacctcaaaacaaatgggtatttttgggttttgaggatagatgttactccttaaagtttgtatttggggcatgaaaaactactgaaagaagaaaagtgctacagatactacatttcaaagagttggcattttccctttggccactcaagcagcatttgatgtatctaaagaaacaaagtcattgtttattttttaaaaaattatatgcagttgtacaagatactacattccattgaaatgttggctatgtcctaaccaggcaaccagataacaaaaacattttgagtcttttatctaggtagttctaattattcagctacttagtttaacaaaggaaaatatcctgacttctctcatttcatttgtagacttttcattgtataggcacaaccaaagagtcagactggtttaaaactccagaaggaaaaaaagtatcccacacagtggatgttgtttctaagaatgctacaaaatcctgacatctcagacatctcaatgttaaaggaagaaaaaaaataccttttcatttcaaagaactaatatactttgatattgtgtaaaccttactcaagtttattgtcaagctttaactgcctttttagaactttttaaaatttcgagcccacaaatctattgtattagttgccttctataacaataaatcttcactgagcaaaaaaaaaaaaaaaaaaaaaaaaaaancccnggggggggggccc

SEQ ID NO: 804 - DNA, 1343 bp, Homo sapien
gctctttccaacgctgtaaaaaggacagaggctgttccctatggcagaaggcaaccacagaaaaaagccacttaaggtgttggaatccctgggcaaagatttcctcactggtgttttggataacttggtggaacaaaatgtactgaactggaaggaagaggaaaaaaagaaatattacgatgctaaaactgaagacaaagttcgggtcatggcagactctatgcaagagaagcaacgtatggcaggacaaatgcttcttcaaaccttttttaacatagaccaaatatcccccaataaaaaaggtgataaattgggtcacagaggcagaaatcacaatttatgttctgcaatatcctgcagctcatccgaatatggaggctggaccacctgagtcaggagaatctacagatgccctcaagctttgtcctcatgaagaattcctgagactatgtaaagaaagagctgaagagatctatccaataaaggagagaaacaaccgcacacgcctggctctcatcatatgcaatacagagtttgaccatctgcctccgaggaatggagctgactttgacatcacagggatgaaggagctacttgagggtctggactatagtgtagatgtagaagagaatctgacagccagggatatggagtcagcgctgagggcatttgctaccagaccagagcacaagtcctctgacagcacattcttggtactcatgtctcatggcatcctggagggaatctgcggaactgtgcatgatgagaaaaaaccagatgtgctgctttatgacaccatcttccagatattcaacaaccgcaactgcctcagtctgaaggacaaacccaaggtcatcattgtccaggcctgcagaggtgcaaaccgtggggaactgtgggtcagagactctccagcatccttggaagtggcctcttcacagtcatctgagaacctggaggaagatgctgtttacaagacccacgtggagaaggacttcattgctttctgctcttcaacgccacacaacgtgtcctggagagacagcacaatgggctctatcttcatcacacaactcatcacatgcttccagaaatattcttggtgctgccacctagaggaagtatttcggaaggtacagcaatcatttgaaactccaagggccaaagctcaaatgcccaccatagaacgactgtccatgacaagatatttctacctctttcctggcaattgaaaatggaagccacaagcagcccagccctccttaatcaacttcaaggagcaccttcattagtacagcttgcatatttaacattttgtatttcaataaaagtgaagacaaacg

SEQ ID NO: 805 - protein, 286 aa, Homo sapien
MEAGPPESGESTDALKLCPHEEFLRLCKERAEEIYPIKERNNRTRLALIICNTEFDHLPPRNGADFDITGMKELLEGLDYSVDVEENLTARDMESALRAFATRPEHKSSDSTFLVLMSHGILEGICGTVHDEKKPDVLLYDTIFQIFNNRNCLSLKDKPKVIIVQACRGANRGELWVRDSPASLEVASSQSSENLEEDAVYKTHVEKDFIAFCSSTPHNVSWRDSTMGSIFITQLITCFQKYSWCCHLEEVFRKVQQSFETPRAKAQMPTIERLSMTRYFYLFPGN

SEQ ID NO: 806 - DNA, 2049 bp, Homo sapien
gagcccagccgagcgtccgccgctgcccgtgcgcctctgcgctccgcgccatggccggcctcaactccctggaggcggtgaaacgcaagatccaggccctgcagcagcaggcggacgaggcggaagaccgcgcgcagggcctgcagcgggagctggacggcgagcgcgagcggcgcgagaaagctgaaggtgatgtggccgccctcaaccgacgcatccagctcgttgaggaggagttggacagggctcaggaacgactggccacggccctgcagaagctggaggaggcagaaaaagctgcagatgagagtgagagaggaatgaaggtgatagaaaaccgggccatgaaggatgaggagaagatggagattcaggagatgcagctcaaagaggccaagcacattgcggaagaggctgaccgcaaatacgaggaggtagctcgtaagctggtcatcctggagggtgagctggagagggcagaggagcgtgcggaggtgtctgaactaaaatgtggtgacctggaagaagaactcaagaatgttactaacaatctgaaatctctggaggctgcatctgaaaagtattctgaaaaggaggacaaatatgaagaagaaattaaacttctgtctgacaaactgaaagaggctgagacccgtgctgaatttgcagagagaacggttgcaaaactggaaaagacaattgatgacctggaagagaaacttgcccaggccaaagaagagaacgtgggcttacatcagacactggatcagacactaaacgaacttaactgtatataagcaaaacagaagagtcttgttccaacagaaactctggagctccgtgggtctttctcttctcttgtaagaagttccttttgttattgccatcttcgctttgctggaaatgtcaagcaaattatgaatacatgaccaaatattttgtatcggagaagctttgagcaccagttaaatctcattccttccctttttttttcaaatggcaccagctttttcagctctcttattttttccttaagtagcatttattcctaaggtaggcagggtatttcctagtaagcatactttcttaagacggaggccatttggttcctgggagaataggcagccccacactttgaagaatacagaccccagtatctagtcgtggatataattaaaacgctgaagaccataaccttttgggtcaactgttggtcaaactataggagagaccagggaccatcacatgggtagggattttccatccagagccaataaaaggactggtgggggccgggggtggctattgtgggaagtcataacccacagatagatcaacctaagaatcctggcccttctccactctccaccatgcaggacaaacatcttctcaagcagtcaacgtagaatgcttgggaaatagtcataattacccacatatagtaattaatagatggtaattaattgatccttgatgtgatgttcttttgcatatttccttcattctaaagttgttccctggccgggagcgtttgctttcgcctgtaatcccaacactttgggaggccaggacagatcacttgaggtcaggagttcgagaccagcccagccaacatggcgaaaccatgtctctactaaaaatacaaaaattatggtgacgcctgcctgtagtcccagctactcgggaggctgaggcaggaggatcgcttgaacccaggaagtggagactgcagtgagccgatatcgcaccacagcgctccagcctggtcgacagagtgagactccatctcaagaaaaaataaaaataaagttgttctctgaagagcaaatgtctcattccagtaatgacccactcagcaggaatatggtggagttcagtccaattcaggtcagccatatccaaaagaccacaagtcattactaagttgagcaaaagagtttttatctattagcagaaagggcctctctggcagcagagattaaaaactggcccaacttcatttccatacttcagggaacagcaaattgaggatttacttatctaggactt

SEQ ID NO: 807 - protein, 248 aa, Homo sapien
MAGLNSLEAVKRKIQALQQQADEAEDRAQGLQRELDGERERREKAEGDVAALNRRIQLVEEELDRAQERLATALQKLEEAEKAADESERGMKVIENRAMKDEEKMEIQEMQLKEAKHIAEEADRKYEEVARKLVILEGELERAEERAEVSELKCGDLEEELKNVTNNLKSLEAASEKYSEKEDKYEEEIKLLSDKLKEAETRAEFAERTVAKLEKTIDDLEEKLAQAKEENVGLHQTLDQTLNELNCI

SEQ ID NO: 808 - DNA, 1451 bp, Homo sapien
ggcacgaggggaaggtggccgagcgcccgcgctgcccactcgctcgctcgcgcactcagacgcgcgccacaacagcgcgccccaagctgcgcagctctgcaaaagtttctgctcgggatctggctctcttccccttggactttagaacgatttagggttgacagaggaaagcagaggcgcgcaggaggagcagaaaacaccaccttctgcagttggaggcaggcagccccggctgcactctagccgccgcgcccggagccggggccgacccgccactatccgcagcagcctcggccaggaggcgacccgggcgcctgggtgtgtggctgctgttgcgggacgtcttcgcggggcgggaggctcgcgccgcagccagcgccatgcaaaactacaagtacgacaaagcgatcgtcccggagagcaagaacggcggcagcccggcgctcaacaacaacccgaggaggagcggcagcaagcgggtgctgctcatctgcctcgacctcttctgcctcttcatggcgggcctccccttcctcatcatcgagacaagcaccatcaagccttaccaccgagggttttactgcaatgatgagagcatcaagtacccactgaaaactggtgagacaataaatgacgctgtgctctgtgccgtggggatcgtcattgccatcctcgcgatcatcacgggggaattctaccggatctattacctgaagaagtcgcggtcgacgattcagaacccctacgtggcagcactctataagcaagtgggctgcttcctctttggctgtgccatcagccagtctttcacagacattgccaaagtgtccatagggcgcctgcgtcctcacttcttgagtgtctgcaaccctgatttcagccagatcaactgctctgaaggctacattcagaactacagatgcagaggtgatgacagcaaagtccaggaagccaggaagtccttcttctctggccatgcctccttctccatgtacactatgctgtatttggtgctatacctgcaggcccgcttcacttggcgaggagcccgcctgctccggcccctcctgcagttcaccttgatcatgatggccttctacacgggactgtctcgcgtatcagaccacaagcaccatcccagtgatgttctggcaggatttgctcaaggagccctggtggcctgctgcatagttttcttcgtgtctgacctcttcaagactaagatgacgctctccctgcctgcccctgctatccggaaggaaatcctttcacctgtggacattattgacaggaacaatcaccacaacatgatgtaggtgccacccacctcctgagctgtttttgtaaaatgactgctgacagcaagttcttgctgctctccaatctcatcagacagtagaatgtagggaaaaacttttgcccgactgatttttaaaaaaaaaaaaaaaaaa

SEQ ID NO: 809 - protein, 311 aa, Homo sapien
MQNYKYDKAIVPESKNGGSPALNNNPRRSGSKRVLLICLDLFCLFMAGLPFLIIETSTIKPYHRGFYCNDESIKYPLKTGETINDAVLCAVGIVIAILAIITGEFYRIYYLKKSRSTIQNPYVAALYKQVGCFLFGCAISQSFTDIAKVSIGRLRPHFLSVCNPDFSQINCSEGYIQNYRCRGDDSKVQEARKSFFSGHASFSMYTMLYLVLYLQARFTWRGARLLRPLLQFTLIMMAFYTGLSRVSDHKHHPSDVLAGFAQGALVACCIVFFVSDLFKTKMTLSLPAPAIRKEILSPVDIIDRNNHHNMM

SEQ ID NO: 810 - DNA, 2100 bp, Homo sapien
ggcacgagctctctctctctctctctctctctctcgccgccatgacgctgcgcggcgccgtcttcgaccttgacggggtgctggcgctgccagcggtgttcggcgtcctcggccgcacggaggaggccctggcgctgcccagaggacttctgaatgatgctttccagaaagggggaccagagggtgccactacccggcttatgaaaggagagatcacactttcccagtggataccactcatggaagaaaactgcaggaagtgctccgagaccgctaaagtctgcctccccaagaatttctccataaaagaaatctttgacaaggcgatttcagccagaaagatcaaccgccccatgctccaggcagctctcatgctcaggaagaaaggattcactactgccatcctcaccaacacctggctggacgaccgtgctgagagagatggcctggcccagctgatgtgtgagctgaagatgcactttgacttcctgatagagtcgtgtcaggtgggaatggtcaaacctgaacctcagatctacaagtttctgctggacaccctgaaggccagccccagtgaggtcgtttttttggatgacatcggggctaatctgaagccagcccgtgacttgggaatggtcaccatcctggtccaggacactgacacggccctgaaagaactggagaaagtgaccggaatccagcttctcaataccccggcccctctgccgacctcttgcaatccaagtgacatgagccatgggtacgtgacagtaaagcccagggtccgtctgcattttgtggagctgggctggcctgctgtgtgcctctgccatggatttcccgagagttggtattcttggaggtaccagatccctgctctggcccaggcaggttaccgggtcctagctatggacatgaaaggctatggagagtcatctgctcctcccgaaatagaagaatattgcatggaagtgttatgtaaggagatggtaaccttcctggataaactgggcctctctcaagcagtgttcattggccatgactggggtggcatgctggtgtggtacatggctctcttctaccccgagagagtgagggcggtggccagtttgaatactcccttcataccagcaaatcccaacatgtcccctttggagagtatcaaagccaacccagtatttgattaccagctctacttccaagaaccaggagtggctgaggctgaactggaacagaacctgagtcggactttcaaaagcctcttcagagcaagcgatgagagtgttttatccatgcataaagtctgtgaagcgggaggactttttgtaaatagcccagaagagcccagcctcagcaggatggtcactgaggaggaaatccagttctatgtgcagcagttcaagaagtctggtttcagaggtcctctaaactggtaccgaaacatggaaaggaactggaagtgggcttgcaaaagcttgggacggaagatcctgattccggccctgatggtcacggcggagaaggacttcgtgctcgttcctcagatgtcccagcacatggaggactggattccccacctgaaaaggggacacattgaggactgtgggcactggacacagatggacaagccaaccgaggtgaatcagatcctcattaagtggctggattctgatgcccggaacccaccggtggtctcaaagatgtagaacgcagcgtagtgcccacgctcagcaggtgtgccatccttccacctgctggggcaccattcttagtatacagaggtggccttacacacatcttgcatggatggcagcattgttctgaaggggtttgcagaaaaaaaagattttctttacataaagtgaatcaaatttgacattattttagatcccagagaaatcaggtgtgattagttctccaggcatgaatgcatcgtccctttatctgtaagaacccttagtgtcctgtagggggacagaatggggtggccaggtggtgatttctctttgaccaatgcatagtttggcagaaaaatcagccgttcatttagaagaatcttagcagagattgggatgccttactcaataaagctaagatgac

SEQ ID NO: 811 - protein, 554 aa, Homo sapien
MTLRGAVFDLDGVLALPAVFGVLGRTEEALALPRGLLNDAFQKGGPEGATTRLMKGEITLSQWIPLMEENCRKCSETAKVCLPKNFSIKEIFDKAISARKINRPMLQAALMLRKKGFTTAILTNTWLDDRAERDGLAQLMCELKMHFDFLIESCQVGMVKPEPQIYKFLLDTLKASPSEVVFLDDIGANLKPARDLGMVTILVQDTDTALKELEKVTGIQLLNTPAPLPTSCNPSDMSHGYVTVKPRVRLHFVELGWPAVCLCHGFPESWYSWRYQIPALAQAGYRVLAMDMKGYGESSAPPEIEEYCMEVLCKEMVTFLDKLGLSQAVFIGHDWGGMLVWYMALFYPERVRAVASLNTPFIPANPNMSPLESIKANPVFDYQLYFQEPGVAEAELEQNLSRTFKSLFRASDESVLSMHKVCEAGGLFVNSPEEPSLSRMVTEEEIQFYVQQFKKSGFRGPLNWYRNMERNWKWACKSLGRKILIPALMVTAEKDFVLVPQMSQHMEDWIPHLKRGHIEDCGHWTQMDKPTEVNQILIKWLDSDARNPPVVSKM

SEQ ID NO: 812 - DNA, 1594 bp, Homo sapien
gcccgccggtccacgccgcgcaccgctccgagggccagcgccacccgctccgcagccggcaccatgcgcgagatcgtgcacatccaggcgggccagtgcggcaaccagatcggcgccaagttttgggaggtcatcagcgatgagcatgggatcgaccccacaggcagttaccatggagacagtgacttgcagctggagagaatcaacgtgtactacaatgaggctgctggtaacaaatatgtacctcgggccatcctggtggatctggagcctggcaccatggactctgtcaggtctggacccttcggccagatcttcagaccagacaacttcgtgttcggccagagtggagccgggaataactgggccaagggccactacacagagggagccgagctggtcgactcggtcctggatgtggtgaggaaggagtcagagagctgtgactgtctccagggcttccagctgacccactctctggggggcggcacggggtccgggatgggcaccctgctcatcagcaagatccgggaagagtacccagaccgcatcatgaacaccttcagcgtcatgccctcacccaaggtgtcagacacggtggtggagccctacaacgccaccctctcggtccaccagctggtggaaaacacagatgaaacctactccattgataacgaggccctgtatgacatctgcttccgcaccctgaagctgaccacccccacctacggggacctcaaccacctggtgtcggccaccatgagcggggtcaccacctgcctgcgcttcccgggccagctgaacgcagacctgcgcaagctggcggtgaacatggtgcccttccctcgcctgcacttcttcatgcccggcttcgcgcccctgaccagccggggcagccagcagtaccgggcgctcacggtgcccgagctcacccagcagatgttcgactccaagaacatgatggccgcctgcgacccgcgccacggccgctacctgacggtggctgccatcttccggggccgcatgtccatgaaggaggtggacgagcagatgctcaacgtgcagaacaagaacagcagctacttcgtggagtggatccccaacaacgtgaagacggccgtgtgcgacatcccgccccgcggcctgaagatgtcggccaccttcatcggcaacagcacggccatccaggagctgttcaagcgcatctccgagcagttcacggccatgttccggcgcaaggccttcctgcactggtacacgggcgagggcatggacgagatggagttcaccgaggccgagagcaacatgaacgacctggtgtccgagtaccagcagtaccaggacgccacggccgacgaacaaggggagttcgaggaggaggagggcgaggacgaggcttaaaaacttctcagatcaatcgtgcatccttagtgaacttctgttgtcctcaagcatggtctttctacttgtaaactatggtgctcagttttgcctctgttagaaattcacactgttgatgtaatgatgtggaactcctctaaaaattacagtattgtctgtgaaggtatctatactaataaaaaagcatgtgtag

SEQ ID NO: 813 - protein, 445 aa, Homo sapien
MREIVHIQAGQCGNQIGAKFWEVISDEHGIDPTGSYHGDSDLQLERINVYYNEAAGNKYVPRAILVDLEPGTMDSVRSGPFGQIFRPDNFVFGQSGAGNNWAKGHYTEGAELVDSVLDVVRKESESCDCLQGFQLTHSLGGGTGSGMGTLLISKIREEYPDRIMNTFSVMPSPKVSDTVVEPYNATLSVHQLVENTDETYSIDNEALYDICFRTLKLTTPTYGDLNHLVSATMSGVTTCLRFPGQLNADLRKLAVNMVPFPRLHFFMPGFAPLTSRGSQQYRALTVPELTQQMFDSKNMMAACDPRHGRYLTVAAIFRGRMSMKEVDEQMLNVQNKNSSYFVEWIPNNVKTAVCDIPPRGLKMSATFIGNSTAIQELFKRISEQFTAMFRRKAFLHWYTGEGMDEMEFTEAESNMNDLVSEYQQYQDATADEQGEFEEEEGEDEA

SEQ ID NO: 814 - DNA, 2075 bp, Homo sapien
ggcaggaggtgatatttgacaggctgcgcgcgggcgagctgccgcggagcacccggcaggggctgacagcatggcctcgcccgacccgcccgccaccagctacgccccgtccgacgtgccctcgggggtcgcgctgttcctcaccatccctttcgccttcttcctgcccgagctgatatttgggttcttggtctggaccatggtagccgccacccacatagtataccccttgctgcaaggatgggtgatgtatgtctcgctcacctcgtttctcatctccttgatgttcctgttgtcttacttgtttggattttacaaaagatttgaatcctggagagttctggacagcctgtaccacgggaccactggcatcctgtacatgagcgctgccgtcctacaagtacatgccacgattgtttctgagaaactgctggacccaagaatttactacattaattcggcagcctcgttcttcgccttcatcgccacgctgctctacattctccatgccttcagcatctattaccactgatgcacaggcgccaggccaagggggaaatgctctttgaaagctccaattattggtccccaaaagcagcttccaacgtttgccatctggatgacaaacggaagatccactaaaacgtccacgggattaacagaacgtccttgcagactgagcgatgacaccacactttgtttggacatttaaattcactctgctgaataggaggaagcttttctttttcctgggaaaacaactgtctcttggaattatctgaccatgaacttgctcttctagacaactcacatcaaagccctcactccactaatggagaatcctagccccactaatgccaagtctgtttggggattttgcctcagctatgggcttccctagagtaggtctaggggaatactcagtctgatcttttttttgtttgttttattttgttttttttgagacggagtctcgctcttcctccaaggctggagtgcagtgacgcgatctccactcactgcaggctccgcctcccgggttcccgccattctcctgcctcagcctcccgagtagccgggactacaggcgcccaccaccatgcccggctaatttagttgtatttttagtagagatggggtttcaccgtattagccaggatggtctcgatctcctgacctcgtgatccgcccgcctcggcctcccaaagtgctgggattacaggcgtgagccaccgtgcccggcctgattctcttaaaattgaagaggtgctgccaaggccttcagatctaacgcagatgcatagaccttgttcctggtacttgttcagcctgtgctggggagccgtggtcccgagttccctgggaggctgacagggtcaagccaccctgcccaccaccctcccacttcccctcccctttcctctccagcattaggattcaagggaaatctgcatgaagccaattttgagggtagacgtgtggggaaaataaatcattatacagtaagacctggggcttgaggggtggggaatggggagggaagggcatagcctgctcctccatgagtctgacatctcggaaactgagcagctgccggacgcctgggtcaggaatccaagaccccacctcttaaggactggttcctcagaaagcaccctcagggaaaaaggtgaaaacattacatccgtggattctcctgccacaaccgcattggaagaaaaggctgccgcaacatctcagcgaggagtgaaggacccatgtcccaggaaccgcgctgcgccacctgcactcacccccctcacattctcttaagcacccggtggccctccgaggcctggcggaatggtggtgcccacggggttgggcaagggctcaccaggacctcaacgggcaaagttgtgcacactaaaatatcaaatcaaggtgcttggttttaaagtaaatgtttttctaaagaaagctgtgttcttctgttgacccagacgaatagggcacagccctgtaactgcacgtgccttctgtcattgggaatgaaataaattattacgagaaagggaaaaaaaaaaaaaaaaaaa

SEQ ID NO: 815 - protein, 153 aa, Homo sapien
MASPDPPATSYAPSDVPSGVALFLTIPFAFFLPELIFGFLVWTMVAATHIVYPLLQGWVMYVSLTSFLISLMFLLSYLFGFYKRFESWRVLDSLYHGTTGILYMSAAVLQVHATIVSEKLLDPRIYYINSAASFFAFIATLLYILHAFSIYYH

SEQ ID NO: 816 - DNA, 1925 bp, Homo sapien
agtggagtgggacaggtatataaaggaagtacagggcctggggaagaggccctgtctaggtagctggcaccaggagccgtgggcaagggaagaggccacaccctgccctgctctgctgcagccagaatgggtgtgaaggcgtctcaaacaggctttgtggtcctggtgctgctccagtgctgctctgcatacaaactggtctgctactacaccagctggtcccagtaccgggaaggcgatgggagctgcttcccagatgcccttgaccgcttcctctgtacccacatcatctacagctttgccaatataagcaacgatcacatcgacacctgggagtggaatgatgtgacgctctacggcatgctcaacacactcaagaacaggaaccccaacctgaagactctcttgtctgtcggaggatggaactttgggtctcaaagattttccaagatagcctccaacacccagagtcgccggactttcatcaagtcagtaccgccattcctgcgcacccatggctttgatgggctggaccttgcctggctctaccctggacggagagacaaacagcattttaccaccctaatcaaggaaatgaaggccgaatttataaaggaagcccagccagggaaaaagcagctcctgctcagcgcagcactgtctgcggggaaggtcaccattgacagcagctatgacattgccaagatatcccaacacctggatttcattagcatcatgacctacgattttcatggagcctggcgtgggaccacaggccatcacagtcccctgttccgaggtcaggaggatgcaagtcctgacagattcagcaacactgactatgctgtggggtacatgttgaggctgggggctcctgccagtaagctggtgatgggcatccccaccttcgggaggagcttcactctggcttcttctgagactggtgttggagccccaatctcaggaccgggaattccaggccggttcaccaaggaggcagggacccttgcctactatgagatctgtgacttcctccgcggagccacagtccatagaaccctcggccagcaggtcccctatgccaccaagggcaaccagtgggtaggatacgacgaccaggaaagcgtcaaaagcaaggtgcagtacctgaaggataggcagctggcaggcgccatggtatgggccctggacctggatgacttccagggctccttctgcggccaggatctgcgcttccctctcaccaatgccatcaaggatgcactcgctgcaacgtagccctctgttctgcacacagcacgggggccaaggatgccccgtccccctctggctccagctggccgggagcctgatcacctgccctgctgagtcccaggctgagcctcagtctccctcccttggggcctatgcagaggtccacaacacacagatttgagctcagccctggtgggcagagaggtagggatggggctgtggggatagtgaggcatcgcaatgtaagactcgggattagtacacacttgttgatgattaatggaaatgtttacagatccccaagcctggcaagggaatttcttcaactccctgccccctagccctccttatcaaaggacaccattttggcaagctctatcaccaaggagccaaacatcctacaagacacagtgaccatactaattataccccctgcaaagccagcttgaaaccttcacttaggaacgtaatcgtgtcccctatcctacttccccttcctaattccacagctgctcaataaagtacaagagtttaacagtgtgttggcgctttgctttggtctatctttgagcgcccactagacccactggactcacctcccccatctcttctgggttccttcctctgagccttgggacccctgagcttgcagagatgaaggccgccatgtt

SEQ ID NO: 817 - protein, 383 aa, Homo sapien
MGVKASQTGFVVLVLLQCCSAYKLVCYYTSWSQYREGDGSCFPDALDRFLCTHIIYSFANISNDHIDTWEWNDVTLYGMLNTLKNRNPNLKTLLSVGGWNFGSQRFSKIASNTQSRRTFIKSVPPFLRTHGFDGLDLAWLYPGRRDKQHFTTLIKEMKAEFIKEAQPGKKQLLLSAALSAGKVTIDSSYDIAKISQHLDFISIMTYDFHGAWRGTTGHHSPLFRGQEDASPDRFSNTDYAVGYMLRLGAPASKLVMGIPTFGRSFTLASSETGVGAPISGPGIPGRFTKEAGTLAYYEICDFLRGATVHRTLGQQVPYATKGNQWVGYDDQESVKSKVQYLKDRQLAGAMVWALDLDDFQGSFCGQDLRFPLTNAIKDALAAT

SEQ ID NO: 818 - DNA, 1846 bp, Homo sapien
caacctgcatagtaacgaaaccaaacggctggtgtgattgaccgatgggagcttctccaggcccaggcattgagcaaggagttgaggatgaagcagaacctccagaagtggcagcagtttaactcagacttgaacagcatctgggcctggctgggggacacggaggaggagttggaacagctccagcgtctggaactcagcactgacatccagaccatcgagctccagatcaaaaagctcaaggagctccagaaagctgtggaccaccgcaaagccatcatcctctccatcaatctctgcagccctgagttcacccaggctgacagcaaggagagccgggacctgcaggatcgcttgtcgcagatgaatgggcgctgggaccgagtgtgctctctgctggaggagtggcggggcctgctgcaggatgccctgatgcagtgccagggtttccatgaaatgagccatggtttgcttcttatgctggagaacattgacagaaggaaaaatgaaattgtccctattgattctaaccttgatgcagagatacttcaggaccatcacaaacagcttatgcaaataaagcatgagctgttggaatcccaactcagagtagcctctttgcaagacatgtcttgccaactactggtgaatgctgaaggaacagactgtttagaagccaaagaaaaagtccatgttattggaaatcggctcaaacttctcttgaaggaggtcagtcgtcatatcaaggaactggagaagttattagacgtgtcaagtagtcagcaggatttgtcttcctggtcttctgctgatgaactggacacctcagggtctgtgagtcccacatcaggaaggagcaccccaaacagacagaaaacgccacgaggcaagtgtagtctctcacagcctggaccctctgtcagcagtccacatagcaggtccacaaaaggtggctccgattcctccctttctgagccagggccaggtcggtccggccgcggcttcctgttcagagtcctccgagcagctcttccccttcagcttctcctgctcctcctcatcgggcttgcctgccttgtaccaatgtcagaggaagactacagctgtgccctctccaacaactttgcccggtcatccaccccatgctcagatacacgaatggccctcctccactctgaactaagcagatgccatctgcagaagtgctggtagcataaggaggatcgggtcataagcaatcccaaactaccaacaagaggaccttgatcttggcgaaagccatcggtgtggcagctttagccctcctccagatcacatgtgtgcaaattatggcttcagagggtggaagataaacagtgacgggggaacaaacagacaacaagaaggtttggaagaaatctggtttgagactctgaaccttagcactaaggagattgagtaaggacctccaaagttccccggactcatgaattctgggcccttggcattcgtgtgcacagccaaggacttcagtagaccatctgggcagctttcccatggtgctgctccaaccatcagataaatgaccctccccaagcaccatgtcagtgtcgtacaatctaccaaccaaccagtgctgaagagattttagaaccttgtaacatacaatttttaagagcttatatggcagcttcctttttaccttgttttcctttggggcatgatgttttaaccttttgctttagaagcacaagctgtaaatctaaaaggcacttttttttagaggtataagaaaaactagatgtaataaataagatcatggaaggctttatgtgaaaaaagttgaatgttatagtaaaaaaaaaaa

SEQ ID NO: 819 - protein, 374 aa, Homo sapien
MKQNLQKWQQFNSDLNSIWAWLGDTEEELEQLQRLELSTDIQTIELQIKKLKELQKAVDHRKAIILSINLCSPEFTQADSKESRDLQDRLSQMNGRWDRVCSLLEEWRGLLQDALMQCQGFHEMSHGLLLMLENIDRRKNEIVPIDSNLDAEILQDHHKQLMQIKHELLESQLRVASLQDMSCQLLVNAEGTDCLEAKEKVHVIGNRLKLLLKEVSRHIKELEKLLDVSSSQQDLSSWSSADELDTSGSVSPTSGRSTPNRQKTPRGKCSLSQPGPSVSSPHSRSTKGGSDSSLSEPGPGRSGRGFLFRVLRAALPLQLLLLLLIGLACLVPMSEEDYSCALSNNFARSSTPCSDTRMALLHSELSRCHLQKCW

SEQ ID NO: 820 - DNA, 2496 bp, Homo sapien
gttttgaaagttgatggagcgaactgcttttccaaagactcttttgaaaaactttttaagtaggccattctgactttaacatttctctttgtcttaacattagacaaaaagtaaccttcctgaagaggacatgtgattggaagttgtcaattgttgaagcattggtaactccagtctctaacgttttagaaaatcataacaagcggttctctaccctgtaaaggtgaactactgagttcttcattatgtctgatggagattatgattacctcatcaagtttttagctttgggagactctggtgtagggaagaccagtgtactttaccaatatacagatggtaaatttaactccaaatttatcacaacagtgggcattgatttcagggaaaaaagagtggtgtacagagccagtgggccggatggagccactggcagaggccagagaatccacctgcagttatgggacacagcagggcaggagaggtttcgtagcttaacgacagcgttcttcagagatgctatgggttttcttctactttttgatctgacaaatgagcaaagtttcctcaatgtcagaaactggataagccagctacagatgcatgcatattgtgaaaacccagatatagtgctgtgtggaaacaagagtgatctggaggaccagagagtagtgaaagaggaggaagccatagcactcgcagagaaatatggaatcccctactttgaaactagtgctgccaatgggacaaacataagccaagcaattgagatgcttctggacctgataatgaagcgaatggaacggtgtgtggacaagtcctggattcctgaaggagtggtgcgatcaaatggtcatgcctctacggatcagttaagtgaagaaaaggagaaaggggcatgtggctgttgagaagtcaagtaagtgacatagtagttcaggtggcccatgcctgggatcttctctatgattgatacatggcacagtgagagattaatgggcattgtgtacaaattgcttctcaccatccccattagacctacgaataaagcatccggttctaaaattaatttgttgcagctttgtaaatatttctttaagattcagcctgagagttaggagaaatatttcagagccaaaagtgccttatacaaccttagcctattatagtaaatcattcaaggattcagaattttgcagtcacagaagagtgtatttattatgtagaatgaatgagggtactgtcacctgccttaatgtaggtaggcccagagtcttacatttaagatcttacatgcagttataaaaccgccacagtcttcaatccagatttgaagactcatgccataggtgacattctaaaataccattaaagccacttaaatgttaaataagaatatacatgcacatcagctcaatgtctttgagtattaattttatgtaagcattctatttaacatgaatataggacaaatcatggctatatctatagaccttggataaactggattgaccaattatacactcacggtgacttttttattggtgggaaggggattggggtggggcaggctggcttaatgtaatatgagcaaccaaagtgggacttctgtctccccgctatattcccattgctctgaatggttgattgaagggtcagggaactagattttatggctttagttcactgtgattgtacatttatacttggcctatgtgctggccgcacctgaacatagctggtgcttatgccgagttatttgtgatgagtaaatatttagtttctttttcttcatatttataatgttgatctggcatcctcaggctgcagctttattagcttataaattactcatctctgtctttaccagcaggctctgtattgttgatatttgcaacttgttttgcttttccattggtggaattgaaataattagtttttaattacataagatgcctgtttgctatttggtggaagatagatgttcatattgaagcagtcacatttgtactgtagttcaataaaagaaaaatgaagtattctgtagcctatatttttcatagagctcatgagcatttactgtacttgctgggtcttgccaagatcatttattccgctgcattgccaaagtgtcttcataccaaattaaaggtggttttaatatatgtttcatggaagttgtttataaaattcaaaggtatttcatttaggtgaaaagtcttatttattaaagtggtttgaataaagtagatcaaaacttccagagatcttaatggctatataggaagaaatatcactcaccataatttaaataaagaataaaaatacatgtattttatggtggcaaatgtttggtagaactgtaattagaaaaatacaagtatatttgcgtgatggttacactagaagcccagactttacgactacacaatatattcatgtatctaaactgtacttgtaccccctaaatttatttttaaaaaaaaaaaaaaaaaa

SEQ ID NO: 821 - protein, 221 aa, Homo sapien
MSDGDYDYLIKFLALGDSGVGKTSVLYQYTDGKFNSKFITTVGIDFREKRVVYRASGPDGATGRGQRIHLQLWDTAGQERFRSLTTAFFRDAMGFLLLFDLTNEQSFLNVRNWISQLQMHAYCENPDIVLCGNKSDLEDQRVVKEEEAIALAEKYGIPYFETSAANGTNISQAIEMLLDLIMKRMERCVDKSWIPEGVVRSNGHASTDQLSEEKEKGACGC

SEQ ID NO: 822 - DNA, 2804 bp, Homo sapien
atcgatgccccgcccccgccccacagccaacctcccgggcaccgttgcccgcccggggcccgctaccggcccaggccccgcctcgcgagtcctcctccccgggtgcctgcccgcagcccgctcggcccagagggtgggcgcggggctgcctctaccggctggcggctgtaactcagcgaccttggcccgaaggctctagcaaggacccaccgaccccagccgcggcggcggcggcgcggactttgcccggtgtgtggggcggagcggactgcgtgtccgcggacgggcagcgaagatgttagccttcgctgccaggaccgtggtgaagcctctgggcttcctgaagcccttctccttgatgaaggcttccagccgcttcaaggcacaccaggatgcactgccacggctgcccgtgccccctctccagcagtccctggaccactacctgaaggcgctgcagcccatcgtgagtgaggaggagtgggcccacaccaagcagctggtggatgagtttcaggcctcaggaggtgtaggggagcgcctgcagaaggggctggagcgtcgggccaggaagacggagaactggctgtctgagtggtggctcaagaccgcctacctccagtaccgccagcctgtggtcatctactcgagcccaggcgtgatgctacccaagcaggacttcgtggacctgcagggtcagctccgatttgctgccaaactcattgagggtgtgttggatttcaaggtcatgattgacaacgagaccctgcccgtggagtacctgggggggaagccactgtgcatgaaccagtactatcagatcttgtcctcctgccgagtgccgggccccaagcaggacacagtcagcaacttcagcaagaccaagaagcctcccacgcacatcaccgtggtacacaactaccagttttttgagctggatgtgtaccacagtgacgggacacccctcactgcggatcagatctttgtgcagctggagaagatctggaactcatccctacagaccaacaaggagcctgtgggcatcctcacctccaaccaccgcaactcctgggccaaggcatacaacaccctcatcaaagacaaggtgaaccgggattccgtgcgctccatccagaagagcatcttcaccgtgtgcctagatgcaaccatgcccagggtctcagaagacgtgtaccgcagccacgtggcaggccagatgctgcatgggggcggcagcaggctcaacagcggcaaccgctggttcgacaagacgctgcagttcatcgtggcagaagatggctcctgtgggcttgtgtacgagcatgctgcagcggaggggccccctattgtcacccttctggactatgtcatcgagtacacgaagaaacccgagcttgtgcggtctcccatggtgcccctgcccatgcccaagaagctgcggttcaacatcacccccgagatcaagagcgacatcgagaaggccaagcagaacctcagcatcatgatccaggacctggatatcaccgtgatggtgttccaccattttggaaaagacttccccaagtcggagaagctaagcccagatgccttcatccagatggctttgcagctggcctactacaggatctacggacaggcatgtgccacctatgaaagtgcctccctgcgcatgtttcacctgggccgcaccgacaccatccgctcggcttccatggactcactcacctttgtcaaggccatggatgactccagcgtcacggagcaccagaaggtggagctgctgcggaaggccgtgcaggcccaccgaggctacaccgaccgggccatccgcggggaggcctttgatcgacacctgctgggcctgaagctgcaggccatcgaggacctggtgagcatgcccgacatcttcatggacacctcctacgccatcgccatgcacttccacctctccaccagccaggtccctgccaagacagactgtgtcatgttcttcgggcccgtggtccccgacggctacggtgtctgctataaccccatggaggcccacatcaacttctccctgtcggcctacaacagctgcgcggagaccaacgccgcccgcctggcgcattacctggagaaggcgctcctggacatgcgtgccctgctgcagagccacccccgggccaagctctgagcccctaggactcaggcctgccaatgccacagccaagcccaccctgggatgggccacccaccagggctcagctccttggttccctcttccttggttccctcttccctggtccccccaaatctactgagccacggaccgcatcctccagggggcctgcaggccccagccaagtgccttccgtgggtcatcccagcacctgccagggcccgacctggggctgagtgcagaggctgagcaggacgttaggcccgggcccctggcacgtcctccaccggtgcctcctctggggaagggaaccagccctccagagcaggagactggcaagagctctttgtctcaccagctcagccccggccactccctgccaactccatgaccaggccaccatctgtaccctgcttcccaaactcccaggacctggagacaggattgtctggggccgaggggccagggtgtgaggtttcacctccgttgcggctgtgctcctgtggataacattgctagcgagccgcctctggttccactcagcttggttcctgcccccgccctgctgtatgatattaatgtggaaggtcatcaataaaggggaattgtgttggtgaaaaaaaaaaaaaaaaaaaaaaaaaaa

SEQ ID NO: 823 - protein, 544 aa, Homo sapien
MLAFAARTVVKPLGFLKPFSLMKASSRFKAHQDALPRLPVPPLQQSLDHYLKALQPIVSEEEWAHTKQLVDEFQASGGVGERLQKGLERRARKTENWLSEWWLKTAYLQYRQPVVIYSSPGVMLPKQDFVDLQGQLRFAAKLIEGVLDFKVMIDNETLPVEYLGGKPLCMNQYYQILSSCRVPGPKQDTVSNFSKTKKPPTHITVVHNYQFFELDVYHSDGTPLTADQIFVQLEKIWNSSLQTNKEPVGILTSNHRNSWAKAYNTLIKDKVNRDSVRSIQKKPELVRSPMVPLPMPKKLRFNITPEIKSDIEKAKQNLSIMIQDLDITVMVFHHFGKDFPKSEKLSPDAFIQMALQLAYYRIYGQACATYESASLRMFHLGRTDTIRSASMDSLTFVKAMDDSSVTEHQKVELLRKAVQAHRGYTDRAIRGEAFDRHLLGLKLQAIEDLVSMPDIFMDTSYAIAMHFHLSTSQVPAKTDCVMFFGPVVPDGYGVCYNPMEAHINFSLSAYNSCAETNAARLAHYLEKALLDMRALLQSHPRAKL

SEQ ID NO: 824 - DNA, 2395 bp, Homo sapien
taatcctttaacctttccttgtgcaggaatgaggcagatgagctccgtaaagctctggacaaccttgcaagacaaatgatcatgaaagacaaaaactggcacgataaaggccagcagtacagaaactggtttctgaaagagtttcctcggttgaaaagtaagcttgaggataacataagaaggctccgtgcccttgcagatggggttcagaaggtccacaaaggcaccaccatcgccaatgtggtgtctggctctctcagcatttcctctggcatcctgaccctcgtcggcatgggtctggcacccttcacagagggaggcagccttgtactcttggaacctgggatggagttgggaatcacagccgctttgaccgggattaccagcagtaccatagactacggaaagaagtggtggacacaagcccaagcccacgacctggtcatcaaaagccttgacaaattgaaggaggtgaaggagtttttgggtgagaacatatccaactttctttccttagctggcaatacttaccaactcacacgaggcattgggaaggacatccgtgccctcagacgagccagagccaatcttcagtcagtaccgcatgcctcagcctcacgcccccgggtcactgagccaatctcagctgaaagcggtgaacaggtggagagggttaatgaacccagcatcctggaaatgagcagaggagtcaagctcacggatgtggcccctgtaagcttctttcttgtgctggatgtagtctacctcgtgtacgaatcaaagcacttacatgagggggcaaagtcagagacagctgaggagctgaagaaggtggctcaggagctggaggagaagctaaacattctcaacaataattataagattctgcaggcggaccaagaactgtgaccacagggcagggcagccaccaggagagatatgcctggcaggggccaggacaaaatgcaaacttttttttttttctgagacagagtcttgctctgtcgccaagttggagtgcaatggtgcgatctcagctcactgcaagctctgcctcccgtgttcaagcgattctcctgccttggcctcccaagtagctgggactacaggcgcctaccaccatgcccagctaatttttgtatttttaatagagatggggtttcaccatgttggccaggatggtctcgatctcctgacctcttgatctgcccaccttggcctcccaaagtgctgggattacaggcgtgagccatcgcttttgacccaaatgcaaacattttattagggggataaagagggtgaggtaaagtttatggaactgagtgttagggactttggcatttccatagctgagcacagcaggggaggggttaatgcagatggcagtgcagcaaggagaaggcaggaacattggagcctgcaataagggaaaaatgggaactggagagtgtggggaatgggaagaagcagtttactttagactaaagaatatattggggggccgggtgtagtggctcatgcctgtaatccgagcactttgggaggccaaggcgggcggatcacgaggtcaggagatcaagaccatcctggctaacacagtgaaaccccgtctctactaaaaatacaaaaaattagccgggcatggtgcgggcgcctgtagttccagctaactgggcggctgaggcaggagaatggcgtgaacctgggaggtggagcttgcagtgagccgagatatcgccactgcactccagcctgggtgacagagcgagactccatctcaaaaaaaaaaaaaaaaagaatatattgacggaagaatagagaggaggcttgaaggaaccagcaatgagaaggccaggaaaagaaagagctgaaaatggagaaagcccaagagttagaacagttggatacaggagaagaaacagcggctccactacagacccagccccaggttcaatgtcctccgaagaatgaagtctttccctggtgatggtcccctgccctgtctttccagcatccactctcccttgtcctcctgggggcatatctcagtcaggcagcggcttcctgatgatggtcgttggggtggttgtcatgtgatgggtccctccaggttactaaagggtgcatgtcccctgcttgaacactgaagggcaggtggtgggccatggccatggtccccagctgaggagcaggtgtccctgagaacccaaacttcccagagagtatgtgagaaccaaccaatgaaaacagtcccatcgctcttacccggtaagtaaacagtcagaaaattagcatgaaagcagtttagcattgggaggaagctcagatctctagagctgtcttgtcgccgcccaggattgacctgtgtgtaagtcccaataaactcacctactca

SEQ ID NO: 825 - DNA, 2365 bp, Homo sapien
tcccagccttcccatccccccaccgaaagcaaatcattcaacgacccccgaccctccgacggcaggagccccccgacctcccaggcggaccgcccttccctccccgcgcgggttccgggcccggcgagagggcgcgacgacagccgaggccatggaggtgacggcggaccagccgcgctgggtgagccaccaccaccccgccgtgctcaacgggcagcacccggacacgcaccacccgggcctcagccactcctacatggacgcggcgcagtacccgctgccggaggaggtggatgtgctttttaacatcgacggtcaaggcaaccacgtcccgccctactacggaaactcggtcagggccacggtgcagaggtaccctccgacccaccacgggagccaggtgtgccgcccgcctctgcttcatggatccctaccctggctggacggcggcaaagccctgggcagccaccacaccgcctccccctggaatctcagccccttctccaagacgtccatccaccacggctccccggggcccctctccgtctaccccccggcctcgtcctcctccttgtcggggggccacgccagcccgcacctcttcaccttcccgcccaccccgccgaaggacgtctccccggacccatcgctgtccaccccaggctcggccggctcggcccggcaggacgagaaagagtgcctcaagtaccaggtgcccctgcccgacagcatgaagctggagtcgtcccactcccgtggcagcatgaccgccctgggtggagcctcctcgtcgacccaccaccccatcaccacctacccgccctacgtgcccgagtacagctccggactcttcccccccagcagcctgctgggcggctcccccaccggcttcggatgcaagtccaggcccaaggcccggtccagcacaggcagggagtgtgtgaactgtggggcaacctcgaccccactgtggcggcgagatggcacgggacactacctgtgcaacgcctgcgggctctatcacaaaatgaacggacagaaccggcccctcattaagcccaagcgaaggctgtctgcagccaggagagcagggacgtcctgtgcgaactgtcagaccaccacaaccacactctggaggaggaatgccaatggggaccctgtctgcaatgcctgtgggctctactacaagcttcacaatattaacagacccctgactatgaagaaggaaggcatccagaccagaaaccgaaaaatgtctagcaaatccaaaaagtgcaaaaaagtgcatgactcactggaggacttccccaagaacagctcgtttaacccggccgccctctccagacacatgtcctccctgagccacatctcgcccttcagccactccagccacatgctgaccacgcccacgccgatgcacccgccatccagcctgtcctttggaccacaccacccctccagcatggtcaccgccatgggttagagccctgctcgatgctcacagggcccccagcgagagtccctgcagtccctttcgacttgcatttttgcaggagcagtatcatgaagcctaaacgcgatggatatatgtttttgaaggcagaaagcaaaattatgtttgccactttgcaaaggagctcactgtggtgtctgtgttccaaccactgaatctggaccccatctgtgaataagccattctgactcatatcccctatttaacagggtctctagtgctgtgaaaaaaaaaaatcctgaacattgcatataacttatattgtaagaaatactgtacaatgactttattgcatctgggtagctgtaaggcatgaaggatgccaagaagtttaaggaatatgggagaaatagtgtggaaattaagaagaaactaggtctgatattcaaatggacaaactgccagttttgtttcctttcactggccacagttgtttgatgcattaaaagaaaataaaaaaaagaaaaaagagaaaagaaaaaaaaagaaaaaagttgtaggcgaatcatttgttcaaagctgttggccctctgcaaaggaaataccagttctgggcaatcagtgttaccgttcaccagttgccattgagggtttcagagagcctttttctaggcctacatgctttgtgaacaagtccctgtaattgttgtttgtatgtataattcaaagcaccaaaataagaaaagatgtagatttatttcatcatattatacagaccgaactgttgtataaatttatttactgctagtcttaagaactgctttctttcgtttgtttgtttcaatattttccttctctctcaattttcggttgaataaactagattacattcagttggcaaaaaaaaaaaaa

SEQ ID NO: 826 - protein, 443 aa, Homo sapien
MEVTADQPRWVSHHHPAVLNGQHPDTHHPGLSHSYMDAAQYPLPEEVDVLFNIDGQGNHVPPYYGNSVRATVQRYPPTHHGSQVCRPPLLHGSLPWLDGGKALGSHHTASPWNLSPFSKTSIHHGSPGPLSVYPPASSSSLSGGHASPHLFTFPPTPPKDVSPDPSLSTPGSAGSARQDEKECLKYQVPLPDSMKLESSHSRGSMTALGGASSSTHHPITTYPPYVPEYSSGLFPPSSLLGGSPTGFGCKSRPKARSSTGRECVNCGATSTPLWRRDGTGHYLCNACGLYHKMNGQNRPLIKPKRRLSAARRAGTSCANCQTTTTTLWRRNANGDPVCNACGLYYKLHNINRPLTMKKEGIQTRNRKMSSKSKKCKKVHDSLEDFPKNSSFNPAALSRHMSSLSHISPFSHSSHMLTTPTPMHPPSSLSFGPHHPSSMVTAMG

SEQ ID NO: 827 - DNA, 2534 bp, Homo sapien
atgcactcaagcagagaagaaatccacaaagactcacagtctgctggtgggcagagaagacagaaacgacatgagcacagcaggaaaagtaatgaaatgcaaagcagctgtgctatgggaggtaaagaaacccttttccattgaggatgtggaggttgcacctcctaaggcttatgaagttcgcattaagatggtggctgtaggaatctgtcgcacagatgaccacgtggttagtggcaaactggtgaccccccttcctgtgattttaggccatgaggcagccggcatcgtggagagtgttggagaaggggtgactacagtcaaaccaggtgataaagtcatcccgctctttactcctcagtgtggaaaatgcagagtttgtaaaaacccggagagcaactactgcttgaaaaatgatctaggcaatccccgggggaccctgcaggatggcaccaggaggttcacctgcagggggaagcccattcaccacttccttggcaccagcaccttctcccagtacacggtggtggatgagaatgcagtggccaaaattgatgcagcctcgaaactggagaaagtctgcctcattggctgtggattctcgactggttatgggtctgcagttaacgttgccaaggtcaccccaggctctacctgtgctgtgtttggcctgggaggggtcggcctatctgctgttatgggctgtaaagcagctggagcagccagaatcattgcggtggacatcaacaaggacaaatttgcaaaggccaaagtgttgggtgccactgaatgcatcaaccctcaagactacaagaaacccatccaggaagtgctaaaggaaatgactgatggaggtgtggatttttcgtttgaagtcatcggtcggcttgacaccatgatggcttccctgttatgttgtcatgaggcatgtggcacaagcgtcatcgtaggggtacctcctgcttcccagaacctctcaataaaccctatgctgctactgactggacgcacctggaagggggctgtttatggtggctttaagagtaaagaaggtatcccaaaacttgtggctgattttatggctaagaagttttcactggatgcgttaataacccatgttttaccttttgaaaaaataaatgaaggatttgacctgcttcactctgggaaaagtatccgtaccgtcctgacgttttgaggcaatagagatgccttcccctgtagcagtcttcagcctcctctaccctacgagatctggagcaacagctaggaaatatcattaattcagctcttcagagatgttatcaataaattacacatgggggctttccaaagaaatggaaattgatgggaaattatttttcaggaaaatttaaaattcaagtgagaagtaaataaagtgttgaacatcagctggggaattgaagccaacaaaccttccttcttaaccattctactgtgtcacctttgccattgaggaaaaatattcctgtgacttcttgcatttttggtatcttcataatctttagtcatcgaatcccagtggaggggacccttttacttgccctgaacatacacatgctgggccattgtgattgaagtcttctaactctgtctcagttttcactgtcgacattttcctttttctaataaaaatgtaccaaatccctggggtaaaagctagggtaaggtaaaggatagactcacatttacaagtagtgaaggtccaagagttctaaatacaggaaatttcttaggaactcaaataaaatgccccacattttactacagtaaatggcagtgtttttatgacttttatactatttctttatggtcgatatacaattgattttttaaaataatagcagatttcttgcttcatatgacaaagcctcaattactaattgtaaaaactgaactattcccagaatcatgttcaaaaaatctgtaatttttgctgatcgaaagtgcttcattgactaaacagtattagtttgtggctataaatgattatttagatgatgactgaaaatgtgtataaagtaattaaaagtaatatggtggctttaagtgtagagatgggatggcaaatgctgtgaatgcagaatgtaaaattggtaactaagaaatggcacaaacaccttaagcaatatattttcctagtagatatatatatacacatacatatatacacatatacaaatgtatatttttgcaaaattgttttcaatctagaacttttctattaactaccatgtcttaaaatcaagtctataatcctagcattagtttaatattttgaatatgtaaacacctgtgttaatgctttgttaatgcttttcccactctcatttgttaatgctttcccactctcgggaaggatttgcattttgagctttatctctaaatgtgacatgcaaagattattcctggtaaaggaggtagctgtctccaaaaatgctattgttgcaatatctacattctatttcatattatgaaagaccttagacataaagtaaaatagtttatcattt

SEQ ID NO: 828 - protein, 375 aa, Homo sapien [sequence omitted]

SEQ ID NO: 829 - DNA, 3803 bp, Homo sapien
cgcccaggaatggcttcggcgggcagcggcatggaggaggtgcgcgtgtcggtgctgacccccttgaagctggtcgggctggtgtgcatcttcctggcgctgtgtctggacctgggggcggtgctgagcccggcctgggtcacagctgaccaccagtactacctgtcgttgtgggagtcctgccgcaaacccgccagcttggacatctggcactgcgagtccacgctcagcagcgattggcagattgctactctggctttactcctgggcggcgctgccatcattctcattgcattcctggtgggtttgatttctatctgcgtgggatctcgaaggcgtttctatagacctgttgcggtcatgctttttgcagcagttgttttacaggtttgcagcctggtcctttacccaatcaagttcattgaaactgtgagcttgaaaatttaccatgagttcaactggggttatggcctggcctggggtgcaactatattttcgtttgggggtgccatcctttattgcctgaaccctaagaactatgaagactactactagaaccaatagtctcaaagtaaaaacaaccaccaccatccaacaaaaggattacgtctgcatcttttctaacttactattttctaaaacacttgtggagcatcaagcagtttgctcagttgatttaatcttttttgccttttggctgtcaatatcataaccagcttttacatccattttagaaatctgcacaaattaagagagctgattagacataggcaaatgctgcaaacttccaatatgttcatatcgtttttcttgacaaatgaagggtctatatgacagcaaccattgtgagaaactagttggaatgagatttgcctcaatctcctattgcctgcaggggagcagttggcataagcaacatttagaagttcctttgcgctgacaaggattccactgttagagcccttaccgcctgcttatcctacccaatgactacattggctgttggttatttgcttgagtgagcccttgaaaaatgaactgcccttcagcatctaatgggagttgtgaatgtaactggttaatgatacacattccaccttcaggaacactctttttaatgggaggttatgctttggcaatcagcgtctccctgggaagagagtcaagacttggagacatgtgcttctcattatgtggttagaaattggtgcctcagccctatctagactggggaaaaattgaggatctctgtttttcctggggcaaacagaaagaaatctgcatgagttgcttttgtaccctttaaatcatttgccaaacattgcagcaaacaagtgtgcgtatgtaacaagcttcactgtttttatagaaggtgaaccattagtataaatggtaataagttgttccctaaccctccacatacatttgcctatcacacgtaaaattaatatttactctagtgaagtggtttgagcactaaccttgtacacattgttaagaggcttagattggtattcatacttatttaccatacaaaagtatggtaccttaaagcttttgctctatgttctttactgtttcactggaaagtgtcaatagagttgcctaagaataaaaattgaaatggtgttaatctgaaaattaatgattctctgtaagcactgtagttgaaaagagagtagcaattaggatgatcattttgtgtaaaattcattaaaatagaaggctgctattttttgcaagtattttaaatgtcttcatttttttaagaaaggaatagcgatagatttatataaatatctaaatgtctcagtagaggagtagaattcatctggttatcacctggtcctctgaagttaactgatgggctaaccgatttgtgcacacacttaggatggatttatgttaagggaattacttactgactgttcaatggaaggaagtattaataatagggaataagtttgcaactaatctcatgctgcaaacttgtgttaattctgtttaatatacaaatttggatagcttaattataaacatatttttatatcaaatatacagttctaatataaaagttataaataattatttttgttaacaaagacactaaaacagtatgttctggttttggccctcttgcagaaagaagcattagaaaaattactttaaaagtagctatatgttactgtattgcaaaatctgttaagagcaggaccacatcgatagtatttaataatttgttttacctcccaaaacacagttcttctttcagcttgtcttaagaatggttgccaaaaacaacagccaaaaaaaaaaaaacctattttattatccaaatgctagaaaacacacatgaattttctataaaatcacgaatatgaagtaccaggtttagtcttactttagcaatgatagacaaaagcgaataaatacatcacagacagaaacctttataaaaatatatgattctataaagaatcattagaaattatgagtggaaattctccagaaagatagtattatagagtcttttgaagcaattttttgagaaatagtaaaatctggggcagagtgtcttgcagttaattgcatattgtcagagcagcatgagaaatatgatatttggatagggatttcagcaactaaacattctctgttctgagatctctttattcctgaataatgaaagaatagtactttggtgctgacaccaatgaggcacttctcttggtcctagtagaggatgcagtgtactgttaaaccaatatcatcacatctcgagtcttatcaagttttcattctctgtcaatatgacaagctcaaagtgacagaatatgttataggttgaagcacacatatttgcagtttactgaaaagtagatttcttatgtgacttttttcccttctcagcaaagagccctacactagatttctaccatcactaatatttggaagtatttcattactaacaatctcagtacaacatgaaaattgttgcttctcatctaaaatacaattttgtctatcagaataaacacaagtgaaattttcacctacattaacattatgtctttgcagctttaggtttgttagatgtgttcttaagcataatttttagccacaaacccattgttagatagatatctatggatatagatctacatctatagatatagatatacacacatatatatactcacacacatatagcataaaatactcagcagggctagttattccgatttcttgcacaattatttagctttttgtaagttcaacatgtaaattttaaagacataaatatagagagacttatgtgtttgaatataaatgatatatatggattagcatgtacctgtatattattaaacatgcaatgaactgactggtaagtgacgtctaattgtatggctagcaatgtaatttattcagactgtatttttgtacagagcagtgcactctaacctatgcctctgtgtcctctttaatgcctaaagctgtgcctagaaatttcatctgtcttaaaagtaaaatatacttcatgctgtttatgctattagtttctgtactgctattctatatttattatttttaaatatatgacatgtttactacttaaacatgaattcatggtatcctggttattttttttaagtcatctgggggaaaacctgtttatcactccagtgattttgagtttgcagtttcacaatcagttcttcatttcatgatttttgtagttgacatgaagtcatctatgtggaaaaaaataaaaataaaagtgaaaaaaaaaaaaaaaaaaa

SEQ ID NO: 830 - protein, 181 aa, Homo sapien
MASAGSGMEEVRVSVLTPLKLVGLVCIFLALCLDLGAVLSPAWVTADHQYYLSLWESCRKPASLDIWHCESTLSSDWQIATLALLLGGAAIILIAFLVGLISICVGSRRRFYRPVAVMLFAAVVLQVCSLVLYPIKFIETVSLKIYHEFNWGYGLAWGATIFSFGGAILYCLNPKNYEDYY

SEQ ID NO: 831 - DNA, 921 bp, Homo sapien
gtgggaggaggcaccggccgcgcggcgggaggaggtgccggccgagcaccgcagacagcgccgggaagatgagcacggaaggtggtggccgtcgctgccaggcacaagtgtcccgccgcatctccttcagcgcgagccaccgattgtacagtaaatttctaagtgatgaagaaaacttgaaactgtttgggaaatgcaacaatccaaatggccatgggcacaattataaagttgtggtgacagtacatggagagattgaccctgctacgggaatggttatgaatctggctgatctcaaaaaatatatggaggaggcgattatgcagccccttgatcataagaatctggatatggatgtgccatactttgcagatgtggtgagcacgactgaaaatgtagctgtttatatctgggacaacctccagaaagttcttcctgtaggagttctttataaagtaaaagtatacgaaactgacaataatattgtggtttataaaggagaatagctattggggttagcattgcacaaagcccagtttctttctgtgtttgaaaaagattttgatccccttggaatattaagaggtcaacacgtgattgttgtacgtacacattgtgctctggagtgcctatttattgaaatcattgtaagacctgttataaatttaagtctatttaaaactaaacttgtaatatacatcctgaaaatcatttagagagtcttttatttataaattaaaaatcacttcattttcacaaaatgttttggtgtgggattatttgaaagcaaaagaaatctaattttgttttctccattacctcattttagtattaatttttacttggtataatatacatggttaaaatgcttatgtgacttcgagtaggtgaatcttaaagaaataaaattcaagtgaccac

SEQ ID NO: 832 - protein, 145 aa, Homo sapien
MSTEGGGRRCQAQVSRRISFSASHRLYSKFLSDEENLKLFGKCNNPNGHGHNYKVVVTVHGEIDPATGMVMNLADLKKYMEEAIMQPLDHKNLDMDVPYFADVVSTTENVAVYIWDNLQKVLPVGVLYKVKVYETDNNIVVYKGE

SEQ ID NO: 833 - DNA, 2356 bp, Homo sapien
ggcacgagggagcaatggagcttaccatctttatcctgagactggccatttacatcctgacatttcccttgtacctgctgaactttctgggcttgtggagctggatatgcaaaaaatggttcccctacttcttggtgaggttcactgtgatatacaacgaacagatggcaagcaagaagcgggagctcttcagtaacctgcaggagtttgcgggcccctccgggaaactctccctgctggaagtgggctgtggcacgggggccaacttcaagttctacccacctgggtgcagggtgacctgtattgaccccaaccccaactttgagaagtttttgatcaagagcattgcagagaaccgacacctgcagtttgagcgctttgtggtagctgccggggagaacatgcaccaggtggctgatggctctgtggatgtggtggtctgcaccctggtgctgtgctctgtgaagaaccaggagcggattctccgcgaggtgtgcagagtgctgagaccgggaggggctttctatttcatggagcatgtggcagctgagtgttcgacttggaattacttctggcaacaagtcctggatcctgcctggcaccttctgtttgatgggtgcaacctgaccagagagagctggaaggccctggagcgggccagcttctctaagctgaagctgcagcacatccaggccccactgtcctgggagttggtgcgccctcatatctatggatatgctgtgaaatagtgtgagctggcagttaagagctgaatggctcaaagaatttaaagcttcagttttacatttaaaatgctaagtgggagaagagaaaccttttttttggggggcggtttttttggtttgttgttggttttttttttttttttggcgggaagaaagagttttgctcttgttgcccaggctggagtgcaatggcgtggtctccgctcactgcaacctccacctcgcgggtttaggcgattcttctgcctcagcctccctagtagctgggattacaggtgcccaccaccatgcccagctaatttgtatttttagttgagacagggtttcactacgttggccaggctggtcttgaactcctgatctcaggcaatccacccacctcagcctcccaaagtgctgggatgacaggcgtgagcaaccgcacccagcttaaggtttttttgttttgttttgagacggagttttcgctcttgttgcccaggctggagtgcaatgctgtgatctcagcttaccacaacctccacctcccgggttcaggtgattcacctgcctcagcctcctgagtggctggtattacaggcatgcgtcaccacgccggctaattttgtacttttagtagagatggtgtttccccacgttggtcagtctggtctcaaattcctgacctcaggtgatctgcctgcctcggcctcccaaagtgctgtgattacagacgtcagccaccatgcctggcctgaaaccttttttaggtaaagttgaattccatccttaaaagtttctgttatatcctatttagccattttctattgtctcccaaagaattcacatcaaaaaaacagctttgaactcccccttcaaaggaaacagtcgactttcataattagcatctaccattatccccaaatcttattttattcattgacttgaaattttttccaattgctttttttttttttttttttaaggttaagagcagaggtttactaggccaaagaaagagaatagctctctgttgcagagaggggtcctggagaaatgggttaccccagttgtcttatttaaatggttacccatcagattttaattttatcttctctttgagagcttggtaataagaagcacttaaatcactccaaagaagactttaaaaagggagcagtgaaaaggtcttaataatttattgattgaattaagaaatactagctaattaagaatctgagtctaaacagcacagattttttctttctgcttttaaattgtgttttaaaaaaagagacagggggctgggcgtggtggctcacgcctgtaatcctagcactttgggaggccgaggcgggtggatcacgaggtaggagttaaagaccagcctggccaacatggcaaaaccctactaaagatacaaaaaaaaaaaaaaattggccaggcgtggtggtgggtgcctgtaatcccaggtacttggaaggctgaggcaggagaatctcttgaacccagaaggcgaaggttgcagtgaaccgagatcatgccattgtactctagcctgggtgacaagagcaagactccgtctcaaaaaaaaaaaaaaaaaaaaaaaaaaaaaaaaaaaaaaaaaaaaa

SEQ ID NO: 834 - protein, 244 aa, Homo sapien
MELTIFILRLAIYILTFPLYLLNFLGLWSWICKKWFPYFLVRFTVIYNEQMASKKRELFSNLQEFAGPSGKLSLLEVGCGTGANFKFYPPGCRVTCIDPNPNFEKFLIKSIAENRHLQFERFVVAAGENMHQVADGSVDVVVCTLVLCSVKNQERILREVCRVLRPGGAFYFMEHVAAECSTWNYFWQQVLDPAWHLLFDGCNLTRESWKALERASFSKLKLQHIQAPLSWELVRPHIYGYAVK

SEQ ID NO: 835 - DNA, 1694 bp, Homo sapien
ctctctgcccacctctgcttcctctaggaacacaggagttccagatcacatcgagttcaccatgaattcactcagtgaagccaacaccaagttcatgttcgacctgttccaacagttcagaaaatcaaaagagaacaacatcttctattcccctatcagcatcacatcagcattagggatggtcctcttaggagccaaagacaacactgcacaacagattaagaaggttcttcactttgatcaagtcacagagaacaccacaggaaaagctgcaacatatcatgttgataggtcaggaaatgttcatcaccagtttcaaaagcttctgactgaattcaacaaatccactgatgcatatgagctgaagatcgccaacaagctcttcggagaaaaaacgtatctatttttacaggaatatttagatgccatcaagaaattttaccagaccagtgtggaatctgttgattttgcaaatgctccagaagaaagtcgaaagaagattaactcctgggtggaaagtcaaacgaatgaaaaaattaaaaacctaattcctgaaggtaatattggcagcaataccacattggttcttgtgaacgcaatctatttcaaagggcagtgggagaagaaatttaataaagaagatactaaagaggaaaaattttggccaaacaagaatacatacaagtccatacagatgatgaggcaatacacatcttttcattttgcctcgctggaggatgtacaggccaaggtcctggaaataccatacaaaggcaaagatctaagcatgattgtgttgctgccaaatgaaatcgatggtctccagaagcttgaagagaaactcactgctgagaaattgatggaatggacaagtttgcagaatatgagagagacacgtgtcgatttacacttacctcggttcaaagtggaagagagctatgacctcaaggacacgttgagaaccatgggaatggtggatatcttcaatggggatgcagacctctcaggcatgaccgggagccgcggtctcgtgctatctggagtcctacacaaggcctttgtggaggttacagaggagggagcagaagctgcagctgccaccgctgtagtaggattcggatcatcacctacttcaactaatgaagagttccattgtaatcaccctttcctattcttcataaggcaaaataagaccaacagcatcctcttctatggcagattctcatccccgtagatgcaattagtctgtcactccatttggaaaatgttcacctgcagatgttctggtaaactgattgctggcaacaacagattctcttggctcatatttcttttctttctcatcttgatgatgatcgtcatcatcaagaatttaatgattaaaatagcatgcctttctctctttctcttaataagcccacatataaatgtactttttcttccagaaaaattctccttgaggaaaaatgtccaaaataagatgaatcacttaataccgtatcttctaaatttgaaatataattctgtttgtgacctgttttaaatgaaccaaaccaaatcatactttttctttgaatttagcaacctagaaacacacatttctttgaatttaggtgatacctaaatccttcttatgtttctaaattttgtgattctataaaacacatcatcaataaaatagtgacataaaatca

SEQ ID NO: 836 - protein, 390 aa, Homo sapien
MNSLSEANTKFMFDLFQQFRKSKENNIFYSPISITSALGMVLLGAKDNTAQQIKKVLHFDQVTENTTGKAATYHVDRSGNVHHQFQKLLTEFNKSTDAYELKIANKLFGEKTYLFLQEYLDAIKKFYQTSVESVDFANAPEESRKKINSWVESQTNEKIKNLIPEGNIGSNTTLVLVNAIYFKGQWEKKFNKEDTKEEKFWPNKNTYKSIQMMRQYTSFHFASLEDVQAKVLEIPYKGKDLSMIVLLPNEIDGLQKLEEKLTAEKLMEWTSLQNMRETRVDLHLPRFKVEESYDLKDTLRTMGMVDIFNGDADLSGMTGSRGLVLSGVLHKAFVEVTEEGAEAAAATAVVGFGSSPTSTNEEFHCNHPFLFFIRQNKTNSILFYGRFSSP

SEQ ID NO: 837 - DNA, 2500 bp, Homo sapien
cccaggcgcagccaatgggaagggtcggaggcatggcacagccaatgggaagggccggggcaccaaagccaatgggaagggccgggagcgcgcggcgcgggagatttaaaggctgctggagtgaggggtcgcccgtgcaccctgtcccagccgtcctgtcctggctgctcgctctgcttcgctgcgcctccactatgctctccctccgtgtcccgctcgcgcccatcacggacccgcagcagctgcagctctcgccgctgaaggggctcagcttggtcgacaaggagaacacgccgccggccctgagcgggacccgcgtcctggccagcaagaccgcgaggaggatcttccaggagcccacggagccgaaaactaaagcagctgcccccggcgtggaggatgagccgctgctgagagaaaacccccgccgctttgtcatcttccccatcgagtaccatgatatctggcagatgtataagaaggcagaggcttccttttggaccgccgaggaggttgacctctccaaggacattcagcactgggaatccctgaaacccgaggagagatattttatatcccatgttctggctttctttgcagcaagcgatggcatagtaaatgaaaacttggtggagcgatttagccaagaagttcagattacagaagcccgctgtttctatggcttccaaattgccatggaaaacatacattctgaaatgtatagtcttcttattgacacttacataaaagatcccaaagaaagggaatttctcttcaatgccattgaaacgatgccttgtgtcaagaagaaggcagactgggccttgcgctggattggggacaaagaggctacctatggtgaacgtgttgtagcctttgctgcagtggaaggcattttcttttccggttcttttgcgtcgatattctggctcaagaaacgaggactgatgcctggcctcacattttctaatgaacttattagcagagatgagggtttacactgtgattttgcttgcctgatgttcaaacacctggtacacaaaccatcggaggagagagtaagagaaataattatcaatgctgttcggatagaacaggagttcctcactgaggccttgcctgtgaagctcattgggatgaattgcactctaatgaagcaatacattgagtttgtggcagacagacttatgctggaactgggttttagcaaggttttcagagtagagaacccatttgactttatggagaatatttcactggaaggaaagactaacttctttgagaagagagtaggcgagtatcagaggatgggagtgatgtcaagtccaacagagaattcttttaccttggatgctgacttctaaatgaactgaagatgtgcccttacttggctgattttttttttccatctcataagaaaaatcagctgaagtgttaccaactagccacaccatgaattgtccgtaatgttcattaacagcatctttaaaactgtgtagctacctcacaaccagtcctgtctgtttatagtgctggtagtatcaccttttgccagaaggcctggctggctgtgacttaccatagcagtgacaatggcagtcttggctttaaagtgaggggtgaccctttagtgagcttagcacagcgggattaaacagtcctttaaccagcacagccagttaaaagatgcagcctcactgcttcaacgcagattttaatgtttacttaaatataaacctggcactttacaaacaaataaacattgttttgtactcacggcggcgataatagcttgatttatttggtttctacaccaaatacattctcctgaccactaatgggagccaattcacaattcactaagtgactaaagtaagttaaacttgtgtagactaagcatgtaatttttaagttttattttaatgaattaaaatatttgttaaccaactttaaagtcagtcctgtgtatacctagatattagtcagttggtgccagatagaagacaggttgtgtttttatcctgtggcttgtgtagtgtcctgggattctctgccccctctgagtagagtgttgtgggataaaggaatctctcagggcaaggagcttcttaagttaaatcactagaaatttaggggtgatctgggccttcatatgtgtgagaagccgtttcattttatttctcactgtattttcctcaacgtctggttgatgagaaaaaattcttgaagagttttcatatgtgggagctaaggtagtattgtaaaatttcaagtcatccttaaacaaaatgatccacctaagatcttgcccctgttaagtggtgaaatcaactagaggtggttcctacaagttgttcattctagttttgtttggtgtaagtaggttgtgtgagttaattcatttatatttactatgtctgttaaatcagaaattttttattatctatgttcttctagattttacctgtagttcataaaaaaaaaaaaaaaaaaaaaaaaa

SEQ ID NO: 838 - protein, 389 aa, Homo sapien; identical to SEQ ID NO: 183

SEQ ID NO: 839 - DNA, 1580 bp, Homo sapien
catcctgccacccctagccttgctggggacgtgaaccctctccccgcgcctgggaagccttcttggcaccgggacccggagaatccccacggaagccagttccaaaagggatgaaaagggggcgtttcgggcactgggagaagcctgtattccagggcccctcccagagcaggaatctgggacccaggagtgccagcctcacccacgcagatcctggccatgagagctccgcacctccacctctccgccgcctctggcgcccgggctctggcgaagctgctgccgctgctgatggcgcaactctgggccgcagaggcggcgctgctcccccaaaacgacacgcgcttggaccccgaagcctatggctccccgtgcgcgcgcggctcgcagccctggcaggtctcgctcttcaacggcctctcgttccactgcgcgggtgtcctggtggaccagagttgggtgctgacggccgcgcactgcggaaacaagccactgtgggctcgagtaggggatgaccacctgctgcttcttcagggagagcagctccgccggaccactcgctctgttgtccatcccaagtaccaccagggctcaggccccatcctgccaaggcgaacggatgagcacgatctcatgttgctgaagctggccaggcccgtagtgctggggccccgcgtccgggccctgcagcttccctaccgctgtgctcagcccggagaccagtgccaggttgctggctggggcaccacggccgcccggagagtgaagtacaacaagggcctgacctgctccagcatcactatcctgagccctaaagagtgtgaggtcttctaccctggcgtggtcaccaacaacatgatatgtgctggactggaccggggccaggacccttgccagagtgactctggaggccccctggtctgtgacgagaccctccaaggcatcctctcgtggggtgtttacccctgtggctctgcccagcatccagctgtctacacccagatctgcaaatacatgtcctggatcaataaagtcatacgctccaactgatccagatgctacgctccagctgatccagatgttatgctcctgctgatccagatgcccagaggctccatcgtccatcctcttcctccccagtcggctgaactctccccttgtctgcactgttcaaacctctgccgccctccacacctctaaacatctcccctctcacctcattcccccacctatccccattctctgcctgtactgaagctgaaatgcaggaagtggtggcaaaggtttattccagagaagccaggaagccggtcatcacccagcctctgagagcagttactggggtcacccaacctgacttcctctgccactccctgctgtgtgactttgggcaagccaagtgccctctctgaacctcagtttcctcatctgcaaaatgggaacaatgacgtgcctacctcttagacatgttgtgaggagactatgatataacatgtgtatgtaaatcttcatggtgattgtcatgtaaggcttaacacagtgggtggtgagttctgactaaaggttacctgttgtcgtga

SEQ ID NO: 840 - protein, 276 aa, Homo sapien
MRAPHLHLSAASGARALAKLLPLLMAQLWAAEAALLPQNDTRLDPEAYGAPCARGSQPWQVSLFNGLSFHCAGVLVDQSWVLTAAHCGNKPLWARVGDDHLLLLQGEQLRRTTRSVVHPKYHQGSGPILPRRTDEHDLMLLKLARPVVPGPRVRALQLPYRCAQPGDQCQVAGWGTTAARRVKYNKGLTCSSITILSPKECEVFYPGVVTNNMICAGLDRGQDPCQSDSGGPLVCDETLQGILSWGVYPCGSAQHPAVYTQICKYMSWINKVIRSN

SEQ ID NO: 841 - DNA, 1413 bp, Homo sapien
atgaccacctgcagccgccagttcacctcctccagctccatgaagggctcctgcggcatcggaggcggcatcggggcgggctccagccgcatctcctccgtcctggccggggcctcctgccctgccagcacctacgggggcgcctctgtctcctctcgcttctcctctgggggagcctgcgggctggggggcggctatggcggtggcttcagcagcagcagcagctttggtagtggcttcgggggaggatatggtggtggccttggtgctggcttcggtggtggcttgggtgctggctttggtggtggttttgctggtggtgatgggcttctggtgggcagtgagaaggtgaccatgcagaacctcaatgaccgcctggcctcctacctggacaaggtgcgtgctctggaggaggccaacgccgacctggaagtgaagatccgtgactggtaccagaggcagcggcccagtgagatcaaagactacagtccctacttcaagaccatcgaggacctgaggaacaagatcattgcggccaccattgagaatgcgcacgcccttttgcagattgacaatgccaggctggcagccgatgacttcaggaccaagtatgaggcacgaactggcctgcggcagactgtggaggccgacgtcaatggcctgcgccgggtgttggatgagctgaccctggccaggactgacctggagatgcagatcgaaggcctgaaggaggagctggcctacctgaggaagaaccacgaggaggagatgcttgctctgagaggtcagaccggcggagatgtgaacgtggagatggatgctgcacctggcgtggacctgagccgcatcctgaatgagatgcgtgaccagtacgagcagatggcagagaaaaaccgcagagacgctgagacctggttcctgagcaagaccgaggagctgaacaaagaagtggcctccaacagcgaactggtacagagcagccgcagtgaggtgacggagctccggagggtgctccagggcctggagattgagctgcagtcccagctcaggatgaaagcatccctggagaacagcctggaggagaccaaaggccgctactgcatgcagctgtcccagatccagggactgattggcagtgtggaggagcagctggcccagctacgctgtgagatggagcagcagagccaggagtaccagatcttgctggatgtgaagacgcggctggagcaggagattgccacctaccgccgcctgctggagggcgaggatgcccacctttcctcccagcaagcatctggccaatcctattcttcccgcgaggtcttcacctcctcctcgtcctcttcagccgtcagacccggcccatcctcagagcagagctcatccagcttcagccagggccagagctcctag

SEQ ID NO: 842 - protein, 470 aa, Homo sapien
MTTCSRQFTSSSSMKGSCGIGGGIGAGSSRISSVLAGASCPASTYGGASVSSRFSSGGACGLGGGYGGGFSSSSSFGSGFGGGYGGGLGAGFGGGLGAGFGGGFAGGDGLLVGSEKVTMQNLNDRLASYLDKVRALEEANADLEVKIRDWYQRQRPSEIKDYSPYFKTIEDLRNKIIAATIENAHALLQIDNARLAADDFRTKYEARTGLRQTVEADVNGLRRVLDELTLARTDLEMQIEGLKEELAYLRKNHEEEMLALRGQTGGDVNVEMDAAPGVDLSRILNEMRDQYEQMAEKNRRDAETWFLSKTEELNKEVASNSELVQSSRSEVTELRRVLQGLEIELQSQLRMKASLENSLEETKGRYCMQLSQIQGLIGSVEEQLAQLRCEMEQQSQEYQILLDVKTRLEQEIATYRRLLEGEDAHLSSQQASGQSYSSREVFTSSSSSSAVRPGPSSEQSSSSFSQGQSS

SEQ ID NO: 843 - DNA, 913 bp, Homo sapien
agagccggcgccgtcaccgcccgcattgccgctcccagtcccgcgctcggcacgacatgaaatcccccgacgaggtgctacgcgagggcgagttggagaagcgcagcgacagcctcttccagctatggaagaagaagcgcggggtgctcacctccgaccgcctgagcctgttccccgccagcccccgcgcgcgccccaaggagctgcgcttccactccatcctcaaggtggactgcgtggagcgcacgggcaagtacgtgtacttcaccatcgtcaccaccgaccacaaggagatcgacttccgctgcgcgggcgagagctgctggaacgcggccatcgcgctggcgctcatcgatttccagaaccgccgcgccctgcaggactttcgcagccgccaggaacgcaccgcacccgccgcacccgccgaggacgccgtggctgccgcggccgccgcaccctccgagccctcggagccctccaggccatccccgcagcccaaaccccgcacgccatgagcccgccgcgggccatacgctggacgagtcggaccgaggctaggacgtggccggcgctctccagccctgcagcagaagaacttcccgtgcgcgcggatcctcgctccgttgcacgggcgccttaagttattggactatctaatatctatgtatttatttcgctggttctttgtagtcacatattttatagtcttaatatcttgtttttgcatcactgtgcccattgcaaataaatcacttggccagtttgcttttctaccatccggctgtggctcagtgagactcctgctgggagggtggaggcccaggaatgggcgggcaggacaccctcatccagtcctgcggggctggtgtgaaaggcgctgggaaccggctttgaatgaataaatgaatcgtgt

SEQ ID NO: 844 - protein, 152 aa, Homo sapien
MKSPDEVLREGELEKRSDSLFQLWKKKRGVLTSDRLSLFPASPRARPKELRFHSILKVDCVERTGKYVYFTIVTTDHKEIDFRCAGESCWNAAIALALIDFQNRRALQDFRSRQERTAPAAPAEDAVAAAAAAPSEPSEPSRPSPQPKPRTP

SEQ ID NO: 845 - DNA, 1284 bp, Homo sapien
ggctccttcgggaaacccagccccgtcaccgggctccgagcggctcgcaggcgagcgacagcggcctcagccccggcagcgcccagcggcggctgcggaaagcggagggagtccgacgcgggcgcgggcggggagcgtgcgtccgttcgcacaggcagcgggaggaggggcggcgcgaaccatggccggggacagcgagcagaccctgcagaaccaccagcagcccaacggcggcgagcccttccttataggcgtcagcgggggaacagctagcggcaagtcttccgtgtgtgctaagatcgtgcagctcctggggcagaatgaggtggactatcgccagaagcaggtggtcatcctgagccaggatagcttctaccgtgtccttacctcggagcagaaggccaaagccctgaagggccagttcaactttgaccacccggatgcctttgacaatgaactcattctcaaaacactcaaagaaatcactgaagggaaaacagtccagatccccgtgtatgactttgtctcccattcccggaaggaggagacagttactgtctatcccgcagacgtggtgctctttgaagggatcctggccttctactcccaggaggtacgagacctgttccagatgaagctttttgtggatacagatgcggacacccggctctcacgcagagtattaagggacatcagcgagagaggcagggatcttgagcagattttatctcagtacattacgttcgtcaagcctgcctttgaggaattctgcttgccaacaaagaagtatgctgatgtgatcatccctagaggtgcagataatctggtggccatcaacctcatcgtgcagcacatccaggacatcctgaatggagggccctccaaacggcagaccaatggctgtctcaacggctacaccccttcacgcaagaggcaggcatcggagtccagcagcaggccgcattgacccgtctccatcggaccccagcccctatctccaagagacagaggaggggtcaggaggcactgctcatctgtacatactgtttcctatgacattactgtatttaagaaaacaccatggagatgaaatgcctttgattttttttttctttttgtactttggaacgacaaaatgaaacagaacttgaccctgagcttaaataacaaaactgtgccaactactactggtgatgcctaattatgaatccaacgtgtaaccagttataaatacatatatatataaaaaaaaaaaaaaaaaaaaaaaaaaaaaaaaaaaaaaaa

SEQ ID NO: 846 - protein, 261 aa, Homo sapien
MAGDSEQTLQNHQQPNGGEPFLIGVSGGTASGKSSVCAKIVQLLGQNEVDYRQKQVVILSQDSFYRVLTSEQKAKALKGQFNFDHPDAFDNELILKTLKEITEGKTVQIPVYDFVSHSRKEETVTVYPADVVLFEGILAFYSQEVRDLFQMKLFVDTDADTRLSRRVLRDISERGRDLEQILSQYITFVKPAFEEFCLPTKKYADVIIPRGADNLVAINLIVQHIQDILNGGPSKRQTNGCLNGYTPSRKRQASESSSRPH

SEQ ID NO: 847 - DNA, 6533 bp, Homo sapien
gaaaaacacgagccgtgttgtatgtggaggccccggtgtctgggtgtaattctcgttccttctgtgaggtgaggcagatgaagccatttcgtggttctgctgagcatggtcttggcagtgtttttgggagcatcacactgtgccccttttgttaacttgctagcccggcctgtcttttgccccgggctcaatggctggattgtggaaactgcacccgccttcaggttgttgagcaactgatgggacgatctcagggaccggcgtttacgaaagaaatgtttaatttggtaaattggaggaaaaaaacatggatttttagcaattgaagagcaaattaaggtttcagatttgggatattggtgtttctgttttggagaaattattctttttctttttaatttgaagaaaaatcatcagtcttggaatacagaagagaaactagaaatatacgtattttgtttcacatttgaacagtcattcttgaggaatactccatacctgagtagacagccatgtggccatcgcagctactaattttcatgatgctcttagctccaataattcatgctttcagccgtgccccaattccaatggctgtggtccgcagagagctatcctgtgagagctatcctatagagcttcgctgtccaggaacagacgtcatcatgatagaaagtgccaactatggcaggactgatgacaaaatttgtgactctgaccctgctcagatggagaatatccgatgttatctgccagatgcctataagattatgtctcaaagatgcaataacagaacccagtgtgcagtggtggcaggtcctgatgtttttccagacccgtgtccaggaacctataaataccttgaagtgcagtatgaatgtgtcccttacaaagtggaacaaaaagtttttctttgtcctggactactaaaaggagtataccagagtgaacatttgtttgagtccgaccaccaatctggggcgtggtgcaaagaccctctgcaggcatctgacaagatttattatatgccctggactccctacagaactgataccctgactgagtattcatccaaggatgacttcattgctggaagaccaactacaacctacaagctccctcatagggtggatggcacaggatttgtagtgtatgatggagctttgttcttcaacaaagagcgcaccaggaacatagtaaagtttgatttgcggactaggataaagagtggagaggctatcatagcaaatgccaattaccatgatacctccccttaccgatggggaggcaaatctgacatagacctggcagtagatgagaatgggctatgggtaatctatgcaacagaacaaaacaatggtaaaattgtcattagtcaattgaacccttacaccctacggatcgaaggaacatgggatactgcatatgataaaaggtcagcttccaatgcctttatgatttgtggaattctgtatgtggtcaaatctgtatatgaggatgatgacaatgaggctactggaaataagattgactacatttacaacactgaccaaagcaaggatagtttggtggatgtaccctttcctaattcataccagtacattgcagctgtggattacaaccccagggacaacctactttatgtatggaataactatcacgtcgtgaaatattctttggattttggacctctggatagtagatcagggcaggcacatcatggacaagtttcatacatttctccgccaattcaccttgactctgagctagaaagaccctctgttaaagatatctctaccacaggacctcttggcatgggaagcactaccaccagtaccacccttcggaccacaactttgagcccaggaaggagtaccaccccgtcagtgtcaggaagaagaaaccggagtactagtaccccatctccagctgtcgaggtacttgatgacatgaccacacaccttccatcagcatcgtcccaaatcccagctctcgaagagagctgtgaggctgtggaagcccgagaaatcatgtggtttaagactcgtcaaggacagatagcaaagcagccatgccctgcaggaactataggtgtatcaacttatctatgccttgctcctgatggaatttgggatccccaaggtccagatctcagcaactgttcttctccttgggtcaatcatataacacagaagttgaaatctggtgaaacagctgccaacattgctagagagctggctgaacagacaagaaatcacttgaatgctggggacatcacctactctgtccgggccatggaccagctggtaggcctcctagatgtacagcttcggaacttgaccccaggtggaaaagatagtgctgcccggagtttgaacaagcttcagaaaagagagcgctcttgcagagcctatgtccaggcaatggtcgagacagttaacaacctccttcagccacaagctttgaatgcatggagagacctgactacgagtgatcagctgcgtgcggccaccatgttgcttcatactgtggaggaaagtgcttttgtgctggctgataaccttttgaagactgacattgtcagggagaatacagacaatattaaattggaagttgcaagactgagcacagaaggaaacttagaagacctaaaatttccagaaaacatgggccatggaagcactatccagctgtctgcaaataccttaaagcaaaatggccgaaatggagagatcagagtggcctttgtcctgtataacaacttgggtccttatttatccacggagaatgccagtatgaagttgggaacggaagctttgtccacaaatcattctgttattgtcaattcccctgttattacggcagcaataaacaaagagttcagtaacaaggtttatttggctgatcctgtggtatttactgttaaacatatcaagcagtcagaggaaaatttcaaccctaactgttcattttggagctactccaagcgtacaatgacaggttattggtcaacacaaggctgtcggctcctgacaacaaataagacacatactacatgctcttgtaaccacctaacaaattttgcagtactgatggcacatgtggaagttaagcacagtgatgcggtccatgacctccttctggatgtgatcacgtgggttggaattttgctgtcccttgtttgtctcctgatttgcatcttcacattttgctttttccgcgggctccagagtgaccgtaacaccatccacaagaacctctgcatcagtctctttgtagcagagctgctcttcctgattgggatcaaccgaactgaccaaccaattgcctgtgctgttttcgctgccctgttacatttcttcttcttggctgccttcacctggatgttcctggagggggtgcagctttatatcatgctggtggaggtttttgagagtgaacattcacgtaggaaatacttttatctggtcggctatgggatgcctgcactcattgtggctgtgtcagctgcagtagactacaggagttatggaacagataaagtatgttggctccgacttgacacctacttcatttggagttttataggaccagcaactttgataattatgcttaatgtaatcttccttgggattgctttatataaaatgtttcatcatactgctatactgaaacctgaatcaggctgtcttgataacatcaactatgaggataacagacccttcatcaagtcatgggttataggtgcaatagctcttctctgcctattaggattgacctgggcctttggactcatgtatattaatgaaagcacagtcatcatggcctatctcttcaccattttcaattctctacagggaatgtttatatttattttccattgtgtcctacagaagaaggtacgaaaagagtatgggaaatgcctgcgaacacattgctgtagtggcaaaagtacagagagttccattggttcagggaaaacatctggttctcgaactcctggacgctactccacaggctcacagagccgaatccgtagaatgtggaatgacacggttcgaaagcagtcagagtcttcctttattactggagacataaacagttcagcgtcactcaacagagagccctacagagagacaagtatgggagtaaagctaaacattgcatatcaaataggggcttctgaacaatgccagggatacaagtgtcatggatactctaccactgaatggtaaccatggcaatagttacagcattgccagcggcgaatacctgagcaactgtgtgcaaatcatagaccgtggctataaccataacgagaccgccctagagaaaaagattctgaaggaactcactcccaactatatcccttcttacctgaacaaccatgagcgctccagtgaacagaacaggaatctgatgaacaagctggtgaataaccttggcagtggaagggaagatgatgccattgtcctggatgatgccacctcgtttaaccacgaggagagtttgggcctggaactcattcatgaggaatctgatgctcctttgctgcccccaagagtatactccaccgagaaccaccagccacaccattataccagaaggcggatcccccaagaccacagtgagagctttttccctttgctaaccaacgagcacacagaagatctccagtcaccccatagagactctctctataccagcatgccgacactggctggtgtggccgccacagagagtgttaccaccagcacccagaccgaacccccaccggccaaatgtggtgatgccgaagatgtttactacaaaagcatgccaaacctaggctccagaaaccacgtccatcagctgcatacttactaccagctaggtcgcggcagcagtgatggatttatagttcctccaaacaaagatgggacccctcccgagggaagttcaaaaggaccggctcatttggtcactagtctatagaagatgacacagaaattggaaccaacaaaactgctaacaccttgttgactgttctgagttgatataagcagtggtaataatgtgtgtactcctaaatctttatgctgtcctctaaagacaaacacaaactctcagacttttttttttttaatgggatttttaggtcagcccaggggagaaagataactgctaaaattcccctgtaccccatcctttcttgtcctttccccttcagatggagacttcattatgttaatgaacaagatatgaagaaaatggcactcattgtggccttgttgaattatgttgtgtatgttttaacatctctgatgctgtgttactaaaattacaaggacctgctttttaaaaggccagaacaattgtctgaaattagtaacaatgctgcatctagattggagtgctgcacaaacaaacataagagcaaagcaaaactgtatcacatagggtttttggtcactcacaacctgaattcaccacagctggaatagctgtggaaaacaaaataaaacaacaaaattaataatgaaatggaggggaattctagaattatatgctaaatgcatattttatgatttgctgtattaactgatgataaaactaatggcagaaaaagaagttgagcaatttctatgtaatgtacagatactagcattgcacatatagtctgctttctgttcctccagaatttgagtcctgttaatgtagtagaaaaaaaaaaaagaaattttctttttcttttgtgctggtcttgcaagtttgtctaccagtaagagagcaaagtttccttcctttcttctctttcttcattttctttttttcttttttgccttttattcctttaaaatttcgcctggcaaaaaataaataaatggaactatcactttataagaatcattttctagtaatgcaaacaaattattttttacaaaaaaacaaaataaataaaattagacttccttccctcactatatatctttatgcagtcagaatatttccaacagtgttttttgcaaattagagcaggacaaacttttatgtttacagggcacgtctgttgtaatgcaaagcatatttggcaagcagttcatcaccaggacactagctatgattctagaagtcaaaaggtgtctatagaactagtggggcttctgcatgtgaaaaacggttttccataggcattaaagtgctgaatgctcagtctgatcaacaagtgggcacctgcactaccactttttagaggaaattcactccctcgtaagcattggaaggtcaaattattttgaagtgattttttttaaaaaaaagtcttctgtttattaacaggaaaatttatttatttgacaggattttgagtaatgtaggaatacaaaaggtaaattagcagcacatataatttttttttaatttatgatccattttgtatggtctcaaagttggatgacctcattactaatatttgttgtaaaagtgaaacttgtttgccaaccaataaacaactgattgagatttagaagatattgtaaaaaaaaaaaaaaaaa

SEQ ID NO: 848 - protein, 1240 aa, Homo sapien
MWPSQLLIFMMLLAPIIHAFSRAPIPMAVVRRELSCESYPIELRCPGTDVIMIESANYGRTDDKICDSDPAQMENIRCYLPDAYKIMSQRCNNRTQCAVVAGPDVFPDPCPGTYKYLEVQYECVPYKVEQKVFLCPGLLKGVYQSEHLFESDHQSGAWCKDPLQASDKIYYMPWTPYRTDTLTEYSSKDDFIAGRPTTTYKLPHRVDGTGFVVYDGALFFNKERTRNIVKFDLRTRIKSGEAIIANANYHDTSPYRWGGKSDIDLAVDENGLWVIYATEQNNGKIVISQLNPYTLRIEGTWDTAYDKRSASNAFMICGILYVVKSVYEDDDNEATGNKIDYIYNTDQSKDSLVDVPFPNSYQYIAAVDYNPRDNLLYVWNNYHVVKYSLDFGPLDSRSGQAHHGQVSYISPPIHLDSELERPSVKDISTTGPLGMGSTTTSTTLRTTTLSPGRSTTPSVSGRRNRSTSTPSPAVEVLDDMTTHLPSASSQIPALEESCEAVEAREIMWFKTRQGQIAKQPCPAGTIGVSTYLCLAPDGIWDPQGPDLSNCSSPWVNHITQKLKSGETAANIARELAEQTRNHLNAGDITYSVRAMDQLVGLLDVQLRNLTPGGKDSAARSLNKLQKRERSCRAYVQAMVETVNNLLQPQALNAWRDLTTSDQLRAATMLLHTVEESAFVLADNLLKTDIVRENTDNIKLEVARLSTEGNLEDLKFPENMGHGSTIQLSANTLKQNGRNGEIRVAFVLYNNLGPYLSTENASMKLGTEALSTNHSVIVNSPVITAAINKEFSNKVYLADPVVFTVKHIKQSEENFNPNCSFWSYSKRTMTGYWSTQGCRLLTTNKTHTTCSCNHLTNFAVLMAHVEVKHSDAVHDLLLDVITWVGILLSLVCLLICIFTFCFFRGLQSDRNTIHKNLCISLFVAELLFLIGINRTDQPIACAVFAALLHFFFLAAFTWMFLEGVQLYIMLVEVFESEHSRRKYFYLVGYGMPALIVAVSAAVDYRSYGTDKVCWLRLDTYFIWSFIGPATLIIMLNVIFLGIALYKMFHHTAILKPESGCLDNINYEDNRPFIKSWVIGAIALLCLLGLTWAFGLMYINESTVIMAYLFTIFNSLQGMFIFIFHCVLQKKVRKEYGKCLRTHCCSGKSTESSIGSGKTSGSRTPGRYSTGSQSRIRRMWNDTVRKQSESSFITGDINSSASLNREPYRETSMGVKLNIAYQIGASEQCQGYKCHGYSTTEW

SEQ ID NO: 849 - DNA, 2831 bp, Homo sapien
gaattccggacaggacgtgaagatagttgggtttggaggcggccgccaggcccaggcccggtggacctgccgccatgcaggacggtaacttcctgctgtcggccctgcagcctgaggccggcgtgtgctccctggcgctgccctctgacctgcagctggaccgccggggcgccgaggggccggaggccgagcggctgcgggcagcccgcgtccaggagcaggtccgcgcccgcctcttgcagctgggacagcagccgcggcacaacggggccgctgagcccgagcctgaggccgagactgccagaggcacatccagggggcagtaccacaccctgcaggctggcttcagctctcgctctcagggcctgagtggggacaagacctcgggcttccggcccatcgccaagccggcctacagcccagcctcctggtcctcccgctccgccgtggatctgagctgcagtcggaggctgagttcagcccacaatgggggcagcgcctttggggccgctgggtacgggggtgcccagcccacccctcccatgcccaccaggcccgtgtccttccatgagcgcggtggggttgggagccgggccgactatgacacactctccctgcgctcgctgcggctggggcccgggggcctggacgaccgctacagcctggtgtctgagcagctggagcccgcggccacctccacctacagggcctttgcgtacgagcgccaggccagctccagctccagccgggcaggggggctggactggcccgaggccactgaggtttccccgagccggaccatccgtgcccctgccgtgcggaccctgcagcgattccagagcagccaccggagccgcggggtaggcggggcagtgccgggggccgtcctggagccagtggctcgagcgccatctgtgcgcagcctcagcctcagcctggctgactcgggccacctgccggacgtgcatgggttcaacagctacggtagccaccgaaccctgcagagactcagcagcggttttgatgacattgacctgccctcagcagtcaagtacctcatggcttcagaccccaacctgcaggtgctgggagcggcctacatccagcacaagtgctacagcgatgcagccgccaagaagcaggcccgcagccttcaggccgtgcctaggctggtgaagctcttcaaccacgccaaccaggaagtgcagcgccatgccacaggtgccatgcgcaacctcatctacgacaacgctgacaacaagctggccctggtggaggagaacgggatcttcgagctgctgcggacactgcgggagcaggatgatgagcttcgcaaaaatgtcacagggatcctgtggaacctttcatccagcgaccacctgaaggaccgcctggccagagacacgctggagcagctcacggacctggtgttgagccccctgtcgggggctgggggtccccccctcatccagcagaacgcctcggaggcggagatcttctacaacgccaccggcttcctcaggaacctcagctcagcctctcaggccactcgccagaagatgcgggagtgccacgggctggtggacgccctggtcacctctatcaaccacgccctggacgcgggcaaatgcgaggacaagagcgtggagaacgcggtgtgcgtcctgcggaacctgtcctaccgcctctacgacgagatgccgccgtccgcgctgcagcggctggagggtcgcggccgcagggacctggcgggggcgccgccgggagaggtcgtgggctgcttcacgccgcagagccggcggctgcgcgagctgcccctcgccgccgatgcgctcaccttcgcggaggtgtccaaggaccccaagggcctcgagtggctgtggagcccccagatcgtggggctgtacaaccggctgctgcagcgctgcgagctcaaccggcacacgacggaggcggccgccggggcgctgcagaacatcacggcaggcgaccgcaggtgggcgggggtgctgagccgcctggccctggagcaggagcgtattctgaaccccctgctagaccgtgtcaggaccgccgaccaccaccagctgcgctcactgactggcctcatccgaaacctgtctcggaacgctaggaacaaggacgagatgtccacgaaggtggtgagccacctgatcgagaagctgccaggcagcgtgggtgagaagtcgcccccagccgaggtgctggtcaacatcatagctgtgctcaacaacctggtggtggccagccccatcgctgcccgagacctgctgtattttgacggactccgaaagctcatcttcatcaagaagaagcgggacagccccgacagtgagaagtcctcccgggcagcatccagcctcctggccaacctgtggcagtacaacaagctccaccgtgactttcgggcgaagggctatcggaaggaggacttcctgggcccataggtgaagccttctggaggagaaggtgacgtggcccagcgtccaagggacagactcagctccaggctgcttggcagcccagcctggaggagaaggctaatgacggaggggcccctcgctggggcccctgtgtgcatctttgagggtcctgggccaccaggaggggcagggtcttatagctggggacttggcttccgcagggcagggggtggggcagggctcaaggctgctctggtgtatggggtggtgacccagtcacattggcagaggtgggggttggctgtggcctggcagtatcttgggatagccagcactgggaataaagatggccatgaacagtcacaaaaaaaaaaaaaaaaggaattc

SEQ ID NO: 850 - protein, 797 aa, Homo sapien
MQDGNFLLSALQPEAGVCSLALPSDLQLDRRGAEGPEAERLRAARVQEQVRARLLQLGQQPRHNGAAEPEPEAETARGTSRGQYHTLQAGFSSRSQGLSGDKTSGFRPIAKPAYSPASWSSRSAVDLSCSRRLSSAHNGGSAFGAAGYGGAQPTPPMPTRPVSFHERGGVGSRADYDTLSLRSLRLGPGGLDDRYSLVSEQLEPAATSTYRAFAYERQASSSSSRAGGLDWPEATEVSPSRTIRAPAVRTLQRFQSSHRSRGVGGAVPGAVLEPVARAPSVRSLSLSLADSGHLPDVHGFNSYGSHRTLQRLSSGFDDIDLPSAVKYLMASDPNLQVLGAAYIQHKCYSDAAAKKQARSLQAVPRLVKLFNHANQEVQRHATGAMRNLIYDNADNKLALVEENGIFELLRTLREQDDELRKNVTGILWNLSSSDHLKDRLARDTLEQLTDLVLSPLSGAGGPPLIQQNASEAEIFYNATGFLRNLSSASQATRQKMRECHGLVDALVTSINHALDAGKCEDKSVENAVCVLRNLSYRLYDEMPPSALQRLEGRGRRDLAGAPPGEVVGCFTPQSRRLRELPLAADALTFAEVSKDPKGLEWLWSPQIVGLYNRLLQRCELNRHTTEAAAGALQNITAGDRRWAGVLSRLALEQERILNPLLDRVRTADHHQLRSLTGLIRNLSRNARNKDEMSTKVVSHLIEKLPGSVGEKSPPAEVLVNIIAVLNNLVVASPIAARDLLYFDGLRKLIFIKKKRDSPDSEKSSRAASSLLANLWQYNKLHRDFRAKGYRKEDFLGP

SEQ ID NO: 851 - DNA, 4968 bp, Homo sapien
atgatttgtcaaaaattctgtgtggttttgttacattgggaatttatttatgtgataactgcgtttaacttgtcatatccaattactccttggagatttaagttgtcttgcatgccaccaaattcaacctatgactacttccttttgcctgctggactctcaaagaatacttcaaattcgaatggacattatgagacagctgttgaacctaagtttaattcaagtggtactcacttttctaacttatccaaaacaactttccactgttgctttcggagtgagcaagatagaaactgctccttatgtgcagacaacattgaaggaaagacatttgtttcaacagtaaattctttagtttttcaacaaatagatgcaaactggaacatacagtgctggctaaaaggagacttaaaattattcatctgttatgtggagtcattatttaagaatctattcaggaattataactataaggtccatcttttatatgttctgcctgaagtgttagaagattcacctctggttccccaaaaaggcagttttcagatggttcactgcaattgcagtgttcatgaatgttgtgaatgtcttgtgcctgtgccaacagccaaactcaacgacactctccttatgtgtttgaaaatcacatctggtggagtaattttccagtcacctctaatgtcagttcagcccataaatatggtgaagcctgatccaccattaggtttgcatatggaaatcacagatgatggtaatttaaagatttcttggtccagcccaccattggtaccatttccacttcaatatcaagtgaaatattcagagaattctacaacagttatcagagaagctgacaagattgtctcagctacatccctgctagtagacagtatacttcctgggtcttcgtatgaggttcaggtgaggggcaagagactggatggcccaggaatctggagtgactggagtactcctcgtgtctttaccacacaagatgtcatatactttccacctaaaattctgacaagtgttgggtctaatgtttcttttcactgcatctataagaaggaaaacaagattgttccctcaaaagagattgtttggtggatgaatttagctgagaaaattcctcaaagccagtatgatgttgtgagtgatcatgttagcaaagttacttttttcaatctgaatgaaaccaaacctcgaggaaagtttacctatgatgcagtgtactgctgcaatgaacatgaatgccatcatcgctatgctgaattatatgtgattgatgtcaatatcaatatctcatgtgaaactgatgggtacttaactaaaatgacttgcagatggtcaaccagtacaatccagtcacttgcggaaagcactttgcaattgaggtatcataggagcagcctttactgttctgatattccatctattcatcccatatctgagcccaaagattgctatttgcagagtgatggtttttatgaatgcattttccagccaatcttcctattatctggctacacaatgtggattaggatcaatcactctctaggttcacttgactctccaccaacatgtgtccttcctgattctgtggtgaagccactgcctccatccagtgtgaaagcagaaattactataaacattggattattgaaaatatcttgggaaaagccagtctttccagagaataaccttcaattccagattcgctatggtttaagtggaaaagaagtacaatggaagatgtatgaggtttatgatgcaaaatcaaaatctgtcagtctcccagttccagacttgtgtgcagtctatgctgttcaggtgcgctgtaagaggctagatggactgggatattggagtaattggagcaatccagcctacacagttgtcatggatataaaagttcctatgagaggacctgaattttggagaataattaatggagatactatgaaaaaggagaaaaatgtcactttactttggaagcccctgatgaaaaatgactcattgtgcagtgttcagagatatgtgataaaccatcatacttcctgcaatggaacatggtcagaagatgtgggaaatcacacgaaattcactttcctgtggacagagcaagcacatactgttacggttctggccatcaattcaattggtgcttctgttgcaaattttaatttaaccttttcatggcctatgagcaaagtaaatatcgtgcagtcactcagtgcttatcctttaaacagcagttgtgtgattgtttcctggatactatcacccagtgattacaagctaatgtattttattattgagtggaaaaatcttaatgaagatggtgaaataaaatggcttagaatctcttcatctgttaagaagtattatatccatgatcattttatccccattgagaagtaccagttcagtctttacccaatatttatggaaggagtgggaaaaccaaagataattaatagtttcactcaagatgatattgaaaaacaccagagtgatgcaggtttatatgtaattgtgccagtaattatttcctcttccatcttattgcttggaacattattaatatcacaccaaagaatgaaaaagctattttgggaagatgttccgaaccccaagaattgttcctgggcacaaggacttaattttcagaagagaacggacattctttgaagtctaatcatgatcactacagatgaacccaatgtgccaacttcccaacagtctatagagtattagaagatttttacattttgaagaaggggagcaaatctaaaaaaaattcagttgaacttctgagagttaacatatggtggattatgttgatttagaacttaaaatagatgtgtaaatttgggttcaaaatgtagatttgagtccagtttggatgtgtgattaattttcaaatcatctaaagtttaaaagtagtattcatgatttctggcttttgatttgtcatattcctggtcataaaacattaagaaaattatggctgttgctgtcattacatatctattaaatgtcatcaaatatgtagtagacaatgctgtaattaggtgaactctaaaactgcaacatctgacaaatagctttaaaaatacaatgattataagtatggaatcagtgaaaatatttagtttgtatttttatgtccaaacttttccattttagattcctttatagacacgtcagcctaaaaatcagcctattcgggtgttcttttgaatatctcctggcatttttgtatctaactttgttcaatctgggaatttcagttttcaatatccttgaaaatggcttaagtgataacttccgtttcagttaaaaggaagcccgaagttgtgtttgtgctgcccacaggacagtgggagttacagttcatatcaggatgaccctacatacccaggtcagattgacgggaccagaagggaacatcgacttctaatccagctttcttgtttaattatgacctaaatctaatttacttccactgaaccatccaagacctctggcaggcagggaaatgggcagtgatgcaaaaaagggagactctttggagcttttatgaatagttcatggtgaggacagaacttttctactttcagacagactgcttgctagttttatgaattcagcacacgaattatgctgcgttgctcacattcaaaccaaaccaacgactatgtttaatgaactcagtattcaaatttattatatatgcgtatatatgtatatatggatcccttatatttagatttaactcgtagttttatttgaaagtagaaaagaactctacaaaaacgggaagaatgtgtctttcttcccttcttgacttctaataggtgtcattgaaatgtaaaatctaagtatgaaattatgaaaggacattctttaattactgcccactcaacacatatttaatatgtgcccagattattctaaaatcttaaaaaaagatgcatatagtgaaattttttaaatggatatacttttaataaagttttataactcactgacaaaacatatttcaatagtatatgagtatgagatttcttatcaattatgagtgaaatattctatctgaatgcattggaaggcatttacagtatttgctttcaacagttactgagtatgacattttagcatgaaatatatcaaacacatcatttgaaggacatatgtaatcttgactatggttatggtttttttgtatgtattccttgttttcatattgatagcatctaattcttttgacaatcttaatatgtaggttcatttaaattttaagacagttcagtgcatatatagtagaagccttaagaaaaaagaaaatgagcaagcaaatatttgaagaaatgtataaaaccatagatttctttcagaaaaaaaaaacaggcataggaacagttttctcttcatatattatgattatgaataataggaaagttgtattaattcagtatttgtcattatgcagtattttaatacctacataagtctattccattattatattttgcgcttggcatatttattcctttatgcttttaatcactaacatattttacttaagagtataaaactatgctaaataaattgtattgtatatggaatatgcttgccattatgaagaacagctgggtataccattatttcaagtaataaatctgaattctattagtttaaaaattgtaaaattcaagttaaatgacgtgtatgatatataagctgaacacattttctatagcccttaatttagttgtgttaatttttcaaggtgatgtatcaacagctttttttttttgcatttgttttttcaatgtgtttacattgtatgaattgagctttttgcccacagattcttgatttgtagttgtttggcaggatttttctttgtgatataatcacttctataaaaaatatgatgtacaaaaaaaaaaaaaaaaaaaa

SEQ ID NO: 852 - protein, 896 aa, Homo sapien
MICQKFCVVLLHWEFIYVITAFNLSYPITPWRFKLSCMPPNSTYDYFLLPAGLSKNTSNSNGHYETAVEPKFNSSGTHFSNLSKTTFHCCFRSEQDRNCSLCADNIEGKTFVSTVNSLVFQQIDANWNIQCWLKGDLKLFICYVESLFKNLFRNYNYKVHLLYVLPEVLEDSPLVPQKGSFQMVHCNCSVHECCECLVPVPTAKLNDTLLMCLKITSGGVIFQSPLMSVQPINMVKPDPPLGLHMEITDDGNLKISWSSPPLVPFPLQYQVKYSENSTTVIREADKIVSATSLLVDSILPGSSYEVQVRGKRLDGPGIWSDWSTPRVFTTQDVIYFPPKILTSVGSNVSFHCIYKKENKIVPSKEIVWWMNLAEKIPQSQYDVVSDHVSKVTFFNLNETKPRGKFTYDAVYCCNEHECHHRYAELYVIDVNINISCETDGYLTKMTCRWSTSTIQSLAESTLQLRYHRSSLYCSDIPSIHPISEPKDCYLQSDGFYECIFQPIFLLSGYTMWIRINHSLGSLDSPPTCVLPDSVVKPLPPSSVKAEITINIGLLKISWEKPVFPENNLQFQIRYGLSGKEVQWKMYEVYDAKSKSVSLPVPDLCAVYAVQVRCKRLDGLGYWSNWSNPAYTVVMDIKVPMRGPEFWRIINGDTMKKEKNVTLLWKPLMKNDSLCSVQRYVINHHTSCNGTWSEDVGNHTKFTFLWTEQAHTVTVLAINSIGASVANFNLTFSWPMSKVNIVQSLSAYPLNSSCVIVSWILSPSDYKLMYFIIEWKNLNEDGEIKWLRISSSVKKYYIHDHFIPIEKYQFSLYPIFMEGVGKPKIINSFTQDDIEKHQSDAGLYVIVPVIISSSILLLGTLLISHQRMKKLFWEDVPNPKNCSWAQGLNFQKRTDIL

SEQ ID NO: 853 - DNA, 2000 bp, Homo sapien
cctgtgaacactatagcgctgagagagacagtctgaaagcagaggaagacatcgatcagtaacaccaagagacaccaaagttgaaagttttgttttctttccctctgttttatttttcccccgtgtgtccctactatggtcagaaagcctgttgtgtccaccatctccaaaggaggttacctgcagggaaatgttaacgggaggctgccttccctgggcaacaaggagccacctgggcaggagaaagtgcagctgaagaggaaagtcactttactgaggggagtctccattatcattggcaccatcattggagcaggaatcttcatctctcctaagggcgtgctccagaacacgggcagcgtgggcatgtctctgaccatctggacggtgtgtggggtcctgtcactatttggagctttgtcttatgctgaattgggaacaactataaagaaatctggaggtcattacacatatattttggaagtctttggtccattaccagcttttgtacgagtctgggtggaactcctcataatacgccctgcagctactgctgtgatatccctggcatttggacgctacattctggaaccattttttattcaatgtgaaatccctgaacttgcgatcaagctcattacagctgtgggcataactgtagtgatggtcctaaatagcatgagtgtcagctggagcgcccggatccagattttcttaaccttttgcaagctcacagcaattctgataattatagtccctggagttatgcagctaattaaaggtcaaacgcagaactttaaagacgccttttcaggaagagattcaagtattacgcggttgccactggctttttattatggaatgtatgcatatgctggctggttttacctcaactttgttactgaagaagtagaaaaccctgaaaaaaccattccccttgcaatatgtatatccatggccattgtcaccattggctatgtgctgacaaatgtggcctactttacgaccattaatgctgaggagctgctgctttcaaatgcagtggcagtgaccttttctgagcggctactgggaaatttctcattagcagttccgatctttgttgccctctcctgctttggctccatgaacggtggtgtgtttgctgtctccaggttattctatgttgcgtctcgagagggtcaccttccagaaatcctctccatgattcatgtccgcaagcacactcctctaccagctgttattgttttgcaccctttgacaatgataatgctcttctctggagacctcgacagtcttttgaatttcctcagttttgccaggtggctttttattgggctggcagttgctgggctgatttatcttcgatacaaatgcccagatatgcatcgtcctttcaaggtgccactgttcatcccagctttgttttccttcacatgcctcttcatggttgccctttccctctattcggacccatttagtacagggattggcttcgtcatcactctgactggagtccctgcgtattatctctttattatatgggacaagaaacccaggtggtttagaataatgtcagggttcctagcactgatgcctgcacaagcatgtgatatgtgaaataaaatggattcttctatagctaaatgagttccctctggggagagttctggtactgcaatcacaatgccagatggtgtttatgggctatttgtgtaagtaagtggtaagatgctatgaagtaagtgtgtttgttttcatcttatggaaactcttgatgcatgtgcttttgtatggaataaattttggtgcaatatgatgtcattcaactttgcattgaattgaattttggttgtatttatatgtattatacctgtcacgcttctagttgcttcaaccattttataaccatttttgtacatattttacttgaaaatattttaaatggaaatttaaataaacatttgatagtttacataataaaaaaaaaaaaaaaaaaa

SEQ ID NO: 854 - protein, 494 aa, Homo sapien
MVRKPVVSTISKGGYLQGNVNGRLPSLGNKEPPGQEKVQLKRKVTLLRGVSIIIGTIIGAGIFISPKGVLQNTGSVGMSLTIWTVCGVLSLFGALSYAELGTTIKKSGGHYTYILEVFGPLPAFVRVWVELLIIRPAATAVISLAFGRYILEPFFIQCEIPELAIKLITAVGITVVMVLNSMSVSWSARIQIFLTFCKLTAILIIIVPGVMQLIKGQTQNFKDAFSGRDSSITRLPLAFYYGMYAYAGWFYLNFVTEEVENPEKTIPLAICISMAIVTIGYVLTNVAYFTTINAEELLLSNAVAVTFSERLLGNFSLAVPIFVALSCFGSMNGGVFAVSRLFYVASREGHLPEILSMIHVRKHTPLPAVIVLHPLTMIMLFSGDLDSLLNFLSFARWLFIGLAVAGLIYLRYKCPDMHRPFKVPLFIPALFSFTCLFMVALSLYSDPFSTGIGFVITLTGVPAYYLFIIWDKKPRWFRIMSGFLALMPAQACDM

SEQ ID NO: 855 - DNA, 803 bp, Homo sapien
ccggcacgagaggagttgtgagtttccaagccccagctcactctgaccacttctctgcctgcccagcatcatgaagggccttgcagctgccctccttgtcctcgtctgcaccatggccctctgctcctgtgcacaagttggtaccaacaaagagctctgctgcctcgtctatacctcctggcagattccacaaaagttcatagttgactattctgaaaccagcccccagtgccccaagccaggtgtcatcctcctaaccaagagaggccggcagatctgtgctgaccccaataagaagtgggtccagaaatacatcagcgacctgaagctgaatgcctgaggggcctggaagctgcgagggcccagtgaacttggtgggcccaggagggaacaggagcctgagccagggcaatggccctgccaccctggaggccacctcttctaagagtcccatctgctatgcccagccacattaactaactttaatcttagtttatgcatcatatttcattttgaaattgatttctattgttgagctgcattatgaaattagtattttctctgacatctcatgacattgtctttatcatcctttcccctttcccttcaactcttcgtacattcaatgcatggatcaatcagtgtgattagctttctcagcagacattgtgccatatgtatcaaatgacaaatctttattgaatggttttgctcagcaccaccttttaatatattggcagtacttattatataaaaggtaaaccagcattctcactgtgaaaaaaaaaaaaaaaaaaaaaaaa

SEQ ID NO: 856 - protein, 89 aa, Homo sapien
MKGLAAALLVLVCTMALCSCAQVGTNKELCCLVYTSWQIPQKFIVDYSETSPQCPKPGVILLTKRGRQICADPNKKWVQKYISDLKLNA

SEQ ID NO: 857 - DNA, 2638 bp, Homo sapien
ggcacgaggtcgctttcctgcgcagagtctgcggaggggctcggctgcaccggggggatcgcgcctggcagaccccagaccgagcagaggcgacccagcgcgctcgggagaggctgcaccgccgcgcccccgcctagcccttccggatcctgcgcgcagaaaagtttcatttgctgtatgccatcctcgagagctgtctaggttaacgttcgcactctgtgtatataacctcgacagtcttggcacctaacgtgctgtgcgtagctgctcctttggttgaatccccaggcccttgttggggcacaaggtggcaggatgtctcagtggtacgaacttcagcagcttgactcaaaattcctggagcaggttcaccagctttatgatgacagttttcccatggaaatcagacagtacctggcacagtggttagaaaagcaagactgggagcacgctgccaatgatgtttcatttgccaccatccgttttcatgacctcctgtcacagctggatgatcaatatagtcgcttttctttggagaataacttcttgctacagcataacataaggaaaagcaagcgtaatcttcaggataattttcaggaagacccaatccagatgtctatgatcatttacagctgtctgaaggaagaaaggaaaattctggaaaacgcccagagatttaatcaggctcagtcggggaatattcagagcacagtgatgttagacaaacagaaagagcttgacagtaaagtcagaaatgtgaaggacaaggttatgtgtatagagcatgaaatcaagagcctggaagatttacaagatgaatatgacttcaaatgcaaaaccttgcagaacagagaacacgagaccaatggtgtggcaaagagtgatcagaaacaagaacagctgttactcaagaagatgtatttaatgcttgacaataagagaaaggaagtagttcacaaaataatagagttgctgaatgtcactgaacttacccagaatgccctgattaatgatgaactagtggagtggaagcggagacagcagagcgcctgtattggggggccgcccaatgcttgcttggatcagctgcagaactggttcactatagttgcggagagtctgcagcaagttcggcagcagcttaaaaagttggaggaattggaacagaaatacacctacgaacatgaccctatcacaaaaaacaaacaagtgttatgggaccgcaccttcagtcttttccagcagctcattcagagctcgtttgtggtggaaagacagccctgcatgccaacgcaccctcagaggccgctggtcttgaagacaggggtccagttcactgtgaagttgagactgttggtgaaattgcaagagctgaattataatttgaaagtcaaagtcttatttgataaagatgtgaatgagagaaatacagtaaaaggatttaggaagttcaacattttgggcacgcacacaaaagtgatgaacatggaggagtccaccaatggcagtctggcggctgaatttcggcacctgcaattgaaagaacagaaaaatgctggcaccagaacgaatgagggtcctctcatcgttactgaagagcttcactcccttagttttgaaacccaattgtgccagcctggtttggtaattgacctcgagacgacctctctgcccgttgtggtgatctccaacgtcagccagctcccgagcggttgggcctccatcctttggtacaacatgctggtggcggaacccaggaatctgtccttcttcctgactccaccatgtgcacgatgggctcagctttcagaagtgctgagttggcagttttcttctgtcaccaaaagaggtctcaatgtggaccagctgaacatgttgggagagaagcttcttggtcctaacgccagccccgatggtctcattccgtggacgaggttttgtaaggaaaatataaatgataaaaattttcccttctggctttggattgaaagcatcctagaactcattaaaaaacacctgctccctctctggaatgatgggtgcatcatgggcttcatcagcaaggagcgagagcgtgccctgttgaaggaccagcagccggggaccttcctgctgcggttcagtgagagctcccgggaaggggccatcacattcacatgggtggagcggtcccagaacggaggcgaacctgacttccatgcggttgaaccctacacgaagaaagaactttctgctgttactttccctgacatcattcgcaattacaaagtcatggctgctgagaatattcctgagaatcccctgaagtatctgtatccaaatattgacaaagaccatgcctttggaaagtattactccaggccaaaggaagcaccagagccaatggaacttgatggccctaaaggaactggatatatcaagactgagttgatttctgtgtctgaagtgtaagtgaacacagaagagtgacatgtttacaaacctcaagccagccttgctcctggctggggcctgttgaagatgcttgtattttacttttccattgtaattgctatcgccatcacagctgaacttgttgagatccccgtgttactgcctatcagcattttactactttaaaaaaaaaaaaaaaaaa

SEQ ID NO: 858 - protein, 712 aa, Homo sapien
MSQWYELQQLDSKFLEQVHQLYDDSFPMEIRQYLAQWLEKQDWEHAANDVSFATIRFHDLLSQLDDQYSRFSLENNFLLQHNIRKSKRNLQDNFQEDPIQMSMIIYSCLKEERKILENAQRFNQAQSGNIQSTVMLDKQKELDSKVRNVKDKVMCIEHEIKSLEDLQDEYDFKCKTLQNREHETNGVAKSDQKQEQLLLKKMYLMLDNKRKEVVHKIIELLNVTELTQNALINDELVEWKRRQQSACIGGPPNACLDQLQNWFTIVAESLQQVRQQLKKLEELEQKYTYEHDPITKNKQVLWDRTFSLFQQLIQSSFVVERQPCMPTHPQRPLVLKTGVQFTVKLRLLVKLQELNYNLKVKVLFDKDVNERNTVKGFRKFNILGTHTKVMNMEESTNGSLAAEFRHLQLKEQKNAGTRTNEGPLIVTEELHSLSFETQLCQPGLVIDLETTSLPVVVISNVSQLPSGWASILWYNMLVAEPRNLSFFLTPPCARWAQLSEVLSWQFSSVTKRGLNVDQLNMLGEKLLGPNASPDGLIPWTRFCKENINDKNFPFWLWIESILELIKKHLLPLWNDGCIMGFISKERERALLKDQQPGTFLLRFSESSREGAITFTWVERSQNGGEPDFHAVEPYTKKELSAVTFPDIIRNYKVMAAENIPENPLKYLYPNIDKDHAFGKYYSRPKEAPEPMELDGPKGTGYIKTELISVSEV

SEQ ID NO: 859 - DNA, 1367 bp, Homo sapien
gggcgtcttgcaatgatgggggaggactctgctgcttcttaagctccagcgtctcaagccagggcgagacagcccgccggccgcccggatctccacctgccaccccagagctgggacagcagccgggctgcggcactgggagggagaccccacagtggcctcttctgccacccacgcccccacccctggcatggccgaccagctgactgaggagcaggtcacagaattcaaggaggccttctccctgtttgacaaggatggggacggctgcatcaccacccgcgagctgggcacggtcatgcggtccctgggccagaaccccacggaggccgagctgcgggacatgatgagtgagatcgaccgggacggcaacggcaccgtggacttccccgagttcctgggcatgatggccaggaagatgaaggacacggacaacgaggaggagatccgcgaggccttccgcgtgttcgacaaggacggcaacggcttcgtcagcgccgccgagctgcgacacgtcatgacccggctgggggagaagctgagtgacgaggaggtggacgagatgatccgggccgcggacacggacggagacggacaggtgaactacgaggagtttgtccgtgtgctggtgtccaagtgaggccggcgcccaccatgctcctgggcgcccacgcggcccacagggcaagaacccggggcctcccgcctcctcccccatccccctgcctcccctgggcactgtggcttcctcctgcgcctggttgattcagcccacctctctgcatcccgcttcccgcgtctcttctctgcactcctgccgaccttcccacctgctcatctgaatgacacggaacgctcccactgcaggcaaaccgtgacgccctccccactcgggagaagcagagctgaccttaggaccgagcaccagggcaggttgcgctgactctgcggccctccaggacggacaccgggtgaccccttagggcacccaggcaagatccctaagaggcacccaatgcccaggccaggggggctgcagccctcagcccccgccaggattcccgcaggctcctggactggaagctccctccgcggtcggattctggagggtgggaggcatcttggcctgcagtaagcggtgctgacggggactctggccacagaggtcaggcctcctgaaaacagcactgccttccgcgctgccccagcttgccccattccttgtccgccaacccaccgtgattcatcttctgaagctgggagtgaaactgggtcagctgtaacctgttcctattcatctggaaggagggaggcttggatgagcaggggatgagagctgcagggaaataaatgagatattcgtcctt

SEQ ID NO: 860 - protein, 97 aa, Homo sapien
MSEIDRDGNGTVDFPEFLGMMARKMKDTDNEEEIREAFRVFDKDGNGFVSAAELRHVMTRLGEKLSDEEVDEMIRAADTDGDGQVNYEEFVRVLVSK

SEQ ID NO: 861 - DNA, 3415 bp, Homo sapien
gggagcagctagggcgcgggtctccctcctcccggagtttggaacggctgaagttcaccttccagcccctagcgccgttcgcgccgctaggcctggcttctgaggcggttgcggtgctcggtcgccgcctaggcggggcagggtgcgagcaggggcttcgggccacgcttctcttggcgacaggattttgctgaagtccgtccgggaaacggaggaaaaaaagagttgcgggaggctgtcggctaataacggttcttgatacatatttgccagacttcaagatttcagaaaaggggtgaaagagaagattgcaactttgagtcagacctgtaggcctgatagactgattaaaccacagaaggtgacctgctgagaaaagtggtacaaatactgggaaaaacctgctcttctgcgttaagtgggagacaatgtcacaagttaaaagctcttattcctatgatgccccctcggatttcatcaatttttcatccttggatgatgaaggagatactcaaaacatagattcatggtttgaggagaaggccaatttggagaataagttactggggaagaatggaactggagggctttttcagggcaaaactcctttgagaaaggctaatcttcagcaagctattgtcacacctttgaaaccagttgacaacacttactacaaagaggcagaaaaagaaaatcttgtggaacaatccattccgtcaaatgcttgttcttccctggaagttgaggcagccatatcaagaaaaactccagcccagcctcagagaagatctcttaggctttctgctcagaaggatttggaacagaaagaaaagcatcatgtaaaaatgaaagccaagagatgtgccactcctgtaatcatcgatgaaattctaccctctaagaaaatgaaagtttctaacaacaaaaagaagccagaggaagaaggcagtgctcatcaagatactgctgaaaagaatgcatcttccccagagaaagccaagggtagacatactgtgccttgtatgccacctgcaaagcagaagtttctaaaaagtactgaggagcaagagctggagaagagtatgaaaatgcagcaagaggtggtggagatgcggaaaaagaatgaagaattcaagaaacttgctctggctggaatagggcaacctgtgaagaaatcagtgagccaggtcaccaaatcagttgacttccacttccgcacagatgagcgaatcaaacaacatcctaagaaccaggaggaatataaggaagtgaactttacatctgaactacgaaagcatccttcatctcctgcccgagtgactaagggatgtaccattgttaagcctttcaacctgtcccaaggaaagaaaagaacatttgatgaaacagtttctacatatgtgccccttgcacagcaagttgaagacttccataaacgaacccctaacagatatcatttgaggagcaagaaggatgatattaacctgttaccctccaaatcttctgtgaccaagatttgcagagacccacagactcctgtactgcaaaccaaacaccgtgcacgggctgtgacctgcaaaagtacagcagagctggaggctgaggagctcgagaaattgcaacaatacaaattcaaagcacgtgaacttgatcccagaatacttgaaggtgggcccatcttgcccaagaaaccacctgtgaaaccacccaccgagcctattggctttgatttggaaattgagaaaagaatccaggagcgagaatcaaagaagaaaacagaggatgaacactttgaatttcattccagaccttgccctactaagattttggaagatgttgtgggtgttcctgaaaagaaggtacttccaatcaccgtccccaagtcaccagcctttgcattgaagaacagaattcgaatgcccaccaaagaagatgaggaagaggacgaaccggtagtgataaaagctcaacctgtgccacattatggggtgccttttaagccccaaatcccagaggcaagaactgtggaaatatgccctttctcgtttgattctcgagacaaagaacgtcagttacagaaggagaagaaaataaaagaactgcagaaaggggaggtgcccaagttcaaggcacttcccttgcctcattttgacaccattaacctgccagagaagaaggtaaagaatgtgacccagattgaacctttctgcttggagactgacagaagaggtgctctgaaggcacagacttggaagcaccagctggaagaagaactgagacagcagaaagaagcagcttgtttcaaggctcgtccaaacaccgtcatctctcaggagccctttgttcccaagaaagagaagaaatcagttgctgagggcctttctggttctctagttcaggaaccttttcagctggctactgagaagagagccaaagagcggcaggagctggagaagagaatggctgaggtagaagcccagaaagcccagcagttggaggaggccagactacaggaggaagagcagaaaaaagaggagctggccaggctacggagagaactggtgcataaggcaaatccaatacgcaagtaccagggtctggagataaagtcaagtgaccagcctctgactgtgcctgtatctcccaaattctccactcgattccactgctaaactcagctgtgagctgcggataccgcccggcaatgggacctgctcttaacctcaaacctaggaccgtcttgctttgtcattgggcatggagagaacccatttctccagacttttacctacccgtgcctgagaaagcatacttgacaactgtggactccagttttgttgagaattgttttcttacattactaaggctaataatgagatgtaactcatgaatgtctcgattagactccatgtagttacttcctttaaaccatcagccggccttttatatgggtcttcactctgactagaatttagtctctgtgtcagcacagtgtaatctctattgctattgccccttacgactctcaccctctccccactttttttaaaaattttaaccagaaaataaagatagttaaatcctaagatagagattaagtcatggtttaaatgaggaacaatcagtaaatcagattctgtcctcttctctgcataccgtgaatttatagttaaggatccctttgctgtgagggtagaaaacctcaccaactgcaccagtgaggaagaagactgcgtggattcatggggagcctcacagcagccacgcagcaggctctgggtggggctgccgttaaggcacgttctttccttactggtgctgataacaacagggaaccgtgcagtgtgcattttaagacctggcctggaataaatacgttttgtctttccctcaaaaaaaaaaaaaaaaaaaaaaa

SEQ ID NO: 862 - protein, 747 aa, Homo sapien
MSQVKSSYSYDAPSDFINFSSLDDEGDTQNIDSWFEEKANLENKLLGKNGTGGLFQGKTPLRKANLQQAIVTPLKPVDNTYYKEAEKENLVEQSIPSNACSSLEVEAAISRKTPAQPQRRSLRLSAQKDLEQKEKHHVKMKAKRCATPVIIDEILPSKKMKVSNNKKKPEEEGSAHQDTAEKNASSPEKAKGRHTVPCMPPAKQKFLKSTEEQELEKSMKMQQEVVEMRKKNEEFKKLALAGIGQPVKKSVSQVTKSVDFHFRTDERIKQHPENQEEYKEVNFTSELRKHPSSPARVTKGCTIVKPFNLSQGKKRTFDETVSTYVPLAQQVEDFHKRTPNRYHLRSKKDDINLLPSKSSVTKICRDPQTPVLQTKHRARAVTCKSTAELEAEELEKLQQYKFKARELDPRILEGGPILPKKPPVKPPTEPIGFDLEIEKRIQERESKKKTEDEHFEFHSRPCPTKILEDVVGVPEKKVLPITVPKSPAFALKNRIRMPTKEDEEEDEPVVIKAQPVPHYGVPFKPQIPEARTVEICPFSFDSRDKERQLQKEKKIKELQKGEVPKFKALPLPHFDTINLPEKKVKNVTQIEPFCLETDRRGALKAQTWKHQLEEELRQQKEAACFKARPNTVISQEPFVPKKEKKSVAEGLSGSLVQEPFQLATEKRAKERQELEKRMAEVEAQKAQQLEEARLQEEEQKKEELARLRRELVHKANPIRKYQGLEIKSSDQPLTVPVSPKFSTRFHC

SEQ ID NO: 863 - DNA, 1794 bp, Homo sapien
cgccgagatcgggtgcccgggatgagcctcatccggaaaaagggcttctacaagcaggacgtcaacaagaccgcctgggagctgcccaagacctacgtgtccccgacgcacgtcggcagcggggcctatggctccgtgtgctcggccatcgacaagcggtcaggggagaaggtggccatcaagaagctgagccgaccctttcagtccgagatcttcgccaagcgcgcctaccgggagctgctgctgctgaagcacatgcagcatgagaacgtcattgggctcctggatgtcttcaccccagcctcctccctgcgcaacttctatgacttctacctggtgatgcccttcatgcagacggatctgcagaagatcatggggatggagttcagtgaggagaagatccagtacctggtgtatcagatgctcaaaggccttaagtacatccactctgctggggtcgtgcacagggacctgaagccaggcaacctggctgtgaatgaggactgtgaactgaagattctggattttgggctggcgcgacatgcagacgccgagatgactggctacgtggtgacccgctggtaccgagcccccgaggtgatcctcagctggatgcactacaaccagacagtggatatctggtctgtgggctgtatcatggcagagatgctgacagggaaaactctgttcagggggaaagattacctggaccagctgacccagatcctgaaagtgaccggggtgcctggcacggagtttgtgcagaagctgaacgacaaagcggccaaatcctacatccagtccctgccacagacccccaggaaggatttcactcagctgttcccacgggccagcccccaggctgcggacctgctggagaagatgctggagctagacgtggacaagcgcctgacggccgcgcaggccctcacccatcccttctttgaacccttccgggaccctgaggaagagacggaggcccagcagccgtttgatgattccttagaacacgagaaactcacagtggatgaatggaagcagcacatctacaaggagattgtgaacttcagccccattgcccggaaggactcacggcgccggagtggcatgaagctgtagggactcatcttgcatggcaccgccggccagacactgcccaaggaccagtatttgtcactaccaaactcagcccttcttggaatacagcctttcaagcagaggacagaagggtccttctccttatgtgggaaatgggcctagtagatgcagaattcaaagatgtcggttgggagaaactagctctgatcctaacaggccacgttaaactgcccatctggagaatcgcctgcaggtggggccctttccttcccgccagagtggggctgagtgggcgctgagccaggccgggggcctatggcagtgatgctgtgttggtttcctagggatgctctaacgaattaccacaaacctggtggattgaaacagcagaacttgattcccttacagttctggaggctggaaatctgggatggaggtgttggcagggctgtggtccctttgaaggctctggggaagaatccttccttggctctttttagcttgtggcggcagtgggcagtccgtggcattccccagcttattgctgcatcactccagtctctgtctcttctgttctctcctcttttaacaacagtcattggatttagggcccaccctaatcctgtgtgatcttatcttgatccttattaattaaacctgcaaatactctagttccaaataaaaaaaaaaaaaaaa

SEQ ID NO: 864 - protein, 365 aa, Homo sapien [sequence omitted]

SEQ ID NO: 865 - DNA, 1805 bp, Homo sapien
ggcacgaggctgggaccggagtggggagcgcggcgtggaggtgccacccggcgcgggtggcggagagatcagaagcctcttccccaagccgagccaacctcagcggggacccgggctcagggacgcggcggcggcggcggcgactgcagtggctggacgatggcagcgtccgccggagccggggcggtgattgcagccccagacagccggcgctggctgtggtcggtgctggcggcggcgcttgggctcttgacagctggagtatcagccttggaagtatatacgccaaaagaaatcttcgtggcaaatggtacacaagggaagctgacctgcaagttcaagtctactagtacgactggcgggttgacctcagtctcctggagcttccagccagagggggccgacactactgtgtcgtttttccactactcccaagggcaagtgtaccttgggaattatccaccatttaaagacagaatcagctgggctggagaccttgacaagaaagatgcatcaatcaacatagaaaatatgcagtttatacacaatggcacctatatctgtgatgtcaaaaaccctcctgacatcgttgtccagcctggacacattaggctctatgtcgtagaaaaagagaatttgcctgtgtttccagtttgggtagtggtgggcatagttactgctgtggtcctaggtctcactctgctcatcagcatgattctggctgtcctctatagaaggaaaaactctaaacgggattacactggctgcagtacatcagagagtttgtcaccagttaagcaggctcctcggaagtccccctccgacactgagggtcttgtaaagagtctgccttctggatctcaccagggcccagtcatatatgcacagttagaccactccggcggacatcacagtgacaagattaacaagtcagagtctgtggtgtatgcggatatccgaaagaattaagagaatacctagaacatatcctcagcaagaaacaaaaccaaactggactctcgtgcagaaaatgtagcccattaccacatttagccttggagacccaggcaaggacaagtacacgtgtactcacagagggagagaaagatgtgtacaaaggatatgtataaatattctatttagtcatcctgatatgaggagccagtgttgcatgatgaaaagatggtatgattctacatatgtacccattgtcttgctgtttttgtactttcttttcaggtcatttacaattgggagatttcagaaacattcctttcaccatcatttagaaatggtttgccttaatggagacaatagcagatcctgtagtatttccagtagacatggccttttaatctaagggcttaagactgattagtcttagcatttactgtagttggaggatggagatgctatgatggaagcatacccagggtggcctttagcacagtatcagtaccatttatttgtctgccgcttttaaaaaatacccattggctatgccacttgaaaacaatttgagaagtttttttgaagtttttctcactaaaatatggggcaattgttagccttacatgttgtgtagacttactttaagtttgcacccttgaaatgtgtcatatcaatttctggattcataatagcaagattagcaaaggataaatgccgaaggtcacttcattctggacacagttggatcaatactgattaagtagaaaatccaagctttgcttgagaacttttgtaacgtggagagtaaaaagtatcggttttaaaaaaaaaaaaaaaaaaaaaaaaaaaaaaaa

SEQ ID NO: 866 - protein, 269 aa, Homo sapien
MAASAGAGAVIAAPDSRRWLWSVLAAALGLLTAGVSALEVYTPKEIFVANGTQGKLTCKFKSTSTTGGLTSVSWSFQPEGADTTVSFFHYSQGQVYLGNYPPFKDRISWAGDLDKKDASINIENMQFIHNGTYICDVKNPPDIVVQPGHIRLYVVEKENLPVFPVWVVVGIVTAVVLGLTLLISMILAVLYRRKNSKRDYTGCSTSESLSPVKQAPRKSPSDTEGLVKSLPSGSHQGPVIYAQLDHSGGHHSDKINKSESVVYADIRKN

SEQ ID NO: 867 - DNA, 2561 bp, Homo sapien
ggggggtgtttggagagcccggactggatgcccactagaatcctgtgctgtgaacagtgagagagttttcttcattttgaggaaccctaaacacctatctttcccaaggcaacctgtctggactgagcatttctctgacttgacataacttcccatccagccaggagtctgcactcttcagtctttgcaggcagtagcagaatcccatggtagccaggtgggtgaaggggagcgaggacgttctacctgccttgaagaagacacctgacctgcggagtgagtgaccagtgtttccagagcctggcaatggatgccattcacatcggcatgtccagcacccccctggtgaagcacactgctggggctgggctcaaggccaacagaccccgcgtcatgtccaagagtgggcacagcaacgtgagaattgacaaagtggatggcatatacctactctacctgcaagacctgtggaccacagttatcgacatgaagtggagatacaaactcaccctgttcgctgccacttttgtgatgacctggttcctttttggagtcatctactatgccatcgcgtttattcatggggacttagaacccggtgagcccatttcaaatcataccccctgcatcatgaaagtggactctctcactggggcgtttctcttttccctggaatcccagacaaccattggctatggagtccgttccatcacagaggaatgtcctcatgccatcttcctgttggttgctcagttggtcatcacgaccttgattgagatcttcatcaccggaaccttcctggccaaaatcgccagacccaaaaagcgggctgagaccatcaagttcagccactgtgcagtcatcaccaagcagaatgggaagctgtgcttggtgattcaggtagccaatatgaggaagagcctcttgattcagtgccagctctctggcaagctcctgcagacccacgtcaccaaggagggggagcggattctcctcaaccaagccactgtcaaattccacgtggactcctcctctgagagccccttcctcattctgcccatgacattctaccatgtgctggatgagacgagccccctgagagacctcacaccccaaaacctaaaggagaaggagtttgagcttgtggtcctcctcaatgccactgtggaatccaccagcgctgtctgccagagccgaacatcttatatcccagaggaaatctactggggttttgagtttgtgcctgtggtatctctctccaaaaatggaaaatatgtggctgatttcagtcagtttgaacagattcggaaaagcccagattgcacattttactgtgcagattctgagaaacagcaactcgaggagaagtacaggcaggaggatcagagggaaagagaactgaggacacttttattacaacagagcaatgtctgatcacaggggcgccatccaggtttaaccctgcaagctgtttccacatcagaactcccttcaaacacaaagattgctgtgaaaacgaaaatgtgtagacgcactctcaaaaactgcacggacatacaaaatcaatcttttcctttgatcttgtggctaaaccagcatttctgtgtttgagagatttcctgttaggtgcttcgtctgaaagtgaactctcataattcaaattgtataaaataaagctacatttctaagagcttggtgtagggcaattggaataatgtcctgttagataaacagacatttagcaatcctgacattaaaaggaaatgtatttctatacaagattattagctgtaatacaagatatttatttaaccaatgaccttatggctgagagttgaattgtggttcagtattcattgatctcactgctttaaaacatgctctttttgttcaagcaggaaaaatattatatctaattatgtctatgtggtaatacctaaaaagaggtagagagactctatgttcacaaaatatagtaatttcatttttacctttcttcagtggactgaattgtatggaaggaaattgatcagatctgtaattcacaactgtggaaacctacacaaatggggctgatgccattgtttcctctattttattttatttatttttgaatccactatctctttccattcaaaatatttccattcaaaatgtggttcacagacccgccacatcagcaccatccgagagcttattagtaatgtgtagattctcatgtcccagccagacttacagaattggggtctgtatcttaacaagaaccccagatgatttgtgtacaaatgaaagttcgaaagctgtgctctggacagtgttctcaaagcaactttctgaagccgtgtggaaaactgactctgtgtgggtcccgtatccctgtggcatccagacctggcctctcttcatttcattattattggccaatatttctttcagccatttcatttcttatctattaaaatggcttgcccataaaggaactgcataggattatcccctgacattccaagagcaaaataaagctcttgagagaaaaaaaaaaaaaaaaaaaaaaaaaaaaa

SEQ ID NO: 868 - protein, 375 aa, Homo sapien
MDAIHIGMSSTPLVKHTAGAGLKANRPRVMSKSGHSNVRIDKVDGIYLLYLQDLWTTVIDMKWRYKLTLFAATFVMTWFLFGVIYYAIAFIHGDLEPGEPISNHTPCIMKVDSLTGAFLFSLESQTTIGYGVRSITEECPHAIFLLVAQLVITTLIEIFITGTFLAKIARPKKRAETIKFSHCAVITKQNGKLCLVIQVANMRKSLLIQCQLSGKLLQTHVTKEGERILLNQATVKFHVDSSSESPFLILPMTFYHVLDETSPLRDLTPQNLKEKEFELVVLLNATVESTSAVCQSRTSYIPEEIYWGFEFVPVVSLSKNGKYVADFSQFEQIRKSPDCTFYCADSEKQQLEEKYRQEDQRERELRTLLLQQSNV

SEQ ID NO: 869 - DNA, 1596 bp, Homo sapien
ccgcgggacgcatgcgcacggcggacggaggcgagccggccggggcttcctccccggccggcagggtggacggtgggctccagatgggatcagagcggatggagatgcggaagcggcagatgcccgccgcccaggacacaccaggcgccgccccaggccagcccggagcggggagtcgcgggtccaacgcatgctgcttctgctggtgctgctgttgtagctgctcgtgtctcactgttagaaaccaggaagatcagaggcccacaatagcttcccacgaactcagagcagatcttccaacctgggaagaaagccctgctcctactctggaagaagtcaacgcctgggctcagtcatttgacaaattaatggtcactccagcaggaaggaatgcattccgtgaattcctccgaacagaattcagtgaggaaaatatgctcttctggatggcctgtgaggaactgaaaaaggaagctaataaaaacattattgaagagaaagcaaggataatctatgaagactacatttctatactttctcctaaggaggtgagcttagactcccgggtgagagaagtgatcaacagaaacatggtggagccatcccaacacatattcgatgatgctcaacttcagatttacaccctgatgcacagagactcatatcctcgattcatgaactctgctgtctataaggacttgcttcagtccttatcggagaaatctattgaagcataggatttttcaaatatatttattattaataaaataataaaagaattcatgggctacaactagcacagggaatttagaggttgtagcatcttctgctggagtaatactcaggctattctaataacagatgattccttcaacagactgctatatattcaccatgtaaactgcagccacctttagtgatacttttaaaaaaaaaaataaagggatatggctgttgtagaaagatagcgtatttgcatttacaataacagtagcatgttgtcagtggccaaggctacacagaaggctccctgctgcccggagcaggtacatccacagagcaaagggaaccacttttattttgcatgagtttggtaactgattactctcccctcaaagaaaagacattcaggtgtttctcaacgacatcttctgtccagcaagctcggtttgaatacgtcacttaccagtgccattgcaggacccaaattcacagttcataaaagatgtgaccactacatgtaaaaatagcattctacttgatcttacagtatgtatgtatgtatgtatggagacatatgtgtgcgtgtggatgtctacatggttaatggaaagcactgtgctctgaagtggatcagtctcaagtgtctggtaacagcagcaatgcttagaaaattcttttgttgaaaagagttactgttattatcagaatttgccaacctaaagaatgaatttttaaattcataacttggtcatgttcacaacaaaactgtcaaataagcatatttccatttttattactgaaagaaatatgggcattttcattctttaaagaaataaagcacaagaattttatctcaaaaaaaaaaaaaaaaaa

SEQ ID NO: 870 - protein, 241 aa, Homo sapien
MRTADGGEPAGASSPAGRVDGGLQMGSERMEMRKRQMPAAQDTPGAAPGQPGAGSRGSNACCFCWCCCCSCSCLTVRNQEDQRPTIASHELRADLPTWEESPAPTLEEVNAWAQSFDKLMVTPAGRNAFREFLRTEFSEENMLFWMACEELKKEANKNIIEEKARIIYEDYISILSPKEVSLDSRVREVINRNMVEPSQHIFDDAQLQIYTLMHRDSYPRFMNSAVYKDLLQSLSEKSIEA

SEQ ID NO: 871 - DNA, 11426 bp, Homo sapien
agacccgccgggctcccgccgcgcgcgctgtccctggagctcggggacgcggcccggagccgggaagatggcgaagcggctctgcgcggggagcgcactgtgtgttcgcggcccccggggccccgcgccgctgctgctggtcgggctggcgctgctgggcgcggcgcgggcgcgggaggaggcgggcggcggcttcagcctgcacccgccctacttcaacctggccgagggcgcccgcatcgccgcctccgcgacctgcggagaggaggccccggcgcgcggctccccgcgccccaccgaggacctttactgcaagctggtagggggccccgtggccggcggcgaccccaaccagaccatccggggccagtactgtgacatctgcacggctgccaacagcaacaaggcacaccccgcgagcaatgccatcgatggcacggagcgctggtggcagagtccaccgctgtcccgcggcctggagtacaacgaggtcaacgtcaccctggacctgggccaggtcttccacgtggcctacgtcctcatcaagtttgccaactcaccccggccggacctctgggtgctggagcggtccatggacttcggccgcacctaccagccctggcagttctttgcctcctccaagagggactgtctggagcggttcgggccacagacgctggagcgcatcacacgggacgacgcggccatctgcaccaccgagtactcacgcatcgtgcccctggagaacggagagatcgtggtgtccctggtgaacggacgtccgggcgccatgaatttctcctactcgccgctgctacgtgagttcaccaaggccaccaacgtccgcctgcgcttcctgcgtaccaacacgctgctgggccatctcatggggaaggcgctgcgggaccccacggtcacccgccggtattattacagcatcaaggatatcagcatcggaggccgctgtgtctgccacggccacgcggatgcctgcgatgccaaagaccccacggacccgttcaggctgcagtgcacctgccagcacaacacctgcgggggcacctgcgaccgctgctgccccggcttcaatcagcagccgtggaagcctgcgactgccaacagtgccaacgagtgccagtcctgtaactgctacggccatgccaccgactgttactacgaccctgaggtggaccggcgccgcgccagccagagcctggatggcacctatcagggtgggggtgtctgtatcgactgccagcaccacaccaccggcgtcaactgtgagcgctgcctgcccggcttctaccgctctcccaaccaccctctcgactcgccccacgtctgccgccgctgcaactgcgagtccgacttcacggatggcacctgcgaggacctgacgggtcgatgctactgccggcccaacttctctggggagcggtgtgacgtgtgtgccgagggcttcacgggcttcccaagctgctacccgacgccctcgtcctccaatgacaccagggagcaggtgctgccagccggccagattgtgaattgtgactgcagcgcggcagggacccagggcaacgcctgccggaaggacccaagggtgggacgctgtctgtgcaaacccaacttccaaggcacccattgtgagctctgcgcgccagggttctacggccccggctgccagccctgccagtgttccagccctggagtggccgatgaccgctgtgaccctgacacaggccagtgcaggtgccgagtgggcttcgagggggccacatgtgatcgctgtgcccccggctactttcacttccctctctgccagttgtgtggctgcagccctgcaggaaccttgcccgagggctgcgatgaggccggccgctgcctatgccagcctgagtttgctggacctcattgtgaccggtgccgccctggctaccatggtttccccaactgccaagcatgcacctgcgaccctcggggagccctggaccagctctgtggggcgggaggtttgtgccgctgccgccccggctacacaggcactgcctgccaggaatgcagccccggctttcacggcttccccagctgtgtcccctgccactgctctgctgaaggctccctgcacgcagcctgtgacccccggagtgggcagtgcagctgccggccccgtgtgacggggctgcggtgtgacacatgtgtgcccggtgcctacaacttcccctactgcgaagctggctcttgccaccctgccggtctggccccagtggatcctgcccttcctgaggcacaggttccctgtatgtgccgggctcacgtggaggggccgagctgtgaccgctgcaaacctgggttctggggactgagccccagcaaccccgagggctgtacccgctgcagctgcgacctcaggggcacactgggtggagttgctgagtgccagccgggcaccggccagtgcttctgcaagccccacgtgtgcggccaggcctgcgcgtcctgcaaggatggcttctttggactggatcaggctgactattttggctgccgcagctgccggtgtgacattggcggtgcactgggccagagctgtgaaccgaggacgggcgtctgccggtgccgccccaacacccagggccccacctgcagcgagcctgcgagggaccactacctcccggacctgcaccacctgcgcctggagctggaggaggctgccacacctgagggtcacgccgtgcgctttggcttcaaccccctcgagttcgagaacttcagctggaggggctacgcgcagatggcacctgtccagcccaggatcgtggccaggctgaacctgacctcccctgaccttttctggctcgtcttccgatacgtcaaccggggggccatgagtgtgagcgggcgggtctctgtgcgagaggagggcaggtcggccacctgcgccaactgcacagcacagagtcagcccgtggccttcccacccagcacggagcctgccttcatcaccgtgccccagaggggcttcggagagccctttgtgctgaaccctggcacctgggccctgcgtgtggaggccgaaggggtgctcctggactacgtggttctgctgcctagcgcatactacgaggcggcgctcctgcagctgcgggtgactgaggcctgcacataccgtccctctgcccagcagtctggcgacaactgcctcctctacacacacctccccctggatggcttcccctcggccgccgggctggaggccctgtgtcgccaggacaacagcctgccccggccctgccccacggagcagctcagcccgtcgcacccgccactgatcacctgcacgggcagtgatgtggacgtccagcttcaagtggcagtgccacagccaggccgctatgccctagtggtggagtacgccaatgaggatgcccgccaggaggtgggcgtggccgtgcacaccccacagcgggccccccagcaggggctgctctccctgcacccctgcctgtacagcaccctgtgccggggcactgcccgggatacccaggaccacctggctgtcttccacctggactcggaggccagcgtgaggctcacagccgaacaggcacgcttcttcctgcacggggtcactctggtgcccattgaggagttcagcccggagttcgtggagccccgggtcagctgcatcagcagccacggcgcctttggccccaacagtgccgcctgtctgccctcgcgcttcccaaagccgccccagcccatcatcctcagggactgccaggtgatcccgctgccgcccggcctcccgctgacccacgcgcaggatctcactccagccatgtccccagctggaccccgacctcggccccccaccgctgtggaccctgatgcagagcccaccctgctgcgtgagccccaggccaccgtggtcttcaccacccatgtgcccacgctgggccgctatgccttcctgctgcacggctaccagccagcccaccccaccttccccgtggaagtcctcatcaacgccggccgcgtgtggcagggccacgccaacgccagcttctgtccacatggctacggctgccgcaccctggtggtgtgtgagggccaggccctgctggacgtgacccacagcgagctcactgtgaccgtgcgtgtgcccaagggccggtggctctggctggattatgtactcgtggtccctgagaacgtctacagctttggctacctccgggaggagcccctggataaatcctatgacttcatcagccactgcgcagcccagggctaccacatcagccccagcagctcatccctgttctgccgaaacgctgctgcttccctctccctcttctataacaacggagcccgtccatgtggctgccacgaagtaggtgctacaggccccacgtgtgagcccttcgggggccagtgtccctgccatgcccatgtcattggccgtgactgctcccgctgtgccaccggatactggggcttccccaactgcaggccctgtgactgcggtgcccgcctctgtgacgagctcacgggccagtgcatctgcccgccacgcaccatcccgcccgactgcctgctgtgccagccccagacctttggctgccaccccctggtcggctgtgaggagtgtaactgctcagggcccggcatccaggagctcacagaccctacctgtgacacagacagcggccagtgcaagtgcagacccaacgtgactgggcgccgctgtgatacctgctctccgggcttccatggctacccccgctgccgcccctgtgactgtcacgaggcgggcactgcgcctggcgtgtgtgaccccctcacagggcagtgctactgtaaggagaacgtgcagggccccaaatgtgaccagtgcagccttgggaccttctcactggatgctgccaaccccaaaggttgcacccgctgcttctgctttggggccacggagcgctgccggagctcgtcctacacccgccaggagttcgtggatatggagggatgggtgctgctgagcactgaccggcaggtggtgccccacgagcggcagccagggacggagatgctccgtgcagacctgcggcacgtgcctgaggctgtgcccgaggctttccccgagctgtactggcaggccccaccctcctacctgggggaccgggtgtcatcctacggtgggaccctccgttatgaactgcactcagagacccagcggggagatgtctttgtccccatggagagcaggccggatgtggtgctgcagggcaaccagatgagcatcacattcctggagccggcataccccacgcctggccacgttcaccgtgggcagctgcagctggtggaggggaacttccggcatacggagacgcgcaacactgtgtcccgcgaggagctcatgatggtgctggccagcctggagcagctgcagatccgtgccctcttctcacagatctcctcggctgtcttcctgcgcagggtggcactggaggtggccagcccagcaggccagggggccctggccagcaatgtggagctgtgcctgtgccccgccagctaccggggggactcatgccaggaatgtgcccccggcttctatcgggacgtcaaaggtctcttcctgggccgatgtgtcccttgtcagtgccatggacactcagaccgctgcctccctggctctggcgtctgtgtggactgccagcacaacaccgaaggggcccactgtgagcgctgccaggctggcttcgtgagcagcagggacgaccccagcgccccctgtgtcagctgcccctgccccctctcagtgccttccaacaacttcgccgagggctgtgtcctgcgaggcggccgcacccagtgcctctgcaaacctggttatgcaggtgcctcctgcgagcggtgtgcgcccggattctttgggaacccactggtgctgggcagctcctgccagccatgcgactgcagcggcaacggtgaccccaacttgctcttcagcgactgcgaccccctgacgggcgcctgccgtggctgcctgcgccacaccactgggccccgctgcgagatctgtgcccccggcttctacggcaacgccctgctgcccggcaactgcacccggtgcgactgtaccccatgtgggacagaggcctgcgacccccacagcgggcactgcctgtgcaaggcgggcgtgactgggcggcgctgtgaccgctgccaggagggacattttggtttcgatggctgcgggggctgccgcccgtgtgcttgtggaccggccgccgagggctccgagtgccacccccagagcggacagtgccactgccgaccagggaccatgggaccccagtgccgcgagtgtgcccctggctactgggggctccctgagcagggctgcaggcgctgccagtgccctgggggccgctgtgaccctcacacgggccgctgcaactgccccccggggctcagcggggagcgctgcgacacctgcagccagcagcatcaggtgcctgttccaggcgggcctgtgggccacagcatccactgtgaagtgtgtgaccactgtgtggtcctgctcctggatgacctggaacgggccggcgccctcctccccgccattcacgagcaactgcgtggcatcaatgccagctccatggcctgggcccgtctgcacaggctgaacgcctccatcgctgacctgcagagccagctccggagccccctgggcccccgccatgagacggcacagcagctggaggtgctggagcagcagagcacaagcctcgggcaggacgcacggcggctaggcggccaggccgtggggacccgagaccaggcgagccaattgctggccggcaccgaggccacactgggccatgcgaagacgctgttggcggccatccgggctgtggaccgcaccctgagcgagctcatgtcccagacgggccacctggggctggccaatgcctcggctccatcaggtgagcagctgctccggacactggccgaggtggagcggctgctctgggagatgcgggcccgggacctgggggccccgcaggcagcagctgaggctgagttggctgcagcacagagattgctggcccgggtgcaggagcagctgagcagcctctgggaggagaaccaggcactggccacacaaacccgcgaccggctggcccagcacgaggccggcctcatggacctgcgagaggctttgaaccgggcagtggacgccacacgggaggcccaggagctcaacagccgcaaccaggagcgcctggaggaagccctgcaaaggaagcaggagctgtcccgggacaatgccaccctgcaggccactctgcatgcggctagggacaccctggccagcgtcttcagattgctgcacagcctggaccaggctaaggaggagctggagcgcctcgccgccagcctggatggggctcggaccccactgctgcagaggatgcagaccttctccccggcgggcagcaagctgcgtctagtggaggccgccgaggcccacgcacagcagctgggccagctggcactcaatctgtccagcatcatcctggacgtcaaccaggaccgcctcacccagagggccatcgaggcctccaacgcctacagccgcatcctgcaggccgtgcaggctgccgaggatgctgctggccaggccctgcagcaggcggaccacacgtgggcgacggtggtgcggcagggcctggtggaccgagcccagcagctcctggccaacagcactgcactagaagaggccatgctccaggaacagcagaggctgggccttgtgtgggctgccctccagggtgccaggacccagctccgagatgtccgggccaagaaggaccagctggaggcgcacatccaggcggcgcaggccatgcttgccatggacacagacgagacaagcaagaagatcgcacatgccaaggctgtggctgctgaagcccaggacaccgccacccgtgtgcagtcccagctgcaggccatgcaggagaatgtggagcggtggcagggccagtacgagggcctgcggggccaggacctgggccaggcagtgcttgacgcaggccactcagtgtccaccctggagaagacgctgccccagctgctggccaagctgagcatcctggagaaccgtggggtgcacaacgccagcctggccctgtccgccagcattggccgcgtgcgagagctcattgcccaggcccggggggctgccagtaaggtcaaggtgcccatgaagttcaacgggcgctcaggggtgcagctgcgcaccccacgggatcttgccgaccttgctgcctacactgccctcaagttctacctgcagggcccagagcctgagcctgggcagggtaccgaggatcgctttgtgatgtacatgggcagccgccaggccactggggactacatgggtgtgtctctgcgtgacaagaaggtgcactgggtgtatcagctgggtgaggcgggccctgcagtcctaagcatcgatgaggacattggggagcagttcgcagctgtcagcctggacaggactctccagtttggccacatgtccgtcacagtggagagacagatgatccaggaaaccaagggtgacacggtggcccctggggcagaggggctgctcaacctgcggccagacgacttcgtcttctacgtcggggggtaccccagtaccttcacgccccctcccctgcttcgcttccccggctaccggggctgcatcgagatggacacgctgaatgaggaggtggtcagcctctacaacttcgagaggaccttccagctggacacggctgtggacaggccttgtgcccgctccaagtcgaccggggacccgtggctcacggacggctcctacctggacggcaccggcttcgcccgcatcagcttcgacagtcagatcagcaccaccaagcgcttcgagcaggagctgcggctcgtgtcctacagcggggtgctcttcttcctgaagcagcagagccagttcctgtgcttggccgtgcaagaaggcagcctcgtgctgttgtatgactttggggctggcctgaaaaaggccgtcccactgcagcccccaccgcccctgacctcggccagcaaggcgatccaggtgttcctgctggggggcagccgcaagcgtgtgctggtgcgtgtggagcgggccacggtgtacagcgtggagcaggacaatgatctggagctggccgacgcctactacctggggggcgtgccgcccgaccagctgcccccgagcctgcgacggctcttccccaccggaggctcagtccgtggctgcgtcaaaggcatcaaggccctgggcaagtatgtggacctcaagcggctgaacacgacaggcgtgagcgccggctgcaccgccgacctgctggtggggcgcgccatgactttccatggccacggcttccttcgcctggcgctctcgaacgtggcaccgctcactggcaacgtctactccggcttcggcttccacagcgcccaggacagtgccctgctctactaccgggcgtccccggatgggctatgccaggtgtccctgcagcagggccgtgtgagcctacagctcctgaggactgaagtgaaaactcaagcgggcttcgccgatggtgccccccattacgtcgccttctacagcaatgccacgggagtctggctgtatgtcgatgaccagctccagcagatgaagccccaccggggaccaccccccgagctccagccgcagcctgaggggcccccgaggctcctcctgggaggcctgcctgagtctggcaccatttacaacttcagtggctgcatcagcaacgtcttcgtgcagcggctcctgggcccacagcgcgtatttgatctgcagcagaacctgggcagcgtcaatgtgagcacgggctgtgcacccgccctgcaagcccagaccccgggcctggggcctagaggactgcaggccaccgcccggaaggcctcccgccgcagccgtcagcccgcccggcatcctgcctgcatgctgcccccacacctcaggaccacccgagactcctaccagtttgggggttccctgtccagtcacctggagtttgtgggcatcctggcccgacataggaactggcccagtctctccatgcacgtcctcccgcgaagctcccgaggcctcctcctcttcactgcccgtctgaggcccggcagcccctccctggcgctcttcctgagcaatggccacttcgttgcacagatggaaggcctcgggactcggctccgcgcccagagccgccagcgctcccggcctggccgctggcacaaggtctccgtgcgctgggagaagaaccggatcctgctggtgacggacggggcccgggcctggagccaggaggggccgcaccggcagcaccagggggcagagcacccccagccccacaccctctttgtgggcggcctcccggccagcagccacagctccaaacttccggtgaccgtcgggttcagcggctgtgtgaagagactgaggctgcacgggaggcccctgggggcccccacacggatggcaggggtcacaccctgcatcttgggccccctggaggcgggcctgttcttcccaggcagcgggggagttatcactttagacctcccaggagctacactgcctgatgtgggcctggaactggaggtgcggcccctggcagtcaccggactgatcttccacttgggccaggcccggacgcccccctacttgcagttgcaggtgaccgagaagcaagtcctgctgcgggcggatgacggagcaggggagttctccacgtcagtgacccgcccctcagtgctgtgtgatggccagtggcaccggctagcggtgatgaaaagcgggaatgtgctccggctggaggtggacgcgcagagcaaccacaccgtgggccccttgctggcggctgcagctggtgccccagcccctctgtacctcgggggcctgcctgagcccatggccgtgcagccctggccccccgcctactgcggctgcatgaggaggctggcggtgaaccggtcccccgtcgccatgactcgctctgtggaggtccacggggcagtgggggccagtggctgcccagccgcctaggacacagccaaccccggcccctggtcaggcccctgcagctgcctcacaccgccccttgtgctcgcctcataggtgtctatttggactctaagctctacgggtgacagatcttgtttctgaagatggtttaagttatagcttcttaaacgaaagaataaaatactgcaaaatgtttttatatttggcccttccacccatttttaattgtgagagatttgtcaccaatcatcactggttcctccttaaaaattaaaaagtaacttctgtgtaa

SEQ ID NO: 872 - protein, 3695 aa, Homo sapien
MAKRLCAGSALCVRGPRGPAPLLLVGLALLGAARAREEAGGGFSLHPPYFNLAEGARIAASATCGEEAPARGSPRPTEDLYCKLVGGPVAGGDPNQTIRGQYCDICTAANSNKAHPASNAIDGTERWWQSPPLSRGLEYNEVNVTLDLGQVFHVAYVLIKFANSPRPDLWVLERSMDFGRTYQPWQFFASSKRDCLERFGPQTLERITRDDAAICTTEYSRIVPLENGEIVVSLVNGRPGAMNFSYSPLLREFTKATNVRLRFLRTNTLLGHLMGKALRDPTVTRRYYYSIKDISIGGRCVCHGHADACDAKDPTDPFRLQCTCQHNTCGGTCDRCCPGFNQQPWKPATANSANECQSCNCYGHATDCYYDPEVDRRRASQSLDGTYQGGGVCIDCQHHTTGVNCERCLPGFYRSPNHPLDSPHVCRRCNCESDFTDGTCEDLTGRCYCRPNFSGERCDVCAEGFTGFPSCYPTPSSSNDTREQVLPAGQIVNCDCSAAGTQGNACRKDPRVGRCLCKPNFQGTHCELCAPGFYGPGCQPCQCSSPGVADDRCDPDTGQCRCRVGFEGATCDRCAPGYFHFPLCQLCGCSPAGTLPEGCDEAGRCLCQPEFAGPHCDRCRPGYHGFPNCQACTCDPRGALDQLCGAGGLCRCRPGYTGTACQECSPGFHGFPSCVPCHCSAEGSLHAACDPRSGQCSCRPRVTGLRCDTCVPGAYNFPYCEAGSCHPAGLAPVDPALPEAQVPCMCRAHVEGPSCDRCKPGFWGLSPSNPEGCTRCSCDLRGTLGGVAECQPGTGQCFCKPHVCGQACASCKDGFFGLDQADYFGCRSCRCDIGGALGQSCEPRTGVCRCRPNTQGPTCSEPARDHYLPDLHHLRLELEEAATPEGHAVRFGFNPLEFENFSWRGYAQMAPVQPRIVARLNLTSPDLFWLVFRYVNRGAMSVSGRVSVREEGRSATCANCTAQSQPVAFPPSTEPAFITVPQRGFGEPFVLNPGTWALRVEAEGVLLDYVVLLPSAYYEAALLQLRVTEACTYRPSAQQSGDNCLLYTHLPLDGFPSAAGLEALCRQDNSLPRPCPTEQLSPSHPPLITCTGSDVDVQLQVAVPQPGRYALVVEYANEDARQEVGVAVHTPQRAPQQGLLSLHPCLYSTLCRGTARDTQDHLAVFHLDSEASVRLTAEQARFFLHGVTLVPIEEFSPEFVEPRVSCISSHGAFGPNSAACLPSRFPKPPQPIILRDCQVIPLPPGLPLTHAQDLTPAMSPAGPRPRPPTAVDPDAEPTLLREPQATVVFTTHVPTLGRYAFLLHGYQPAHPTFPVEVLINAGRVWQGHANASFCPHGYGCRTLVVCEGQALLDVTHSELTVTVRVPKGRWLWLDYVLVVPENVYSFGYLREEPLDKSYDFISHCAAQGYHISPSSSSLFCRNAAASLSLFYNNGARPCGCHEVGATGPTCEPFGGQCPCHAHVIGRDCSRCATGYWGFPNCRPCDCGARLCDELTGQCICPPRTIPPDCLLCQPQTFGCHPLVGCEECNCSGPGIQELTDPTCDTDSGQCKCRPNVTGRRCDTCSPGFHGYPRCRPCDCHEAGTAPGVCDPLTGQCYCKENVQGPKCDQCSLGTFSLDAANPKGCTRCFCFGATERCRSSSYTRQEFVDMEGWVLLSTDRQVVPHERQPGTEMLRADLRHVPEAVPEAFPELYWQAPPSYLGDRVSSYGGTLRYELHSETQRGDVFVPMESRPDVVLQGNQMSITFLEPAYPTPGHVHRGQLQLVEGNFRHTETRNTVSREELMMVLASLEQLQIRALFSQISSAVFLRRVALEVASPAGQGALASNVELCLCPASYRGDSCQECAPGFYRDVKGLFLGRCVPCQCHGHSDRCLPGSGVCVDCQHNTEGAHCERCQAGFVSSRDDPSAPCVSCPCPLSVPSNNFAEGCVLRGGRTQCLCKPGYAGASCERCAPGFFGNPLVLGSSCQPCDCSGNGDPNLLFSDCDPLTGACRGCLRHTTGPRCEICAPGFYGNALLPGNCTRCDCTPCGTEACDPHSGHCLCKAGVTGRRCDRCQEGHFGFDGCGGCRPCACGPAAEGSECHPQSGQCHCRPGTMGPQCRECAPGYWGLPEQGCRRCQCPGGRCDPHTGRCNCPPGLSGERCDTCSQQHQVPVPGGPVGHSIHCEVCDHCVVLLLDDLERAGALLPAIHEQLRGINASSMAWARLHRLNASIADLQSQLRSPLGPRHETAQQLEVLEQQSTSLGQDARRLGGQAVGTRDQASQLLAGTEATLGHAKTLLAAIRAVDRTLSELMSQTGHLGLANASAPSGEQLLRTLAEVERLLWEMRARDLGAPQAAAEAELAAAQRLLARVQEQLSSLWEENQALATQTRDRLAQHEAGLMDLREALNRAVDATREAQELNSRNQERLEEALQRKQELSRDNATLQATLHAARDTLASVFRLLHSLDQAKEELERLAASLDGARTPLLQRMQTFSPAGSKLRLVEAAEAHAQQLGQLALNLSSIILDVNQDRLTQRAIEASNAYSRILQAVQAAEDAAGQALQQADHTWATVVRQGLVDRAQQLLANSTALEEAMLQEQQRLGLVWAALQGARTQLRDVRAKKDQLEAHIQAAQAMLAMDTDETSKKIAHAKAVAAEAQDTATRVQSQLQAMQENVERWQGQYEGLRGQDLGQAVLDAGHSVSTLEKTLPQLLAKLSILENRGVHNASLALSASIGRVRELIAQARGAASKVKVPMKFNGRSGVQLRTPRDLADLAAYTALKFYLQGPEPEPGQGTEDRFVMYMGSRQATGDYMGVSLRDKKVHWVYQLGEAGPAVLSIDEDIGEQFAAVSLDRTLQFGHMSVTVERQMIQETKGDTVAPGAEGLLNLRPDDFVFYVGGYPSTFTPPPLLRFPGYRGCIEMDTLNEEVVSLYNFERTFQLDTAVDRPCARSKSTGDPWLTDGSYLDGTGFARISFDSQISTTKRFEQELRLVSYSGVLFFLKQQSQFLCLAVQEGSLVLLYDFGAGLKKAVPLQPPPPLTSASKAIQVFLLGGSRKRVLVRVERATVYSVEQDNDLELADAYYLGGVPPDQLPPSLRRLFPTGGSVRGCVKGIKALGKYVDLKRLNTTGVSAGCTADLLVGRAMTFHGHGFLRLALSNVAPLTGNVYSGFGFHSAQDSALLYYRASPDGLCQVSLQQGRVSLQLLRTEVKTQAGFADGAPHYVAFYSNATGVWLYVDDQLQQMKPHRGPPPELQPQPEGPPRLLLGGLPESGTIYNFSGCISNVFVQRLLGPQRVFDLQQNLGSVNVSTGCAPALQAQTPGLGPRGLQATARKASRRSRQPARHPACMLPPHLRTTRDSYQFGGSLSSHLEFVGILARHRNWPSLSMHVLPRSSRGLLLFTARLRPGSPSLALFLSNGHFVAQMEGLGTRLRAQSRQRSRPGRWHKVSVRWEKNRILLVTDGARAWSQEGPHRQHQGAEHPQPHTLFVGGLPASSHSSKLPVTVGFSGCVKRLRLHGRPLGAPTRMAGVTPCILGPLEAGLFFPGSGGVITLDLPGATLPDVGLELEVRPLAVTGLIFHLGQARTPPYLQLQVTEKQVLLRADDGAGEFSTSVTRPSVLCDGQWHRLAVMKSGNVLRLEVDAQSNHTVGPLLAAAAGAPAPLYLGGLPEPMAVQPWPPAYCGCMRRLAVNRSPVAMTRSVEVHGAVGASGCPAA

SEQ ID NO: 873 - DNA, 2777 bp, Homo sapien
gaattcgggaaaagaccgaagaaggaggctggagagaccaggatccttccagctgaacaaagtcagccacaaagcagactagccagccggctacaattggagtcagagtcccaaagacatgggcttgttagagtgctgtgcaagatgtctggtaggggccccctttgcttccctggtggccactggattgtgtttctttggggtggcactgttctgtggctgtggacatgaagccctcactggcacagaaaagctaattgagacctatttctccaaaaactaccaagactatgagtatctcatcaatgtgatccatgccttccagtatgtcatctatggaactgcctctttcttcttcctttatggggccctcctgctggctgagggcttctacaccaccggcgcagtcaggcagatctttggcgactacaagaccaccatctgcggcaagggcctgagcgcaacggtaacagggggccagaaggggaggggttccagaggccaacatcaagctcattctttggagcgggtgtgtacttgtttgggaaaatggctaggacatcccgacaagtttgtgggcatcacctatgccctgaccgttgtgtggctcctggtgtttgcctgctctgctgtgcctgtgtacatttacttcaacacctggaccacctgccagtctattgccttccccagcaagacctctgccagtataggcagtctctgtgctgacgccagaatgtatggtgttctcccatggaatgctttccctggcaaggtttgtggctccaaccttctgtccatctgcaaaacagctgagttccaaatgaccttccacctgtttattgctgcatttgtgggggctgcagctacactggtttccctgctcaccttcatgattgctgccacttacaactttgccgtccttaaactcatgggccgaggcaccaagttctgatcccccgtagaaatccccctttctctaatagcgaggctcctctaaccacacagcctacaatgctgcgtctcccatcttaactctttgcctttgccaccaactggccctcttcttacttgatgagtgtaacaagaaaggagagtcttgcagtgattaaggtctctctttggactctcccctcttatgtacctcttttagtcattttgcttcatagctggttcctgctagaaatgggaaatgcctaagaagatgacttcccaactcgaagtcacaaaggaatggaggctctaattgaattttcaagcatctcctgaggatcagaaagtaatttcttctcaaagggtacttccactgatggaaacaaagtggaaggaaagaaggtcaggtacagagaaggaatgtctttggtcctcttgccatctataggggccaaatatattctctttggtgtacaaaatggaattcattctggtctctctattaccactgaagatagaagaaaaaagaatgtcagaaaaacaataagagcgtttgcccaaatctgcctattgcagctgggagaagggggtcaaagcaaggatctttcacccacagaaagagagcactgaccccgatggcgatggactactgaagccctaactcagccaaccttacttacagcataagggagcgtagaatctgtgtagacgaagggggcatctggccttacacctcgttagggaagagaaacagggtgttgtcagcatcttctcactcccttctccttgataacagctaccatgacaaccctgtggtttccaaggagctgagaatagaaggaaactagcttacatgagaacagactggcctgaggagcagcagttcctggtggctaatggtgtaacctgagatggccctctggtagacacaggatagataactctttggatagcatgtctttttttctgttaattagttgtgtactctggcctctgtcatatcttcacaatggtgctcatttcatggggtattatccattcagtcatcgtaggtgatttgaaggtcttgatttgttttagaatgatgcacatttcatgtattccagtttgtttattacttatttggggttgcatcagaaatgtctggagaataattctttgattatgactgttttttaaactaggaaaattggacattaagcatcacaaatgatattaaaaattggctagttgaatctattgggattttctacaagtattctgcctttgcagaaacagatttggtgaatttgaatctcaatttgagtaatctgatcgttctttctagctaatggaaaatgattttacttagcaatgttatcttggtgtgttaagagttaggtttaacataaaggttattttctcctgatatagatcacataacagaatgcaccagtcatcagctattcagttggtaagcttccaggaaaaaggacaggcagaaagagtttgagacctgaatagctcccagatttcagtcttttcctgtttttgttaactttgggttaaaaaaaaaaaaagtctgattggttttaattgaaggaaagatttgtactacagttcttttgttgtaaagagttgtgttgttcttttcccccaaagtggtttcagcaatatttaaggagatgtaagagctttacaaaaagacacttgatacttgttttcaaaccagtatacaagataagcttccaggctgcatagaaggaggagagggaaaatgttttgtaagaaaccaatcaagataaaggacagtgaagtaatccgtaccttgtgttttgttttgatttaataacataacaaataaccaa

SEQ ID NO: 874 - protein, 277 aa, Homo sapien [sequence omitted]

SEQ ID NO: 875 - DNA, 1112 bp, Homo sapien
gacggaaacctttttagggagtccaaggtacagtcgccgcgtgcgagcttgttactggttacttggcctcatggcggtccgagcttcgttcgagaacaactgtgagatcggctgctttgccaagctcaccaacacctactgtctggtagcgatcggaggctcagagaacttctacagtgtgttcgagggcgagctctccgataccatccccgtggtgcacgcgtctatcgccggctgccgcatcatcgggcgcatgtgtgtggggaacaggcacggtctcctggtacccaacaataccaccgaccaggagctgcaacacattcgcaacagcctcccagacacagtgcagattaggcgggtggaggagcggctctcagccttgggcaatgtcaccacctgcaatgactacgtggccttggtccacccagacttggacagggagacagaagaaattctggcagatgtgctcaaggtggaagtcttcagacagacagtggccgaccaggtgctagtaggaagctactgtgtcttcagcaatcagggagggctggtgcatcccaagacttcaattgaagaccaggatgagctgtcctctcttcttcaagtcccccttgtggcggggactgtgaaccgaggcagtgaggtgattgctgctgggatggtggtgaatgactggtgtgccttctgtggcctggacacaaccagcacagagctgtcagtggtggagagtgtcttcaagctgaatgaagcccagcctagcaccattgccaccagcatgcgggattccctcattgacagcctcacctgagtcaccttccaagttgttccatgggctcctggctctggactgtggccaaccttctccacattccgcccaatctgtaccggatgctggcagggaggtggcagagagctcactgggactgaggggctgggcacccaacccttttccacctgtgcttatcgcctggatctatcattactgcaaaaacctgctctgttgtgctggctggcaggccctgtggctgctggctgagggttctgctgtcctgtgccaccccattaaagtgcagttcctccggaaaaaaaaaaaaaaaaaaaaaaaaaaaaaa

SEQ ID NO: 876 - protein, 245 aa, Homo sapien
MAVRASFENNCEIGCFAKLTNTYCLVAIGGSENFYSVFEGELSDTIPVVHASIAGCRIIGRMCVGNRHGLLVPNNTTDQELQHIRNSLPDTVQIRRVEERLSALGNVTTCNDYVALVHPDLDRETEEILADVLKVEVFRQTVADQVLVGSYCVFSNQGGLVHPKTSIEDQDELSSLLQVPLVAGTVNRGSEVIAAGMVVNDWCAFCGLDTTSTELSVVESVFKLNEAQPSTIATSMRDSLIDSLT

SEQ ID NO: 877 - DNA, 2741 bp, Homo sapien
ggcacgagggagagagaactagtctcgagtttttttttttttttttgtgcaggtaggaaatgtctttattattggccttgagtcatcatgtagtgtctgacataggttacgtgtccagaggatctgcctggcacacgctagctacccctgcccactggagcagcccctctggccgacgccaggcctttgtccatcatgccagggaagccaaccccaccatcccacaagttcatgctaggggtgctgaggaacaaggctgtcctaggattggaccctccatcctggacaggggtcctggggaggatgaggctgaggcctggatgatcagtctctttttggtttcatgatcatttaaaaaacagaaaagacaaacatttcacagtctttaaaaaatagaagtctgaggagagaagccagagtcctgggccccgggaggcccctcgaggcctcagcattccctgtcccttgaggtctgtctgcaggcctggccacagcacacgtggcccgttattggagccaggcctacaccccagcaaccatgtccaagggacctgcagttggtattgatcttggcaccacctactcttgtgtgggtgttttccagcacggaaaagtcgagataattgccaatgatcagggaaaccgaaccactccaagctatgtcgcctttacggacactgaacggttgatcggtgatgccgcaaagaatcaagttgcaatgaaccccaccaacacagtttttgatgccaaacgtctgattggacgcagatttgatgatgctgttgtccagtctgatatgaaacattggccctttatggtggtgaatgatgctggcaggcccaaggtccaagtagaatacaagggagagaccaaaagcttctatccagaggaggtgtcttctatggttctgacaaagatgaaggaaattgcagaagcctaccttgggaagactgttaccaatgctgtggtcacagtgccagcttactttaatgactctcagcgtcaggctaccaaagatgctggaactattgctggtctcaatgtacttagaattattaatgagccaactgctgctgctattgcttacggcttagacaaaaaggttggagcagaaagaaacgtgctcatctttgacctgggaggtggcacttttgatgtgtcaatcctcactattgaggatggaatctttgaggtcaagtctacagctggagacacccacttgggtggagaagattttgacaaccgaatggtcaaccattttattgctgagtttaagcgcaagcataagaaggacatcagtgagaacaagagagctgtaagacgcctccgtactgcttgtgaacgtgctaagcgtaccctctcttccagcacccaggccagtattgagatcgattctctctatgaaggaatcgacttctatacctccattacccgtgcccgatttgaagaactgaatgctgacctgttccgtggcaccctggacccagtagagaaagcccttcgagatgccaaactagacaagtcacagattcatgatattgtcctggttggtggttctactcgtatccccaagattcagaagcttctccaagacttcttcaatggaaaagaactgaataagagcatcaaccctgatgaagctgttgcttatggtgcagctgtccaggcagccatcttgtctggagacaagtctgagaatgttcaagatttgctgctcttggatgtcactcctctttcccttggtattgaaactgctggtggagtcatgactgtcctcatcaagcgtaataccaccattcctaccaagcagacacagaccttcactacctattctgacaaccagcctggtgtgcttattcaggtttatgaaggcgagcgtgccatgacaaaggataacaacctgcttggcaagtttgaactcacaggcatacctcctgcaccccgaggtgttcctcagattgaagtcacttttgacattgatgccaatggtatactcaatgtctctgctgtggacaagagtacgggaaaagagaacaagattactatcactaatgacaagggccgtttgagcaaggaagacattgaacgtatggtccaggaagctgagaagtacaaagctgaagatgagaagcagagggacaaggtgtcatccaagaattcacttgagtcctatgccttcaacatgaaagcaactgttgaagatgagaaacttcaaggcaagattaacgatgaggacaaacagaagattctggacaagtgtaatgaaattatcaactggcttgataagaatcagactgctgagaaggaagaatttgaacatcaacagaaagagctggagaaagtttgcaaccccatcatcaccaagctgtaccagagtgcaggaggcatgccaggaggaatgcctgggggatttcctggtggtggagctcctccctctggtggtgcttcctcagggcccaccattgaagaggttgattaagccaaccaagtgtagatgtagcattgttccacacatttaaaacatttgaaggacctaaattcgtagcaaattctgtggcagttttaaaaagttaagctgctatagtaagttactgggcattctcaatacttgaatatggaacatatgcacaggggaaggaaataacattgcactttataaacactgtattgtaagtggaaaatgcaatgtcttaaataaaactatttaaaattggcaccataaaaaaaaaaaaaaaaaaaaa

SEQ ID NO: 878 - protein, 646 aa, Homo sapien
MSKGPAVGIDLGTTYSCVGVFQHGKVEIIANDQGNRTTPSYVAFTDTERLIGDAAKNQVAMNPTNTVFDAKRLIGRRFDDAVVQSDMKHWPFMVVNDAGRPKVQVEYKGETKSFYPEEVSSMVLTKMKEIAEAYLGKTVTNAVVTVPAYFNDSQRQATKDAGTIAGLNVLRIINEPTAAAIAYGLDKKVGAERNVLIFDLGGGTFDVSILTIEDGIFEVKSTAGDTHLGGEDFDNRMVNHFIAEFKRKHKKDISENKRAVRRLRTACERAKRTLSSSTQASIEIDSLYEGIDFYTSITRARFEELNADLFRGTLDPVEKALRDAKLDKSQIHDIVLVGGSTRIPKIQKLLQDFFNGKELNKSINPDEAVAYGAAVQAAILSGDKSENVQDLLLLDVTPLSLGIETAGGVMTVLIKRNTTIPTKQTQTFTTYSDNQPGVLIQVYEGERAMTKDNNLLGKFELTGIPPAPRGVPQIEVTFDIDANGILNVSAVDKSTGKENKITITNDKGRLSKEDIERMVQEAEKYKAEDEKQRDKVSSKNSLESYAFNMKATVEDEKLQGKINDEDKQKILDKCNEIINWLDKNQTAEKEEFEHQQKELEKVCNPIITKLYQSAGGMPGGMPGGFPGGGAPPSGGASSGPTIEEVD

SEQ ID NO: 879 - DNA, 1284 bp, Homo sapien
cctctgcttcctctaggaacacaggagttccagatcacatcgagttcaccatgaattcactcagtgaagccaacaccaagttcatgttcgatctgttccaacagttcagaaaatcaaaagagaacaacatcttctattcccctatcagcatcacatcagcattagggatggtcctcttaggagccaaagacaacactgcacaacaaattagcaaggttcttcactttgatcaagtcacagagaacaccacagaaaaagctgcaacatatcatgttgataggtcaggaaatgttcatcaccagtttcaaaagcttctgactgaattcaacaaatccactgatgcatatgagctgaagatcgccaacaagctcttcggagaaaagacgtatcaatttttacaggaatatttagatgccatcaagaaattttaccagaccagtgtggaatctactgattttgcaaatgctccagaagaaagtcgaaagaagattaactcctgggtggaaagtcaaacgaatgaaaaaattaaaaacctatttcctgatgggactattggcaatgatacgacactggttcttgtgaacgcaatctatttcaaagggcagtgggagaataaatttaaaaaagaaaacactaaagaggaaaaattttggccaaacaagaatacatacaaatctgtacagatgatgaggcaatacaattcctttaattttgccttgctggaggatgtacaggccaaggtcctggaaataccatacaaaggcaaagatctaagcatgattgtgctgctgccaaatgaaatcgatggtctgcagaagcttgaagagaaactcactgctgagaaattgatggaatggacaagtttgcagaatatgagagagacatgtgtcgatttacacttacctcggttcaaaatggaagagagctatgacctcaaggacacgttgagaaccatgggaatggtgaatatcttcaatggggatgcagacctctcaggcatgacctggagccacggtctctcagtatctaaagtcctacacaaggcctttgtggaggtcactgaggagggagtggaagctgcagctgccaccgctgtagtagtagtcgaattatcatctccttcaactaatgaagagttctgttgtaatcaccctttcctattcttcataaggcaaaataagaccaacagcatcctcttctatggcagattctcatccccatagatgcaattagtctgtcactccatttagaaaatgttcacctagaggtgttctggtaaactga

SEQ ID NO: 880 - protein, 390 aa, Homo sapien
MNSLSEANTKFMFDLFQQFRKSKENNIFYSPISITSALGMVLLGAKDNTAQQISKVLHFDQVTENTTEKAATYHVDRSGNVHHQFQKLLTEFNKSTDAYELKIANKLFGEKTYQFLQEYLDAIKKFYQTSVESTDFANAPEESRKKINSWVESQTNEKIKNLFPDGTIGNDTTLVLVNAIYFKGQWENKFKKENTKEEKFWPNKNTYKSVQMMRQYNSFNFALLEDVQAKVLEIPYKGKDLSMIVLLPNEIDGLQKLEEKLTAEKLMEWTSLQNMRETCVDLHLPRFKMEESYDLKDTLRTMGMVNIFNGDADLSGMTWSHGLSVSKVLHKAFVEVTEEGVEAAAATAVVVVELSSPSTNEEFCCNHPFLFFIRQNKTNSILFYGRFSSP

SEQ ID NO: 881 - DNA, 1847 bp, Homo sapien
cagaaggatgtcgctgctgagcctgtcttggctgggcctcaggccggtggcagcatccccgtggctgctcctgctggtggtcggggcctcctggctcctggcccgcatcctggcctggacctatgccttctatcacaacggccgccgcctccggtgtttcccgcagccccggaaacagaactggttcttgggtcacctgggcctggtcactcccacagaggagggcttgagggtcctgacccagctggtggccacctacccccagggctttgtgaggtggttgggccccatcactcccatcatcaacttgtgccaccctgacatcgtccgatctgtcatcaatacctcagatgccattacagacaaggacatagtcttctacaagaccctgaagccctggctgggggatgggctcttgttaagtgttggtgacaagtggagacaccaccgtcgcttgctgacgcctgccttccatttcaacatcctgaagccctatataaagattttcagcaagagtgcaaacatcatgcatgccaagtggcaacgcctggccatggagggcagcacctgtctggatgtgtttgagcacatcagccttatgaccctggacagtctgcagaaatgcatcttcagctttgacagcaattgtcaggagaagcccagtgaatatattactgcgatcatggagctcagtgcccttgtagtgaaacggaataaccagttcttccggtacaaggacttcctgtacttcctcactccctgtggacggcgcttccacagggcctgcagactggtgcacgacttcacagatgccgtcatccaggagcggcgccgcaccctcactagccagggtgttgatgacttcctccaagccaaggccaagtccaagactttggactttattgatgtgctcctgctgagcgaggataaaaatggtaaagagttgtcagatgaggacataagagcagaagctgacactttcatgtttggaggccatgacaccacggccagtggcctctcctgggtcttgtacaacctcgcgaggcacccagaataccaagaacgctgccggcaggaggtgcaagagcttctgaaggaccgtgagcctaaagagattgaatgggacgacctggcccagttgcccttcctgaccatgtgcctgaaggagagcctgcggttgcatcccccaatccctacattcgcccgcggctgcacccaggacgtggtgctcccagacagccgagtcatccccaaagggaatgtctgtaacatcaacatcttcgcaatccatcacaacccctcagtctggccagaccctgaggtctatgaccccttccgcttcgaccccgaaaacgcccagaagaggtcacctatggcttttattcctttctcggcggggcccaggaactgcatcgggcagaagttcgcgatggcagagatgaaggtggtcctggcgctcacgctgctgcgcttccgcatcctgcccgaccacagggagccacgcaggacgccggagattgttttgcgtgcggaggacggactttggctgcgagtagaacccctgggctgaggcctgcagtgacccacccacctacctttgcatcacctacctttgcaccaactaccttttcagatttccggtaataaatctgtgttggcccctgtgcctcagtcccgcggatggccagtagggggcgctggaggactgcggggatctagggcctggctgggaagaggcggggagatgtctctgtgcccaagatactcactgcctctctgggtgagcacaggagccccgtgctgagggtgggatctcccagagtctaagtaaagactttttccccccc

SEQ ID NO: 882 - protein, 520 aa, Homo sapien
MSLLSLSWLGLRPVAASPWLLLLVVGASWLLARILAWTYAFYHNGRRLRCFPQPRKQNWFLGHLGLVTPTEEGLRVLTQLVATYPQGFVRWLGPITPIINLCHPDIVRSVINTSDAITDKDIVFYKTLKPWLGDGLLLSVGDKWRHHRRLLTPAFHFNILKPYIKIFSKSANIMHAKWQRLAMEGSTCLDVFEHISLMTLDSLQKCIFSFDSNCQEKPSEYITAIMELSALVVKRNNQFFRYKDFLYFLTPCGRRFHRACRLVHDFTDAVIQERRRTLTSQGVDDFLQAKAKSKTLDFIDVLLLSEDKNGKELSDEDIRAEADTFMFGGHDTTASGLSWVLYNLARHPEYQERCRQEVQELLKDREPKEIEWDDLAQLPFLTMCLKESLRLHPPIPTFARGCTQDVVLPDSRVIPKGNVCNINIFAIHHNPSVWPDPEVYDPFRFDPENAQKRSPMAFIPFSAGPRNCIGQKFAMAEMKVVLALTLLRFRILPDHREPRRTPEIVLRAEDGLWLRVEPLG

SEQ ID NO: 883 - DNA, 1823 bp, Homo sapien
cccaagccttcgggtagggtgccttcagccgctacaagagcagaagcagtgggcattggatggagctgagtacaggaccatacaggctaattgcaccggcacagtgaaataagatttcgccgcctatcatctgctaactgctacggactcaggctcagaaaggcctgcgcttcacccaggaatcggatataacatcatctgggtacccatggccagctgtgacttctccatccgcacctacacctatgcagacacccctgatgatttccagttgcacaacttcagcctcccagaggaagataccaagctcaagatacccctgattcaccgagccctgcagttggcccagcgtcccgtttcactccttgccagcccctggacatcacccactcggctcaagaccaggggagcggggaatgggaaggggccactcaagggacagcccagagacatctaccaccagacctgggccagatacattgtgaagttcctggatgcctatgctgagcacaagttacagttctgggcagtgacagctgaaaatgagccttctgctgggctgttgagtggataccccttccagtgcctgggcttcacccctgaacatcagcgagacttcattgcccgtgacctaggtcctacccttgccaacggtactcaccacaatgtccgcctactcatgctggatgaccaacgcttgctgctgccccactgggcaaaggtggtactgacagacccagaagcagctaagtatgttcatggtattgctgtacattggtacctggactttctggctccagccaaagccaccctaagggagacacaccacctgttccccaacaccatgctctttgcctcagaggcctgtgtgggttccaagttctgggagcagagtgtgcggctaggctcctgggatcgagggatgcagtacagccacagcatcatcacaaacctcctgtaccatgtggtcggctggaccgactggaacccatcattgtagacatcaccaagcacacgttttacaaacagcccatgttctaccaccttggccacttcagcaagttcattcctgagggctcccagagagtggggctggttgccagtcagaagaacgacccggacgcagtggcactgatgcatcccgatggctctgctgttgtggtcgtgctaaaccgctcctctaaggatgtgcctcttaccatcaaggatcctgctgtgggcttcctggagacaatctcacctggctactccattcacacctacctgtggcgtcgccagtgatggagcagatactcaaggaggcactgggctcagcctgggcattaaagggacagagtcagctcacacgctgtctgtgactaaagagggcacaacagggccagcgtgacgttacagcgacgtaagcccaggggcaatggtttgggtgactcactttcccctctaggcggtgccaggggctggaggcccctagaaaaagatcagtaagccccagtgtccccccagcccccatgcttatgtgaacatgcgctgtgtgctgcttgctttggaaactgggcctgggtccaggcctagggtgagctcactgtccgtacaaacacaagatcagggctgagggtaaggaaaagaagagactaggaaagctgggcccaaaactggagactgtttgtctttcctggagatgcagaactgggcccgtggagcagcagtgtcagcatcagggcggaagccttaaagcagcagcgggtgtgcccaggcacccagatgattcctatggcaccagccaggaaaaatggcagctcttaaaggagaaaatgtttgagccc

SEQ ID NO: 884 - protein, 263 aa, Homo sapien
MASCDFSIRTYTYADTPDDFQLHNFSLPEEDTKLKIPLIHRALQLAQRPVSLLASPWTSPTRLKTRGAGNGKGPLKGQPRDIYHQTWARYIVKFLDAYAEHKLQFWAVTAENEPSAGLLSGYPFQCLGFTPEHQRDFIARDLGPTLANGTHHNVRLLMLDDQRLLLPHWAKVVLTDPEAAKYVHGIAVHWYLDFLAPAKATLRETHHLFPNTMLFASEACVGSKFWEQSVRLGSWDRGMQYSHSIITNLLYHVVGWTDWNPSL

SEQ ID NO: 885 - DNA, 2642 bp, Homo sapien
aaggaggcggcctccgggaaaagcgaccgcaggactcctgagagcagcctccatgaggccctggaccagtgcatgaccgccctggacctcttcctcaccaaccagttctcagaagcactcagctacctcaagcccagaaccaaggaaagcatgtaccactcactgacatatgccaccatcctggagatgcaggccatgatgacctttgaccctcaggacatcctgcttgccggcaacatgatgaaggaggcacagatgctgtgtcagaggcaccggaggaagtcttctgtaacagattccttcagcagcctggtgaaccgccccacgctgggccaattcactgaagaagaaatccacgctgaggtctgctatgcagagtgcctgctgcagcgagcagccctgaccttcctgcaggacgagaacatggtgagcttcatcaaaggcggcatcaaagttcgaaacagctaccagacctacaaggagctggacagccttgttcagtcctcacaatactgcaagggtgagaaccacccgcactttgaaggaggagtgaagcttggtgtaggggccttcaacctgacactgtccatgcttcctactaggatcctgaggctgttggagtttgtggggttttcaggaaacaaggactatgggctgctgcagctggaggagggagcgtcagggcacagcttccgctctgtgctctgtgtcatgctcctgctgtgctaccacaccttcctcaccttcgtgctcggtactgggaacgtcaacatcgaggaggccgagaagctcttgaagccctacctgaaccggtaccctaagggtgccatcttcctgttctttgcagggaggattgaagtcattaaaggcaacattgatgcagccatccggcgtttcgaggagtgctgtgaggcccagcagcactggaagcagtttcaccacatgtgctactgggagctgatgtggtgcttcacctacaagggccagtggaagatgtcctacttctacgccgacctgctcagcaaggagaactgctggtccaaggccacctacatttacatgaaggccgcctacctcagcatgtttgggaaggaggaccacaagccgttcggggacgacgaagtggaattatttcgagctgtgccaggcctgaagctcaagattgctgggaaatctctacccacagagaagtttgccatccggaagtcccggcgctacttctcctccaaccctatctcgctgccagtgcctgctctggaaatgatgtacatctggaacggctacgccgtgattgggaagcagccgaaactcacggatgggatacttgagattatcactaaggctgaagagatgctggagaaaggcccagagaacgagtactcagtggatgacgagtgcttggtgaaattgttgaaaggcctgtgtctgaaatacctgggccgtgtccaggaggccgaggagaattttaggagcatctctgccaatgaaaagaagattaaatatgaccactacttgatcccaaacgccctgctggagctggccctgctgcttatggagcaagacagaaacgaagaggccatcaaacttttggaatctgccaagcaaaactacaagaattactccatggagtcaaggacacactttcgaatccaggcagccacactccaagccaagtcttccctagagaacagcagcagatccatggtctcatcagtgtccttgtagctttgtgcagcagttccgggctggaagacagagacagctggacagagctcctgaaaacatttcaaaataccccctccccctgccctgccctgcctttggggtccaccggcactccagttggatggcacaacatagtgtatccgtgcagaagccgagctggcattttcaccagtgtagccaagggcctttgccaagggcagagcaggtggagccctctgcctgccctatcacacatacgggtacttgcttttcactgtgatgtttaagagaatgtatgaacagtttacattttccttagaaatacattgatgggatcacagttggctttaaaaaccaacaacaatcaaccacctgtaagtctttgtcttcacctattatcatctggaggtaaatctctttatatgatgatgccaaagggcaaattgcttttcaaattcagcaagttctcagcttgtgtgacggaaggtccttcagaggacctgaggaatgcctgggagaggctaagcctcaggcttcaatgcttctggggttgggcatgaggatgtacacagacacccactaccttactactcacacttcatttcactccttttgtaaatttccaatttaaaaatcaagcacgtctttttagtgagataaaatctgagctcttctgtagaaaaatcaatctctaccagtagaaaatgccagggcttgatggaagagctgtgtagccctttctatgccaaagccaggaaatttggggggcaggaggaggttctcagaatccagtctgtatctttgctgtatgccaaactgaaaccactgggaataatttatgaaacataaaaatcttctgtacttcactccaaggtacatttgcttactgacagcatttttgttaaaactgttattcttgaaaaaaaaaaaaaaaaaaa

SEQ ID NO: 886 - protein, 574 aa, Homo sapien
KEAASGKSDRRTPESSLHEALDQCMTALDLFLTNQFSEALSYLKPRTKESMYHSLTYATILEMQAMMTFDPQDILLAGNMMKEAQMLCQRHRRKSSVTDSFSSLVNRPTLGQFTEEEIHAEVCYAECLLQRAALTFLQDENMVSFIKGGIKVRNSYQTYKELDSLVQSSQYCKGENHPHFEGGVKLGVGAFNLTLSMLPTRILRLLEFVGFSGNKDYGLLQLEEGASGHSFRSVLCVMLLLCYHTFLTFVLGTGNVNIEEAEKLLKPYLNRYPKGAIFLFFAGRIEVIKGNIDAAIRRFEECCEAQQHWKQFHHMCYWELMWCFTYKGQWKMSYFYADLLSKENCWSKATYIYMKAAYLSMFGKEDHKPFGDDEVELFRAVPGLKLKIAGKSLPTEKFAIRKSRRYFSSNPISLPVPALEMMYIWNGYAVIGKQPKLTDGILEIITKAEEMLEKGPENEYSVDDECLVKLLKGLCLKYLGRVQEAEENFRSISANEKKIKYDHYLIPNALLELALLLMEQDRNEEAIKLLESAKQNYKNYSMESRTHFRIQAATLQAKSSLENSSRSMVSSVSL

SEQ ID NO: 887 - DNA, 1637 bp, Homo sapien
aagaactggcctgtacattttcaaggaattcttgagaggttcttggagagattctgggagccaaacactccattgggatcctagctgttttagagaacaacttgtaatggagccttcatctcttgagctgccggctgacacagtgcagcgcattgcggctgaactcaaatgccacccaacggatgagagggtggctctccacctagatgaggaagataagctgaggcacttcagggagtgcttttatattcccaaaatacaggatctgcctccagttgatttatcattagtgaataaagatgaaaatgccatctatttcttgggaaattctcttggccttcaaccaaaaatggttaaaacatatcttgaagaagaactagataagtgggccaaaatagcagcctatggtcatgaagtggggaagcgtccttggattacaggagatgagagtattgtaggccttatgaaggacattgtaggagccaatgagaaagaaatagccctaatgaatgctttgactgtaaatttacatcttctaatgttatcattttttaagcctacgccaaaacgatataaaattcttctagaagccaaagccttcccttctgatcattatgctattgagtcacaactacaacttcacggacttaacattgaagaaagtatgcggatgataaagccaagagagggggaagaaaccttaagaatagaggatatccttgaagtaattgagaaggaaggagactcaattgcagtgatcctgttcagtggggtgcatttttacactggacagcactttaatattcctgccatcacaaaagctggacaagcgaagggttgttatgttggctttgatctagcacatgcagttggaaatgttgaactctacttacatgactggggagttgattttgcctgctggtgttcctacaagtatttaaatgcaggagcaggaggaattgctggtgccttcattcatgaaaagcatgcccatacgattaaacctgcattagtgggatggtttggccatgaactcagcaccagatttaagatggataacaaactgcagttaatccctggggtctgtggattccgaatttcaaatcctcccattttgttggtctgttccttgcatgctagtttagagatctttaagcaagcgacaatgaaggcattgcggaaaaaatctgttttgctaactggctatctggaatacctgatcaagcataactatggcaaagataaagcagcaaccaagaaaccagttgtgaacataattactccgtctcatgtagaggagcgggggtgccagctaacaataacattttctgttccaaacaaagatgttttccaagaactagaaaaaagaggagtggtttgtgacaagcggaatccaaatggcattcgagtggctccagttcctctctataattctttccatgatgtttataaatttaccaatctgctcacttctatacttgactctgcagaaacaaaaaattagcagtgttttctagaacaacttaagcaaattatactgaaagctgctgtggttatttcagtattattcgatttttaattattgaaagtatgtcaccattgaccacatgtaactaacaataaataatataccttac

SEQ ID NO: 888 - protein, 465 aa, Homo sapien
MEPSSLELPADTVQRIAAELKCHPTDERVALHLDEEDKLRHFRECFYIPKIQDLPPVDLSLVNKDENAIYFLGNSLGLQPKMVKTYLEEELDKWAKIAAYGHEVGKRPWITGDESIVGLMKDIVGANEKEIALMNALTVNLHLLMLSFFKPTPKRYKILLEAKAFPSDHYAIESQLQLHGLNIEESMRMIKPREGEETLRIEDILEVIEKEGDSIAVILFSGVHFYTGQHFNIPAITKAGQAKGCYVGFDLAHAVGNVELYLHDWGVDFACWCSYKYLNAGAGGIAGAFIHEKHAHTIKPALVGWFGHELSTRFKMDNKLQLIPGVCGFRISNPPILLVCSLHASLEIFKQATMKALRKKSVLLTGYLEYLIKHNYGKDKAATKKPVVNIITPSHVEERGCQLTITFSVPNKDVFQELEKRGVVCDKRNPNGIRVAPVPLYNSFHDVYKFTNLLTSILDSAETKN

SEQ ID NO: 889 - DNA, 1168 bp, Homo sapien
tccaatcgacaagaagctggaaaagaatgatgttgtccttaaacaacctacagaatatcatctataacccggtaatcccgtttgttggcaccattcctgatcagctggatcctggaactttgattgtgatacgtgggcatgttcctagtgacgcagacagattccaggtggatctgcagaatggcagcagcatgaaacctcgagccgatgtggcctttcatttcaatcctcgtttcaaaagggccggctgcattgtttgcaatactttgataaatgaaaaatggggacgggaagagatcacctatgacacgcctttcaaaagagaaaagtcttttgagatcgtgattatggtgctgaaggacaaattccaggtggctgtaaatggaaaacatactctgctctatggccacaggatcggcccagagaaaatagacactctgggcatttatggcaaagtgaatattcactcaattggttttagcttcagctcggacttacaaagtacccaagcatctagtctggaactgacagagataagtagagaaaatgttccaaagtctggcacgccccagcttcctagtaatagaggaggagacatttctaaaatcgcacccagaactgtctacaccaagagcaaagattcgactgtcaatcacactttgacttgcaccaaaataccacctatgaactatgtgtcaaagaggctgccattcgctgcaaggttgaacacccccatgggccctggacgaactgtcgtcgttaaaggagaagtgaatgcaaatgccaaaagctttaatgttgacctactagcaggaaaatcaaaggatattgctctacacttgaacccacgcctgaatattaaagcatttgtaagaaattcttttcttcaggagtcctggggagaagaagagagaaatattacctctctcccatttagtcctgggatgtactttgagatgataatttattgtgatgttagagaattcaaggttgcagtaaatggcgtacacagcctggagtacaaacacagatttaaagagctcagcagtattgacacgctggaaattaatggagacatccacttactggaagtaaggagctggtagcctacctacacagctgctacaaaaaccaaaatacagaatggcttctgtgatactggccttgc

SEQ ID NO: 890 - protein, 359 aa, Homo sapien [sequence omitted]

SEQ ID NO: 891 - DNA, 2298 bp, Homo sapien
tcggccgagcccagagacagccagttcctctcccgccgcgccgggccgcgtgccgctcgctccccggccgtggcgcctccgggccagacgcgctgcagcctccagcccgcggcaagcgggcggggcggccgcgccacccccggccccgcgccagcagcccctcgccgcgcgtccagcgttcccggccagcagcctccccatacgcagtcctgctggaccgccccgtcgcgccccccactctgaactcaagtcaccgtggagctccgccgccccgaaactttcacgcgagcgggaaatatgggatgtataaaatcaaaagggaaagacagcttgagtgacgatggagtagatttgaagactcaaccagtacgtaatactgaaagaactatttatgtgagagatccaacgtccaataaacagcaaaggccagttccagaatctcagcttttacctggacagaggtttcaaactaaagatccagaggaacaaggagacattgtggtagccttgtacccctatgatggcatccacccggacgacttgtctttcaagaaaggagagaagatgaaagtcctggaggagcatggagaatggtggaaagcaaagtcccttttaacaaaaaaagaaggcttcatccccagcaactatgtggccaaactcaacaccttagaaacagaagagtggtttttcaaggatataaccaggaaggacgcagaaaggcagcttttggcaccaggaaatagcgctggagctttccttattagagaaagtgaaacattaaaaggaagcttctctctgtctgtcagagactttgaccctgtgcatggtgatgttattaagcactacaaaattagaagtctggataatgggggctattacatctctccacgaatcacttttccctgtatcagcgacatgattaaacattaccaaaagcaggcagatggcttgtgcagaagattggagaaggcttgtattagtcccaagccacagaagccatgggataaagatgcctgggagatcccccgggagtccatcaagttggtgaaaaggcttggcgctgggcagtttggggaagtctggatgggttactataacaacagtaccaaggtggctgtgaaaaccctgaagccaggaactatgtctgtgcaagccttcctggaagaagccaacctcatgaagaccctgcagcatgacaagctcgtgaggctctacgctgtggtcaccagggaggagcccatttacatcatcaccgagtacatggccaagggcagtttgctggatttcctgaagagcgatgaaggtggcaaagtgctgcttccaaagctcattgacttttctgctcagattgcagagggaatggcatacatcgagcggaagaactacattcaccgggacctgcgagcagctaatgttctggtctccgagtcactaatgtgcaaaattgcagattttggccttgctagagtaattgaagataatgagtacacagcaagggaaggtgctaagttccctattaagtggacggctccagaagcaatcaactttggatgtttcactattaagtctgatgtgtggtcctttggaatcctcctatacgaaattgtcacctatgggaaaattccctacccagggagaactaatgccgacgtgatgaccgccctgtcccagggctacaggatgccccgtgtggagaactgcccagatgagctctatgacattatgaaaatgtgctggaaagaaaaggcagaagagagaccaacgtttgactacttacagagcgtcctggatgatttctacacagccacggaagggcaataccagcagcagccttagagcacagggagacccgtccatttggcaggggtggctgcctcatttagagaggaaaagtaaccatcactggttgcacttatgatttcatgtgcggggatcatctgccgtgcctggatcctgaaatagaggctaaattactcaggaagaacaccctctaaatgggaaagtattctgtactcttagatggattctccactcagttgcaacttggacttgtcctcagcagctggtaatcttgctctgcttgacaacatctgagtgcagccgtttgagaagaaaacatctattctctccaaaaatgcacccaactagctctatgtttacaaatggacataggactcaaagtttcagagaccattgcaatgaatccccaataattgcagaactaaactcatttataaagctaaaataaccggatatatacatagcatgacatttctttgtgctttggcttacttgttt

SEQ ID NO: 892 - protein, 512 aa, Homo sapien
MGCIKSKGKDSLSDDGVDLKTQPVRNTERTIYVRDPTSNKQQRPVPESQLLPGQRFQTKDPEEQGDIVVALYPYDGIHPDDLSFKKGEKMKVLEEHGEWWKAKSLLTKKEGFIPSNYVAKLNTLETEEWFFKDITRKDAERQLLAPGNSAGAFLIRESETLKGSFSLSVRDFDPVHGDVIKHYKIRSLDNGGYYISPRITFPCISDMIKHYQKQADGLCRRLEKACISPKPQKPWDKDAWEIPRESIKLVKRLGAGQFGEVWMGYYNNSTKVAVKTLKPGTMSVQAFLEEANLMKTLQHDKLVRLYAVVTREEPIYIITEYMAKGSLLDFLKSDEGGKVLLPKLIDFSAQIAEGMAYIERKNYIHRDLRAANVLVSESLMCKIADFGLARVIEDNEYTAREGAKFPIKWTAPEAINFGCFTIKSDVWSFGILLYEIVTYGKIPYPGRTNADVMTALSQGYRMPRVENCPDELYDIMKMCWKEKAEERPTFDYLQSVLDDFYTATEGQYQQQP

SEQ ID NO: 893 - DNA, 3213 bp, Homo sapien
agagactcaagatgattccctttttacccatgttttctctactattgctgcttattgttaaccctataaacgccaacaatcattatgacaagatcttggctcatagtcgtatcaggggtcgggaccaaggcccaaatgtctgtgcccttcaacagattttgggcaccaaaaagaaatacttcagcacttgtaagaactggtataaaaagtccatctgtggacagaaaacgactgttttatatgaatgttgccctggttatatgagaatggaaggaatgaaaggctgcccagcagttttgcccattgaccatgtttatggcactctgggcatcgtgggagccaccacaacgcagcgctattctgacgcctcaaaactgagggaggagatcgagggaaagggatccttcacttactttgcaccgagtaatgaggcttgggacaacttggattctgatatccgtagaggtttggagagcaacgtgaatgttgaattactgaatgctttacatagtcacatgattaataagagaatgttgaccaaggacttaaaaaatggcatgattattccttcaatgtataacaatttggggcttttcattaaccattatcctaatggggttgtcactgttaattgtgctcgaatcatccatgggaaccagattgcaacaaatggtgttgtccatgtcattgaccgtgtgcttacacaaattggtacctcaattcaagacttcattgaagcagaagatgacctttcatcttttagagcagctgccatcacatcggacatattggaggcccttggaagagacggtcacttcacactctttgctcccaccaatgaggcttttgagaaacttccacgaggtgtcctagaaaggttcatgggagacaaagtggcttccgaagctcttatgaagtaccacatcttaaatactctccagtgttctgagtctattatgggaggagcagtctttgagacgctggaaggaaatacaattgagataggatgtgacggtgacagtataacagtaaatggaatcaaaatggtgaacaaaaaggatattgtgacaaataatggtgtgatccatttgattgatcaggtcctaattcctgattctgccaaacaagttattgagctggctggaaaacagcaaaccaccttcacggatcttgtggcccaattaggcttggcatctgctctgaggccagatggagaatacactttgctggcacctgtgaataatgcattttctgatgatactctcagcatggttcagcgcctccttaaattaattctgcagaatcacatattgaaagtaaaagttggccttaatgagctttacaacgggcaaatactggaaaccatcggaggcaaacagctcagagtcttcgtatatcgtacagctgtctgcattgaaaattcatgcatggagaaagggagtaagcaagggagaaacggtgcgattcacatattccgcgagatcatcaagccagcagagaaatccctccatgaaaagttaaaacaagataagcgctttagcaccttcctcagcctacttgaagctgcagacttgaaagagctcctgacacaacctggagactggacattatttgtgccaaccaatgatgcttttaagggaatgactagtgaagaaaaagaaattctgatacgggacaaaaatgctcttcaaaacatcattctttatcacctgacaccaggagttttcattggaaaaggatttgaacctggtgttactaacattttaaagaccacacaaggaagcaaaatctttctgaaagaagtaaatgatacacttctggtgaatgaattgaaatcaaaagaatctgacatcatgacaacaaatggtgtaattcatgttgtagataaactcctctatccagcagacacacctgttggaaatgatcaactgctggaaatacttaataaattaatcaaatacatccaaattaagtttgttcgtggtagcaccttcaaagaaatccccgtgactgtctatacaactaaaattataaccaaagttgtggaaccaaaaattaaagtgattgaaggcagtcttcagcctattatcaaaactgaaggacccacactaacaaaagtcaaaattgaaggtgaacctgaattcagactgattaaagaaggtgaaacaataactgaagtgatccatggagagccaattattaaaaaatacaccaaaatcattgatggagtgcctgtggaaataactgaaaaagagacacgagaagaacgaatcattacaggtcctgaaataaaatacactaggatttctactggaggtggagaaacagaagaaactctgaagaaattgttacaagaagaggtcaccaaggtcaccaaattcattgaaggtggtgatggtcatttatttgaagatgaagaaattaaaagactgcttcagggagacacacccgtgaggaagttgcaagccaacaaaaaagttcaaggttctagaagacgattaagggaaggtcgttctcagtgaaaatccaaaaaccagaaaaaaatgtttatacaaccctaagtcaataacctgaccttagaaaattgtgagagccaagttgacttcaggaactgaaacatcagcacaaagaagcaatcatcaaataattctgaacacaaatttaatatttttttttctgaatgagaaacatgagggaaattgtggagttagcctcctgtggtaaaggaattgaagaaaatataacaccttacaccctttttcatcttgacattaaaagttctggctaactttggaatccattagagaaaaatccttgtcaccagattcattacaattcaaatcgaagagttgtgaactgttatcccattgaaaagaccgagccttgtatgtatgttatggatacataaaatgcacgcaagccattatctctccatgggaagctaagttataaaaataggtgcttggtgtacaaaactttttatatcaaaaggctttgcacatttctatatgagtgggtttactggtaaattatgttattttttacaactaattttgtactctcagaatgtttgtcatatgcttcttgcaatgcatattttttaatctcaaacgtttcaataaaaccatttttcagatataaagagaattacttcaaattgagtaattcagaaaaactcaagatttaagttaaaaagtggtttggacttgggaa

SEQ ID NO: 894 - protein, 836 aa, Homo sapien
MIPFLPMFSLLLLLIVNPINANNHYDKILAHSRIRGRDQGPNVCALQQILGTKKKYFSTCKNWYKKSICGQKTTVLYECCPGYMRMEGMKGCPAVLPIDHVYGTLGIVGATTTQRYSDASKLREEIEGKGSFTYFAPSNEAWDNLDSDIRRGLESNVNVELLNALHSHMINKRMLTKDLKNGMIIPSMYNNLGLFINHYPNGVVTVNCARIIHGNQIATNGVVHVIDRVLTQIGTSIQDFIEAEDDLSSFRAAAITSDILEALGRDGHFTLFAPTNEAFEKLPRGVLERFMGDKVASEALMKYHILNTLQCSESIMGGAVFETLEGNTIEIGCDGDSITVNGIKMVNKKDIVTNNGVIHLIDQVLIPDSAKQVIELAGKQQTTFTDLVAQLGLASALRPDGEYTLLAPVNNAFSDDTLSMVQRLLKLILQNHILKVKVGLNELYNGQILETIGGKQLRVFVYRTAVCIENSCMEKGSKQGRNGAIHIFREIIKPAEKSLHEKLKQDKRFSTFLSLLEAADLKELLTQPGDWTLFVPTNDAFKGMTSEEKEILIRDKNALQNIILYHLTPGVFIGKGFEPGVTNILKTTQGSKIFLKEVNDTLLVNELKSKESDIMTTNGVIHVVDKLLYPADTPVGNDQLLEILNKLIKYIQIKFVRGSTFKEIPVTVYTTKIITKVVEPKIKVIEGSLQPIIKTEGPTLTKVKIEGEPEFRLIKEGETITEVIHGEPIIKKYTKIIDGVPVEITEKETREERIITGPEIKYTRISTGGGETEETLKKLLQEEVTKVTKFIEGGDGHLFEDEEIKRLLQGDTPVRKLQANKKVQGSRRRLREGRSQ

SEQ ID NO: 895 - DNA, 1600 bp, Homo sapien
cggagcgaggcagcgcgcccggctcccgcgccatggggcggctggtggctgtgggcttgctggggatcgcgctggcgctcctgggcgagaggcttctggcactcagaaatcgacttaaagcctccagagaagtagaatctgtagaccttccacactgccacctgattaaaggaattgaagctggctctgaagatattgacatacttcccaatggtctggctttttttagtgtgggtctaaaattcccaggactccacagctttgcaccagataagcctggaggaatactaatgatggatctaaaagaagaaaaaccaagggcacgggaattaagaatcagtcgtgggtttgatttggcctcattcaatccacatggcatcagcactttcatagacaacgatgacacagtttatctctttgttgtaaaccacccagaattcaagaatacagtggaaatttttaaatttgaagaagcagaaaattctctgttgcatctgaaaacagtcaaacatgagcttcttccaagtgtgaatgacatcacagctgttggaccggcacatttctatgccacaaatgaccactacttctctgatcctttcttaaagtatttagaaacatacttgaacttacactgggcaaatgttgtttactacagtccaaatgaagttaaagtggtagcagaaggatttgattcagcaaatgggatcaatatttcacctgatgataagtatatctatgttgctgacatattggctcatgaaattcatgttttggaaaaacacactaatatgaatttaactcagttgaaggtacttgagctggatacactggtggataatttatctattgatccttcctcgggggacatctgggtagtctgtcatcctaatggccagaagctcttcgtgtatgacccgaacaatcctccctcgtcagaggttctccgcatccagaacattctatctgagaagcctacagtgactacagtttatgccaacaatgggtctgttctccaaggaagttctgtagcctcagtgtatgatgggaagctgctcataggcactttataccacagagccttgtattgtgaactctaaattgtacttttggcatgaaagtgcgataacttaacaattaattttctatgaaattgctaattctgagggaatttaaccagcaacattgacccagaaatgtatggcatgtgtagttaattttattccagtaaggaacggcccttttagttcttagagcacttttaacaaaaaaggaaaatgaacaggttctttaaaatgccaagcaagggacagaaaagaaagctgctttcgaataaagtgaatacattttgcacaaagtaagcctcacctttgccttccaactgccagaacatggattccactgaaatagagtgaattatatttccttaaaatgtgagtgacctcacttctggcactgtgactactatggctgtttagaactactgataataacgtattttgatgttttgtacttacatctttgtttaccattaaaaagttggagttatattaaagactaactaaaatcccaaaaaaaaaaaaaaaaaaaaaaaaaaaaaaaa

SEQ ID NO: 896 - protein, 354 aa, Homo sapien
MGRLVAVGLLGIALALLGERLLALRNRLKASREVESVDLPHCHLIKGIEAGSEDIDILPNGLAFFSVGLKFPGLHSFAPDKPGGILMMDLKEEKPRARELRISRGFDLASFNPHGISTFIDNDDTVYLFVVNHPEFKNTVEIFKFEEAENSLLHLKTVKHELLPSVNDITAVGPAHFYATNDHYFSDPFLKYLETYLNLHWANVVYYSPNEVKVVAEGFDSANGINISPDDKYIYVADILAHEIHVLEKHTNMNLTQLKVLELDTLVDNLSIDPSSGDIWVVCHPNGQKLFVYDPNNPPSSEVLRIQNILSEKPTVTTVYANNGSVLQGSSVASVYDGKLLIGTLYHRALYCEL

SEQ ID NO: 897 - DNA, 4039 bp, Homo sapien
tgccaaggctccagcccggccgggctccgaggcgagaggctgcatggagtggccggcgcggctctgcgggctgtgggcgctgctgctctgcgccggcggcgggggcgggggcgggggcgccgcgcctacggaaactcagccacctgtgacaaatttgagtgtctctgttgaaaacctctgcacagtaatatggacatggaatccacccgagggagccagctcaaattgtagtctatggtattttagtcattttggcgacaaacaagataagaaaatagctccggaaactcgtcgttcaatagaagtacccctgaatgagaggatttgtctgcaagtggggtcccagtgtagcaccaatgagagtgagaagcctagcattttggttgaaaaatgcatctcacccccagaaggtgatcctgagtctgctgtgactgagcttcaatgcatttggcacaacctgagctacatgaagtgttcttggctccctggaaggaataccagtcccgacactaactatactctctactattggcacagaagcctggaaaaaattcatcaatgtgaaaacatctttagagaaggccaatactttggttgttcctttgatctgaccaaagtgaaggattccagttttgaacaacacagtgtccaaataatggtcaaggataatgcaggaaaaattaaaccatccttcaatatagtgcctttaacttcccgtgtgaaacctgatcctccacatattaaaaacctctccttccacaatgatgacctatatgtgcaatgggagaatccacagaattttattagcagatgcctattttatgaagtagaagtcaataacagccaaactgagacacataatgttttctacgtccaagaggctaaatgtgagaatccagaatttgagagaaatgtggagaatacatcttgtttcatggtccctggtgttcttcctgatactttgaacacagtcagaataagagtcaaaacaaataagttatgctatgaggatgacaaactctggagtaattggagccaagaaatgagtataggtaagaagcgcaattccacactctacataaccatgttactcattgttccagtcatcgtcgcaggtgcaatcatagtactcctgctttacctaaaaaggctcaagattattatattccctccaattcctgatcctggcaagatttttaaagaaatgtttggagaccagaatgatgatactctgcactggaagaagtacgacatctatgagaagcaaaccaaggaggaaaccgactctgtagtgctgatagaaaacctgaagaaagcctctcagtgatggagataatttatttttaccttcactgtgaccttgagaagattcttcccattctccatttgttatctgggaacttattaaatggaaactgaaactactgcaccatttaaaaacaggcagctcataagagccacaggtctttatgttgagtcgcgcaccgaaaaactaaaaataatgggcgctttggagaagagtgtggagtcattctcattgaattataaaagccagcaggcttcaaactaggggacaaagcaaaaagtgatgatagtggtggagttaatcttatcaagagttgtgacaacttcctgagggatctatacttgctttgtgttctttgtgtcaacatgaacaaattttatttgtaggggaactcatttggggtgcaaatgctaatgtcaaacttgagtcacaaagaacatgtagaaaacaaaatggataaaatctgatatgtattgtttgggatcctattgaaccatgtttgtggctattaaaactcttttaacagtctgggctgggtccggtggctcacgcctgtaatcccagcaatttgggagtccgaggcgggcggatcactcgaggtcaggagttccagaccagcctgaccaaaatggtgaaacctcctctctactaaaactacaaaaattaactgggtgtggtggcgcgtgcctgtaatcccagctactcgggaagctgaggcaggtgaattgtttgaacctgggaggtggaggttgcagtgagcagagatcacaccactgcactctagcctgggtgacagagcaagactctgtctaaaaaacaaaacaaaacaaaacaaaacaaaaaaacctcttaatattctggagtcatcattcccttcgacagcattttcctctgctttgaaagccccagaaatcagtgttggccatgatgacaactacagaaaaaccagaggcagcttctttgccaagacctttcaaagccattttaggctgttaggggcagtggaggtagaatgactccttgggtattagagtttcaaccatgaagtctctaacaatgtattttcttcacctctgctactcaagtagcatttactgtgtctttggtttgtgctaggcccccgggtgtgaagcacagaccccttccaggggtttacagtctatttgagactcctcagttcttgccacttttttttttaatctccaccagtcatttttcagaccttttaactcctcaattccaacactgatttccccttttgcattctccctccttcccttccttgtagccttttgactttcattggaaattaggatgtaaatctgctcaggagacctggaggagcagaggataattagcatctcaggttaagtgtgagtaatctgagaaacaatgactaattcttgcatattttgtaacttccatgtgagggttttcagcattgatatttgtgcattttctaaacagagatgaggtggtatcttcacgtagaacattggtattcgcttgagaaaaaaagaatagttgaacctatttctctttctttacaagatgggtccaggattcctcttttctctgccataaatgattaattaaatagcttttgtgtcttacattggtagccagccagccaaggctctgtttatgcttttggggggcatatattgggttccattctcacctatccacacaacatatccgtatatatcccctctactcttacttcccccaaatttaaagaagtatgggaaatgagaggcatttcccccaccccatttctctcctcacacacagactcatattactggtaggaacttgagaactttatttccaagttgttcaaacatttaccaatcatattaatacaatgatgctatttgcaattcctgctcctaggggaggggagataagaaaccctcactctctacaggtttgggtacaagtggcaacctgcttccatggccgtgtagaagcatggtgccctggcttctctgaggaagctggggttcatgacaatggcagatgtaaagttattcttgaagtcagattgaggctgggagacagccgtagtagatgttctactttgttctgctgttctctagaaagaatatttggttttcctgtataggaatgagattaattcctttccaggtattttataattctgggaagcaaaacccatgcctccccctagccatttttactgttatcctatttagatggccatgaagaggatgctgtgaaattcccaacaaacattgatgctgacagtcatgcagtctgggagtggggaagtgatcttttgttcccatcctcttcttttagcagtaaaatagctgagggaaaagggagggaaaaggaagttatgggaatacctgtggtggttgtgatccctaggtcttgggagctcttggaggtgtctgtatcagtggatttcccatcccctgtgggaaattagtaggctcatttactgttttaggtctagcctatgtggattttttcctaacatacctaagcaaacccagtgtcaggatggtaattcttattctttcgttcagttaagtttttcccttcatctgggcactgaagggatatgtgaaacaatgttaacatttttggtagtcttcaaccagggattgtttctgtttaacttcttataggaaagcttgagtaaaataaatattgtctttttgtatgtcaagcgggccgccaccgcggtggaaactccagctt

SEQ ID NO: 898 - protein, 427 aa, Homo sapien
MEWPARLCGLWALLLCAGGGGGGGGAAPTETQPPVTNLSVSVENLCTVIWTWNPPEGASSNCSLWYFSHFGDKQDKKIAPETRRSIEVPLNERICLQVGSQCSTNESEKPSILVEKCISPPEGDPESAVTELQCIWHNLSYMKCSWLPGRNTSPDTNYTLYYWHRSLEKIHQCENIFREGQYFGCSFDLTKVKDSSFEQHSVQIMVKDNAGKIKPSFNIVPLTSRVKPDPPHIKNLSFHNDDLYVQWENPQNFISRCLFYEVEVNNSQTETHNVFYVQEAKCENPEFERNVENTSCFMVPGVLPDTLNTVRIRVKTNKLCYEDDKLWSNWSQEMSIGKKRNSTLYITMLLIVPVIVAGAIIVLLLYLKRLKIIIFPPIPDPGKIFKEMFGDQNDDTLHWKKYDIYEKQTKEETDSVVLIENLKKASQ

SEQ ID NO: 899 - DNA, 1401 bp, Homo sapien
gctctacaattgaatgagctcaccatggatgatgataccgctgtgctcgtcattgacaacggctctggcatgtgcaaggccggctttgcgggcgacgatgccccccaggctgtcttcccttctatcgtggggcgccccaggcaccagggcatgatggagggcatgcatcagaaggagtcctatgtgggcaaagaggcccagagcaagagaggcatgctgaccctgaagtaccccatggagcatggcatcatcaccaactgggacgacatggagaagatctggcaccacaccttctacaatgagctgcgtgtggctcctgaggagcaccccatcctgctgactgaggcccccctgaaccccaaggccaaccgtgagaagatgacccagatcatgtttgagaccttcaacaccccagccatgtacgtggccatccaggccgtgctgtccctatacacctctggccgtactactggcatcgtgatggactctggtgatgggttcacccacactgtgcccatctatgaggggaatgccctcccccatgccaccctgcgcctagacctggctgggcgggaactgactgactacctcatgaagatcctcaccgagcgtggctataggttcaccaccacggccgagcaggaaattgtgcgtgacatcaaagagaagctgtgctatgttgccctggactccgagcaggagatggccatggcagcctccagctcctccgtagagaagagctacgagctgcccgatggtcaggtcatcaccatcggcaacgagcggttccgctgccccgaggcgctcttccagccttgcttcctgggcatggaatcctgtggcatccacaaaactaccttcaactccatagtgaagtctgatgtggacatccgcaaagacctgtacaccaacacagtgctgtctggcggcaccaccatgtaccctggcatcgcccacaggatgcagaaggagatcactgccctggcgcctagcattatgaagatcaagatcattgctcctcccaagcgcaagtactccgtgtgggtcggtggctccatcctggcctcgctgtccaccttccagcagatgtggatcagcaagcaggagtatgatgagtcaggcccctccattgtccaccgcaaatgcttctaggtggactctgacttagttgcgttacaccctttcttgacaaaaccaaacttctcagaaaacaacatgagattggcgtggctttatttgttttcttgtttcattttttgttttgttttttattggcttgactcaggatttgaaaaccggaacggcgaaggtgatagtagtcggttggagcgagcttcccccaaagttctacaatgtggccaaggactttgattgtacattgttcttcttttcaatagtcat

SEQ ID NO: 900 - protein, 375 aa, Homo sapien
MDDDTAVLVIDNGSGMCKAGFAGDDAPQAVFPSIVGRPRHQGMMEGMHQKESYVGKEAQSKRGMLTLKYPMEHGIITNWDDMEKIWHHTFYNELRVAPEEHPILLTEAPLNPKANREKMTQIMFETFNTPAMYVAIQAVLSLYTSGRTTGIVMDSGDGFTHTVPIYEGNALPHATLRLDLAGRELTDYLMKILTERGYRFTTTAEQEIVRDIKEKLCYVALDSEQEMAMAASSSSVEKSYELPDGQVITIGNERFRCPEALFQPCFLGMESCGIHKTTFNSIVKSDVDIRKDLYTNTVLSGGTTMYPGIAHRMQKEITALAPSIMKIKIIAPPKRKYSVWVGGSILASLSTFQQMWISKQEYDESGPSIVHRKCF

SEQ ID NO: 901 - DNA, 899 bp, Homo sapien
gttcacgctgacgtcccaaatcttggaagttttgtccccatttgctttctgcttctggggacaaaacttccaagatttgggacgtcagcgtgaactccgtggtcagcacatttcccatgggctccacggttctggaccagcagctgggctgcttatggcagaaggaccacctgctcagtgtctccctgtccgggtacatcaactatctggacagaaacaaccccagcaagcccctgcacgtcatcaagggtcacagtaaatcgatccagtgtctgggaagctgaggatctgggataccacgcagaaggagcacctgttgaagtatgagtaccagcctttcgctgggaagatcaaagacattgcttggactgaagacagtaagaggatcgcccgtggtcggggaaggaagggagaagtttggagcagtcttcctctgggatagtggctcttctgtgggcgagattacaggacacaacaaagtcatcaacagcgtggcatcaagcagagccgccataccgctggcacgggaagcgatgataactgcgcgcattctttgagggacccccattcaagttcaagttcacagttggcgccacagccgtttgtcaactgtgtgcgattctctcaagagcaaaggttaatttaaggacaaagatgaagtcctgtaaactaatctgtcattgttttaccttcctttctttttcagtgcggaattaaaagtaagtttaaagcacctgattgggagtgttttgcgtgttcggaatcacttgtaatgttggctgagacaatccttccttgcactttgaaacactttgagcctttaagagatagcctgagaataataaattcttttcttttaaaaaaaaaaaaaatttaaaaaaaaaaaaaaaaaaaaaaaa

SEQ ID NO: 902 - protein, 77 aa, Homo sapien [sequence omitted]

SEQ ID NO: 903 - DNA, 1569 bp, Homo sapien
caaaatctcaaccatgatcttgagatggcaaaggttttaaatacgttttggaaatatactcattggtatatttcttttgagaaggctgaaatgtagctggggacagcaggttgatcacaagggacgatgatatgaggtaagcacacaagagctatggacaagacaaggtctaaaggattttgaatacaaagcagaaatatttcgaccttctcatttctggggtgggagtggggagtgttcattaagtacatatgacaagagggagtgtggggagaaggtgaaacagtagactacatttatggattaagtagggaatgtgaacaaagatgttaaagtcatggcgatccggtagacagattacacagaaggggaccgaagatgaactggacaaatactctgaggctctcaaagatgcccaggagaagctggagctggcagagaaaaaggccaccgatgctgaagccgacgtagcttctctgaacagacgcatccagctggttgaggaagagttggatcgtgcccaggagcgtctggcaacagctttgcagaagctggaggaagctgagaaggcagcagatgagagtgagagaggcatgaaagtcattgagagtcgagcccaaaaagatgaagaaaaaatggaaattcaggagatccaactgaaagaggccaagcacattgctgaagatgccgaccgcaaatatgaagaggtggcccgtaagctggtcatcattgagagcgacctggaacgtgcagaggagcgggctgagctctcagaaggccaagtccgacagctggaagaacaattaagaataatggatcagaccttgaaagcattaatggctgcagaggataagtactcgcagaaggaagacagatatgaggaagagatcaaggtcctttccgacaagctgaaggaggctgagactcgggctgagtttgcggagaggtcagtaactaaattggagaaaagcattgatgacttagaagagaaagtgctcatgccaaagaagaaaaccttagtatgcatcagatgctggatcagactttactggagttaaacaacatgtgaaaacctccttagctgcgaccacattctttcattttgttttgttttgttttgtttttaaacacctgcttaccccttaaatgcaatttatttacttttaccactgtcacagaaacatccacaagataccagctaggtcagggggtggggaaaacacatacaaaaagcaagcccatgtcagggcgatcctggttcaaatgtgccatttcccgggttgatgctgccacactttgtagagagtttagcaacacagtgtgcttagtcagtgtaggaatcctcactaaagcagaagaagttccattcctttctgattggcacacgtgcagctcatgacaatctgtaggataacaatcagtgtggatttccactcttttcagtccttcatgttaaagatttagacaccacatacaactggtaaaggacgttttcttgagagttttaactatatgtaaacattgtataatgatatggaataaaatgcacattttaggacattttctaaa

SEQ ID NO: 904 - protein, 243 aa, Homo sapien
MLKSWRSGRQITQKGTEDELDKYSEALKDAQEKLELAEKKATDAEADVASLNRRIQLVEEELDRAQERLATALQKLEEAEKAADESERGMKVIESRAQKDEEKMEIQEIQLKEAKHIAEDADRKYEEVARKLVIIESDLERAEERAELSEGQVRQLEEQLRIMDQTLKALMAAEDKYSQKEDRYEEEIKVLSDKLKEAETRAEFAERSVTKLEKSIDDLEEKVLMPKKKTLVCIRCWIRLYWS

SEQ ID NO: 905 - DNA, 2000 bp, Homo sapien
tgcggccgcacctgcaggcgcagagtaggtatggaagatccctcgagatccattgtgctctaaagccgccgggggtccgtgtcctgtctcggttggccggacccgggcccgagcccgagcagtagccggcgccatgtcggtggtgggcatagacctgggcttccagagctgctacgtcgctgtggcccgcgccggcggcatcgagactatcgctaatgagtatagcgaccgctgcacgccggcttgcatttcttttggtcctaagaatcgttcaattggagcagcagctaaaagccaggtaatttctaatgcaaagaacacagtccaaggatttaaaagattccatggccgagcattctctgatccatttgtggaggcagaaaaatctaaccttgcatatgatattgtgcagtggcctacaggattaacaggtataaaggtgacatatatggaggaagagcgaaattttaccactgagcaagtgactgccatgcttttgtccaaactgaaggagacagccgaaagtgttcttaagaagcctgtagttgactgtgttgtttcggttccttgtttctatactgatgcagaaagacgatcagtgatggatgcaacacagattgctggtcttaattgcttgcgattaatgaatgaaaccactgcagttgctcttgcatatggaatctataagcaggatcttcctcgcttagaagagaaaccaagaaatgtagtttttgtagacatgggccactctgcttatcaagtttctgtatgtgcatttaatagaggaaaactgaaagttctggccactgcatttgacacgacattgggaggtagaaaatttgatgaagtgttagtaaatcacttctgtgaagaatttgggaagaaatacaagctagacattaagtccaaaatccgtgcattattacgactctctcaggagtgtgagaaactcaagaaattgatgagtgcaaatgcttcagatctccctttgagcattgaatgttttatgaatgatgttgatgtatctggaactatgaatagaggcaaatttctggagatgtgcaatgatctcttagctagagtggagccaccacttcgtagtgttttggaacaaaccaagttaaagaaagaagatatttatgcagtggagatagttggtggtgctacacgaatccctgcggtaaaagagaagatcagcaaatttttcggtaaagaacttagtacaacattaaatgctgatgaagctgtcactcgaggctgtgcattgcagtgtgccatcttatcgcctgctttcaaagtcagagaattttctatcactgatgtagtaccatatccaatatctctgagatggaattctccagctgaagaagggtcaagtgactgtgaagtcttttccaaaaatcatgctgctcctttctctaaagttcttacattttatagaaaggaacctttcactcttgaggcctactacagctctcctcaggatttgccctatccagatcctgctatagctcagttttcagttcagaaagtcactcctcagtctgatggctccagttcaaaagtgaaagtcaaagttcgagtaaatgtccatggcattttcagtgtgtccagtgcatctttagtggaggttcacaagtctgaggaaaatgaggagccaatggaaacagatcagaatgcaaaggaggaagagaagatgcaagtggaccaggaggaaccacatgttgaagagcaacagcagcagacaccagcagaaaataaggcagagtctgaagaaatggagacctctcaagctggatccaaggataaaaagatggaccaaccaccccaatgccaagaaggcaaaagtgaagaccagtactgtggacctgccaatcgagaatcagctatatggcagatagacagagagatgctcaacttgtacattgaaaatgagggtaagatgatcatgcaggataaactggagaaggagcggaatgatgctaagaacgcagtggagg

SEQ ID NO: 906 - protein, 701 aa, Homo sapien [sequence omitted]

SEQ ID NO: 907 - DNA, 1285 bp, Homo sapien
gggctgcctgtgacgcgcggcgcggtcggtcctgcctgtaacggcggcggcggctgctgctccagacacctgcggcggcggcggcgaccccgcggcgggcgcggagatgtggcccctggtagcggcgctgttgctgggctcggcgtgctgcggatcagctcagctactatttaataaaacaaaatctgtagaattcacgttttgtaatgacactgtcgtcattccatgctttgttactaatatggaggcacaaaacactactgaagtatacgtaaagtggaaatttaaaggaagagatatttacacctttgatggagctctaaacaagtccactgtccccactgactttagtagtgcaaaaattgaagtctcacaattactaaaaggagatgcctctttgaagatggataagagtgatgctgtctcacacacaggaaactacacttgtgaagtaacagaattaaccagagaaggtgaaacgatcatcgagctaaaatatcgtgttgtttcatggttttctccaaatgaaaatattcttattgttattttcccaatttttgctatactcctgttctggggacagtttggtattaaaacacttaaatatagatccggtggtatggatgagaaaacaattgctttacttgttgctggactagtgatcactgtcattgtcattgttggagccattcttttcgtcccaggtgaatattcattaaagaatgctactggccttggtttaattgtgacttctacagggatattaatattacttcactactatgtgtttagtacagcgattggattaacctccttcgtcattgccatattggttattcaggtgatagcctatatcctcgctgtggttggactgagtctctgtattgcggcgtgtataccaatgcatggccctcttctgatttcaggtttgagtatcttagctctagcacaattacttggactagtttatatgaaatttgtggcttccaatcagaagactatacaacctcctaggaaagctgtagaggaaccccttaatgcattcaaagaatcaaaaggaatgatgaatgatgaataactgaagtgaagtgatggactccgatttggagagtagtaagacgtgaaaggaatacacttctgtttaagcaccatggccttgatgattcactgttggggagaagaaacaagaaaagtaactggttgtcacctatgagacccttacgtgattgttagttaagtttttattcaaagcagctgtaatttagttaataaaataattatgatc

SEQ ID NO: 908 - protein, 323 aa, Homo sapien
MWPLVAALLLGSACCGSAQLLFNKTKSVEFTFCNDTVVIPCFVTNMEAQNTTEVYVKWKFKGRDIYTFDGALNKSTVPTDFSSAKIEVSQLLKGDASLKMDKSDAVSHTGNYTCEVTELTREGETIIELKYRVVSWFSPNENILIVIFPIFAILLFWGQFGIKTLKYRSGGMDEKTIALLVAGLVITVIVIVGAILFVPGEYSLKNATGLGLIVTSTGILILLHYYVFSTAIGLTSFVIAILVIQVIAYILAVVGLSLCIAACIPMHGPLLISGLSILALAQLLGLVYMKFVASNQKTIQPPRKAVEEPLNAFKESKGMMNDE

SEQ ID NO: 909 - DNA, 660 bp, Homo sapien
cctcctacaccttcagcaccctgcccagctactcctgctggaccaaagggaagggtgtttgttagccctcttgcaaagaagttggcagtagagaaagggattgatcttacacaagtaaaagggacaggaccagatggtagaatcaccaagaaggatatcgactcttttgtgcctagtaaagttgctcctgctccggcagctgttgtgcctcccacaggtcctggaatggcaccagttcctacaggtgtcttcacagatatcccaatcagcaacattcgtcgggttattgcacagcgattaatgcaatcaaagcaaaccatacctcattattacctttctatcgatgtaaatatgggagaagttttgttggtacggaaagaacttaataagatattagaagggagaagcaaaatttctgtcaatgacttcatcataaaacgttcagctttggcatgtttaaaagttcccgaagcaaattcttcttggatggacacagttataagacaaaatcatgttgttgatgtcagtgttgcggtcagtactcctgcaggactcatcacacctattgtgtttaatgcacatataaaaggagtggaaaccattgctaatgatgttgtttctttagcaaccaaagcaagagagggtaaactacagccacat

SEQ ID NO: 910 - DNA, 2820 bp, Homo sapien
tggcaaaatcctggagccagaagaaaggacagcagcattgatcaatcttacagctaacatgttgtacctggaaaacaatgcccagactcaatttagtgagccacagtacacgaacctggggctcctgaacagcatggaccagcagattcggaacggctcctcgtccaccagtccctataacacagaccacgcgcagaacagcgtcacggcgccctcgccctacgcacagcccagccccaccttcgatgctctctctccatcacccgccatcccctccaacaccgactacccaggcccgcacagttccgacgtgtccttccagcagtcgagcaccgccaagtcggccacctggacgtattccactgaactgaagaaactctactgccaaattgcaaagacatgccccatccagatcaaggtgatgaccccacctcctcagggagctgttatccgcgccatgcctgtctacaaaaaagctgagcacgtcacggaggtggtgaagcggtgccccaaccatgagctgagccgtgagttcaacgagggacagattgcccctcctagtcatttgattcgagtagaggggaacagccatgcccagtatgtagaagatcccatcacaggaagacagagtgtgctggtaccttatgagccaccccaggttggcactgaattcacgacagtcttgtacaatttcatgtgtaacagcagttgtgttggagggatgaaccgccgtccaattttaatcattgttactctggaaaccagagatgggcaagtcctgggccgacgctgctttgaggcccggatctgtgcttgcccaggaagagacaggaaggcggatgaagatagcatcagaaagcagcaagtttcggacagtacaaagaacggtgatggtacgaagcgcccgtttcgtcagaacacacatggtatccagatgacatccatcaagaaacgaagatccccagatgatgaactgttatacttaccagtgaggggccgtgagacttatgaaatgctgttgaagatcaaagagtccctggaactcatgcagtaccttcctcagcacacaattgaaacgtacaggcaacagcaacagcagcagcaccagcacttacttcagaaacagacctcaatacagtctccatcttcatatggtaacagctccccacctctgaacaaaatgaacagcatgaacaagctgccttctgtgagccagcttatcaaccctcagcagcgcaacgccctcactcctacaaccattcctgatggcatgggagccaacattcccatgatgggcacccacatgccaatggctggagacatgaatggactcagccccacccaggcactccctcccccactctccatgccatccacctcccactgcacacccccacctccgtatcccacagattgcagcattgtcagtttcttagcgaggttgggctgttcatcatgtctggactatttcacgacccaggggctgaccaccatctatcagattgagcattactccatggatgatctggcaagtctgaaaatccctgagcaatttcgacatgcgatctggaagggcatcctggaccaccggcagctccacgaattctcctccccttctcatctcctgcggaccccaagcagtgcctctacagtcagtgtgggctccagtgagacccggggtgagcgtgttattgatgctgtgcgattcaccctccgccagaccatctctttcccaccccgagatgagtggaatgacttcaactttgacatggatgctcgccgcaataagcaacagcgcatcaaagaggagggggagtgagcctcaccatgtgagctcttcctatccctctcctaactgccagccccctaaaagcactcctgcttaatcttcaaagccttctccctagctcctccccttcctcttgtctgatttcttaggggaaggagaagtaagaggctacctcttacctaacatctgacctggcatctaattctgattctggctttaagccttcaaaactatagcttgcagaactgtagctgccatggctaggtagaagtgagcaaaaaagagttgggtgtctccttaagctgcagagatttctcattgacttttataaagcatgttcacccttatagtctaagactatatatataaatgtataaatatacagtatagatttttgggtggggggcattgagtattgtttaaaatgtaatttaaatgaaagaaaattgagttgcacttattgaccattttttaatttacttgttttggatggcttgtctatactccttcccttaaggggtatcatgtatggtgataggtatctagagcttaatgctacatgtgagtgcgatgatgtacagattctttcagttctttggattctaaatacatgccacatcaaacctttgagtagatccatttccattgcttattatgtaggtaagactgtagatatgtattcttttctcagtgttggtatattttatattactgacatttcttctagtgatgatggttcacgttggggtgatttaatccagttataagaagaagttcatgtccaaacggtcctctttagtttttggttgggaatgaggaaaattcttaaaaggcccatagcagccagttcaaaaacacccgacgtcatgtatttgagcatatcagtaacccccttaaatttaatacccagataccttatcttacaatgttgattgggaaaacatttgctgcccattacagaggtattaaaactaaatttcactactagattgactaactcaaatacacatttgctactgttgtaagaattc

SEQ ID NO: 911 - protein, 586 aa, Homo sapien [sequence omitted]

SEQ ID NO: 912 - DNA, 3143 bp, Homo sapien
ctataaattaaggatcccagctacttaattgacttatgcttcctagttcgttgcccagccaccaccgtctctccaaaaacccgaggtctcgctaaaatcatcatggattcacttggcgccgtcagcactcgacttgggtttgatcttttcaaagagctgaagaaaacaaatgatggcaacatcttcttttcccctgtgggcatcttgactgcaattggcatggtcctcctggggacccgaggagccaccgcttcccagttggaggaggtgtttcactctgaaaaagagacgaagagctcaagaataaaggctgaagaaaaagaggtgattgagaacacagaagcagtacatcaacaattccaaaagtttttgactgaaataagcaaactcactaatgattatgaactgaacataaccaacaggctgtttggagaaaaaacatacctcttccttcaaaaatacttagattatgttgaaaaatattatcatgcatctctggaacctgttgattttgtaaatgcagccgatgaaagtcgaaagaagattaattcctgggttgaaagcaaaacaaatgaaaaaatcaaggacttgttcccagatggctctattagtagctctaccaagctggtgctggtgaacatggtttattttaaagggcaatgggacagggagtttaagaaagaaaatactaaggaagagaaattttggatgaataagagcacaagtaaatctgtacagatgatgacacagagccattcctttagcttcactttcctggaggacttgcaggccaaaattctagggattccatataaaaacaacgacctaagcatgtttgtgcttctgcccaacgacatcgatggcctggagaagataatagataaaataagtcctgagaaattggtagagtggactagtccagggcatatggaagaaagaaaggtgaatctgcacttgccccggtttgaggtggaggacggttacgatctagaggcggtcctggctgccatggggatgggcgatgccttcagtgagcacaaagccgactactcgggaatgtcgtcaggctccgggttgtacgcccagaagttcctgcacagttcctttgtggcagtaactgaggaaggcaccgaggctgcagctgccaccggcataggctttactgtcacatccgccccaggtcatgaaaatgttcactgcaatcatcccttcctgttcttcatcaggcacaatgaatccaacagcatcctcttcttcggcagattttcttctccttaagatgatcgttgccatggcattgctgcttttagcaaaaaacaactaccagtgttactcatatgattatgaaaatcgtccattcttttaaatgttgtctcacttgcatttccagtcttggccatcaaatcaatgatttaatgactccaataatgtgtgtgtttataaccatcctcgaaagtgaaatgtccttttttttgtgccatgcgtaaggtgagtcaaaccaaacctcattgataatctcccctttggtttcctttgaaagtaaattggtatcttgtagttttgtgcacacgaaaggagagaaagtttctccagtaaagagtacgaactagtaattttggggggtctctctaattctggtattttgacatgttataatacgcaagtaaaataaaacaatagtttactcagctcatgttactattccccaacagatattgtggcaaatcacacataggaaagaggatttgggaatacagtagcaaaacataaattaaaactcaaatgcccaggacaaaataaaacaatataccagatggagaggatgcccgtattttcatcttccattctaacattatccattgttagatgcataagcattttgatattgtgtaataaatgtggtatttgagaagataaatgatgtagttgatcagtaatcctcctctatcacctttttagactttgtaaggtaaatatttggactaacttttagaaaagtttccctttttttctccatttacatttttctggtttttttttttttttttgagtgaggtacgagtattaccaaatgatattttctgaagatgctttttggaaagctctgaatctatacctaatgctcttaattattggcttgtttcatttttttcctccagtttttaacaagatcacataactggcttatttttaacagctttgtcaaactacaatttacatgccgtaaaatgtacacactgtaattttataattcattgacttttagtaaattttctagcgttatgcatcgccacaatccagttttagaatatttccatgaccctaagaagtttcctcatgtctattaatattcccaatcctaggcaccactgagttgttttctgtctttataagtttttctttctacatcttatataaatggaatcataatacatgtagtattttgtgtctggcgtcttgcacttagcatggtgttcttgaggttcatctgttgtagtatgtattgatacttaggatttttttattgccgaatactattccattgcatggaaaagacctattttatttctaggttcaccagttgagggacatttggattgttcccacttcttgggctgttaggaataatgttgctctgaacatgtaaataaagatctttgtgttcacatatgtttttcattttctgttggggagattccctaggctagaaattgctgggccatatgaaaaatcaatagttagctttgtaagaaacagtcaaactgttttcccaacgtgacattttatattcccaccaggaatgtttaaaactagtgtcttcaaatcctcaccaacatccaggattgtgtctttatgattatagccatttttgtaggtacaaagtggcatctcatggtggttttaatttgcatttccataatatctaattaggttgagctttttttatgtgcttattggccatttgtttgactttgtttggtgaaatgtatacaaatcatttgctcatttttaatttgggttgtctgtcttgtcttctcattttattgagttaaatgagttcttaataatctctggcttacaagtccttaatttatcaaatatatgatacgtggacatttcctcataaaaaaaaaaaaaaaaaa

SEQ ID NO: 913 - protein, 391 aa, Homo sapien
MDSLGAVSTRLGFDLFKELKKTNDGNIFFSPVGILTAIGMVLLGTRGATASQLEEVFHSEKETKSSRIKAEEKEVIENTEAVHQQFQKFLTEISKLTNDYELNITNRLFGEKTYLFLQKYLDYVEKYYHASLEPVDFVNAADESRKKINSWVESKTNEKIKDLFPDGSISSSTKLVLVNMVYFKGQWDREFKKENTKEEKFWMNKSTSKSVQMMTQSHSFSFTFLEDLQAKILGIPYKNNDLSMFVLLPNDIDGLEKIIDKISPEKLVEWTSPGHMEERKVNLHLPRFEVEDGYDLEAVLAAMGMGDAFSEHKADYSGMSSGSGLYAQKFLHSSFVAVTEEGTEAAAATGIGFTVTSAPGHENVHCNHPFLFFIRHNESNSILFFGRFSSP

SEQ ID NO: 914 - DNA, 1373 bp, Homo sapien
gggaggagagaaaagccatggccgacaaggtcctgaaggagaagagaaagctgtttatccgttccatgggtgaaggtacaataaatggcttactggatgaattattacagacaagggtgctgaacaaggaagagatggagaaagtaaaacgtgaaaatgctacagttatggataagacccgagctttgattgactccgttattccgaaaggggcacaggcatgccaaatttgcatcacatacatttgtgaagaagacagttacctggcagggacgctgggactctcagcagatcaaacatctggaaattaccttaatatgcaagactctcaaggagtactttcttcctttccagctcctcaggcagtgcaggacaacccagctatgcccacatcctcaggctcagaagggaatgtcaagctttgctccctagaagaagctcaaaggatatggaaacaaaagtcggcagagatttatccaataatggacaagtcaagccgcacacgtcttgctctcattatctgcaatgaagaatttgacagtattcctagaagaactggagctgaggttgacatcacaggcatgacaatgctgctacaaaatctggggtacagcgtagatgtgaaaaaaaatctcactgcttcggacatgactacagagctggaggcatttgcacaccgcccagagcacaagacctctgacagcacgttcctggtgttcatgtctcatggtattcgggaaggcatttgtgggaagaaacactctgagcaagtcccagatatactacaactcaatgcaatctttaacatgttgaataccaagaactgcccaagtttgaaggacaaaccgaaggtgatcatcatccaggcctgccgtggtgacagccctggtgtggtgtggtttaaagattcagtaggagtttctggaaacctatctttaccaactacagaagagtttgaggatgatgctattaagaaagcccacatagagaaggattttatcgctttctgctcttccacaccagataatgtttcttggagacatcccacaatgggctctgtttttattggaagactcattgaacatatgcaagaatatgcctgttcctgtgatgtggaggaaattttccgcaaggttcgattttcatttgagcagccagatggtagagcgcagatgcccaccactgaaagagtgactttgacaagatgtttctacctcttcccaggacattaaaataaggaaactgtatgaatgtctgtgggcaggaagtgaagagatcgttctgtaaaaggtttttggaattatgtctgctgaataataaactttttttgaaataataaatctggtagaaaaatgaaaaaaaaaaaaaaaaaa

SEQ ID NO: 915 - protein, 404 aa, Homo sapien
MADKVLKEKRKLFIRSMGEGTINGLLDELLQTRVLNKEEMEKVKRENATVMDKTRALIDSVIPKGAQACQICITYICEEDSYLAGTLGLSADQTSGNYLNMQDSQGVLSSFPAPQAVQDNPAMPTSSGSEGNVKLCSLEEAQRIWKQKSAEIYPIMDKSSRTRLALIICNEEFDSIPRRTGAEVDITGMTMLLQNLGYSVDVKKNLTASDMTTELEAFAHRPEHKTSDSTFLVFMSHGIREGICGKKHSEQVPDILQLNAIFNMLNTKNCPSLKDKPKVIIIQACRGDSPGVVWFKDSVGVSGNLSLPTTEEFEDDAIKKAHIEKDFIAFCSSTPDNVSWRHPTMGSVFIGRLIEHMQEYACSCDVEEIFRKVRFSFEQPDGRAQMPTTERVTLTRCFYLFPGH

SEQ ID NO: 916 - DNA, 1851 bp, Homo sapien
gaaaagccgccggtatttctccacctggctctcctctacctccaggcaggcgcacccgaggtccccctcccaccccaccttctgccctcccgcacacttggaccagtgctgttgacccggaagcggacatttctgcagctattctaagcacacgtcggcggagggagcgggacgtggccagcggtcagcggcgaaggaggcaggccctgcgcggggatcacggaagccctgtgattcaccatgaagttccagtacaaggaggtccatccctttgagtatcggaaaaaggaaggagaaaagatccggaagaaatatccggacagggtccccttgattgtagagaaggctccaaaagcaagggtgcctgatctggacaggaggaagtacctagtgccctccgaccttaccgatggccagttctaccttttaatccggaagagaatccacctgagacctgaggacgccttattcttctttgtcaacaacactatccctcccactagtgctaccatgggccaactatatgaggacagtcatgaggaagatgattttctgtatgtggcctacagtaatgagagtgtctatgggaaatgagtggttggaagcccagcagatggaagcacctggacttaggggtaggggaggggtgtgtgtgtgacttggggaaagagagggcggctcccaccgtgaggagacagaaggtgaagacatatagaaactttacaccgcacacaccgtcaacgcattttcacatgctcaactgatattttttgttgcttccttggcccagggagaaagcatgtcaggacagagctgttggattggctttgatagaggaatggggatgatgtaattttatggcattcctgagatttaatttttgtgcagtttcatagaaaggtcggtcaggaggtggacaagttggggtcagagatgatggcagtccagcagcaactccctgtgctcccttctctttgggcagagattctgtttttgacagttgcacaagacaggtagggaaaggggacttgtggtagtgggccatacctggggacgaaaagagacccactgtaattgatgcatcgtggcccccgatcttccgtatcccacacttcttttctcccatcccagttgcaatctcactcacaaacatcacagtaccaccccaggggcggcagtagacaccaacccagaaatttagacagggatctcttatctttggaaaataggggttaggcatgagggtggttatgattaagaagataattttgttgttaaatagcattaaactggaattgacagagtgagttgagcatctctgtctaacctgctctttctctctggtgctcctcatctcacccctaccttggaatttaataagcttcaggcatttccaattgcagactaaaaccacttctaccatctcctctagtattttccatgtatcaggacagagatgtcttatgtagggaaggggcaggtatgaagtgaggtagattatctatacctctcactcattcaggattctcgctcccatgctgctgtcccttcattctcacactcacaggaatgctatgtgatggccagctgcttcccttcttggttatccactgcagctgctagttagaaaggtttgcagggatgacttttagtaaatcatggggattttattgatttattatcacttataggattttgtggggtgggagtggggagcaggaattgcactcagacatgacatttcaattcatctctgcaaatgaaaagggttcttcctcttgggggaaatctgtgtgtcagttctgtcagctgcaagttcttgtgtaatgaagtcaatgctgtcaggccaag

SEQ ID NO: 917 - protein, 117 aa, Homo sapien
MKFQYKEVHPFEYRKKEGEKIRKKYPDRVPLIVEKAPKARVPDLDRRKYLVPSDLTDGQFYLLIRKRIHLRPEDALFFFVNNTIPPTSATMGQLYEDSHEEDDFLYVAYSNESVYGK

SEQ ID NO: 918 - DNA, 2496 bp, Homo sapien
ctctcttgcctgccgccatgtgcctttcgccttctgccgtgattgtgaggcctccccagccatatggaagttcaggatgtctgcccgtggcccggctatcggcatcgacctgggcaccacctattcgtgcgtcggggtcttccaacatggcaaggtggagatcatcgccaacgaccagggcaatcgcaccacccccagctacgtggccttcacggacaccgagcgcctcatcggcgacgccgccaagaaccaggtggccatgaaccccaccaacaccatcttcgacgccaagaggctgattggacggaaattcgaggatgccacagtgcagtcggatatgaaacactggccgttccgggtggtgagcgagggaggcaagcccaaagtgcaagtagagtacaagggggagaccaagaccttcttcccagaggagatatcctccatggtcctcacgaagatgaaggagatcgcggaagcctacctggggggcaaggtgcacagcgcggtcataacggtcccggcctatttcaacgactcgcagcgccaggccaccaaggacgcaggcaccatcacggggctcaatgtgctgcgcatcatcaacgagcccacggcggcggccatcgcctacggcctggacaagaagggctgcgcgggcggcgagaagaacgtgctcatctttgacctgggcggtggcactttcgacgtgtccatcctgaccatcgaggatggcatcttcgaggtgaagtccacggccggcgacacccacctgggcggtgaggacttcgacaaccgcatggtgagccacctggcggaggagttcaagcgcaagcacaagaaggacattgggcccaacaagcgcgccgtgaggcggctgcgcaccgcttgcgagcgcgccaagcgcaccctgagctcgtccacgcaggcgagcatcgagatcgactcgctctacgagggcgtggacttctatacgtccatcacgcgcgcccgcttcgaggagctcaatgccgacctctttcgcgggaccctggagccggtggagaaggcgctgcgcgacgccaagctggacaagggccagatccaggagatcgtgctggtgggcggctccactcgtatccccaagatccagaagctgctgcaggatttcttcaacggcaaggagctgaacaagagcatcaaccccgacgaggcggtggcctatggcgccgcggtgcaggcggccatcctcatcggcgacaaatcagagaatgtgcaggacctgctgctactcgacgtgaccccgttgtcgctgggcatcgagacagctggcggtgtcatgaccccactcatcaagaggaacaccacgatccccaccaagcagacgcagaccttcaccacctactcggacaaccagagcagcgtactggtgcaggtatacgagggcgaacgggccatgaccaaggacaataacctgctgggcaagttcgacctgaccgggattccccctgcgcctcgcggggtcccccaaatcgaggttaccttcgacattgacgccaatggcatccttaacgttaccgccgccgacaagagcaccggtaaggaaaacaaaatcaccatcaccaatgacaaaggtcgtctgagcaaggacgacattgaccggatggtgcaggaggcggagcggtacaaatcggaagatgaggcgaatcgcgaccgagtcgcggccaaaaacgccctggagtcctatacctacaacatcaagcagacggtggaagacgagaaactgaggggcaagattagcgagcaggacaaaaacaagatcctcgacaagtgtcaggaggtgatcaactggctcgaccgaaaccagatggcagagaaagatgagtatgaacacaagcagaaagagctcgaaagagtttgcaaccccatcatcagcaaactttaccaaggtggtcctggcggcggcagcggcggcggcggttcaggagcctccgggggacccaccatcgaagaagtggactaagcttgcactcaagtcagcgtaaacctctttgcctttctctctctctctttttttttgtttgtttctttgaaatgtccttgtgccaagtacgagatctattgttggaagtctttggtatatgcaaatgaaaggagaggtgcaacaacttagtttaattataaaagttccaaagtttgttttttaaaaacattattcgaggtttctctttaatgcattttgcgtgtttgctgacttgagcatttttgattagttcgtgcatggagatttgtttgagatgagaaaccttaagtttgcacacctgttctgtagaagcttggaaacagtaaaatatataggagcttaaattgtttatttttatgtactactttaaaactaaactgaacattgcagtaatgttaaggacaggtatactttttgcaaacaaatgcataaatgcaaatgtaaagtaaagctgaaattgatctcaaaaaaaaaaaaaaaaaaaaaaaaaaaaaaaaaaa

SEQ ID NO: 919 - protein, 639 aa, Homo sapien
MSARGPAIGIDLGTTYSCVGVFQHGKVEIIANDQGNRTTPSYVAFTDTERLIGDAAKNQVAMNPTNTIFDAKRLIGRKFEDATVQSDMKHWPFRVVSEGGKPKVQVEYKGETKTFFPEEISSMVLTKMKEIAEAYLGGKVHSAVITVPAYFNDSQRQATKDAGTITGLNVLRIINEPTAAAIAYGLDKKGCAGGEKNVLIFDLGGGTFDVSILTIEDGIFEVKSTAGDTHLGGEDFDNRMVSHLAEEFKRKHKKDIGPNKRAVRRLRTACERAKRTLSSSTQASIEIDSLYEGVDFYTSITRARFEELNADLFRGTLEPVEKALRDAKLDKGQIQEIVLVGGSTRIPKIQKLLQDFFNGKELNKSINPDEAVAYGAAVQAAILIGDKSENVQDLLLLDVTPLSLGIETAGGVMTPLIKRNTTIPTKQTQTFTTYSDNQSSVLVQVYEGERAMTKDNNLLGKFDLTGIPPAPRGVPQIEVTFDIDANGILNVTAADKSTGKENKITITNDKGRLSKDDIDRMVQEAERYKSEDEANRDRVAAKNALESYTYNIKQTVEDEKLRGKISEQDKNKILDKCQEVINWLDRNQMAEKDEYEHKQKELERVCNPIISKLYQGGPGGGSGGGGSGASGGPTIEEVD

SEQ ID NO: 920 - DNA, 5581 bp, Homo sapien
agctcctgtgacagacggagctggagcggcggggcggcggcggagtccggcggccgggagagcgagtgagcgagcggaggagcagcgacacgggagtctagggagcgagaaggagaaggaggggagcgctcgggcgcgagcgagagaaaccgcgagcgccgagcttggactcgagccccggaacggctgaggagcccgcccgctcccctcccctccccctccccgggcccgggcccagcgcgccatcctcccccctccttccctccctccctccttcctccctcccctctccctccccctcccccgccggtggatgggagtgaaggacggaagaggcccggcggaggcggcggtgcagcgctccggtggaatgaatcttacttgttgaatatcttctggttactagttggattcatttgtgaaagaatcattttcccctgtgtggaagacacttagtggcatatttaaattataagtccacggatcaaaaagctttttgatttcccaaaggagggacataccactatatcagataagcttgacattacagccaagatggtgctgtcccagagacaacgagatgaactaaatcgagctatagcagattatcttcgttcaaatggctatgaagaggcatattcagtttttaaaaaggaagctgaattagatgtgaatgaagaattagataaaaagtatgctggtcttttggaaaaaaaatggacatctgttattagattacaaaagaaggttatggaattagaatcaaagctaaatgaagcaaaagaagaatttacgtcaggtggacctcttggtcagaaacgagacccaaaagaatggattccccgtccgccagaaaaatatgcattgagtggtcacaggagtccagtcactcgagtcattttccatcctgtgttcagtgttatggtctctgcttcagaggatgctacaattaaggtgtgggattatgagactggagattttgaacgaactcttaaaggacatacagactctgtacaggacatttcattcgaccacagcggcaagcttctggcttcctgttctgcagatatgaccattaaactatgggattttcagggctttgaatgcatcagaaccatgcacggccatgaccacaatgtttcttcagtagccatcatgcccaatggagatcatatagtgtctgcctcaagggataaaactataaaaatgtgggaagtgcaaactggctactgtgtgaagacattcacaggacacagagaatgggtacgtatggtacggccaaatcaagatggcactctgatagccagctgttccaatgaccagactgtgcgtgtatgggtcgtagcaacaaaggaatgcaaggctgagctccgagagcatgagcatgtggtagaatgcatttcctgggctccagaaagctcatattcctccatctctgaagcaacaggatctgagactaaaaaaagtggtaaacctgggccattcttgctgtctggatccagagacaagactattaagatgtgggatgtcagtactggcatgtgccttatgaccctcgtgggtcatgataactgggtacgtggagttctgttccattctggggggaagtttattttgagttgtgctgatgacaagaccctacgcgtatgggattacaagaacaagcgatgcatgaagaccctcaatgcgcatgaacactttgttacctccttggatttccacaagacggcaccctatgtcgtcactggcagcgtagatcaaacagtaaaagtgtgggagtgccgttgattgtgtctccttcggcccctcctccctcttttcctctggatgcactctgatgataccatggttaccccattgagctctgtttaaataaatattgtcctttcatgtaaattattctggatgtagattgagcttattaaatgttacacacaaagtattcatgcatggtgaatccaaattgtatactgtaaatttacatacgttgtctagaagtaccatagggtttaaaaacctgggctggcattggtcacaccaggcctaagaaggcagaagttgaatcaattgaactagggcactaaactgaatagttgacagtgtcattttatgttggattattaattcctgtttttctttctgctatctgttggtgcctgacttgatggcctcatttggggaaaagtggtggttattagggcttttcctgaaatgtgtatctatgtaacatcacttaagtgtgcttaataaatctcctgtaaggattttagatgataaggctacaattcagaatcttctgaaccatctatgtaatgaatggggattatacattggaatttttgtcatgacacatttgccaaatcagtaggatatatttgttttggcagcctatcacgcagaggctagtggtatatttatgtaagaaaatgactgtaaatctcaagaaaaatctcagcagctaatagcaactcatttatttcattttggtcttaatgctttgtaaacaggtcaaaaaatactgtcatactctaagcttctattttccacactggacatacttctagttgtattctccatactattagactgtgtagtgatgtgacttccaagtagaatttaatctccccattgagtgtgtcatggtacaaatcactattcgtttttggtgttttttagggatgtgcaatgtgcattacataatgacagaaatactgagaaggttctgtgtgcccatttgaaaggagtgggaggaatacagcagtttgtttttcaacatgaatctgatattgatttaaactgtgtttcacttacaagttttaaaaaaatgacagggtttaatggagcgtgcataaaaatgtactgttttcaccttttgtttatatgtaaatgtttgtaagtatatgggcctatctgtaagtgggtaagtctgtatgtgtgtatcatacacatcaacctccatgtccttagtcctgggtttttgaaaaagtgctaaaacggacaagtagaataaatgttgctgtggaatgccatgctttagaacaaaccctttttgatcttaatgcttctgaaaactaggtctgactctggggatttttttccagccgaaggaaaatcacttccgttatgtccccctctaatttagccgctcgacattttacacaacccggatatgttgtatattttgacccaaagttacaggtaggtttaagagaatttttagccatgacttttggagcactattccattgtcagttattaataaagaattccattgcttagctaaccaacaggttttttttgtttccaagagagttatttgaaaagttaacagaacaatgagataacagtgacagtttaacaaagataaaattctgaactgcgttttattcatttgtgtactatgtgattttttaaatgtcccctttagtatttaatggaaaattggttcctgcaaaagacaaagggtgagagttagcgtcctgtagatacacacagagactaggccgtatattaactagaagcagctttatgtctagcttgtgtctttttgtttgtttgcttgtttgtttttagattcctgagagatgtctctggaagggaaagttttgagaactaatggctatttttgaggacaaaaattacatcttaagctaattccttaaatacatacagtaggtgaattttcaggacaatattgcctcacaaccctgcttacattgaaaagtctttttcccttagctcttctgactggatttttctacaaaactatggaaaatatctttgttcttgtttgctgctattttctgtcctattttgagaaatataaatacatagaaatggtgcatcttaacatttgtttgtacatgtataaatgtcttgtattttaattcatttttagcatgaattgtttaagggtaagccacaacatctagaaatcactcatagatattgaacaataaaggagaatggtaccgatgcaggaggaagcaagcgtgtcttcccctgcagcacacagcgacttgcgttgacaaaggaggaggaaacgattactctgtaaacaaagttatccttacttgggagattgccacagcctgctgctgagttgagttaccagacatcctccatgtgagaagcagcgaacattgaatctcagggatggcccacaactgggtccacatgtaatgagccctgtttaataacgaaggggtgggggagagcagtccgtctacaacctggaatcagatttgcaaaatttcctgcactgctgtctgacactgtcctgttgatgccctttctgactgtgttctctgttttctctgtctgctgtctaaccctgtgccttgcctgggataaggacaatgatgaggttactggtttggattgtaagtagaggacttttattaattggtttagaggttcactgctgctttgtcactttctcaatcaaattggccacttaagaaataaagagctggtagaattgcatcctcagatgattattgactgtgtgtgtgtgtgaaaacagacattccagtgccacccaaatatatatctgtaacgtgcccaagaaatcctagctgcgctcttgagagtgcatgccatggagactggtttagacaccgcgtggagcctagttgcctgttgtcacggcatcttgcactttaggagactaagaccgtcctggttcgtctgtgtgtggtgtgaccaatggtgtgcccagagcactactctcaaaatcactagtgttagcaagtcgtcccgggctggggagcgttcgccgtagtctttggaagctttggctttagatttaccaagccccgcctccccgctgccagtgccctgctctcccgttcgcctctttctgtttctgtgtgaactttcccggtaatatcactcgttaaataggttttctttaaacttaattaaggaaaaactatttaaaggtaaaggatattttgttgacatcggtggctcgatcatccttaagcaactgaagttaaaattgttgaaggaaaaggcacttaaattggttactttcatgtccagctgtatataagtccagtgtgttcatctagatgacgcaaagaatctcctggtagagaagcgacatgtaaaaaactggtggaaaaaggttttggattttttttccagtggggtggggggagggcaagctggatttacaggtcacggctggactgaatgggcctttttatcttcccactgtatcatggaagtagctgcttgcttgtactgtccatccttcaggcatccctaaagctcactctgaagatgttagagacaaacacaaactcttcgagttaaagttgatcctgacactgacatgaaggcaagccttgatttcgtatgaacgttgctgaagtggtaattgaggaaaacagttccccagattgttaagagttcactgaagatattgacacaattttaaaaaatcagtaaaggaatgtatataatattgctctcgtgttttacagtaagatttgttgctctcagactgtgtaaaacaaaatttattcatgttttctgcatattaaaaaatcttattgtaccaactggtaaaccg

SEQ ID NO: 921 - protein, 410 aa, Homo sapien
MVLSQRQRDELNRAIADYLRSNGYEEAYSVFKKEAELDVNEELDKKYAGLLEKKWTSVIRLQKKVMELESKLNEAKEEFTSGGPLGQKRDPKEWIPRPPEKYALSGHRSPVTRVIFHPVFSVMVSASEDATIKVWDYETGDFERTLKGHTDSVQDISFDHSGKLLASCSADMTIKLWDFQGFECIRTMHGHDHNVSSVAIMPNGDHIVSASRDKTIKMWEVQTGYCVKTFTGHREWVRMVRPNQDGTLIASCSNDQTVRVWVVATKECKAELREHEHVVECISWAPESSYSSISEATGSETKKSGKPGPFLLSGSRDKTIKMWDVSTGMCLMTLVGHDNWVRGVLFHSGGKFILSCADDKTLRVWDYKNKRCMKTLNAHEHFVTSLDFHKTAPYVVTGSVDQTVKVWECR

SEQ ID NO: 922 - DNA, 2256 bp, Homo sapien
tcagagtccggctcaggctccggctgcggctccagcccgcgatgccccattccgtgaccctgcgcgggccttcgccctggggcttccgcctggtgggcggccgggacttcagcgcgcccctcaccatctcacgggtccatgctggcagcaaggctgcattggctgccctgtgcccaggagacctgatccaggccatcaatggtgagagcacagagctcatgacacacctggaggcacagaaccgcatcaagggctgccacgatcacctcacactgtctgtgagcaggcctgagggcaggagctggcccagtgcccctgatgacagcaaggctcaggcacacaggatccacatcgatcctgagatccaggacggcagcccaacaaccagcaggcggccctcaggcaccgggactgggccagaagatggcagaccaagcctgggatctccatatggacaaccccctcgctttccagtccctcacaatggcagcagcgaggccaccctgccagcccagatgagcaccctgcatgtgtctccaccccccagcgctgacccagccagaggcctcccgcggagccgggactgcagagtcgacctgggctccgaggtgtacaggatgctgcgggagccagccgagcccgtggccgcggagcccaagcagtcaggctccttccgctacttgcagggcatgctagaggccggcgagggcggggattggcccgggcctggcggcccccggaacctcaagcccacggccagcaagctgggcgctccgctgagcggcctgcaggggctgcccgagtgcacgcgctgcggccacggcatcgtgggcaccatcgtcaaggcacgggacaagctctaccatcccgagtgcttcatgtgcagtgactgcggcctgaacctcaagcagcgtggttacttctttctggacgagcggctctactgtgagagccacgccaaggcgcgcgtgaagccgcccgagggctacgacgtggtggcggtgtaccccaatgccaaggtggaactcgtctgagctgggaccctgctcccacgcctgcttcttaaggtccctgctcggccggtgtaaatatgtttcaccctgtccctctaataaagctcctctgctccaccttgaacctgtcacctggcctgccaccctcctgcgcaggccatgcatggctcccgagtacagtagtatctgcttaggtgccaggcatgtcctaggctctgggtgcagtagtgagcaggacgggtaccatgctgccctgaaggggccacagcctgggtggaaggcagacctgaatcacaacgggccagctctagtaatacgaaggtgaggtctgggatgctgcgtgcggcgcgacgacaggaggtatgacctgggtggggtcagggaaagtcttagctgagaactaagagatgagggaggcacaaactctgcacgggggaactgtgtgtgcaaaggtgagctgggggcgagaaaggcctctgtggccgtcatcggcactagcgggttgggggtggtggtggggtgctggcagcctcaggagcgatcgctcccctggagagggtgattgagtgtggagatcaccggggccgccgcgggccgtctgcacttctgttccaggtttttctggcattttctgttccaggtttcttccacccacgagcactttattctcctccgagacccccttttcttccccttcctctctcccaccagggggcgcgcttaaatttccagacagagaccagaaggaaggtttagaaagaaaagaacacttgcccagggcagctttgccctccaagaggctccctcctgtctctaagtcaattccacccctcctcgaagtcccggcttccacccctctcctcagagtcccggcgtttacctcgtggtgtgtttgccttgggcctttcatgccccggctgcacacatcgtctgtgaattgtggctgttcactcccgaggatgtgtcctagactccgggtcgcgtggatctaccctctagtttacttgctcgggagaagaaactgactcgttttatttagtgcctatttagcgagcccagagtaacgtacatttgtgctgttttcaattttgtgctatcgcaaatcacaaaaaaactgttatcaattcacattcatcatcagcacgagacccatttccttgtgctcctgccagctcaggatattatgtttcttttttcatttttgccagtctgttaagtaaaatgtcatatgcgtttgttttaa

SEQ ID NO: 923 - protein, 330 aa, Homo sapien
MPHSVTLRGPSPWGFRLVGGRDFSAPLTISRVHAGSKAALAALCPGDLIQAINGESTELMTHLEAQNRIKGCHDHLTLSVSRPEGRSWPSAPDDSKAQAHRIHIDPEIQDGSPTTSRRPSGTGTGPEDGRPSLGSPYGQPPRFPVPHNGSSEATLPAQMSTLHVSPPPSADPARGLPRSRDCRVDLGSEVYRMLREPAEPVAAEPKQSGSFRYLQGMLEAGEGGDWPGPGGPRNLKPTASKLGAPLSGLQGLPECTRCGHGIVGTIVKARDKLYHPECFMCSDCGLNLKQRGYFFLDERLYCESHAKARVKPPEGYDVVAVYPNAKVELV

SEQ ID NO: 924 - DNA, 11185 bp, Homo sapien
gctgccccgagcctttctggggaagaactccaggcgtgcggacgcaacagccgagaacattaggtgttgtggacaggagctgggaccaagatcttcggccagccccgcatcctcccgcatcttccagcaccgtcccgcaccctccgcatccttccccgggccaccacgcttcctatgtgacccgcctgggcaacgccgaacccagtcgcgcagcgctgcagtgaattttccccccaaactgcaataagccgccttccaaggccaagatgttcataaatataaagagcatcttatggatgtgttcaaccttaatagtaacccatgcgctacataaagtcaaagtgggaaaaagcccaccggtgaggggctccctctctggaaaagtcagcctaccttgtcatttttcaacgatgcctactttgccacccagttacaacaccagtgaatttctccgcatcaaatggtctaagattgaagtggacaaaaatggaaaagatttgaaagagactactgtccttgtggcccaaaatggaaatatcaagattggtcaggactacaaagggagagtgtctgtgcccacacatcccgaggctgtgggcgatgcctccctcactgtggtcaagctgctggcaagtgatgcgggtctttaccgctgtgacgtcatgtacgggattgaagacacacaagacacggtgtcactgactgtggatggggttgtgtttcactacagggcggcaaccagcaggtacacactgaattttgaggctgctcagaaggcttgtttggacgttggggcagtcatagcaactccagagcagctctttgctgcctatgaagatggatttgagcagtgtgacgcaggctggctggctgatcagactgtcagatatcccatccgggctcccagagtaggctgttatggagataagatgggaaaggcaggagtcaggacttatggattccgttctccccaggaaacttacgatgtgtattgttatgtggatcatctggatggtgatgtgttccacctcactgtccccagtaaattcaccttcgaggaggctgcaaaagagtgtgaaaaccaggatgccaggctggcaacagtgggggaactccaggcggcatggaggaacggctttgaccagtgcgattacgggtggctgtcggatgccagcgtgcgccaccctgtgactgtggccagggcccagtgtggaggtggtctacttggggtgagaaccctgtatcgttttgagaaccagacaggcttccctccccctgatagcagatttgatgcctactgctttaaacctaaagaggctacaaccatcgatttgagtatcctcgcagaaactgcatcacccagtttatccaaagaaccacaaatggtttctgatagaactacaccaatcatccctttagttgatgaattacctgtcattccaacagagttccctcccgtgggaaatattgtcagttttgaacagaaagccacagtccaacctcaggctatcacagatagtttagccaccaaattacccacacctactggcagtaccaagaagccctgggatatggatgactactcaccttctgcttcaggacctcttggaaagctagacatatcagaaattaaggaagaagtgctccagagtacaactggcgtctctcattatgctacggattcatgggatggtgtcgtggaagataaacaaacacaagaatcggttacacagattgaacaaatagaagtgggtcctttggtaacatctatggaaatcttaaagcacattccttccaaggaattccctgtaactgaaacaccattggtaactgcaagaatgatcctggaatccaaaactgaaaagaaaatggtaagcactgtttctgaattggtaaccacaggtcactatggattcaccttgggagaagaggatgatgaagacagaacacttacagttggatctgatgagagcaccttgatctttgaccaaattcctgaagtcattacggtgtcaaagacttcagaagacaccatccacactcatttagaagacttggagtcagtctcagcatccacaactgtttcccctttaattatgcctgataataatggatcatccatggatgactgggaagagagacaaactagtggtaggataacggaagagtttcttggcaaatatctgtctactacaccttttccatcacagcatcgtacagaaatagaattgtttccttattctggtgataaaatattagtagagggaatttccacagttatttatccttctctacaaacagaaatgacacatagaagagaaagaacagaaacactaataccagagatgagaacagatacttatacagatgaaatacaagaagagatcactaaaagtccatttatgggaaaaacagaagaagaagtcttctctgggatgaaactctctacatctctctcagagccaattcatgttacagagtcttctgtggaaatgaccaagtcttttgatttcccaacattgataacaaagttaagtgcagagccaacagaagtaagagatatggaggaagactttacagcaactccaggtactacaaaatatgatgaaaatattacaacagtgcttttggcccatggtactttaagtgttgaagcagccactgtatcaaaatggtcatgggatgaagataatacaacatccaagcctttagagtctacagaaccttcagcctcttcaaaattgccccctgccttactcacaactgtggggatgaatggaaaggataaagacatcccaagtttcactgaagatggagcagatgaatttactcttattccagatagtactcaaaagcagttagaggaggttactgatgaagacatagcagcccatggaaaattcacaattagatttcagccaactacatcaactggtattgcagaaaagtcaactttgagagattctacaactgaagaaaaagttccacctatcacaagcactgaaggccaagtttatgcaaccatggaaggaagtgctttgggtgaagtagaagatgtggacctctctaagccagtatctactgttccccaatttgcacacacttcagaggtggaaggattagcatttgttagttatagtagcacccaagagcctactacttatgtagactcttcccataccattcctctttctgtaattcccaagacagactggggagtgttagtaccttctgttccatcagaagatgaagttctaggtgaaccctctcaagacatacttgtcattgatcagactcgccttgaagcgactatttctccagaaactatgagaacaacaaaaatcacagagggaacaactcaggaagaattcccttggaaagaacagactgcagagaaaccagttcctgctctcagttctacagcttggactcccaaggaggcagtaacaccactggatgaacaagagggcgatggatcagcatatacagtctctgaagatgaattgttgacaggttctgagagggtcccagttttagaaacaactccagttggaaaaattgatcacagtgtgtcttatccaccaggtgctgtaactgagcacaaagtgaaaacagatgaagtggtaacactaacaccacgcattgggccaaaagtatctttaagtccagggcctgaacaaaaatatgaaacagaaggtagtagtacaacaggatttacatcatctttgagtccttttagtacccacattacccagcttatggaagaaaccactactgagaaaacatccctagaggatattgatttaggctcaggattatttgaaaagcccaaagccacagaactcatagaattttcaacaatcaaagtcacagttccaagtgatattaccactgccttcagttcagtagacagacttcacacaacttcagcattcaagccatcttccgcgatcactaagaaaccacctctcatcgacagggaacctggtgaagaaacaaccagtgacatggtaatcattggagaatcaacatctcatgttcctcccactacccttgaagatattgtagccaaggaaacagaaaccgatattgatagagagtatttcacgacttcaagtcctcctgctacacagccaacaagaccacccactgtggaagacaaagaggcctttggacctcaggcgctttctacgccacagcccccagcaagcacaaaatttcaccctgacattaatgtttatattattgaggtcagagaaaataagacaggtcgaatgagtgatttgagtgtaattggtcatccaatagattcagaatctaaagaagatgaaccttgtagtgaagaaacagatccagtgcatgatctaatggctgaaattttacctgaattccctgacataattgaaatagacctataccacagtgaagaaaatgaagaagaagaagaagagtgtgcaaatgctactgatgtgacaaccaccccatctgtgcagtacataaatgggaagcatctcgttaccactgtgcccaaggacccagaagctgcagaagctaggcgtggccagtttgaaagtgttgcaccttctcagaatttctcggacagctctgaaagtgatactcatccatttgtaatagccaaaacggaattgtctactgctgtgcaacctaatgaatctacagaaacaactgagtctcttgaagttacatggaagcctgagacttaccctgaaacatcagaacatttttcaggtggtgagcctgatgttttccccacagtcccattccatgaggaatttgaaagtggaacagccaaaaaaggggcagaatcagtcacagagagagatactgaagttggtcatcaggcacatgaacatactgaacctgtatctctgtttcctgaagagtcttcaggagagattgccattgaccaagaatctcagaaaatagcctttgcaagggctacagaagtaacatttggtgaagaggtagaaaaaagtacttctgtcacatacactcccactatagttccaagttctgcatcagcatatgtttcagaggaagaagcagttaccctaataggaaatccttggccagatgacctgttgtctaccaaagaaagctgggtagaagcaactcctagacaagttgtagagctctcagggagttcttcgattccaattacagaaggctctggagaagcagaagaagatgaagatacaatgttcaccatggtaactgatttatcacagagaaatactactgatacactcattactttagacactagcaggataatcacagaaagcttttttgaggttcctgcaaccaccatttatccagtttctgaacaaccttctgcaaaagtggtgcctaccaagtttgtaagtgaaacagacacttctgagtggatttccagtaccactgttgaggaaaagaaaaggaaggaggaggagggaactacaggtacggcttctacatttgaggtatattcatctacacagagatcggatcaattaattttaccctttgaattagaaagtccaaatgtagctacatctagtgattcaggtaccaggaaaagttttatgtccttgacaacaccaacacagtctgaaagggaaatgacagattctactcctgtctttacagaaacaaatacattagaaaatttgggggcacagaccactgagcacagcagtatccatcaacctggggttcaggaagggctgaccactctcccacgtagtcctgcctctgtctttatggagcagggctctggagaagctgctgccgacccagaaaccaccactgtttcttcattttcattaaacgtagagtatgcaattcaagccgaaaaggaagtagctggcactttgtctccgcatgtggaaactacattctccactgagccaacaggactggttttgagtacagtaatggacagagtagttgctgaaaatataacccaaacatccagggaaatagtgatttcagagcgattaggagaaccaaattatggggcagaaataaggggcttttccacaggttttcctttggaggaagatttcagtggtgactttagagaatactcaacagtgtctcatcccatagcaaaagaagaaacggtaatgatggaaggctctggagatgcagcatttagggacacccagacttcaccatctacagtacctacttcagttcacatcagtcacatatctgactcagaaggacccagtagcaccatggtcagcacttcagccttcccctgggaagagtttacatcctcagctgagggctcaggtgagcaactggtcacagtcagcagctctgttgttccagtgcttcccagtgctgtgcaaaagttttctggtacagcttcctccattatcgacgaaggattgggagaagtgggtactgtcaatgaaattgatagaagatccaccattttaccaacagcagaagtggaaggtacgaaagctccagtagagaaggaggaagtaaaggtcagtggcacagtttcaacaaactttccccaaactatagagccagccaaattatggtctaggcaagaagtcaaccctgtaagacaagaaattgaaagtgaaacaacatcagaggaacaaattcaagaagaaaagtcatttgaatcccctcaaaactctcctgcaacagaacaaacaatctttgattcacagacatttactgaaactgaactcaaaaccacagattattctgtactaacaacaaagaaaacttacagtgatgataaagaaatgaaggaggaagacacttctttagttaacatgtctactccagatccagatgcaaatggcttggaatcttacacaactctccctgaagctactgaaaagtcacattttttcttagctactgcattagtaactgaatctataccagctgaacatgtagtcacagattcaccaatcaaaaaggaagaaagtacaaaacattttccgaaaggcatgagaccaacaattcaagagtcagatactgagctcttattctctggactgggatcaggagaagaagttttacctactctaccaacagagtcagtgaattttactgaagtggaacaaatcaataacacattatatccccacacttctcaagtggaaagtacctcaagtgacaaaattgaagactttaacagaatggaaaatgtggcaaaagaagttggaccactcgtatctcaaacagacatctttgaaggtagtgggtcagtaaccagcacaacattaatagaaattttaagtgacactggagcagaaggacccacggtggcacctctccctttctccacggacatcggacatcctcaaaatcagactgtcaggtgggcagaagaaatccagactagtagaccacaaaccataactgaacaagactctaacaagaattcttcaacagcagaaattaacgaaacaacaacctcatctactgattttctggctagagcttatggttttgaaatggccaaagaatttgttacatcagcaccaaaaccatctgacttgtattatgaaccttctggagaaggatctggagaagtggatattgttgattcatttcacacttctgcaactactcaggcaaccagacaagaaagcagcaccacatttgtttctgatgggtccctggaaaaacatcctgaggtgccaagcgctaaagctgttactgctgatggattcccaacagtttcagtgatgctgcctcttcattcagagcagaacaaaagctcccctgatccaactagcacactgtcaaatacagtgtcatatgagaggtccacagacggtagtttccaagaccgtttcagggaattcgaggattccaccttaaaacctaacagaaaaaaacccactgaaaatattatcatagacctggacaaagaggacaaggatttaatattgacaattacagagagtaccatccttgaaattctacctgagctgacatcggataaaaatactatcatagatattgatcatactaaacctgtgtatgaagacattcttggaatgcaaacagatatagatacagaggtaccatcagaaccacatgacagtaatgatgaaagtaatgatgacagcactcaagttcaagagatctatgaggcagctgtcaacctttctttaactgaggaaacatttgagggctctgctgatgttctggctagctacactcaggcaacacatgatgaatcaatgacttatgaagatagaagccaactagatcacatgggctttcacttcacaactgggatccctgctcctagcacagaaacagaattagacgttttacttcccacggcaacatccctgccaattcctcgtaagtctgccacagttattccagagattgaaggaataaaagctgaagcaaaagccctggatgacatgtttgaatcaagcactttgtctgatggtcaagctattgcagaccaaagtgaaataataccaacattgggccaatttgaaaggactcaggaggagtatgaagacaaaaaacatgctggtccttcttttcagccagaattctcttcaggagctgaggaggcattagtagaccatactccctatctaagtattgctactacccaccttatggatcagagtgtaacagaggtgcctgatgtgatggaaggatccaatcccccatattacactgatacaacattagcagtttcaacatttgcgaagttgtcttctcagacaccatcatctcccctcactatctactcaggcagtgaagcctctggacacacagagatcccccagcccagtgctctgccaggaatagacgtcggctcatctgtaatgtccccacaggattcttttaaggaaattcatgtaaatattgaagcaactttcaaaccatcaagtgaggaataccttcacataactgagcctccctctttatctcctgacacaaaattagaaccttcagaagatgatggtaaacctgagttattagaagaaatggaagcttctcccacagaacttattgctgtggaaggaactgagattctccaagatttccaaaacaaaaccgatggtcaagtttctggagaagcaatcaagatgtttcccaccattaaaacacctgaggctggaactgttattacaactgccgatgaaattgaattagaaggtgctacacagtggccacactctacttctgcttctgccacctatggggtcgaggcaggtgtggtgccttggctaagtccacagacttctgagaggcccacgctttcttcttctccagaaataaaccctgaaactcaagcagctttaatcagagggcaggattccacgatagcagcatcagaacagcaagtggcagcgagaattcttgattccaatgatcaggcaacagtaaaccctgtggaatttaatactgaggttgcaacaccaccattttcccttctggagacttctaatgaaacagatttcctgattggcattaatgaagagtcagtggaaggcacggcaatctatttaccaggacctgatcgctgcaaaatgaacccgtgccttaacggaggcacctgttatcctactgaaacttcctacgtatgcacctgtgtgccaggatacagcggagaccagtgtgaacttgattttgatgaatgtcactctaatccctgtcgtaatggagccacttgtgttgatggttttaacacattcaggtgcctctgccttccaagttatgttggtgcactttgtgagcaagataccgagacatgtgactatggctggcacaaattccaagggcagtgctacaaatactttgcccatcgacgcacatgggatgcagctgaacgggaatgccgtctgcagggtgcccatctcacaagcatcctgtctcacgaagaacaaatgtttgttaatcgtgtgggccatgattatcagtggataggcctcaatgacaagatgtttgagcatgacttccgttggactgatggcagcacactgcaatacgagaattggagacccaaccagccagacagcttcttttctgctggagaagactgtgttgtaatcatttggcatgagaatggccagtggaatgatgttccctgcaattaccatctcacctatacgtgcaagaaaggaacagttgcttgcggccagccccctgttgtagaaaatgccaagacctttggaaagatgaaacctcgttatgaaatcaactccctgattagataccactgcaaagatggtttcattcaacgtcaccttccaactatccggtgcttaggaaatggaagatgggctatacctaaaattacctgcatgaacccatctgcataccaaaggacttattctatgaaatactttaaaaattcctcatcagcaaaggacaattcaataaatacatccaaacatgatcatcgttggagccggaggtggcaggagtcgaggcgctgatccctaaaatggcgaacatgtgttttcatcatttcagccaaagtcctaacttcctgtgcctttcctatcacctcgagaagtaattatcagttggtttggatttttggaccaccgttcagtcattttgggttgccgtgctcccaaaacattttaaatgaaagtattggcattcaaaaagacagcagacaaaatgaaagaaaatgagagcagaaagtaagcatttccagcctatctaatttctttagttttctatttgcctccagtgcagtccatttcctaatgtataccagcctactgtactatttaaaatgctcaatttcagcaccgatggccatgtaaataagatgatttaatgttgattttaatcctgtatataaaataaaaagtcacaatgagtttgggcatatttaatgatgattatggagccttagaggtctttaatcattggttcggctgcttttatgtagtttaggctggaaatggtttcacttgctctttgactgtcagcaagactgaagatggcttttcctggacagctagaaaacacaaaatcttgtaggtcattgcacctatctcagccataggtgcagtttgcttctacatgatgctaaaggctgcgaatgggatcctgatggaactaaggactccaatgtcgaactcttctttgctgcattcctttttcttcacttacaagaaaggcctgaatggaggacttttctgtaaccagg

SEQ ID NO: 925 - protein, 2000 aa, Homo sapien
MFINIKSILWMCSTLIVTHALHKVKVGKSPPVRGSLSGKVSLPCHFSTMPTLPPSYNTSEFLRIKWSKIEVDKNGKDLKETTVLVAQNGNIKIGQDYKGRVSVPTHPEAVGDASLTVVKLLASDAGLYRCDVMYGIEDTQDTVSLTVDGVVFHYRAATSRYTLNFEAAQKACLDVGAVIATPEQLFAAYEDGFEQCDAGWLADQTVRYPIRAPRVGCYGDKMGKAGVRTYGFRSPQETYDVYCYVDHLDGDVFHLTVPSKFTFEEAAKECENQDARLATVGELQAAWRNGFDQCDYGWLSDASVRHPVTVARAQCGGGLLGVRTLYRFENQTGFPPPDSRFDAYCFKPKEATTIDLSILAETASPSLSKEPQMVSDRTTPIIPLVDELPVIPTEFPPVGNIVSFEQKATVQPQAITDSLATKLPTPTGSTKKPWDMDDYSPSASGPLGKLDISEIKEEVLQSTTGVSHYATDSWDGVVEDKQTQESVTQIEQIEVGPLVTSMEILKHIPSKEFPVTETPLVTARMILESKTEKKMVSTVSELVTTGHYGFTLGEEDDEDRTLTVGSDESTLIFDQIPEVITVSKTSEDTIHTHLEDLESVSASTTVSPLIMPDNNGSSMDDWEERQTSGRITEEFLGKYLSTTPFPSQHRTEIELFPYSGDKILVEGISTVIYPSLQTEMTHRRERTETLIPEMRTDTYTDEIQEEITKSPFMGKTEEEVFSGMKLSTSLSEPIHVTESSVEMTKSFDFPTLITKLSAEPTEVRDMEEDFTATPGTTKYDENITTVLLAHGTLSVEAATVSKWSWDEDNTTSKPLESTEPSASSKLPPALLTTVGMNGKDKDIPSFTEDGADEFTLIPDSTQKQLEEVTDEDIAAHGKFTIRFQPTTSTGIAEKSTLRDSTTEEKVPPITSTEGQVYATMEGSALGEVEDVDLSKPVSTVPQFAHTSEVEGLAFVSYSSTQEPTTYVDSSHTIPLSVIPKTDWGVLVPSVPSEDEVLGEPSQDILVIDQTRLEATISPETMRTTKITEGTTQEEFPWKEQTAEKPVPALSSTAWTPKEAVTPLDEQEGDGSAYTVSEDELLTGSERVPVLETTPVGKIDHSVSYPPGAVTEHKVKTDEVVTLTPRIGPKVSLSPGPEQKYETEGSSTTGFTSSLSPFSTHITQLMEETTTEKTSLEDIDLGSGLFEKPKATELIEFSTIKVTVPSDITTAFSSVDRLHTTSAFKPSSAITKKPPLIDREPGEETTSDMVIIGESTSHVPPTTLEDIVAKETETDIDREYFTTSSPPATQPTRPPTVEDKEAFGPQALSTPQPPASTKFHPDINVYIIEVRENKTGRMSDLSVIGHPIDSESKEDEPCSEETDPVHDLMAEILPEFPDIIEIDLYHSEENEEEEEECANATDVTTTPSVQYINGKHLVTTVPKDPEAAEARRGQFESVAPSQNFSDSSESDTHPFVIAKTELSTAVQPNESTETTESLEVTWKPETYPETSEHFSGGEPDVFPTVPFHEEFESGTAKKGAESVTERDTEVGHQAHEHTEPVSLFPEESSGEIAIDQESQKIAFARATEVTFGEEVEKSTSVTYTPTIVPSSASAYVSEEEAVTLIGNPWPDDLLSTKESWVEATPRQVVELSGSSSIPITEGSGEAEEDEDTMFTMVTDLSQRNTTDTLITLDTSRIITESFFEVPATTIYPVSEQPSAKVVPTKFVSETDTSEWISSTTVEEKKRKEEEGTTGTASTFEVYSSTQRSDQLILPFELESPNVATSSDSGTRKSFMSLTTPTQSEREMTDSTPVFTETNTLENLGAQTTEHSSIHQPGVQEGLTTLPRSPASVFMEQGSGEAAADPETTTVSSFSLNVEYAIQAEKEVAGTLSPHVETTFSTEPTGLVLSTVMDRVVAENITQTSREIVISERLGEPNYGAEIRGFSTGFPLEEDFSGDFREYSTVSHPIAKEETVMMEGSGDAAFRDTQTSPSTVPTSVHISHISDSEGPSSTMVSTSAFP

SEQ ID NO: 926 - DNA, 3231 bp, Homo sapien
agctagctgcagcgactaccgcatcatcacagcctgttgaactcttctgagcaagagaaggggaggcggggtaagggaagtaggtggaagattcagccaagctcaaggatggaagtgcagttagggctgggaagggtctaccctcggccgccgtccaagacctaccgaggagctttccagaatctgttccagagcgtccgcgaagtgatccagaacccgggccccaggcacccagaggccgcgagcgcagcacctcccggcgccagtttgctgctgctgcagcagcagcagcagcagcagcagcagcagcagcagcagcagcagcaagagactagccccaggcagcagcagcagcagcagggtgaggatggttctccccaagcccatcgtagaggccccacaggctacctggtcctggatgaggaacagcaaccttcacagccgcagtcggccctggagtgccaccccgagagaggttgcgtcccagagcctggagccgccgtggccgccagcaaggggctgccgcagcagctgccagcacctccggacgaggatgactcagctgccccatccacgttgtccctgctggcccccactttccccggcttaagcagctgctccgctgaccttaaagacatcctgagcgaggccagcaccatgcaactccttcagcaacagcagcaggaagcagtatccgaaggcagcagcagcgggagagcgagggaggcctcgggggctcccacttcctccaaggacaattacttagggggcacttcgaccatttctgacaacgccaaggagttgtgtaaggcagtgtcggtgtccatgggcctgggtgtggaggcgttggagcatctgagtccaggggaacagcttcggggggattgcatgtacgccccacttttgggagttccacccgctgtgcgtcccactccttgtgccccattggccgaatgcaaaggttctctgctagacgacagcgcaggcaagagcactgaagatactgctgagtattcccctttcaagggaggttacaccaaagggctagaaggcgagagcctaggctgctctggcagcgctgcagcagggagctccgggacacttgaactgccgtctaccctgtctctctacaagtccggagcactggacgaggcagctgcgtaccagagtcgcgactactacaactttccactggctctggccggaccgccgccccctccgccgcctccccatccccacgctcgcatcaagctggagaacccgctggactacggcagcgcctgggcggctgcggcggcgcagtgccgctatggggacctggcgagcctgcatggcgcgggtgcagcgggacccggttctgggtcaccctcagccgccgcttcctcatcctggcacactctcttcacagccgaagaaggccagttgtatggaccgtgtggtggtggtgggggtggtggcggcggcggcggcggcggcggcggcggcgaggcgggagctgtagccccctacggctacactcggccccctcaggggctggcgggccaggaaagcgacttcaccgcacctgatgtgtggtaccctggcggcatggtgagcagagtgccctatcccagtcccacttgtgtcaaaagcgaaatgggcccctggatggatagctactccggaccttacggggacatgcgtttggagactgccagggaccatgttttgcccattgactattactttccaccccagaagacctgcctgatctgtggagatgaagcttctgggtgtcactatggagctctcacatgtggaagctgcaaggtcttcttcaaaagagccgctgaagggaaacagaagtacctgtgcgccagcagaaatgattgcactattgataaattccgaaggaaaaattgtccatcttgtcgtcttcggaaatgttatgaagcagggatgactctgggagcccggaagctgaagaaacttggtaatctgaaactacaggaggaaggagaggcttccagcaccaccagccccactgaggagacaacccagaagctgacagtgtcacacattgaaggctatgaatgtcagcccatctttctgaatgtcctggaagccattgagccaggtgtagtgtgtgctggacacgacaacaaccagcccgactcctttgcagccttgctctctagcctcaatgaactgggagagagacagcttgtacacgtggtcaagtgggccaaggccttgcctggcctccgcaacttacacgtggacgaccagatggctgtcattcagtactcctggatggggctcatggtgtttgccatgggctggcgatccttcaccaatgtcaactccaggatgctctacttcgcccctgatctggttttcaatgagtaccgcatgcacaagtcccggatgtacagccagtgtgtccgaatgaggcacctctctcaagagtttggatggctccaaatcaccccccaggaattcctgtgcatgaaagccatgctactcttcagcattattccagtggatgggctgaaaaatcaaaaattctttgatgaacttcgaatgaactacatcaaggaactcgatcgtatcattgcatgcaaaagaaaaaatcccacatcctgctcaagacgcttctaccagctcaccaagctcctggactccgtgcagcctattgcgagagagctgcatcagttcacttttgacctgctaatcaagtcacacatggtgagcgtggactttccggaaatgatggcagagatcatctctgtgcaagtgcccaagatcctttctgggaaagtcaagcccatctatttccacacccagtgaagcattggaaaccctatttccccaccccagctcatgccccctttcagatgtcttctgcctgttataactctgcactactcctctgcagtgccttggggaatttcctctattgatgtacagtctgtcatgaacatgttcctgaattctatctgctgggctttttttttctctttctctcctttctttttcttcttccctccctatctaaccctcccatggcaccttcagactttgcttcccattgtggctcctatctgtgttttgaatggtgttgtatgccttaaatctgtgatgatcctcatatggcccagtgtcaagttgtgcttgtttacacgcatctctgtgccagccacacaaaccgtttacttacttaccgcaagggaacttagagagctagaattc

SEQ ID NO: 927 - protein, 906 aa, Homo sapien
MEVQLGLGRVYPRPPSKTYRGAFQNLFQSVREVIQNPGPRHPEAASAAPPGASLLLLQQQQQQQQQQQQQQQQETSPRQQQQQQGEDGSPQAHRRGPTGYLVLDEEQQPSQPQSALECHPERGCVPEPGAAVAASKGLPQQLPAPPDEDDSAAPSTLSLLAPTFPGLSSCSADLKDILSEASTMQLLQQQQQEAVSEGSSSGRAREASGAPTSSKDNYLGGTSTISDNAKELCKAVSVSMGLGVEALEHLSPGEQLRGDCMYAPLLGVPPAVRPTPCAPLAECKGSLLDDSAGKSTEDTAEYSPFKGGYTKGLEGESLGCSGSAAAGSSGTLELPSTLSLYKSGALDEAAAYQSRDYYNFPLALAGPPPPPPPPHPHARIKLENPLDYGSAWAAAAAQCRYGDLASLHGAGAAGPGSGSPSAAASSSWHTLFTAEEGQLYGPCGGGGGGGGGGGGGGGGEAGAVAPYGYTRPPQGLAGQESDFTAPDVWYPGGMVSRVPYPSPTCVKSEMGPWMDSYSGPYGDMRLETARDHVLPIDYYFPPQKTCLICGDEASGCHYGALTCGSCKVFFKRAAEGKQKYLCASRNDCTIDKFRRKNCPSCRLRKCYEAGMTLGARKLKKLGNLKLQEEGEASSTTSPTEETTQKLTVSHIEGYECQPIFLNVLEAIEPGVVCAGHDNNQPDSFAALLSSLNELGERQLVHVVKWAKALPGLRNLHVDDQMAVIQYSWMGLMVFAMGWRSFTNVNSRMLYFAPDLVFNEYRMHKSRMYSQCVRMRHLSQEFGWLQITPQEFLCMKAMLLFSIIPVDGLKNQKFFDELRMNYIKELDRIIACKRKNPTSCSRRFYQLTKLLDSVQPIARELHQFTFDLLIKSHMVSVDFPEMMAEIISVQVPKILSGKVKPIYFHTQ

SEQ ID NO: 928 - DNA, 3595 bp, Homo sapien
ggaggtgggaagtatcccgggctgggggtgggggtacgccgcacagctccagtcgccgtcgcggcttccggtgctaggtggagggaaggaaggagggagccggggagtgggccagggcagcagccgggctgaagtcggcttggggagccagagggagcggagcggaacctgcggggcagaggcggcggccgcagcggcgcagctgatagcaggaacaggatcaagtcttccataccagggaccaggccaaaaccagactgccactgcccctacttgggccccactgtccccagaaagcagctgctgtgatcatgggcaatatctttggaaaccttctcaagagcctgattgggaagaaggagatgcgcatcctgatggtgggcctggatgccgcaggaaagaccaccatcctatacaagctgaaactgggggagatcgtcaccaccatccctaccattgggttcaatgtggagacagtggagtataagaacatcagctttacagtgtgggatgtgggtggccaggacaagattcgacccctctggagacactacttccagaacacccaagggttgatatttgtggtcgacagcaatgatcgggagcgagtaaatgaggcccgggaagagctgatgagaatgctggcggaggacgagctccgggatgctgtactccttgtctttgcaaacaaacaggatctgcctaatgctatgaacgctgctgagatcacagacaagctgggcctgcattcccttcgtcaccgtaactggtacattcaggccacctgtgccaccagcggggacgggctgtacgaaggcctggactggctggccaatcagctcaaaaacaagaagtgaaagccagacagccctaacaaagcaccccacccacccctgacatacctactgtcaccctgccccagtcctaccccttcctctccatgcaagtgtggccagggccctgggtatcatgtccacatgcccagcaagagccttgcctcccctgcctcccctcctttttcctgtccacctatatgaccaatccctaattgctgtcctgatgatgagtcattccaatttactggatttaaaacaaaaagttgttacggtttcatggggtggcccctctctctctctcacctctgggtttcgggaggtcgagtggggtattctctttgtttggcagtggttgctgtcctcttggcatctgagtcctttccctgtccccacaagcccttctactccctgtttgcctttcctttgccaccctctccctgttttacatggaaattgcacgggcctctctgtgtttgcgtgcatgtgtgcgcctgtatatacatgtatagagagatatatttgtgggggccggggggagcggggagggggtggagtgaagctcagggcttgcagccaggacactgcccactggagcctgtcatctgccccttccgtgttggtgagattaagggaagaaggtgggagggcattagtcaagccggactgccccagtctttgactggttaccctcctctctgcaggtaggtttttctggatgataggacagatgatggattcttcaccaccattttccttgtactcttctctccacccttcttagggctggaggatggcatttatctctagatgactgttcccaaggagatgccactctgctctgccttactgttgggaaggagagaggaacccactcactcttatcagcttagagtgttcaactgatccttccccaccatcttcagatctgttcctctggagcttgactggggggtggggatggcaagtccatggtgtgtgttagggacccagggcattgggggaagggaggcgaaggcctgaggttttccatcttcattctcttttgttattaggagaaggtgaggcatgggccaatcccattcctgccttccagtgccccaccacccttctgatcttaggggttggatgggtcatctgtccttggtcagaattttctcaccctagtactcctactggcctgaccagggctgactgggtattctaatgaggagctgggaagtggggtgacatagctgaccttagtatcaacccccctcttctccaactcttgttttctagtccaggatatgctaaaggacgaagattttctattgtttccaggccctcagaccatccttgctgtcccttcaccctccatgcccctgccatcctcactcacttctcataaatggatctgggggttagagtggaggaaataaaatcctgaagtggttgtcagtgcttgtgggatgcagtggtcttcaggattctccccgcattattatgtagttgttcagaagctgttgctactgcgtctctctgtctgcagggggcacttgttcctgaggtcctcgcctgggtcctgacttctgtagtttctgtgaagacgtggctgtcctgtgggctcctgtgtgtgctggctgcgcctgagctccgagacagctgcccataacctgctaaggtcagggcccagggccccccacagcatggctgagggaccccttcccagtagggctgtcccaagccccactccatggggccaggtttcctggccacttttgttgatagcagatggatcaatattagtaaccccatccaagattgaactgtgaaagagaggttccaggggtatctccctcagtgccagttacttagtgatgtgttacccaggatgcagcaggtgtgtgcaggtatcttgctctctaggcctgtgtgtgtgtgtgagtgtgtgtgtatatgggtgtgggtgtgtttgtgtgtggtggttgtggggggggtgttggaggttctatttcatttaaaaatgtattcatttccctggccccacagatgcttccctccatactttttatttgctctgtttcctcagatttattttgtcttgccccattgcctctccttccttgaactctttccttttcaatctcaactcattcactgctgttgctcatttgcccttttccatgtattttttcctacttaggattttccactctatctttgtggttcatgaggactttgcctcttctcctgcctcattccctgactttctctagttagatgtcagtcctaaataggttttcctcacttcaggcctcacccctcaccttgtttttttgggggctccagggaccaatctggggctggaaatgttaggaggttgccttggtgctgccccagatctgtccagcagggggcagtaagtgatcttggtagtatccctggctgctaagcccttggcaggggtggtcctttctacattcccattcacttaacagctcttttgggattgggtgtttcattccatttctgcccactccctctcctctcctctctggtaggtttaattttatgctttccctgattccagctttctgcttcctgaggactcccgctccccccaccccaaagtttgtctgtggtgttatagtggtaactgcagttcctcctctggaatgtagactgtatatgtttaataactcaccttctctatccttgctcaaaatgtgggataacgcgatgactgtgaccctggttggaaattaaacttgttttatgca

SEQ ID NO: 929 - protein, 181 aa, Homo sapien
MGNIFGNLLKSLIGKKEMRILMVGLDAAGKTTILYKLKLGEIVTTIPTIGFNVETVEYKNISFTVWDVGGQDKIRPLWRHYFQNTQGLIFVVDSNDRERVNEAREELMRMLAEDELRDAVLLVFANKQDLPNAMNAAEITDKLGLHSLRHRNWYIQATCATSGDGLYEGLDWLANQLKNKK

SEQ ID NO: 930 - DNA, 820 bp, Homo sapien
cagccagcgcccgcgatgactgccactctccgcccctacctgagtgccgtgcgggccacattgcaggctgccctctgcctggagaacttctcctcccaggttgtggaacgacacaacaagccggaagtggaagtcaggagtagcaaagagctcctgttacaacctgtgaccatcagcaggaatgagaaggaaaaggttctgattgagggctccatcaactctgtccgggtcagcattgctgtgaaacaggctgatgagatcgagaagattttgtgccacaagttcatgcgcttcatgatgatgcgagcagagaacttctttatccttcgaaggaagcctgtggaggggtatgatatcagctttctgatcaccaacttccacacagagcagatgtacaaacacaagttggtggactttgtgatccacttcatggaggagattgacaaggagatcagtgagatgaagctgtcagtcaatgcccgtgcccgcattgtggctgaagagttccttaagaatttttaaaccatctggctggatctcgtggccttccccctcagactacccatgtctccacgaaggcgtcctggagtcactccccgagcagcgcggcggcggcagggagttgggttggggtgggcatttgatgcgggaggtgggtggtgtgcttgctagctgggcaagaaagcagcagtggacctgccccaaggccacacgtgcctggtcaggctggcttctgatgttcagtcccctgggccgggacagattttttttaacgtcttgaaacttaaactctgtgcttgtaaaaaaaaaaaaaaaaaaa

SEQ ID NO: 931 - protein, 168 aa, Homo sapien
MTATLRPYLSAVRATLQAALCLENFSSQVVERHNKPEVEVRSSKELLLQPVTISRNEKEKVLIEGSINSVRVSIAVKQADEIEKILCHKFMRFMMMRAENFFILRRKPVEGYDISFLITNFHTEQMYKHKLVDFVIHFMEEIDKEISEMKLSVNARARIVAEEFLKNF

SEQ ID NO: 932 - DNA, 2059 bp, Homo sapien
ccgcaggcgctcggggttggagccagcgaccgtcggtagcagcatggctctcctctttctcctaccccttgtcatgcagggtgtgagcagggctgagatgggcaccgcggatctggggccgtcctcagtgcctacaccaactaatgttacaattgaatcctataacatgaaccctatcgtatattgggagtaccagatcatgccacaggtccctgtttttaccgtagaggtaaagaactatggtgttaagaattcagaatggattgatgcctgcatcaatatttctcatcattattgtaatatttctgatcatgttggtgatccatcaaattctctttgggtcagagttaaagccagggttggacaaaaagaatctgcctatgcaaagtcagaagaatttgctgtatgccgagatggaaaaattggaccacctaaactggatatcagaaaggaggagaagcaaatcatgattgacatatttcacccttcagtttttgtaaatggagacgagcaggaagtcgattatgatcccgaaactacctgttacattagggtgtacaatgtgtatgtgagaatgaacggaagtgagatccagtataaaatactcacgcagaaggaagatgattgtgacgagattcagtgccagttagcgattccagtatcctcactgaattctcagtactgtgtttcagcagaaggagtcttacatgtgtggggtgttacaactgaaaagtcaaaagaagtttgtattaccattttcaatagcagtataaaaggttctctttggattccagttgttgctgctttactactctttctagtgcttagcctggtattcatctgtttttatattaagaaaattaatccattgaaggaaaaaagcataatattacccaagtccttgatctctgtggtaagaagtgctactttagagacaaaacctgaatcaaaatatgtatcactcatcacgtcataccagccattttccttagaaaaggaggtggtctgtgaagagccgttgtctccagcaacagttccaggcatgcataccgaagacaatccaggaaaagtggaacatacagaagaactttctagtataacagaagtggtgactactgaagaaaatattcctgacgtggtcccgggcagccatctgactccaatagagagagagagttcttcacctttaagtagtaaccagtctgaacctggcagcatcgctttaaactcgtatcactccagaaattgttctgagagtgatcactccagaaatggttttgatactgattccagctgtctggaatcacatagctccttatctgactcagaatttcccccaaataataaaggtgaaataaaaacagaaggacaagagctcataaccgtaataaaagcccccacctcctttggttatgataaaccacatgtgctagtggatctacttgtggatgatagcggtaaagagtccttgattggttatagaccaacagaagattccaaagaattttcatgagatcagctaagttgcaccaactttgaagtctgattttcctggacagttttctgctttaatttcatgaaaagattatgatctcagaaattgtatcttagttggtatcaaccaaatggagtgacttagtgtacatgaaagcgtaaagaggatgtgtggcattttcacttttggcttgtaaagtacagacttttttttttttttaaacaaaaaaagcattgtaacttatgaacctttacatccagataggttaccagtaacggaacatatccagtactcctggttcctaggtgagcaggtgatgccccagggacctttgtagccacttcactttttttcttttctctgccttggtatagcatatgtgttttgtaagtttatgcatacagtaattttaagtaatttcagaagaaattctcgaagcttttcaaaattggacttaaaatctaattcaaactaatagaattaatggaatatgtaaatagaaacgtgtatattttttatgaaacattacagttagagatttttaaataaagaattttaaaactc

SEQ ID NO: 933 - protein, 489 aa, Homo sapien
MALLFLLPLVMQGVSRAEMGTADLGPSSVPTPTNVTIESYNMNPIVYWEYQIMPQVPVFTVEVKNYGVKNSEWIDACINISHHYCNISDHVGDPSNSLWVRVKARVGQKESAYAKSEEFAVCRDGKIGPPKLDIRKEEKQIMIDIFHPSVFVNGDEQEVDYDPETTCYIRVYNVYVRMNGSEIQYKILTQKEDDCDEIQCQLAIPVSSLNSQYCVSAEGVLHVWGVTTEKSKEVCITIFNSSIKGSLWIPVVAALLLFLVLSLVFICFYIKKINPLKEKSIILPKSLISVVRSATLETKPESKYVSLITSYQPFSLEKEVVCEEPLSPATVPGMHTEDNPGKVEHTEELSSITEVVTTEENIPDVVPGSHLTPIERESSSPLSSNQSEPGSIALNSYHSRNCSESDHSRNGFDTDSSCLESHSSLSDSEFPPNNKGEIKTEGQELITVIKAPTSFGYDKPHVLVDLLVDDSGKESLIGYRPTEDSKEFS

SEQ ID NO: 934 - DNA, 3300 bp, Homo sapien
ggggagaatctggtggatgctggaccttgctgctgctgctactgctgtttccaggggctgcagagcatggactgttaaatcttgcacttcttctgagtgagctgaattcttgccgccaggatggggaaacagaacagcaagctgcgcccggaggtcatgcaggacttgctggaaagcacagactttacagagcatgagatccaggaatggtataaaggcttcttgagagactgccccagtggacatttgtcaatggaagagtttaagaaaatatatgggaactttttcccttatggggatgcttccaaatttgcagagcatgtcttccgcaccttcgatgcaaatggagatgggacaatagactttagagaattcatcatcgccttgagtgtaacttcgagggggaagctggagcagaagctgaaatgggccttcagcatgtacgacctggacggaaatggctatatcagcaaggcagagatgctagtgatcgtgcaggcaatctataagatggtttcctctgtaatgaaaatgcctgaagatgagtcaaccccagagaaaagaacagaaaagatcttccgccagatggacaccaatagagacggaaaactctccctggaagagttcatccgaggagccaaaagcgacccgtccattgtgcgcctcctgcagtgcgacccgagcagtgccggccagttctgagccctgcgcccaccaatcgaattgtagagctgcttgtgttcccttttgattcttctttttaacaatttttttttttttttgccaaacaatatcaatggtgatgccgtcccctgtgcggtctgatgcgccttcctccgtgacgccttcagcctcttttgtcgtggatgcttcgtgggaatgcccagagccccagtgtgcttgtggagagcatggacagacttcgtggtgttcattgtttgatgatttttaatcgttactattatttctttttattctaatgtctctgttctaaaacgtaagactcgggggttggggcaaaagaagggaaacccatccagtcctgtgattctattgcaagcttcaaggggcttttgtttgaaagacaaaactccccacctgggtctgttgtcacacgtgccgtaggggtgatggatggcaccggatgctggattccccaagaacaagttaccctctggggtgaggctattccagcgagctgggacatttccccatgggggcccactcccctctcttccccagcaggctgtagtttctaagctgtgaacatttcaagataaattaacagaggagaggaaaaagatggctcagctattttttcacaggtttacactagttgagctaatatgcgtgtctttggaaattaaacacaaatggtaacatattccaaaaccagacccatcttgttgcctattgtgataaaataaaaagacggctgtatataacatattgggtaatgcagaccaaattaagtgttttgccttgtttaaatgaaatgcatgtttagtgagcactaatacaatcttattccagaagactgtttttagtagcttattgtgaagtaagacaactataatgaatgtctgtcttgtttggaagtcatatctgtctttgcacaaatgtaccaatcgacaagtatattttatatattccataaaaatacaaagtaaccctgactagggcccaactttaattttgaatgcatttccagagtggccatgcctagagggcagatgcagagcaggtggtagtgggacaggacaattggagcacaggaatgttaacatgtatgacaggggaccagtagggtggtttccctctcaggcccagcagcccattgacagcattagactggcggcatggtgcttttctgagcagatcaatactctgcagactcgaaaaaacatcacatacattcttggaacttcccagtggtttaatctatgtgcatggttagggagccaggcctggaatattcagtttccctgcccctgttaaagaatcagaggttgggcagtcatcaaattcatcataaagacatgggcaagtgtgtctgtggtttccaaggcccccctatggagaatccaaaagtattttccattgccgtgctctttgaatgcagacttctatttccagaagtgacagcacaagtctgagttgctgtttggtctggtgacctcagacacactaatttgaattgaaagctaagagtaaaaatttgctggttacaggcgagtcatactcttgcaagtagttagcaaagggaggcccaaattctcaaggttgttgatggggaacttgccactaagagaaggcagagaggtccctagtgggtatatttgctgccaagccacttgccaaagaagaggaaccacagaaagagagacatcatgaccaggagaaaaatgtgactagacatgctaacctccaggtttttatatatgacttgagtctgctgtaattggcagcagaaatccaaatttgtatggtagaccaaaaagaaccaaatccatagggtgaaattttgagacctagactctgtaaaaataatcctagtcttcctccaggggtcagttcctcacagtggttctgtaccaaaacttgccaaattcctccatggccaagtgttaaaatctgtgtttggaaaatagcgaattaacctaagacacagaaggcagactgggtgaggagacctagcatgccctattggcagtgctcaggagctgcatcccacttttccctgctctgaatcgaagtcctagttccttcctttgattctcctttggtaggtggaatcagttaatgttttgagaaacctgcctgggctctgcccttagtcatgacatctcgctgagccagacccactctgttccttggaacctagagctggagtgaggagtagaggtctccggctattccagaaagaaaagtgagccacatgcaggctgatgaatgccgacacttccagaatgtatagaaatagtccctgtcctggcctgccactgaccctgtctgtattttctcggaggttgtttttctccttctccttcccaggaaggtctttgtatgtcgaatccagtgcactcaagtttggccaagggactccacagcacccagaggactgcatgcctcaaggtttatgtcactcctctgctgggctgttcattgtcattgctgtgttcagggacctttggaaataaaacctgttctgtcccaaataaaaccagcctgtgatgttcaagggactggaataaagtggcttacgacctgaaggattctaaaaaaaaaaaaaaaaaaaaa

SEQ ID NO: 935 - protein, 193 aa, Homo sapien
MGKQNSKLRPEVMQDLLESTDFTEHEIQEWYKGFLRDCPSGHLSMEEFKKIYGNFFPYGDASKFAEHVFRTFDANGDGTIDFREFIIALSVTSRGKLEQKLKWAFSMYDLDGNGYISKAEMLVIVQAIYKMVSSVMKMPEDESTPEKRTEKIFRQMDTNRDGKLSLEEFIRGAKSDPSIVRLLQCDPSSAGQF

SEQ ID NO: 936 - DNA, 1864 bp, Homo sapien
atgggcggggcgcggctcggagcgcgaaacatggcggggcaggacgctggctgcggccgtggcggcgacgactactcagaggacgagggcgacagcagcgtgtccagggcggctgtggaggtgttcgggaagctgaaggacctaaactgccccttcctcgagggtctgtatatcacagagccaaagacaattcaggaactgctgtgcagcccctcagagtaccgcttggagatcctagagtggatgtgtacccgggtctggccctcactgcaggacaggttcagctcactgaaaggggtcccaacagaggtgaagatccaagaaatgacgaagctgggccacgagctgatgctgtgtgcgccagatgaccaggagctcctcaagggctgtgcctgcgcccagaagcagctacacttcatggaccagttgctcgataccatccggagcctgaccattgggtgctccagttgctcgagcctgatggagcacttcgaggacaccagggagaagaacgaggccttgctgggggagctcttctctagcccccacctgcagatgctcctgaatccagagtgcgacccgtggcccctggacatgcagcccctcctcaacaagcagagtgatgactggcagtgggccagtgcctctgccaagtccgaggaggaggagaagctggcggagcttgccaggcagctgcaggagagtgctgccaagttgcacgcgcttagaacggagtctacgacgacgagctgggcgagtgctgccagcgcccaggccctgacctccacccgtgcggccccatcatccaggccacgcaccagaatctgacttcctacagccaactgctgcaagtggtcatggcagttgctgacacctctgcgaaggccgtggagaccgtgaagaagcagcaaggcgagcagatctgctggggtggcagcagctccgtcatgagtctagctaccaagatgaatgaactaatggagaaatagaaagtcttcagtgatggcctacgccaaagcacaggatggggcgggcaggaagccctctcccaagatcgagttggccgaggatggatgattgtggcagcagaagccgttgcagccccacgttgtgctctagtttgaggacttgctatccccgtgggaacatcaccatgtccgaggcaccccgggccgagacctttgtcttcctggacctggaagccactgggctccccagtgtggagcccgagattgccgagctgtccctctttgctgtccaccgctcctccctggagaacccggagcacgacgagtctggtgccctagtattgccccgggtcctggacaagctcacgctgtgcatgtgcccggagcgccccttcactgccaaggccagcgagatcaccggcctgagcagtgagggcctggcgcgatgccggaaggctggctttgatggcgccgtggtgcggacgctgcaggccttcctgagccgccaggcagggcccatctgccttgtggcccacaatggctttgattatgatttccccctgctgtgtgccgagctgcggcgcctgggtgcccgcctgccccgggacactgtctgcctggacacgctgccggccctgcggggcctggaccgcgcccacagccacggcacccgggcccggggccgccagggttacagcctcggcagcctcttccaccgctacttccgggcagagccaagcgcagcccactcagccgagggcgacgtgcacaccctgctcctgatcttcctgcaccgcgccgcagagctgctcgcctgggccgatgagcaggcccgtgggtgggcccacatcgagcccatgtacttgccgcctgatgaccccagcctggaggcctga

SEQ ID NO: 937 - protein, 279 aa, Homo sapien
MGRAGSPLPRSSWPRMDDCGSRSRCSPTLCSSLRTCYPRGNITMSEAPRAETFVFLDLEATGLPSVEPEIAELSLFAVHRSSLENPEHDESGALVLPRVLDKLTLCMCPERPFTAKASEITGLSSEGLARCRKAGFDGAVVRTLQAFLSRQAGPICLVAHNGFDYDFPLLCAELRRLGARLPRDTVCLDTLPALRGLDRAHSHGTRARGRQGYSLGSLFHRYFRAEPSAAHSAEGDVHTLLLIFLHRAAELLAWADEQARGWAHIEPMYLPPDDPSLEA

SEQ ID NO: 938 - DNA, 592 bp, Homo sapien
aaaccagagcatcagggaatgataggatgctgtggactaaatgtccgtttttctccctgttttcattctccatgacaccttcccctgttgcacaggatctggcaagtctgaaaatccctgagcaatttcgacatgcgatctggaagggcatcctggaccaccggcagctccacgaattctcctccccttctcatctcctgcggaccccaagcagtgcctctacagtcagtgtgggctccagtgagacccggggtgagcgtgttattgatgctgtgcgattcaccctccgccagaccatctctttcccaccccgagatgagtggaatgacttcaactttgacatggatgctcgccgcaataagcaacagcgcatcaaagaggagggggagtgagcctcaccatgtgagctcttcctatccctctcctaactgccagccccctaaaagcactcctgcttaatcttcaaagccttctccctagctcctccccttcctcttgtctgatttcttaggggaaggagaagtaagaggctacctcttacctaacatctgacctggcatctaattctgattctggctttaagccttcaaaa

SEQ ID NO: 939 - DNA, 1116 bp, Homo sapien
tcaccatgaattcactcagtgaagccaacaccaagttcatgttcgatctgttccaacagttcagaaaatcaaaagagaacaacatcttctattcccctatcagcatcacatcagcattagggatggtcctcttaggagccaaagacaacactgcacaacaaattagcaaggttcttcactttgatcaagtcacagagaacaccacagaaaaagctgcaacatatcatgttgataggtcaggaaatgttcatcaccagtttcaaaagcttctgactgaattcaacaaatccactgatgcatatgagctgaagatcgccaacaagctcttcggagaaaagacgtatcaatttttacaggaatatttagatgccatcaagaaattttaccagaccagtgtggaatctactgattttgcaaatgctccagaagaaagtcgaaagaagattaactcctgggtggaaagtcaaacgaatgaaaaaattaaaaacctatttcctgatgggactattggcaatgatacgacactggttcttgtgaacgcaatctatttcaaagggcagtgggagaataaatttaaaaaagaaaacactaaagaggaaaaattttggccaaacaaggatgtacaggccaaggtcctggaaataccatacaaaggcaaagatctaagcatgattgtgctgctgccaaatgaaatcgatggtctgcagaagcttgaagagaaactcactgctgagaaattgatggaatggacaagtttgcagaatatgagagagacatgtgtcgatttacacttacctcggttcaaaatggaagagagctatgacctcaaggacacgttgagaaccatgggaatggtgaatatcttcaatggggatgcagacctctcaggcatgacctggagccacggtctctcagtatctaaagtcctacacaaggcctttgtggaggtcactgaggagggagtggaagctgcagctgccaccgctgtagtagtagtcgaattatcatctccttcaactaatgaagagttctgttgtaatcaccctttcctattcttcataaggcaaaataagaccaacagcatcctcttctatggcagattctcatccccataga

SEQ ID NO: 940 - protein, 369 aa, Homo sapien
MNSLSEANTKFMFDLFQQFRKSKENNIFYSPISITSALGMVLLGAKDNTAQQISKVLHFDQVTENTTEKAATYHVDRSGNVHHQFQKLLTEFNKSTDAYELKIANKLFGEKTYQFLQEYLDAIKKFYQTSVESTDFANAPEESRKKINSWVESQTNEKIKNLFPDGTIGNDTTLVLVNAIYFKGQWENKFKKENTKEEKFWPNKDVQAKVLEIPYKGKDLSMIVLLPNEIDGLQKLEEKLTAEKLMEWTSLQNMRETCVDLHLPRFKMEESYDLKDTLRTMGMVNIFNGDADLSGMTWSHGLSVSKVLHKAFVEVTEEGVEAAAATAVVVVELSSPSTNEEFCCNHPFLFFIRQNKTNSILFYGRFSSP

SEQ ID NO: 941 - DNA, 1489 bp, Homo sapien
ggcacgagggaaggccctgggcaccctgggcatgacgacaaatgaaaagggccaggtcgtgaccaagacagcactcctgaagcagatggaagagctgatcgaggagcctggcctcacgtgctgcatctgcagggagggatacaagttccagcccacaaaggtcctgggcatttataccttcacgaagcgggtagccttggaggagatggagaataagccccggaaacagcagggctacagcaccgtgtcccacttcaacattgtgcactacgactgccatctggctgccgtcaggttggctcgaggccgggaagagtgggagagtgccgccctgcagaatgccaacaccaagtgcaacgggctccttccggtctggggacctcatgtccctgaatcagcttttgccacttgcttggcaagacacaacacttacctccaggaatgtacaggccagcgggagcccacgtatcagctcaacatccatgacatcaaactgctcttcctgcgcttcgccatggagcagtcgttcagcgcagacactggcgggggcggccgggagagcaacatccacctgatcccgtacatcattcacactgtgctttacgtcctgaacacaacccgagcaacttcccgagaagagaagaacctccaaggctttctggaacagcccaaggagaagtgggtggagagtgcctttgaagtggacgggccctactatttcacagtcttggcccttcacatcctgccccctgagcagtggagagccacacgtgtggaaatcttgcggaggctgttggtgacctcgcaggctcgggcagtggctccaggtggagccaccaggctgacagataaggcagtgaaggactattccgcttaccgttcttcccttctcttttgggccctcgtcgatctcatttacaacatgtttaagaaggtgcctaccagtaacacagagggaggctggtcctgctctctcgctgagtacatccgccacaacgacatgcccatctacgaagctgccgacaaagccctgaaaaccttccaggaggagttcatgccagtggagaccttctcagagttcctcgatgtggccggtcttttatcagaaatcaccgatccagagagcttcctgaaggacctgttgaactcagtcccctgaccaccacacagcagctgcggcggcgaagacgaagctggcttgccttccaccctctgttctccctccttgtgcattaagttccctccgcgggatgctgcattgttaccccgccctcccctctctcatttttcttggtgtggcttggggtttttaggcttcctgttttatctcgtgtgtgtggtgcaccagctatgaggttgtctgtaacccaagccatcaaagggcctgtacatacctaggagccatgagttgtcccggccagcttcatacttgagtgtgcacatcttgagaaataaacaagtgacttaacacaaaaaaaaaaaaaaaaaa

SEQ ID NO: 942 - DNA, 7709 bp, Homo sapien
cgaaggacctgaaggaaagtggaaaagtccaaagtttaagatgccagagatgcattttaagactccaaagatatccatgccagatattgacctgaatctcacaggtccaaaaataaaaggagatgtggatgttacaggccctaaggtagagggagatctgaaaggtcctgaagttgacctcaaaggccccaaagtggacattgatgtcccagatgttaatgttcagggtccagactggcacctgaagatgcccaagatgaaaatgcctaagttcagtatgcctggcttcaaaggagagggcccagatggtggatgtgaagctgcccataggctgacattgatgtctcaggaccaaagtggacattgaaggccctgatgttaacattgaaggaccagagggaaagttgaaagggcctaagttcaagatgccagagatgaatatcaaagcccccaagatctccatgcctgatattgacttaaacctgaaaggacccaagtgaagggtgatgtggatgtttcccttcctaaagtggaaggtgacctcaagggcccagaagttgacatcaagggcccaaaagtggacattgacgcacctgatgttgatgttcatggcccagactggcacctaaagatgcccaagatgaaaatgcccaagttcagcatgcctggcttcaaagcagagggccctgaagctggaatgtgaacctgcccaaggctgacgttgatgtctcaggccccaaagtggatattaatgccccagatgtgggtgttcaaggcccagactggcacctgaagatgcccaaggtgaaaatgccaaagttcagcatgcctggcttcaaaggagagggcccagatggggatgtgaagctgcccaaggctgacattgatgtctcaggacccaaagtggacattgaaggccctgatgttaacattgaaggaccagagggaaagttgaaagggcctaagttcaagatgccagagatgaatatcaaagcccccaagatctccatgcctgatattgacttaaacctgaaaggacccaaagtgaagggtgatgtggatgtttcccttcctaaagtggaaggtgacctcaagggcccagaagttgacatcaagggcccaaaagtggacattgacgcacctgatgttgatgttcatggcccagactggcacctaaagatgcccaagataaaaatgcccaagatcagcatgcctggcttcaaaggagaaggtccagatgtggacgtgaacctgcccaaggctgacattgatgtctcaggaccgaaagtggatgttgaatgtcccgatgtgaatatcgaaggacctgaaggaaagtggaaaagtccaaagtttaagatgccagagatgcattttaagactccaaagatatccatgccagatattgacctgaatctcacaggtccaaaaataaaaggagatgtggatgttacaggccctaaggtagagggagatctgaaaggtcctgaagttgacctcaaaggccccaaagtggacattgatgtcccagatgttaatgttcagggtccagactggcacctgaagatgcccaagatgaaaatgcccaagttcagcatgcctggcttcaaagcagagggccctgaagtggatgtgaacctgcccaaggctgacgttgatgtctcaggccccaaagtggacgttgaaggccctgatgttaacattgaaggaccagagggaaagttgaaagggcccaagttcaagatgccagagatgaatatcaaagcccccaagatccccatgcctgactttgatttgcatctgaaaggtcccaaggtgaagggcgatgtggatatttctctgcccaaagtggaaggtgacctcaagggccctgaagttgacatcaggggtcccaaagtggacattgatgtcccggatgtgggcgttcaaggcccagactggcacctaaaaatgcccaaagtgaaaatgcccaaattcagcatgcctggcttcaaaggagagggcccagatgtggatgtgaacctgcccaaggctgaccttgatgtctcaggacccaaggtggacattgatgttccagatgtgaatatcgaaggcccagagggaaagttgaaaggtcccaaattcaaaatgcctgagatgaacatcaaagcccccaagatctccatgcctgacattgatcttaacctgaaaggtcccaaagtgaagggtgacatggatgtgtctctgccaaaagtggaaggtgacatgaaagttcctgacgtggatattaaaggccccaaagtggatattaatgccccagatgtggatgttcaaggcccagactggcacctgaagatgcctaaaataaaaatgcccaagatcagcatgcctggcttcaaaggagaaggtccagaagtggacgtgaacctgcccaaggctgaccttgacgtctcaggacccaaggtggacgttgatgttccagatgtgaatattgaaggtccagatgcgaaactgaagggccctaaattcaagatgccagagatgaacatcaaagcccccaagatctccatgcctgactttgatttgcatctgaaaggccctaaggtgaaaggagatgtggatgtttctctgcctaagatggaaggtgatctaaagggtcctgaagttgacatcaagggccccaaagtggacattaatgctccagatgtggatgttcaaggcccagactggcacctgaagatgcccaaggtgaaaatgcccaagttcagcatgcctggcttcaaaggagagggcccagatgtggatgtgaacctgcccaaggctgaccttgatgtctcaggacccaaggtggacattgatgttcctgatgtggatatccgaaggtccagaagggaaactgaaaggtcccaaattcaagatgcctgagatgagcatccaagcccccaagatctccatgcctgatattgacttaaacctgaaaggacccaaagtgaagggcgatgtggatgttacccttcctaaagtggaaggtgacctcaagggcccagaagctgacatcaagggcccaaaagtggacatcaacacccctgatgtggatgttcatggcccagactggcacctgaagatgcccaaggtgaaaatgcccaaattcagcatgcctggcttcaaaggagaaggtccagatgtggatgtgaacctgcccaaggctgacattgatgtctcaggacccaaagtggacgttgatgttcctgatgtgaatatcgaaggtccagatgcgaaactaaagggccccaagttcaagatgcctgagatgagcatcaaagcccccaagatctccatgcctgatattgacttaaacctgaaaggacccaaagtgaagggcgatgtggatgttacccttcctaaagtggaaggtgacctcaagggcccagaagctgacatcaagggcccaaaagtggacatcaacacccctgatgtggatgttcatggcccagactggcacctgaagatgcccaaggtgaaaatgcccaaattcagcatgcctggcttcaaaggagaaggtccagatgtggatgtgagcctgcccaaggccgacatcgatgtctcgggacccaaggtggacgttgatattccagatgtgaatatcgaaggtccagacgcaaaactgaagggccccaagttcaagatgcctgaaataaatatcaaagctcccaagatctccatacctgatgttgacctggatttgaaaggacccaaagtaaaaggagattttgatgtgtctgtccctaaggttgaagggactttgaaaggcccagaagtagatcttaaaggtccacgtctggatttcgaaggccctgatgccaaactcagtggcccatctttgaagatgccatcgctggagatatctgctcctaaagtaactgctcctgatgttgatttgcatctcaaggcaccaaaaattggattttcaggtccgaagttagaaggtggtgaagtggacctcaagggacccaaagttgaagctccaagcttagatgtacacatggacagcccagatattaacatcgaagggccagatgttaaaatccccaaatttaagaaacccaagtttggatttggggcaaaaagccccaaagctgacatcaagtcaccttcactggatgtcactgttcctgaggcagagctgaaccttgagactcctgaaattagtgttggtggcaagggcaagaaaagtaagtttaaaatgcctaaaattcatatgagtggtcctaagattaaggccaaaaaaacagggatttgacctgaatgttcctgggggtgaaattgatgccagcctcaaggctccggatgtagatgtcaacatcgcagggccggatgctgcactcaaagtcgacgtgaaatcgcccaaaaccaagaaaacgatgtttggaaaaatgtacttcccagatgtagagtttgacattaaatcacctaaatttaaagctgaggcccctctccctagccccaaactggagggtgaactccaggcacctgatctggaactttctttgccagcgattcacgtcgaaggtcttgacatcaaggcgaaggctcccaaggtcaagatgccagatgtggacatctcagtgccaaaaatagagggtgacctgaaaggccccaaagtgcaggcaaacttgggtgcacctgacatcaacatcgaaggcctagatgctaaagtcaaaacaccgtccttcggcatttctgcccctcaagtctccatccctgatgtgaatgtaaacttgaaaggaccaaagataaagggtgatgtccccagcgtgggactggaaggaccagatgtagatctgcaaggtccagaagcaaaaattaagttccccaagttttccatgcccaagatcggcatcccaggtgtgaaaatggagggtgggggagccgaggtccatgcccagctaccctctcttgaaggagacttgagaggaccagatgttaagctcgaagggcccgatgtttctctaaaggggccaggagtagacttgccttcagtgaacctctctatgccaaaagtctctgggcctgaccttgatctgaacttgaaaggaccaagtttgaagggagacctggatgcatctgttcccagcatgaaggtgcatgctccagggctcaacctcagtggtgtcggtggcaaaatgcaggtgggaggagacggtgtgaaagtgccagggatcgatgccacaacaaagcttaacgttggggcaccagatgtgacactgaggggaccaagcctgcagggagatctggctgtctctggtgacatcaaatgccctaaagtatccgtaggagctcctgatctaagcttggaggcatccgaaggcagcattaaacttcccaaaatgaagctgccccaatttggcatctctactccggggtccgacttgcacgtcaatgccaaggggccacaggtttctggcgaactgaaggggccaggtgtggatgtgaacctgaaagggcctcggatttcagcaccgaatgtggactttaacttggaaggaccaaaagtgaaagggagccttggggccactggtgagatcaaaggccccactgtcggaggaggtcttccaggcattggtgttcaaggcctagaaggaaacctccagatgcctggaattaagtcctctggatgtgatgtgaacctgccaggcgtgaatgtgaaactcccaactgggcagatttctgggcctgaaatcaaaggtggtctgaaaggttcagaagtaggtttccatggggctgctcctgatatcagtgtgaaggggcctgcctttaatatggcatctcctgagtcagattttggcatcaacttgaagggcccaaaaatcaaaggaggtgcggatgtttcagggggtgtcagtgccccagacatcagccttggtgaagggcatttgagtgttaaaggttccgggggtgagtggaagggaccccaagtctcctctgctctcaacttggacacatctaagtttgctgggggccttcatttctcaggaccaaaggtggaaggaggtgtgaaaggaggtcagattggactccaggctcctgggctgagtgtgtctgggcctcaaggtcacttggaaagtggatctggaaaagtaacattccctaaaatgaagatccccaaatttaccttctctggccgtgagctggttggcagagaaatgggggtggatgttcacttccctaaagcagaggccagcatccaagctggtgctggagacggcgagtgggaagagtctgaagtcaaactgaaaaagtccaagatcaaaatgcccaagtttaatttttccaaacctaaagggaaaggtggtgtcactggctcaccagaagcatcaatttctgggtccaaaggtgacctgaaaagttcaaaggccagcctgggctctctggaaggagaggcagaggccgaagcctcttcaccgaaaggcaaattctccttatttaaaagtaagaagccacggcaccgctcaaattcattcagtgatgaaagagagttctctggaccttccaccccgacggggacgctggagtttgaaggtggggaagtgtctctggaaggtgggaaagttaaagggaaacacgggaagctgaaattcggtacctttggtggattggggtcaaagagcaaaggtcattatgaggtgactgggagcgatgatgagacaggcaagttacaggggagtggggtgtccctggcctctaagaagtcccgactgtcctcctcttctagcaatgacagtgggaataaggttggcatccagcttcccgaggtggagctgtcagtttccacaaagaaagagtagcaggcctttgtatgtgtgtacatatatatatatataacaaaacatcagccttgggtggtgtgttcctatataaactccaaagggaaacacaccgactgcctcagcaatcatgcaaagaccttgcctggcccggtggcaagcgctgaaaaaccgaccgcctgtaggctcctggaactatacagataggtaaagagttccaagttcgtccagcccatgtgcaaagtcaacagtatttgccttaagatttcatatatatatatttttttgcattgactgctgagagctcctgtttactaagcaagcttttgtgtttattatcctcatttttactgaacattgttagttttggggtaatggaaacccactttttcattgtaatgactttgggggcttttgttagtaagggtgggtggggtgatgggttgcagacggaggtcaggtcttcctctttcctgagactggatctgttcaaacagcaaacgcccacagatggcccagaggtggtggtagtcagggtgtgtgggtgtttttagggttctttagtgttgtttctttcacccaggggtggtggtcccagccagtttggtgctgacggtgagaggaaattagaatctgtttgcaaattgtccaacccaccccctcaacatgaggggcttccattttctgtgttttgtaagggaactgtttccttcatgccgccatgttcctgatattagttctgatttctttttaacaaatgttatcatgattaagaaaatttccagcactttaatggccaattaactgagaatgtaagaaaattgatgctgtacaaggcaaataaagctgtttattaacctccgaaaaaaaatctatgtcgggtgcggagaaagaggtaatgaaatggca

SEQ ID NO: 943 - protein, 2007 aa, Homo sapien
MPKVKMPKFSMPGFKGEGPDGDVKLPKADIDVSGPKVDIEGPDVNIEGPEGKLKGPKFKMPEMNIKAPKISMPDIDLNLKGPKVKGDVDVSLPKVEGDLKGPEVDIKGPKVDIDAPDVDVHGPDWHLKMPKIKMPKISMPGFKGEGPDVDVNLPKADIDVSGPKVDVECPDVNIEGPEGKWKSPKFKMPEMHFKTPKISMPDIDLNLTGPKIKGDVDVTGPKVEGDLKGPEVDLKGPKVDIDVPDVNVQGPDWHLKMPKMKMPKFSMPGFKAEGPEVDVNLPKADVDVSGPKVDVEGPDVNIEGPEGKLKGPKFKMPEMNIKAPKIPMPDFDLHLKGPKVKGDVDISLPKVEGDLKGPEVDIRGPKVDIDVPDVGVQGPDWHLKMPKVKMPKFSMPGFKGEGPDVDVNLPKADLDVSGPKVDIDVPDVNIEGPEGKLKGPKFKMPEMNIKAPKISMPDIDLNLKGPKVKGDMDVSLPKVEGDMKVPDVDIKGPKVDINAPDVDVQGPDWHLKMPKIKMPKISMPGFKGEGPEVDVNLPKADLDVSGPKVDVDVPDVNIEGPDAKLKGPKFKMPEMNIKAPKISMPDFDLHLKGPKVKGDVDVSLPKMEGDLKGPEVDIKGPKVDINAPDVDVQGPDWHLKMPKVKMPKFSMPGFKGEGPDVDVNLPKADLDVSGPKVDIDVPDVDIRRSRRETERSQIQDAEMSIQAPKISMPDIDLNLKGPKVKGDVDVTLPKVEGDLKGPEADIKGPKVDINTPDVDVHGPDWHLKMPKVKMPKFSMPGFKGEGPDVDVNLPKADIDVSGPKVDVDVPDVNIEGPDAKLKGPKFKMPEMSIKAPKISMPDIDLNLKGPKVKGDVDVTLPKVEGDLKGPEADIKGPKVDINTPDVDVHGPDWHLKMPKVKMPKFSMPGFKGEGPDVDVSLPKADIDVSGPKVDVDIPDVNIEGPDAKLKGPKFKMPEINIKAPKISIPDVDLDLKGPKVKGDFDVSVPKVEGTLKGPEVDLKGPRLDFEGPDAKLSGPSLKMPSLEISAPKVTAPDVDLHLKAPKIGFSGPKLEGGEVDLKGPKVEAPSLDVHMDSPDINIEGPDVKIPKFKKPKFGFGAKSPKADIKSPSLDVTVPEAELNLETPEISVGGKGKKSKFKMPKIHMSGPKIKAKKTGIDLNVPGGEIDASLKAPDVDVNIAGPDAALKVDVKSPKTKKTMFGKMYFPDVEFDIKSPKFKAEAPLPSPKLEGELQAPDLELSLPAIHVEGLDIKAKAPKVKMPDVDISVPKIEGDLKGPKVQANLGAPDINIEGLDAKVKTPSFGISAPQVSIPDVNVNLKGPKIKGDVPSVGLEGPDVDLQGPEAKIKFPKFSMPKIGIPGVKMEGGGAEVHAQLPSLEGDLRGPDVKLEGPDVSLKGPGVDLPSVNLSMPKVSGPDLDLNLKGPSLKGDLDASVPSMKVHAPGLNLSGVGGKMQVGGDGVKVPGIDATTKLNVGAPDVTLRGPSLQGDLAVSGDIKCPKVSVGAPDLSLEASEGSIKLPKMKLPQFGISTPGSDLHVNAKGPQVSGELKGPGVDVNLKGPRISAPNVDFNLEGPKVKGSLGATGEIKGPTVGGGLPGIGVQGLEGNLQMPGIKSSGCDVNLPGVNVKLPTGQISGPEIKGGLKGSEVGFHGAAPDISVKGPAFNMASPESDFGINLKGPKIKGGADVSGGVSAPDISLGEGHLSVKGSGGEWKGPQVSSALNLDTSKFAGGLHFSGPKVEGGVKGGQIGLQAPGLSVSGPQGHLESGSGKVTFPKMKIPKFTFSGRELVGREMGVDVHFPKAEASIQAGAGDGEWEESEVKLKKSKIKMPKFNFSKPKGKGGVTGSPEASISGSKGDLKSSKASLGSLEGEAEAEASSPKGKFSLFKSKKPRHRSNSFSDEREFSGPSTPTGTLEFEGGEVSLEGGKVKGKHGKLKFGTFGGLGSKSKGHYEVTGSDDETGKLQGSGVSLASKKSRLSSSSSNDSGNKVGIQLPEVELSVSTKKE

SEQ ID NO: 944 - DNA, 5471 bp, Homo sapien
caggacacgaggaaactgttaatgacttgggctttggaagtagctgttgtaatgaagaagtccgaaacatatgcacctttattctgtcttccgtctttccataaattttgcaaaggccttttagccgacactctcgttgaagatgtgaatatctgtctgcaggcatgcagcagtctacatgctctatcctcttccttgccagatgatcttttacagagatgtgttgatgtttgccgtgtccaactagtgcaccgtggaacttgtattcgacaagcatttggaaaactgttgaaatcaattcctttaggtgttttcctaagcgataacaatcacacagaaattcaagaaatttctttagcattaagaagtcacatgagtaaagcaccaagtaatacattccacccccaagatttctctgatgttattagttttattttgtatgggaactctcatagaacagggaaggacaattggttggaaagactgttctatagctgccagagactggataagcgtgaccagtcaacaattccacgcaatctcctgaagacagatgctatcctttggcagtgggccatatgggaagctgcacaattcactgttctttctaagctgagaaccccactgggcagagctcaagacaccttccagacaattgaaggtatcattcgaagtctcgcaggtcacacattaaaccctgatcaggatgttagtcagtggacaactgcagacagtgatgaaggccatggtaacaaccaacttagacttgttcttcttctgcagtatctggaaaatctggagaaattaatgtataatgcatacgagggatgtgctaatgccttaacttcacctcccaaggtcattagaacttttttgtataccaatcgccaaacttgtcaggactggctaacgcggattcgactctccatcatgagggtaggattgttggcaggccagcctgcagtgacagtgagacatggctttgacttgcttacagagatgaaaacaaccagcctatctcaggggaatgaattggaagtaagcattatgatggtggtagaagcactatgtgaacttcattgtcctgaagctatacagggaattgctgtctggtcatcatctattgttggaaaacatcttctgtggattaactcagtggctcaacaggctgaagggaggtttgaaaaggcctctgtggagtaccaggaacacctgtgtgccatgacaggtgttgattgctgcatctccagctttgacaaatcggtgctcaccttagccagtgctgggtgtaagagtgccagcctgaaacattgtctgaatggtgaatccagaaaaagtgtgctgtccaaaccgactgactcttcccctgaggttataaattatttaggaaacaaagcatgtgagtgctacatctcaactgccgattgggctgctgtgcaggaatggcagaacgctatccatgacttgaaaaagagtaccagtagcacttccctcaacctgaaagctgacttcaactatataaaatcattaagcagctttgagtctggaaaatttgtcgaatgtaccgagcaattagaattgttaccaggagaaaatatcaatctacttgctggaggatcaaaagaaaaaatagacatgaaaaaactgcttcgtaacatgtgaagtccagatccaagggaacctcagaaatccattgaagttccattgttaagaagttctgtttgtttggcaactgctttaaacccgatagaacaagatcagaagtggcagtctataactgaaaatgtggtaaagtacttgaagcaaacatcccgcatcgctattggacctctgagactttctactttaacagtttcacagtctttgccagttctaagtaccttgcagctgtattgctcgtctgctttggagaccacagtttctaacagactttcaacagaggactgtcttattccactcttcggcgaagctttacgttcatgtaaacagcatgacgtgaggccgtggatgcaggcattaaggtatactgtgtaccagaatcagttgttggagaaaattaaaggtatgatctcgtgaaatcttgagagaaactgaatgacgaatgaaactattgttcctgtttcacacagaagaaaactgaggttggcactcatcatgagcccctgttctcattctgcaaatggtgaagctctctattgtcctgaccccacagttcctgtcccatgaccagggccagctcaccaaggagctgcagcagcatgtaaagtcagtgacatgcccatgcgagtacctgaggaaggttatcaatactctggctgaccatcatcatcgtgggactgactttggtggaagtccttggttacatgtcattattgcgtttccgacaagttataaagttgtcattaccctctggatagtttacctttgggtgtctctcctgaagactatcttctggtctcgaaatggacatgatggatccacggatgtacagcagagagcctggaggtccaaccgccgtagacaggaagggctgaggtccatttgtatgcacacaaagaaaagagtttcttcctttcgaggaaataaaattggcctgaaagacgtcattactctacggagacatgtggaaacaaaagttagagctaaaatccgtaagaggaaggtgacaacgaaaatcaaccatcatgacaaaatcaatggaaagaggaagaccgccagaaaacagaaaatgtttcaacgtgcgcaagagttgcggcggcgagcagaggactaccacaaatgcaaaatcccccttctgcaagaaaggctctttgcaactgggtcagaatggcggcagcggagcatcgtcattcttcaggattgccctactggccctacctcacagctgaaactttaaaaaacaggatgggccaccagccacctcctccaactcaacaacattctataactgataactccctgagcctcaagacacctcccgagtgtctgctcactccccttccaccctcagcggatgataatctcaagacacctcccgagtgtgtgctcactccccttccaccctcagcggatgataatctcaagacacctcccgagtgtgtgctcactccccttccaccctcagcggatgataatctcaagacacctcctgagtgtctcctcactccccttccaccctcagcggatgataatctcaagacacctcccgagtgtctgctcactccccttccaccctcagctctaccctcagctccaccctcagcagatgataatctcaagacacgtgccgagtgtctgctccatccccttccaccctcagcggatgataatctcaagacaccttccgagcgtcagctcactccccttccaccctcagctccaccctcagcagatgataatatcaagacacctgccgagcgtctgcgggggccgcttccaccctcagcggatgataatctcaagacaccttccgagcgtcagctcactccccttccaccctcagctccaccctcagcagatgataatatcaagacacctgccgagcgtctgcgggggccgcttccaccctcagcggatgataatctcaagacaccttccgagcgtcagctcactccccttccaccctcagctccaccctcagcagatgataatatcaagacacctgccgagcgtctgcgggggccgcttccaccctcagcggatgataatctcaagacaccttccgagcgtcagctcactccccttccaccctcagctccaccctcagcagatgataatatcaagacacctgccgagcgtctgcgggggccgcttccaccctcagcggatgataatctcaagacaccttccgagcgtcagctcactccccttccaccctcagctccaccctcagcagatgataacatcaagacacctgccttccaccctcagcggatgataatctcaagacaccttccgagcgtcagctcactccccttccaccctcagctccaccctcagcagatgataatatcaagatacctgctgagcgtctgcggattccgcttccaccatcagccgatgataatctcaagacaccttccgagcgtcagctcactccccttccaccctcagctccaccctcagcagatgataatatcaagacacctgccgagcgtctgcgggggccgcttccaccctcagcggatgataatctcaagacaccttccgagcatcagctcactccccttccaccctcagctccaccctcagcagatgataatatcaagacacctgccgagcgtctgcgggggccgcttccaccctcagcggatgataatctcaagacaccttccgagcgtcagctcactccccttccaccctcagctccaccctcagcagatgataatatcaagacacctgccgagcgtctgcgggggccgcttccaccctcagcggatgataatctcaagacaccttccgagcgtcagctcactccccttccacactcagctccaccctcagcagatgataatatcaagacacctgccgagcgtctgcggggagcgtctgcgggggccgcttccaccctcagcggatgataatctcaagacaccttccgagcgtcagctcactccccttccaccctcagctccaccctcagcagatgataatatcaagacacctgctgagcgtctgcgggggccgcttccaccctcagcggatgataatctcaagacaccttccgagcgtcagctcactccccttccaccctcagctccaccctcagcagatgataatatcaagacacctgccgagcgtctgcgggggccgcttccaccctcagcggatgataatctcaagacaccttccgagcgtcagctcactccccttccaccctcagctccaccctcagcagatgataatatcaagacacctgccgagcgtctgcgggggccgcttccaccctcagccgatgataatctcaagacacctcccttagctactcaggaggctgaggcagaaaaaccacgcaaacccaagaggcagagggcggctgagatggaaccacctcccgaacccaagaggcggagggtcggtgacgtggaaccgtcacgcaaacccaagaggcggagggccgctgacgtggaaccatcatcacccgaacccaagaggcggagggtcggtgatgtggaaccgtcacgcaaacccaagaggcggagggccgctgacgtggaaccatcatcacccgaacccaagaggcggagggtcggtgacgtggaaccgtcacgcaaacccaagaggcggagggccgctgacgtggaaccatcattacccgaacccaagaggcggaggttgagctgagaagaggccagtgcactcaagcctgagcaataagaataaaaccgagtagaacaaaataaaaaattcaaaaaacaaaacaaaacccacactccaaaaactaacaaagaataaataaataatataaaaat

SEQ ID NO: 945 - DNA, 2113 bp, Homo sapien
gtgcggttgggaacgcggagcggacggattcgattcaacggggttccggaccgcgctgcgctatggagcaggtcaatgagctgaaggagaaaggcaacaaggccctgagcgtgggtaacatcgatgatgccttacagtgctactccgaagctattaagctggatccccacaaccacgtgctgtacagcaaccgttctgctgcctatgccaagaaaggagactaccagaaggcttatgaggatggctgcaagactgtcgacctaaagcctgactggggcaagggctattcacgaaaagcagcagctctagagttcttaaaccgctttgaagaagccaagcgaacctatgaggagggcttaaaacacgaggcaaataaccctcaactgaaagagggtttacagaatatggaggccaggttggcagagagaaaattcatgaaccctttcaacatgcctaatctgtatcagaagttggagagtgatcccaggacaaggacactactcagtgatcctacctaccgggagctgatagagcagctacgaaacaagccttctgacctgggcacgaaactacaagatccccggatcatgaccactctcagcgtcctccttggggtcgatctgggcagtatggatgaggaggaagagattgcaacacctccaccaccaccccctcccaaaaaggagaccaagccagagccaatggaagaagatcttccagagaataagaagcaggcactgaaagaaaaagagctggggaacgatgcctacaagaagaaagactttgacacagccttgaagcattacgacaaagccaaggagctggaccccactaacatgacttacattaccaatcaagcagcggtatactttgaaaagggcgactacaataagtgccgggagctttgtgagaaggccattgaagtggggagagaaaaccgagaagactatcgacagattgccaaagcatatgctcgaattggcaactcctacttcaaagaagaaaagtacaaggatgccatccatttctataacaagtctctggcagagcaccgaaccccagatgtgctcaagaaatgccagcaggcagagaaaatcctgaaggagcaagagcggctggcctacataaaccccgacctggctttggaggagaagaacaaaggcaacgagtgttttcagaaaggggactatccccaggccatgaagcattatacagaagccatcaaaaggaacccgaaagatgccaaattatacagcaatcgagctgcctgctacaccaaactcctggagttccagctggcactcaaggactgtgaggaatgtatccagctggagccgaccttcatcaagggttatacacggaaagccgctgcgctggaagcgatgaaggactacaccaaagccatggatgtgtaccagaaggcgctagacctggactccagctgtaaggaggcggcagacggctaccagcgctgtatgatggcgcagtacaaccggcacgacagccccgaagatgtgaagcgacgagccatggccgaccctgaggtgcagcagatcatgagtgacccagccatgcgccttatcctggaacagatgcagaaggacccccaggcactcagcgaacacttaaagaatcctgtaatagcacagaagatccagaagctgatggatgtgggtctgattgcaattcggtgatgacttgttcatccccccttcccttcgccctcatgtggaaagaggagctgggaccgcggcgagcagcacggagcggaagggagagcaggggagagaaggcctcatctctctatatttatacataaccccggggaagacacagagactcgtacctgcgctgtttgtgccgccgctgcctctgggccctcccagcacacgcatggtctcttcaccgctgccctcgagttccatgtctctttcccctgcccctagttgctgtctcggctgctctcccatagttggttttttttttatttggggcagtgggcatgttatggggaggggagggggttcttccagcctcaggtcccagctgtctcacgttgtttattctgcgtccccttctccaataaaacaagccagttgggcgtggttataac

SEQ ID NO: 946 - protein, 543 aa, Homo sapien
MEQVNELKEKGNKALSVGNIDDALQCYSEAIKLDPHNHVLYSNRSAAYAKKGDYQKAYEDGCKTVDLKPDWGKGYSRKAAALEFLNRFEEAKRTYEEGLKHEANNPQLKEGLQNMEARLAERKFMNPFNMPNLYQKLESDPRTRTLLSDPTYRELIEQLRNKPSDLGTKLQDPRIMTTLSVLLGVDLGSMDEEEEIATPPPPPPPKKETKPEPMEEDLPENKKQALKEKELGNDAYKKKDFDTALKHYDKAKELDPTNMTYITNQAAVYFEKGDYNKCRELCEKAIEVGRENREDYRQIAKAYARIGNSYFKEEKYKDAIHFYNKSLAEHRTPDVLKKCQQAEKILKEQERLAYINPDLALEEKNKGNECFQKGDYPQAMKHYTEAIKRNPKDAKLYSNRAACYTKLLEFQLALKDCEECIQLEPTFIKGYTRKAAALEAMKDYTKAMDVYQKALDLDSSCKEAADGYQRCMMAQYNRHDSPEDVKRRAMADPEVQQIMSDPAMRLILEQMQKDPQALSEHLKNPVIAQKIQKLMDVGLIAIR

SEQ ID NO: 947 - DNA, 3301 bp, Homo sapien
cttgtgagtctataactcggagccgttgggtcggttcctgctattccggcgcctccactccgtcccccgcgggtctgctctgtgtgccatggacggcattgtcccagatatagccgttggtacaaagcggggatctgacgagcttttctctacttgtgtcactaacggaccgtttatcatgagcagcaactcggcttctgcagcaaacggaaatgacagcaagaagttcaaaggtgacagccgaagtgcaggcgtcccctctagagtgatccacatccggaagctccccatcgacgtcacggagggggaagtcatctccctggggctgccctttgggaaggtcaccaacctcctgatgctgaaggggaaaaaccaggccttcatcgagatgaacacggaggaggctgccaacaccatggtgaactactacacctcggtgacccctgtgctgcgcggccagcccatctacatccagttctccaaccacaaggagctgaagaccgacagctctcccaaccaggcgcgggcccaggcggccctgcaggcggtgaactcggtccagtcggggaacctggccttggctgcctcggcggcggccgtggacgcagggatggcgatggccgggcagagccccgtgctcaggatcatcgtggagaacctcttctaccctgtgaccctggatgtgctgcaccagattttctccaagttcggcacagtgttgaagatcatcaccttcaccaagaacaaccagttccaggccctgctgcagtatgcggaccccgtgagcgcccagcacgccaagctgtcgctggacgggcagaacatctacaacgcctgctgcacgctgcgcatcgacttttccaagctcaccagcctcaacgtcaagtacaacaatgacaagagccgtgactacacacgcccagacctgccttccggggacagccagccctcgctggaccagaccatggccgcggccttcgcctctccgtatgcaggagctggtttccctcccacctttgccattcctcaagctgcaggcctttccgttccgaacgtccacggcgccctggcccccctggccatcccctcggcggcggcggcagctgcggcggcaggtcggatcgccatcccgggcctggcgggggcaggaaattctgtattgctggtcagcaacctcaacccagagagagtcacaccccaaagcctctttattcttttcggcgtctacggtgacgtgcagcgcgtgaagatcctgttcaataagaaggagaacgccctagtgcagatggcggacggcaaccaggcccagctggccatgagccacctgaacgggcacaagctgcacgggaagcccatccgcatcacgctctcgaagcaccagaacgtgcagctgccccgcgagggccaggaggaccagggcctgaccaaggactacggcaactcacccctgcaccgcttcaagaagccgggctccaagaacttccagaacatattcccgccctcggccacgctgcacctctccaacatcccgccctcagtctccgaggaggatctcaaggtcctgttttccagcaatgggggcgtcgtcaaaggattcaagttcttccagaaggaccgcaagatggcactgatccagatgggctccgtggaggaggcggtccaggccctcattgacctgcacaaccacgacctcggggagaaccaccacctgcgggtctccttctccaagtccaccatctaggggcacaggcccccacggccgggccccctggcgacaacttccatcattccagagaaaagccactttaaaaacagctgaagtgaccttagcagaccagagattttatttttttaaagagaaatcagtttacctgtttttaaaaaaattaaatctagttcaccttgctcaccctgcggtgacagggacagctcaggctcttggtgactgtggcagcgggagttcccggccctccacacccggggccagaccctcggggccatgccttggtggggcctgtgtcgggcgtggggcctgcaggtgggcgccccgaccacgacttggcttccttgtgccttaaaaaacctgccttcctgcagccacacacccacccggggtgtcctggggacccaaggggtgggggggtcacaccagagagaggcagggggcctggccggctcctgcaggatcatgcagctggggcgcggcggccgcggctgcgacaccccaaccccagccctctaatcaagtcacgtgattctcccttcaccccgcccccagggccttcccttctgcccccaggcgggctccccgctgctccagctgcggagctggtcgacataatctctgtattatatactttgcagttgcagacgtctgtgcctagcaatatttccagttgaccaaatattctaatcttttttcatttatatgcaaaagaaatagttttaagtaactttttatagcaagatgatacaatggtatgagtgtaatctaaacttccttgtggtattaccttgtatgctgttacttttattttattccttgtaattaagtcacaggcaggacccagtttccagagagcaggcggggccgcccagtgggtcaggcacagggagccccggtcctatcttagagcccctgagcttcagggaaggggcgggcgtgtcgccgcctctggcatcgcctccggttgccttacaccacgccttcacctgcagtcgcctagaaaacttgctctcaaacttcagggttttttcttccttcaaattttggaccaaagtctcatttctgtgttttgcctgcctctgatgctgggacccggaaggcgggcgctcctcctgtcttctctgtgctctttctaccgcccccgcgtcctgtcccgggggctctcctaggatcccctttccgtaaaagcgtgtaacaagggtgtaaatatttataattttttatacctgttgtgagacccgaggggcggcggcgcggttttttatggtgacacaaatgtatattttgctaacagcaattccaggctcagtattgtgaccgcggagccacaggggaccccacgcacattccgttgccttacccgatggcttgtgacgcggagagaaccgattaaaaccgtttgagaaactcctcccttgtctagccctgtgttcgctgtggacgctgtagaggcaggttggccagtctgtacctggacttcgaataaatcttctgtatcctcgctccgttccgccttaaaaaaaaaaaaaaaaaaaaaaaaaaaaaaaaaaaaaaaaaaaaaaaaaaaaaaaaaaa

SEQ ID NO: 948 - protein, 531 aa, Homo sapien
MDGIVPDIAVGTKRGSDELFSTCVTNGPFIMSSNSASAANGNDSKKFKGDSRSAGVPSRVIHIRKLPIDVTEGEVISLGLPFGKVTNLLMLKGKNQAFIEMNTEEAANTMVNYYTSVTPVLRGQPIYIQFSNHKELKTDSSPNQARAQAALQAVNSVQSGNLALAASAAAVDAGMAMAGQSPVLRIIVENLFYPVTLDVLHQIFSKFGTVLKIITFTKNNQFQALLQYADPVSAQHAKLSLDGQNIYNACCTLRIDFSKLTSLNVKYNNDKSRDYTRPDLPSGDSQPSLDQTMAAAFGLSVPNVHGALAPLAIPSAAAAAAAAGRIAIPGLAGAGNSVLLVSNLNPERVTPQSLFILFGVYGDVQRVKILFNKKENALVQMADGNQAQLAMSHLNGHKLHGKPIRITLSKHQNVQLPREGQEDQGLTKDYGNSPLHRFKKPGSKNFQNIFPPSATLHLSNIPPSVSEEDLKVLFSSNGGVVKGFKFFQKDRKMALIQMGSVEEAVQALIDLHNHDLGENHHLRVSFSKSTI

SEQ ID NO: 949 - DNA, 6335 bp, Homo sapien
cgaaggcttcatcgaagtcctgaccaagaagcagcgccgcctgctggaggaagagagaagaaagaaggagcaggccgtgcaggtgcctgtcaaaggtcgaggcctttcctcccgtattcctcctcgatttgcaaaaaagcagaacaacttatgtctggagcaaggtgacgtgaccgtgcctggcagcagcctgggcactgagatctgggagagcagcagccaggctctccctgtgcaggccccagccaacgactcctggaggaaagctgtcactgccttcagcagcaccgagactggctctgcggagcagggttttaagagcagccagggagatagtggcgttgacttgagtgccgagtctcgggagtcgtctgcgacctcctcgcagcgcagctccccatatgggactctgaagccagaggagatgagcgggcccggcctggcggaacccaaggccgacagccacaaggagcaggctccaaagccatctgagcagaaggattcagaacaaggctctggacagagcaaggagcacagaccaggacccatcggcaacgagcgttctctgaaaaacagaaagggctcggagggggccgagcggctgcaaggggctgtcgtcccgcctgttaacggggtggagattcacgtggactccgtgctgcctgtgccacccattgaatttggagtcagtccaaaagactccgatttcagcttgccacctggttctgcctctggtcctactgggagtccagttgttaaacttcaggatgccttggccagtaatgcagggttaacacagagtatccccatcctgcggcgggaccatcacatccagagggccatcggtctctccccaatgtccttccccaccgccgaccttactctgaagatggagtctgcgcgcaaggcttgggaaaactcccccagtttgccggagcagagctctccaggcggcgctggctcaggcatccagcctccatcctctgtgggtgcctccagcggggtcaactacagctccttcggtggagtgtccatgccacccatgcctgtggcctctgtagcaccttctgcttctatgccaggcagccacctcccgcccctgtacctggatggccatgtgtttgcaagtcagccccggctggttcctcaaacgatacctcagcagcagagttaccaacaggccgccgctgcccagcagatcccgatctcccttcacacatctctgcaggcacaagctcagcttggactgaggggtgggcttcctgtgtcccagtcccaggagatcttcagctccttgcagcccttcagatctcaggtgtacatgcaccccagcctgtcaccgcccagcaccatgatcctctctgggggcacagccttgaagcctccatactcggcgttcccaggcatgcagcccttggagatggtgaagccgcagtctggctcaccctaccagcccatgagcgggaaccaagccctggtctacgagggccagctcagccaggctgctggcctgggtgcctcccagatgttggactcccagctcccacagctgaccatgccactgcctcggtacggctccgggcagcagccactgatcctgccccagtctattcagctgccacctgggcagagcctctccgttggggccccccgaaggattcctccgcccgggtcccagccgccagtcctgaacaccagcagagagccctctcagatggagatgaaaggcttccactttgccgacagtaaacagaatgtcccttcaggaggccccgtgccatcgccacagacctacaggcctagctctgctagccccagtgggaagccctctggatcagcagttaacatgggctctgtgcagggacactacgtgcaacaggcaaaacaacgagtggatgagaaacccagcctgggagccgtgaagctgcaggaggccccctcggctgcctcccagatgaagcgaaccggagcgatcaagcctcgggctgtcaaagtggaggagagtaaggcctgacagtgcctggctgccacctcgcctctccctactgaggacggtgccgccatgcggcctcgacacagccgacactcgggagcctcaccagatccaccgtccaaatgcgtggcccagactgagagacctccctcctctccactcccgaaagctccgttgtcaaccagcttgcacccgtggatatatggcattgacccgcttgctttgatacgaaacaaaaaagcagacgactccttcatcccatctgctcctaccgtgactgtggagtgacgcctcctgtgcagtgcagatttgccctccctgcctcctccctgtcctgccgcgcagccagggcgccttctcagcagtgcttccggcccagccgcccatccctaggcacagtgatttggcagcagggtcattttactttgaggctttttgttttaaaatgtagccaaggtttttacaaaggggaaaggaaaagaaaacaaaaacgcaagctccatgtgtatagctgaacttttatatgtttcttgccagcccctccgctcccttccatctctagcctctgtcctgtttagtttgatacgtcactgcagtaccttaagaggtgactcttaagaatgcatcccctcctgattcctcagctggttcacccttgaggttatttgcaaaaagaaaaggaggttcttgagggcaccgattgcgagcattctggtgcctggctccccgcctgggaagcaatggggtgctcagagcagcaggcaggttgggggaggggggggggtcatagttgggttccagctcctggcttgatgagcccagggcgcttacaggcagcccatgaagttgatgacagttttagcatgagaatcacacagggtccctgtcctgggctcctctaaagccagtggatgtgctgggcaccagagacaaatcatggagatggctgctggtggctcccaggttggcccagatggggtgagctgacataccacaggcccatcccaggccccgtgggctctgcttctggggctccataccctgccctgcgggggtgctgtgtttttcacacatttctttccctgaagccttctgtaacctgtcattttccttccttcctcttccggagcctgctgctttctctggacctgtctccacctcccacacagctcatcgtgaacaccacttggtgatggagggagtggacccgtgtgtggtccccaagtgaggccactgggagtttgtccttttcctcctttgcttcactcccagcagcagacccaggttgtcaggacaggagggcctgagctaagcagtaggcatcagtctcgtttgtcttcagacggcgggggcaggtccagggtgaggctgggtggagggctgaccaaggtccaaagggcctgcgcagcctccgggagggcagcttctccagccagaggcttgtgtgagccatcgtgtgctgggcttgtttttaagtaagaaacaaggaaatcactccagattctgtcattccaaggaaagggaaggggacagttcaggtttctcagctgttcttaggggtcactgagcgtctacctcctcctccagaggaggctggctcagaacacctagaggagggggccggggatgcaccccccaccagaggctgccttcagcgtctcacgggtgcaggacagcgctcaggcttgggctctaagctctgtgtctagtgtagaacatggggaaggagcatcttaggaactgctgaagtaacttcttactgctctcacaattctaaggaagcgggagaacggcctcctaccaacagcgcccaccccagagctgcctgggaaagggcagttttactgaaaggtgctttactgttcacctgcatctttcagcagctcccctcctgccctcacctggtcttttccctctttatcccaagcctttatgcttgagtcccttccccaggggctgcccacccgacagttccaggcattccctacctgagcttcttgtctgcttttccttctcccactgcaggcggctgcttgtggggcctgggatgagccctctctgtccccaccggccctccttgccaagccattcctgggtgagttcaggcctgcgggagccacacattcatctccacctggacacttgagccgcatggccagacccctcccacctgatgcggtggtgcgtgtgatttgtcaaaagaaagccttctggatgctgttaagatgtacccttcaggtgaacctggtatcagacccacagtacttgctgtttgagaaaaaataaaaacaaaaaggtcacctgttctccagcccttttctcttacctggtatttccttcctttctcctcccccaccccaaataaaaaaacaaaaaacactagaatttatttatatgtattgatgttgtaggtctaggtgaaaaaaaaagaagtaaatgtttcactgctctatttatatataatgtctgaattaattctgtgcaggaaaggccaggaaattgcatgtgaagttcggtgcagtcaccacctctgtgtgacctgagctgcagtctcttcgctgagatgcaggttttaaatgagacttggggggctgagggcaggcctcaggcctcccagcgccccaacccctccttggtctaatgaaatgcagttcttagtgcagagatgttttaaggtgcaatatatctcttcctttcccgtggttttagagccaagctcaaggtagtaggacgtagggtcttattttgttttcaaacccccatcctcagagcgcagatacatgcagaggcttctgccaggataccacggggccttagtgggaacaggtggagaccagcacttccctttcctgctgctgaggtagggattggggggtcagaacccactcacttttgcctgttaaagttgccctcctgacgctggcagctctgccttggtcactggggatgcggctcgttgctcagccaccagtggccttgcggtattgtccaccatccactagagtgggatgaagtccagagtgtgggtatacatctcagatgcccatctacccactggggacttcaatgccagctgcatttggtttggttttcttaactgttggcttctccccacagcgttttttgtttttttttaaacattcatattgttttcaaacttggaattcatagacactctggctctaggttccttaagggggaaaacaaaagatgactttatttcacattcaagaaaatcagttcagttccaaagctgtggtccttccagccacttctagggacactggggaaccttgttaaacgttgacatcagtgctctccagccgtgctgtcaccctcctatcttctggatctgccttcgggatggtcagtgacagcttctggaagctgagcacacacaggtgcacagccatgctgtggtctggcctgctacggcagcatggcagctctggtggagccttctcccttgccatttggttcccctgtgccaagtagctgcaggctgcccctcaaatcttcatttgtcccttttcacttcctgcagaacaagcctgggttagagggtctgctggaaatggcctttgaagaccaaggataccaggatgtgtgcactctgtcgtgttctgtgatgaatgggaaacgcaggcttccagaaagccagctctcttctgaaatgtgacggacctaagcaggaagtcatccaggacaggagtggctcagtgttggggatggacgctgtcgcccagccatgctccaccagggccaccaatgtgtagttggctggtggtcttcgggcatgtgagacctgctcttcactgtttccaccccacttggtggcctccaggatggtagtggcaccctcagagccccatcttcagcatgttctgaagcctcagagtggaaattcctgctaaggctctgtgtggacgcctttctcccgtgatctaaaggggacactgtactcaagcttttgacctcatgccttgtgtagtaaaaaaggatttgggggttttgtttggttcctgagagggttgtgttttgtttttgtttccttttgtttatgttttggcctttcctctttgtctttccatgtagaccagatatttgaaagggcagacgatggctagaggtgtaatgtgcagcttgtttatacggtattttgggaaacttaccttggatgggaaatcgaatcgtggattcaccaggccggtgctggcacactcaccctcgccctttccctccggttcagtacctattgtttctcctttcaaatatgtgattgtactagctctttccatatgaaagaattctccttatttaaataaaaaaagtttaaaaagat

SEQ ID NO: 950 - protein, 670 aa, Homo sapien
EGFIEVLTKKQRRLLEEERRKKEQAVQVPVKGRGLSSRIPPRFAKKQNNLCLEQGDVTVPGSSLGTEIWESSSQALPVQAPANDSWRKAVTAFSSTETGSAEQGFKSSQGDSGVDLSAESRESSATSSQRSSPYGTLKPEEMSGPGLAEPKADSHKEQAPKPSEQKDSEQGSGQSKEHRPGPIGNERSLKNRKGSEGAERLQGAVVPPVNGVEIHVDSVLPVPPIEFGVSPKDSDFSLPPGSASGPTGSPVVKLQDALASNAGLTQSIPILRRDHHIQRAIGLSPMSFPTADLTLKMESARKAWENSPSLPEQSSPGGAGSGIQPPSSVGASSGVNYSSFGGVSMPPMPVASVAPSASMPGSHLPPLYLDGHVFASQPRLVPQTIPQQQSYQQAAAAQQIPISLHTSLQAQAQLGLRGGLPVSQSQEIFSSLQPFRSQVYMHPSLSPPSTMILSGGTALKPPYSAFPGMQPLEMVKPQSGSPYQPMSGNQALVYEGQLSQAAGLGASQMLDSQLPQLTMPLPRYGSGQQPLILPQSIQLPPGQSLSVGAPRRIPPPGSQPPVLNTSREPSQMEMKGFHFADSKQNVPSGGPVPSPQTYRPSSASPSGKPSGSAVNMGSVQGHYVQQAKQRVDEKPSLGAVKLQEAPSAASQMKRTGAIKPRAVKVEESKA

SEQ ID NO: 951 - DNA, 2499 bp, Homo sapien
agatgcgagcactgcggctgggcgctgaggatcagccgcttcctgcctggattccacagcttcgcgccgtgtactgtcgccccatccctgcgcgcccagcctgccaagcagcgtgccccggttgcaggcgtcatgcagcgggcgcgacccacgctctgggccgctgcgctgactctgctggtgctgctccgcgggccgccggtggcgcgggctggcgcgagctcggggggcttgggtcccgtggtgcgctgcgagccgtgcgacgcgcgtgcactggcccagtgcgcgcctccgcccgccgtgtgcgcggagctggtgcgcgagccgggctgcggctgctgcctgacgtgcgcactgagcgagggccagccgtgcggcatctacaccgagcgctgtggctccggccttcgctgccagccgtcgcccgacgaggcgcgaccgctgcaggcgctgctggacggccgcgggctctgcgtcaacgctagtgccgtcagccgcctgcgcgcctacctgctgccagcgccgccagctccaggaaatgctagtgagtcggaggaagaccgcagcgccggcagtgtggagagcccgtccgtctccagcacgcaccgggtgtctgatcccaagttccaccccctccattcaaagataatcatcatcaagaaagggcatgctaaagacagccagcgctacaaagttgactacgagtctcagagcacagatacccagaacttctcctccgagtccaagcgggagacagaatatggtccctgccgtagagaaatggaagacacactgaatcacctgaagttcctcaatgtgctgagtcccaggggtgtacacattcccaactgtgacaagaagggattttataagaaaaagcagtgtcgcccttccaaaggcaggaagcggggcttctgctggtgtgtggataagtatgggcagcctctcccaggctacaccaccaaggggaaggaggacgtgcactgctacagcatgcagagcaagtagacgcctgccgcaaggttaatgtggagctcaaatatgccttattttctacaaaagactgccaaggacatgaccagcagctggctacagcctcgatttatatttctgtttgtggtgaactgattttttttaaaccaaagtttagaaagaggtttttgaaatgcctatggtttctttgaatggtaaacttgagcatcttttcactttccagtagtcagcaaagagcagtttgaattttcttgtcgcttcctatcaaaatatctagagactcgagcacagcacccagacttcatgcgcccgtggaatgctcaccacatgttggtcgaagcggccgaccactgactttgtgacttaggcggctgtgttgcctatgtagagaacacgcttcacccccactccctgtacagtgcgcacaggctttatcgagaataggaaaacctttaaaccccggtcatccggacatcccaacgcatgctcctggagctcacagccttctgtggtgtcatttctgaaacaagggcgtggatccctcaacccagaagagtgtttatgtcttcaagtgacctgtactgcttggggactatttgagaaaataaggtggagtcctacttgtttcacaaatatgtatctaagaatgttctagggcactctgggaacctataaaggcaggtatttcgggccctcctcttcaggaatcttcctgaagacatggcccagtcgaaggcccaggatggcttttgctgcggccccgtggggtaggagggacagagagacagggagagtcagcctccacattcagaggcatcacaagtaatggcacaattcttcggatgactgcagaaaatagtgttttgtagttcaacaactcaagacgaagcttatttctgaggataagctctttaaagacaaagctttattttcatctctcatcttttgtcctccttagcacaatgcaaaaaagaatagtaatatcagaacaggaaggaggaatggcttgctggggagcccatccaggacactgggagcacatagagattcacccatgtttgttgaacttagagtcattctcatgcttttctttataattcacacatatatgcagagaagatatgttcttgttaacattgtatacaacatagccccaaatatagtaagatctatactagataatcctagatgaaatgttagagatgctatatgatacaactgtggccatgactgaggaaaggagctcacgcccagagactgggctgctctcccggaggccaaacccaagaaggtctggcaaagtcaggctcagggagactctgccctgctgcagacctcggtgtggacacacgctgcatagagctctccttgaaaacagaggggtctcaagacattctgcctacctattagcttttctttatttttttaactttttggggggaaaagtatttttgagaagtttgtcttgcaatgtatttataaatagtaaataaagtttttaccatt

SEQ ID NO: 952 - protein, 291 aa, Homo sapien
MQRARPTLWAAALTLLVLLRGPPVARAGASSGGLGPVVRCEPCDARALAQCAPPPAVCAELVREPGCGCCLTCALSEGQPCGIYTERCGSGLRCQPSPDEARPLQALLDGRGLCVNASAVSRLRAYLLPAPPAPGNASESEEDRSAGSVESPSVSSTHRVSDPKFHPLHSKIIIIKKGHAKDSQRYKVDYESQSTDTQNFSSESKRETEYGPCRREMEDTLNHLKFLNVLSPRGVHIPNCDKKGFYKKKQCRPSKGRKRGFCWCVDKYGQPLPGYTTKGKEDVHCYSMQSK

SEQ ID NO: 953 - DNA, 2721 bp, Homo sapien
ccgcggcggcgtccggggtctccagtagggctgacgctccggtgctcgcacaatcccccgcctcggctggcaacgggcgtccctccactccccgagtccccggcagccgccgccaccccagcgcgccccgatctggccccctgccccgcgaagatggctgccgtacgccgggcccgcagttattgccgctgcctggtgcgcttctccgaccgagaactctgctaagctccgctgcagagacaggcaggagtagacacccggacacccagcacccctcctccggggggcggtgcagagggggcacggagagcccctcgagcgcagcaggccgccccgccagcatggcagaagctgaggaagattgtcattctgatactgtcagagcagatgatgatgaagaaaatgaaagtcctgctgaaacagatctgcaggcacaactccagatgttccgagctcagtggatgtttgaacttgctccaggtgtaagctctagcaatttagaaaatcgaccttgcagagcagcaagaggctctctccagaaaacatcggcagataccaaaggaaaacaagaacaggcaaaagaagaaaaggctcgagaactcttcctaaaagcagtagaagaagaacaaaatggagctctctatgaagccatcaagttttatcgtagggctatgcaacttgtacctgatatagagttcaagattacttatacccggtctccagatggtgatggcgttggaaacagctacattgaagataatgatgatgacagcaaaatggcagatctcttgtcctacttccagcagcaactcacatttcaggagtctgtgcttaaactgtgtcagcctgagcttgagagcagtcagattcacatatcagtgctgccaatggaggtcctgatgtacatcttccgatgggtggtgtctagtgacttggacctcagatcattggagcagttgtcgctggtgtgcagaggattctacatctgtgccagagaccctgaaatatggcgtctggcctgcttgaaagtttggggcagaagctgtattaaacttgttccgtacacgtcctggagagagatgtttttagaacggcctcgtgttcggtttgatggcgtgtatatcagtaaaaccacatatattcgtcaaggggaacagtctcttgatggtttctatagagcctggcaccaagtggaatattacaggtacataagattctttcctgatggccatgtgatgatgttgacaacccctgaagagcctcagtccattgttccacgtttaagaactagggaataccaggactgatgccaattctactgggtcactatcgcttggcacaagacacagaccatcagacccaaagtattttgctgtaataactaagaaaaaaaggaagaaaaaccacttggactataaatacccgatattttcgtcgtgtccctgtacaagaagcagatcagagttttcatgtggggctacagctatgttccagtggtcaccagaggttcaacaaactcatctggatacatcattcttgtcacattacttacaaatcaactggtgagactgcagtcagtgcttttgagattgacaagatgtacacccccttgttcttcgccagagtaaggagctacacagctttctcagaaaggcctctgtagagcctcaagtccagtcctctatcacttttgcatgaattaaagtatatagcgcaaaaaaaaaaaaaaaaactctctcctcgtgccgaattcggcacgagggactacaacctctcccaggtatgcgacgggaaagtatccgtccacgtcatcgagggtgaccaccgcacgctgctggagggcagcggcctggagtccatcatcagcatcatccacagctccctggctgagccacgcgtgagcgtgcgggagggctaggcccgtgcccccgcctgcaccggaggtcactcaccatccccaccccaccccacccccgccatgcaacgggattgaagggtcctgccggtgggaccctgtccggcccagtgccactgccccccgaggctgctagacgtaggtgttaggcatgtcccacccacccgccgcctcccacggcacctcggggacaccagagctgccgacttggagactcctggtctgtgaagagccggtggtgcccgtgcccgcaggaactgggctgggcctcgtgcgcccgtggggtctgcgcttggtctttctgtgcttggatttgcatatttattgcattgctggtagagacccccaggcctgtccaccctgccaagactcctcaggcagcgtgtgggtcccgcactctgcccccatttccccgatgtcccctgcgggcgcgggcagccacccaagcctgctggctgcggccccctctcggccaggcattggctcagcccgctgagtggggggtcgtgggccagtccccgaggagctgggcccctgcacaggcacacagggcccggccacacccagcggccccccgcacagccacccgtggggtgctgcccttatgcccggcgccgggcaccaactccatgtttggtgtttgtctgtgtttgtttttcaagaaatgattcaaattgctgcttggattttgaaatttactgtaactgtcagtgtacacgtctggaccccgtttcatttttacaccaatttggtaaaaatgctgctctcagcctcccacaattaaaccgcatgtgatctccaaaaaa

SEQ ID NO: 954 - DNA, 12004 bp, Homo sapien
gccgcgcactctccgcggcgctgggagagggcggagggggaggcggcgcgcggcgccagaggaggggggacgcagggggcggagcggagacagtaccttcggagataatcctttctcctgccgcagaggagaggagcggccggagcgagacacttcgccgaggcacagcagccggcaggatggcgaccgtggtggtggaagccaccgagccggagccgtccggcagcatcgccaacccggcggcgtccacctcgcctagcctgtcgcaccgcttccttgacagcaagttctacttgctggtggtcgtcggcgagatcgtgaccgaggagcacctgcggcgtgccatcggcaacatcgagctcggaatccgatcatgggacacaaacctgattgaatgcaacttggaccaagaactcaaactttttgtatctcgacactctgcaagattctctcctgaagtcccaggacaaaagatccttcatcaccgaagtgacgttttagaaacagtggtcctgatcaacccttctgatgaagcagtcagcaccgaggtgcgcttaatgatcactgatgctgcccgacacaagctgctcgtgctgaccgggcagtgctttgaaaataccggagagctcattctccagtccggctctttctccttccagaacttcatagagattttcaccgatcaagagatcggggagttactaagcaccacccatcctgccaacaaagccagcttaaccctgttctgtcctgaagaaggggactggaagaactccaatcttgacagacacaatctccaagacttcatcaatattaaactcaattcagcttctatcttgccagaaatggaaggactttctgagtttaccgagtatctctcagaatcagtggaagtcccatctccctttgacatcttggaacctcccacatcgggtggatttctgaagctctccaagccctgctgttatatttttccaggagggaggggcgattctgccttgtttgcagtgaatggtttcaatatgctcatcaatggcggatcagagagaaaatcctgcttctggaagctcatccgacacttagaccgagtggactccatcctgctcacccacattggggatgacaatttgcctggaataaacagcatgttacagcggaaaattgcagagctcgaggaagaacagtcccagggctccaccacaaatagtgactggatgaaaaacctcatctcccctgacttaggagttgtatttctcaatgtacctgaaaatctcaaaaatccagagccaaacatcaagatgaagagaagcatagaagaagcctgcttcactctccagtacctaaacaaattgtccatgaaaccagaacctctgtttagaagtgtaggcaatactattgatcctgtcattcttttccaaaaaatgggagtaggtaaacttgagatgtatgtgcttaatccagtcaagagcagcaaggaaatgcagtattttatgcagcagtggactggtaccaacaaagacaaggctgaattcattctgcctaatggtcaagaagtagatctcccgatttcctacttaacttcagtctcatctttgattgtgtggcatccagcaaaccctgcggagaaaatcatccgagtcctgtttcctgggaacagcacccagtacaacatcctggaagggttggaaaagctcaaacatctagactttctgaagcagccactggccacccaaaaggatctcactggccaggtgcccactcctgtggtgaaacaaacaaaactgaaacagagggctgatagccgagaaagtctgaagccagccgcaaaaccacttcctagcaaatccgtgcgcaaggagtcaaaagaagaaacccctgaggtcacaaaagtgaatcacgtggaaaagccacccaaagttgaaagcaaagaaaaggtaatggtgaaaaaagacaagccagtaaaaacagagaccaaaccttcagtgactgaaaaggaggttcccagcaaagaagagccatctccagtgaaagccgaggtggctgagaagcaagccacagatgtcaaacccaaagctgccaaggagaagacggtgaaaaaggaaacaaaggtaaagcctgaagacaagaaagaggagaaagaaaagccaaagaaagaagtggctaaaaaggaggacaaaacacctatcaagaaggaggaaaaaccaaaaaaggaagaggtgaaaaaagaagtcaaaaaagagatcaagaaagaagagaaaaaagaacccaagaaagaggttaagaaagaaacaccgccaaaggaagtcaagaaggaagttaagaaggaagagaagaaggaagtgaaaaaggaagaaaaggaacccaaaaaagaaattaagaagctccctaaagacgcaaagaaatcatctactcctctgtctgaagcaaaaaaaccagctgctttaaaaccaaaagtacccaagaaggaagagtctgtcaagaaagattctgttgctgccggaaagccaaaggagaaggggaaaataaaagtcattaagaaggaaggcaaggccgcagaggctgtcgctgcagctgtcggcactggagccaccacagcagctgtcatggcggcagctggaatagcagccattggccctgccaaagaactcgaagctgagaggtcccttatgtcatctcctgaggatctaaccaaggactttgaagagttaaaggctgaagaggtcgatgtaacaaaggacatcaagcctcagctggagctaatcgaagacgaagagaaactgaaggaaactgagccagtcgaagcctacgtcatccagaaggagagagaagtcaccaaaggtcctgccgagtcccctgatgagggaatcactaccactgaaggggagggcgaatgtgaacagacacctgaggagctggagcccgtcgagaagcagggagtagacgacattgaaaaatttgaagatgaaggagccggttttgaagaatcttcagagactggagactatgaagagaaggcagaaactgaggaggctgaggagccagaagaggatggggaggaacacgtatgtgtgagcgcctccaagcacagccccactgaggatgaggaaagtgccaaggcggaggctgatgcatacatcagggagaagagggagtctgtggccagtggggatgaccgagccgaagaagacatggatgaggccattgagaaaggagaggctgaacaatctgaagaggaggctgatgaggaggacaaagctgaagatgccagagaggaggaatatgagccggaaaaaatggaagctgaagactatgtgatggctgtggtcgacaaggctgcagaggctggtggtgccgaggagcagtatggattcctcaccacaccaaccaagcaactaggagcccagtctcctggccgagaacctgcatcttcaattcatgatgagactttacctggaggctcagagagcgaggccaccgcttctgatgaggagaatcgagaagaccagcctgaggaattcactgccacctctggctacactcagtctactattgagatatccagtgagcccacccccatggatgagatgtctacccctcgagacgtgatgagtgatgagaccaacaatgaagagacggagtccccttctcaggaattcgtaaatatcaccaaatatgaatcttcattgtattctcaggaatactctaaacctgctgatgttacaccgctcaacggattttctgaaggatcaaaaacagatgccactgatggcaaggattacaatgcttcagcctctaccatatcaccaccctcttccatggaggaagacaaattcagcagatctgctttacgtgatgcttactgctctgaagtgaaagccagcaccactttggacatcaaagatagcatctcagctgtttcaagtgaaaaggtcagcccatcgaagagcccgtccctgagtccatctccaccatcacccttagaaaagacccccctgggtgaacgtagtgtgaacttctctctgacgcccaatgagattaaagtctctgcagaggcagaagtagccccggtgtctcctgaggtgacccaagaagtagttgaagaacattgtgctagtcctgaggacaagactctggaagtggtgtcaccatctcagtccgtgactggcagtgctggtcacacaccttactatcaatctcctactgacgagaaatccagtcatctccctacagaagtcattgaaaaaccaccagcagttccagtgagttttgaattcagtgatgccaaagatgagaatgaaagggcttcagtaagccccatggatgagcccgtgcctgactcagagtctcctattgaaaaagttttgtctcctttacgcagcccgcccctcattggatccgagtctgcttatgaaagttttctaagtgctgatgacaaggcttctggcagaggtgccgaaagtccttttgaagaaaagagtggaaaacaaggctctccagaccaagtaagtccagtttctgaaatgacttctactagtctttaccaagacaaacaggaagggaaaagcacagactttgcaccaataaaagaagactttggccaagaaaagaaaactgatgatgttgaagccatgagttctcaaccagcactggctctggatgaaaggaaattaggagatgtttctcccacacaaatagatgtcagtcagtttggatcttttaaagaagacactaagatgtccatttctgaaggtactgtctcagacaagtcagctactcctgttgatgagggcgtagcagaagacacgtactctcatatggagggtgtggcctcagtgtccacagcctcagtggctacgagctcatttccagagccaacaacagatgatgtgtctccatctctgcatgctgaggttggctccccacattccacagaagtagatgactccctttcagtgtctgttgtgcaaacacctaccacattccaggaaacagaaatgtctccatctaaagaagaatgcccaagaccgatgtcaatttctccaccagatttctcccctaaaactgcaaagtccaggacacccgttcaagatcacagatctgaacagtcctcaatgtctattgaatttggccaagaatctcctgagcaatcccttgctatggacttcagtcgacagtctccagatcaccctacagtgggtgcaggcgtgcttcacatcactgaaaatgggccaactgaagtggactacagtccttctgacatgcaggactccagtttatcacataagataccacctatggaggagccgtcctacacccaagataatgatctttctgagctcatctcagtatctcaggtagaggcctccccgtccacctcttctgctcataccccttctcagatcgcttctcctctccaagaagatactctatccgatgttgctcctcccagagatatgtccttatatgcctcactcacctctgaaaaagtgcaaagtctggaaggagagaagctctctccaaaatctgatatctctccactcaccccacgagagtcctctcctttatattcacctactttttcagattctacctctgcagtcaaagagaaaacagcaacttgccacagttcctcttctccaccaatagatgcagcatccgcagagccctatggcttccgtgcctcagtgttattcgatacaatgcaacaccatctagccttgaatagagatttgtccacacctggcctggagaaggacagtggagggaagacacctggtgactttagctatgcctatcaaaagcctgaggaaacaaccaggtccccagatgaagaagattatgactatgagtcttatgagaagaccacccggacctcagatgtgggtggctattactatgagaagatagagagaaccacaaaatctccaagtgacagtggctactcctatgagaccattgggaaaactaccaagacccctgaagatggtgactattcctatgaaattattgagaagaccacacggacccctgaagagggtgggtactcatatgacataagtgaaaagaccaccagcccccccgaagtgagtggttacagctatgaaaagactgagaggtctagaaggcttctggatgacatcagcaatggctatgatgactctgaggatggtggccacacacttggggaccccagctactcttatgaaaccactgagaaaattaccagtttccctgagtctgaaggttattcctatgagacatctacaaagacaacacgaacccctgatacttccacatactgttacgagactgcagagaaaatcactagaacccctcaggcatccacatattcctacgagacttcagacctatgctacactgcagaaaagaagtccccctcagaagcccgtcaggatgtcgatttatgcctcgtgtcctcttgtgaatacaagcaccccaagacagagctttcaccctctttcattaatcccaatcctcttgagtggtttgccagtgaagaacccactgaagaatctgaaaagcccctcactcaatcagggggagccccaccgcctccaggaggaaagcaacagggccgacagtgtgatgaaacccctcccacctcagtcagcgagtcagccccatcccagaccgactctgatgttcccccggagactgaagagtgcccctccatcacggccgatgccaatatcgactctgaagacgagtcggaaaccatccccacagacaaaactgtcacgtacaaacacatggacccacctccagctcccgtgcaagaccgcagcccttcgccacgccaccctgatgtgtccatggtggacccagaggccttggccattgagcagaacctgggcaaagctctaaagaaagatctgaaagagaagaccaaaaccaaaaagccaggtacaaagaccaagtcatcttcacctgtcaaaaagagtgatgggaagtctaagcccttggcagcttcaccaaaaccagcgggcttgaaagaatcctcggataaagtgtccagggtggcttctcctaagaagaaagaatctgtggaaaaggcagcaaaacccaccaccactcctgaggtcaaagctgcacgtggggaagagaaagacaaggagaccaagaatgctgccaatgcctctgcatccaagtcggccaagaccgccactgcaggaccaggaactaccaagacgaccaagtcatctgctgtgcccccaggcctccctgtgtatttggacctgtgctacattcctaaccacagcaatagtaagaatgttgatgtggaatttttcaagagagtgcggtcttcctactacgtggtgagtgggaatgaccctgctgctgaggagcccagccgggctgtcctggacgctttgttggaaggaaaggctcagtggggcagcaacatgcaggtgacactgatcccaactcatgactcagaagtgatgagggaatggtaccaggagacccatgagaaacagcaagatctcaacatcatggttttagcaagcagcagcacagtggttatgcaagatgaatccttccctgcatgcaagattgaactgtaaaaaccaaggccagccacaccacaggatctgaactttgtttccagaaattcttcaatttgaaatcaccttttctaaaaagtcaattcatctagttaagtcgctgaacaattacctgccaaatgctatactgtgtcatggtgatgcaagtcactaaatttctcagtttttgctgattgctaagggaaataacagtatttccacaatagggttcaaattcctgcaaaattacctaccccagttcatctctgctgaacatttggaaaccatgcactagccaacccaactgacttctgctaggtagaggcatttgtcttagagagagagagagcgcgggagagagtgagagagagctgagagcacaaagataacgcaggtgagagagagagaaagaatgaggaaagaaaaggaatgcaagagaaggagatgtaatgacagagagttctggtgagatacccagagagaaaaagagagagcagggtggggtaaggaggagaaaataaaccaacaattaggtctgcattttctcaggcagtaggcattctttagtctacataggcaaagttttccatttttgtcagtctgagtcatcaaaaagagtcttaattttctaaaacaagttggctagaagaaagtaaaaagaacaacacttgttatgagggcatgtgatattttcacatcttaattaagctccttcagtttgaaggctgcacactgacataatgtagtgagtgtagactggccatgcaagtggtttgggccccattcagaactctcagactctaaacacacaagtagattgatctaaggcatgctcccagcatttgtccacccacttagtccactctgagtcgattaacctgcatgcagcaacacccaagtccaccccaattaactgaagcaaataccaaagcagttgggagtacatatggtagacaatttgccttaggaagtgacttgaatgtacaaagatacttgatgcacttattttttaatgtgagacagcaagtttataaaacatccatataggattatagatacttaaaggaacacgtgggtgagcgtgtgtgggggtactagaagctgatctgattggtccaacagtttgatgctgagtcatgcgtgttgaatcccacttcagtgcacctgtggcctctcagtcaaacaagttgtgcctttcacagcttctttactactgcaagttcaagactgaaatggcttctatgatcagaactgggaaaacagtgaatcttatggtggaagaggttctcagcaagtgtacagtatttaccttcctttgtcttacattggctttttaaattttccattaatttcaacataattatgggaacaagtgtacagaagaattttttttttaagatatgtgagaacttttcatagatgaactttttaacaaatgttttcatttacaggaaattgcaaagaaaattctcaagtgatagtcttttttttttaagtgtttcgtaagacaaaaattgaataatgttttttgaagttctggcaagattgaagtctgatattgcagtaatgatatttattaaaaacccataactaccaggaataatgatacctcccaccccttgattcccataacataaaagtgctacttgagagtgggggagaatggcatggtaggctacttttcagggccttgacaagtacatcacccagtggtatcctacatacttctttcaagatcttcaaccatgaggtaaaagagccaagttcaaagaaccctagcacaaatttgctttgggattttcttttctggaaaaaaaaaataaaagaaatagtacattgaaaacaaatgaattctcaactcctacggttcatgtagagtttagagaaaatttccatcattgtcatcattgaactgtgaacctgggaagccagatcatgattaacactgacatcaagtttcaagttgcagatcaatgcacccagtgttcagatgaggcaaacttctccgtgacaactgtgctgtgctctgtcacattacatttcctgcagactctaagatctacggagtagagaacaatgacctcattttattttctatgttagttatttatttcaaaattaacattttagttgatttttgtctgataagtctatgttttgcactgctaactatgatgagggtttaaaaaaatgcttcttcagggtcctttcactgaggacctatgcagtctacttaatgctgtgaattacatttttcaaatgtttaattttttaaagaaaattaatattctatttttgttaggcttctctagaaatgcagcttttatttattaccccatttctttcaagtccttggaaaataacatattaagggtacaagaaattaacacatgatggaaaagtcattgtgacgccaatgaatttcattgagtataaactcatctacttcaaatttattttataagacaacctaagatactcaagataattatttaatggttagctcttaagttgaattggtctacataatgcgtgggaagaaaaccagatttttagccttcttgccaaatccagacctctggttgatttttctttgacagaagatgcaagttattttccaatttcacaattaaatgtatttaacatgaacattattttgctttaaaaactataaacattgtaggagaattatagccagtcttcagttataaccactccaccctcctcactttctgctctctctctctcttttttttttgctatgggatttaatgggaaaaatatgtaaaaactgtcactagtcagctggctctttttcctatgaaatctatcagtacctttctccatccgttgttctcaataatgaccacagagcctgagtataccaagaaaaccaatattcgcattacaggttgctcctgtccttccagacacctttcctgcctgtgtgactaacctaattttgctagttccataaatacacgattagtttagtaacagccatcacaatgtaccatgtacattcatggtgagagctaaagatcgacacagacttctaggagctttgttcatactgattacttaatccaattgtatagattgaatatttgagtggaaggaatttacactctgtttaaatgatgggattctatcgagatagcactcatgatcatgacctttttggtagtattcttaaacaaaattctacagagactaaatgttagcgatgatcctccattttcaattttaaccaattctgtcccctttctcaaaaccctgagccctgtgcatgctttctcagtcttgtggtgggactggatacaatgactaacttcccctcctcccctctttaaacaccattttccatggagttcaaaaaattttttttcttaacgttacatatcatagtgaatggtttccccagtgtatatgaatgttttaagtgtctccaatagcttatgcagtctaggagctttccaatactcatttaattaagatttaatcatttgctaatggaaatcttaccacctttcattttccctctgttaccaaatttcagctcttaggagctgctctacaattctgaatttgcttttcttgcctctctttagtcacctgtcacaggaggttcctgctcagtaatgatattgtgagttaggataataactttttttttttgtgcttcagatttagaagaaaagatcctgtttccatttgaaaggaactgtaagcttttatcttttaaccaactgaacaatacaccaaaagcagcctagggatgagcatttctttgaaagcaattaggttattcacctggtattaaaactatttactgttaaaaaatctgtgacttcatgaagttgatttttaaaggcagcatcaaaaactgaaaaggaagggaaaaaataggcagcttctctgcacttgtttggagctccccaaaacaggagccatggagaagtggcatcaagaccgggctgccctttcgagaacaccctgtggcagttcagagacacgcttttcctacactgcatgcagcccctctttccagcactggaaagaagtggtcttgagcccagctgagaagcacttcacactcctctctcttgttctgaatggtgtttgtgtcagtctgcagctgtgtatggtattatgtcttataatcctgcatcacttctatcctatccagtcatatctaatgtagaaaattagtttccagtgaaagtaatatgtagtgcttttatgatatttgtgtgcaatatcccctcttccattgaggatatttgatgtaaaggaaaaaaaaaaactcagttccacaataaaatacaaaagtggcaaagttaaaaaaaatctatgtcggtgcggagaaagaggtaatgaaatggcaggaattcgatatcagcttatcgataccgcgacctcgagggggcccgtaccag

SEQ ID NO: 955 - protein, 2527 aa, Homo sapien
RALSAALGEGGGGGGARRQRRGDAGGGAETVPSEIILSPAAEERSGRSETLRRGTAAGRMATVVVEATEPEPSGSIANPAASTSPSLSHRFLDSKFYLLVVVGEIVTEEHLRRAIGNIELGIRSWDTNLIECNLDQELKLFVSRHSARFSPEVPGQKILHHRSDVLETVVLINPSDEAVSTEVRLMITDAARHKLLVLTGQCFENTGELILQSGSFSFQNFIEIFTDQEIGELLSTTHPANKASLTLFCPEEGDWKNSNLDRHNLQDFINIKLNSASILPEMEGLSEFTEYLSESVEVPSPFDILEPPTSGGFLKLSKPCCYIFPGGRGDSALFAVNGFNMLINGGSERKSCFWKLIRHLDRVDSILLTHIGDDNLPGINSMLQRKIAELEEEQSQGSTTNSDWMKNLISPDLGVVFLNVPENLKNPEPNIKMKRSIEEACFTLQYLNKLSMKPEPLFRSVGNTIDPVILFQKMGVGKLEMYVLNPVKSSKEMQYFMQQWTGTNKDKAEFILPNGQEVDLPISYLTSVSSLIVWHPANPAEKIIRVLFPGNSTQYNILEGLEKLKHLDFLKQPLATQKDLTGQVPTPVVKQTKLKQRADSRESLKPAAKPLPSKSVRKESKEETPEVTKVNHVEKPPKVESKEKVMVKKDKPVKTETKPSVTEKEVPSKEEPSPVKAEVAEKQATDVKPKAAKEKTVKKETKVKPEDKKEEKEKPKKEVAKKEDKTPIKKEEKPKKEEVKKEVKKEIKKEEKKEPKKEVKKETPPKEVKKEVKKEEKKEVKKEEKEPKKEIKKLPKDAKKSSTPLSEAKKPAALKPKVPKKEESVKKDSVAAGKPKEKGKIKVIKKEGKAAEAVAAAVGTGATTAAVMAAAGIAAIGPAKELEAERSLMSSPEDLTKDFEELKAEEVDVTKDIKPQLELIEDEEKLKETEPVEAYVIQKEREVTKGPAESPDEGITTTEGEGECEQTPEELEPVEKQGVDDIEKFEDEGAGFEESSETGDYEEKAETEEAEEPEEDGEEHVCVSASKHSPTEDEESAKAEADAYIREKRESVASGDDRAEEDMDEAIEKGEAEQSEEEADEEDKAEDAREEEYEPEKMEAEDYVMAVVDKAAEAGGAEEQYGFLTTPTKQLGAQSPGREPASSIHDETLPGGSESEATASDEENREDQPEEFTATSGYTQSTIEISSEPTPMDEMSTPRDVMSDETNNEETESPSQEFVNITKYESSLYSQEYSKPADVTPLNGFSEGSKTDATDGKDYNASASTISPPSSMEEDKFSRSALRDAYCSEVKASTTLDIKDSISAVSSEKVSPSKSPSLSPSPPSPLEKTPLGERSVNFSLTPNEIKVSAEAEVAPVSPEVTQEVVEEHCASPEDKTLEVVSPSQSVTGSAGHTPYYQSPTDEKSSHLPTEVIEKPPAVPVSFEFSDAKDENERASVSPMDEPVPDSESPIEKVLSPLRSPPLIGSESAYESFLSADDKASGRGAESPFEEKSGKQGSPDQVSPVSEMTSTSLYQDKQEGKSTDFAPIKEDFGQEKKTDDVEAMSSQPALALDERKLGDVSPTQIDVSQFGSFKEDTKMSISEGTVSDKSATPVDEGVAEDTYSHMEGVASVSTASVATSSFPEPTTDDVSPSLHAEVGSPHSTEVDDSLSVSVVQTPTTFQETEMSPSKEECPRPMSISPPDFSPKTAKSRTPVQDHRSEQSSMSIEFGQESPEQSLAMDFSRQSPDHPTVGAGVLHITENGPTEVDYSPSDMQDSSLSHKIPPMEEPSYTQDNDLSELISVSQVEASPSTSSAHTPSQIASPLQEDTLSDVAPPRDMSLYASLTSEKVQSLEGEKLSPKSDISPLTPRESSPLYSPTFSDSTSAVKEKTATCHSSSSPPIDAASAEPYGFRASVLFDTMQHHLALNRDLSTPGLEKDSGGKTPGDFSYAYQKPEETTRSPDEEDYDYESYEKTTRTSDVGGYYYEKIERTTKSPSDSGYSYETIGKTTKTPEDGDYSYEIIEKTTRTPEEGGYSYDISEKTTSPPEVSGYSYEKTERSRRLLDDISNGYDDSEDGGHTLGDPSYSYETTEKITSFPESEGYSYETSTKTTRTPDTSTYCYETAEKITRTPQASTYSYETSDLCYTAEKKSPSEARQDVDLCLVSSCEYKHPKTELSPSFINPNPLEWFASEEPTEESEKPLTQSGGAPPPPGGKQQGRQCDETPPTSVSESAPSQTDSDVPPETEECPSITADANIDSEDESETIPTDKTVTYKHMDPPPAPVQDRSPSPRHPDVSMVDPEALAIEQNLGKALKKDLKEKTKTKKPGTKTKSSSPVKKSDGKSKPLAASPKPAGLKESSDKVSRVASPKKKESVEKAAKPTTTPEVKAARGEEKDKETKNAANASASKSAKTATAGPGTTKTTKSSAVPPGLPVYLDLCYIPNHSNSKNVDVEFFKRVRSSYYVVSGNDPAAEEPSRAVLDALLEGKAQWGSNMQVTLIPTHDSEVMREWYQETHEKQQDLNIMVLASSSTVVMQDESFPACKIEL

SEQ ID NO: 956 - DNA, 353 bp, Homo sapien
atatacatatatgtatatatatgcacatatatatatgtatttaaaaaaatcaaaacaaaaaaaaactcatttatacctgtgtattttttaaagctacaatctgttcaatgtttttaaaaatctgtttatatgacattgttaaaataaagttggtcttttgacgagagggaggatgtcacggtcagttgtaactttgccttcacaaggcaactggggtggggggtgggggtagtgtgcctccttgacatttcgttcaagttatagattcaatggagctatgtcttgttttaagttgctttaatgcattgtattagatcttcaaacagaataaaggttgttttgaaactgacagt

SEQ ID NO: 957 - protein, 38 aa, Homo sapien
IYIYVYICTYIYVFKKIKTKKNSFIPVYFLKLQSVQCF

SEQ ID NO: 958 - DNA, 3372 bp, Homo sapien
tacaaccaggctcaactgttgcatggtagcagatttgcaaacatgagtgctgaggggtaccagtacagagcgctgtatgattataaaaaggaaagagaagaagatattgacttgcacttgggtgacatattgactgtgaataaagggtccttagtagctcttggattcagtgatggacaggaagccaggcctgaagaaattggctggttaaatggctataatgaaaccacaggggaaaggggggactttccgggaacttacgtagaatatattggaaggaaaaaaatctcgcctcccacaccaaagccccggccacctcggcctcttcctgttgcaccaggttcttcgaaaactgaagcagatgttgaacaacaagctttgactctcccggatcttgcagagcagtttgcccctcctgacattgccccgcctcttcttatcaagctcgtggaagccattgaaaagaaaggtctggaatgttcaactctatacagaacacagagctccagcaacctggcagaattacgacagcttcttgattgtgatacaccctccgtggacttggaaatgatcgatgtgcacgttttggctgacgctttcaaacgctatctcctggacttaccaaatcctgtcattccagcagccgtttacagtgaaatgatttctttagctccagaagtacaaagctccgaagaatatattcagctattgaagaagcttattaggtcgcctagcatacctcatcagtattggcttacgcttcagtatttgttaaaacatttcttcaagctctctcaaacctccagcaaaaatctgttgaatgcaagagtactctctgaaattttcagccctatgcttttcagattctcagcagccagctctgataatactgaaaacctcataaaagttatagaaattttaatctcaactgaatggaatgaacgacagcctgcaccagcactgcctcctaaaccaccaaaacctactactgtagccaacaacggtatgaataacaatatgtccttacaaaatgctgaatggtactggggagatatctcgagggaagaagtgaatgaaaaacttcgagatacagcagacgggacctttttggtacgagatgcgtctactaaaatgcatggtgattatactcttacactaaggaaagggggaaataacaaattaatcaaaatatttcatcgagatgggaaatatggcttctctgacccattaaccttcagttctgtggttgaattaataaaccactaccggaatgaatctctagctcagtataatcccaaattggatgtgaaattactttatccagtatccaaataccaacaggatcaagttgtcaaagaagataatattgaagctgtagggaaaaaattacatgaatataacactcagtttcaagaaaaaagtcgagaatatgatagattatatgaagaatatacccgcacatcccaggaaatccaaatgaaaaggacagctattgaagcatttaatgaaaccataaaaatatttgaagaacagtgccagacccaagagcggtacagcaaagaatacatagaaaagtttaaacgtgaaggcaatgagaaagaaatacaaaggattatgcataattatgataagttgaagtctcgaatcagtgaaattattgacagtagaagaagattggaagaagacttgaagaagcaggcagctgagtatcgagaaattgacaaacgtatgaacagcattaaaccagaccttatccagctgagaaagacgagagaccaatacttgatgtggttgactcaaaaaggtgttcggcaaaagaagttgaacgagtggttgggcaatgaaaacactgaagaccaatattcactggtggaagatgatgaagatttgccccatcatgatgagaagacatggaatgttggaagcagcaaccgaaacaaagctgaaaacctgttgcgagggaagcgagatggcacttttcttgtccgggagagcagtaaacagggctgctatgcctgctctgtagtggtggacggcgaagtaaagcattgtgtcataaacaaaacagcaactggctatggctttgccgagccctataacttgtacagctctctgaaagaactggtgctacattaccaacacacctcccttgtgcagcacaacgactccctcaatgtcacactagcctacccagtatatgcacagcagaggcgatgaagcgcttactctttgatccttctcctgaagttcagccaccctgaggcctctggaaagcaaagggctcctctccagtctgatctgtgaattgagctgcagaaacgaagccatctttctttggatgggactagagctttctttcacaaaaaagaagtaggggaagacatgcagcctaaggctgtatgatgaccacacgttcctaagctggagtgcttatcccttctttttctttttttctttggtttaatttaaagccacaaccacatacaacacaaagagaaaaagaaatgcaaaaatctctgcgtgcagggacaaagaggcctttaaccatggtgcttgttaatgctttctgaagctttaccagctgaaagttgggactctggagagcggaggagagagaggcagaagaaccctggcctgagaaggtttggtccagcctggtttagcctggatgttgctgtgcacggtggacccagacacatcgcactgtggattatttcattttgtaacaaatgaacgatatgtagcagaaaggcacgtccactcacaagggacgctttgggagaatgtcagttcatgtatgttcagaagaaattctgtcatagaaagtgccagaaagtgtttaacttgtcaaaaaacaaaaacccagcaacagaaaaatggagtttggaaaacaggacttaaaatgacattcagtatataaaatatgtacataatattggatgactaactatcaaatagatggatttgtatcaataccaaatagcttctgttttgttttgctgaaggctaaattcacagcgctatgcaattcttaattttcattaagttgttatttcagttttaaatgtaccttcagaataagcttccccaccccagtttttgttgcttgaaaatattgttgtcccggatttttgttaatattcatttttgttatccttttttaaaaataaatgtacaggatgccagtaaaaaaaaaaatggcttcagaattaaaactatgaaatattttacagtttttcttgtacagagtacttgctgttagcccaaggttaaaaagttcataacagattttttttggactgttttgttgggcagtgcctgataagcttcaaagctgctttattcaataaaaaaaaaacccgaattcactgg

SEQ ID NO: 959 - protein, 724 aa, Homo sapien
MSAEGYQYRALYDYKKEREEDIDLHLGDILTVNKGSLVALGFSDGQEARPEEIGWLNGYNETTGERGDFPGTYVEYIGRKKISPPTPKPRPPRPLPVAPGSSKTEADVEQQALTLPDLAEQFAPPDIAPPLLIKLVEAIEKKGLECSTLYRTQSSSNLAELRQLLDCDTPSVDLEMIDVHVLADAFKRYLLDLPNPVIPAAVYSEMISLAPEVQSSEEYIQLLKKLIRSPSIPHQYWLTLQYLLKHFFKLSQTSSKNLLNARVLSEIFSPMLFRFSAASSDNTENLIKVIEILISTEWNERQPAPALPPKPPKPTTVANNGMNNNMSLQNAEWYWGDISREEVNEKLRDTADGTFLVRDASTKMHGDYTLTLRKGGNNKLIKIFHRDGKYGFSDPLTFSSVVELINHYRNESLAQYNPKLDVKLLYPVSKYQQDQVVKEDNIEAVGKKLHEYNTQFQEKSREYDRLYEEYTRTSQEIQMKRTAIEAFNETIKIFEEQCQTQERYSKEYIEKFKREGNEKEIQRIMHNYDKLKSRISEIIDSRRRLEEDLKKQAAEYREIDKRMNSIKPDLIQLRKTRDQYLMWLTQKGVRQKKLNEWLGNENTEDQYSLVEDDEDLPHHDEKTWNVGSSNRNKAENLLRGKRDGTFLVRESSKQGCYACSVVVDGEVKHCVINKTATGYGFAEPYNLYSSLKELVLHYQHTSLVQHNDSLNVTLAYPVYAQQRR

SEQ ID NO: 960 - DNA, 1310 bp, Homo sapien
gctcggagcccggagcgtgcctcggcggcctgtcggttttcaccatggagcagctgagctcagcaaacacccgcttcgccttggacctgttcctggcgttgagtgagaacaatccggctggaaacatcttcatctctcccttcagcatttcatctgctatggccatggtttttctggggaccagaggtaacacggcagcacagctgtccaagactttccatttcaacacggttgaagaggttcattcaagattccagagtctgaatgctgatatcaacaaacgtggagcgtcttatattctgaaacttgctaatagattatatggagagaaaacttacaatttccttcctgagttcttggtttcgactcagaaaacatatggtgctgacctggccagtgtggattttcagcatgcctctgaagatgcaaggaagaccataaaccagtgggtcaaaggacagacagaaggaaaaattccggaactgttggcttcgggcatggttgataacatgaccaaacttgtgctagtaaatgccatctatttcaagggaaactggaaggataaattcatgaaagaagccacgacgaatgcaccattcagattgaataagaaagacagaaaaactgtgaaaatgatgtatcagaagaaaaaatttgcatatggctacatcgaggaccttaagtgccgtgtgctggaactgccttaccaaggcgaggagctcagcatggtcatcctgctgccggatgacattgaggacgagtccacgggcctgaagaagattgaggaacagttgactttggaaaagttgcatgagtggactaaacctgagaatctcgatttcattgaagttaatgtcagcttgcccaggttcaaactggaagagagttacactctcaactccgacctcgcccgcctaggtgtgcaggatctctttaacagtagcaaggctgatctgtctggcatgtcaggagccagagatatttttatatcaaaaattgtccacaagtcatttgtggaagtgaatgaagagggaacagaggcggcagctgccacagcaggcatcgcaactttctgcatgttgatgcccgaagaaaatttcactgccgaccatccattccttttctttattcggcataattcctcaggtagcatcctattcttggggagattttcttccccttagaagaaagagactgtagcaatacaaaaatcaagcttagtgctttattacctgagtttttaatagagccaatatgtcttatatctttaccaataaaaccactgtccagaaaaaaaaaaaaaaaaaaaa

SEQ ID NO: 961 - protein, 379 aa, Homo sapien
MEQLSSANTRFALDLFLALSENNPAGNIFISPFSISSAMAMVFLGTRGNTAAQLSKTFHFNTVEEVHSRFQSLNADINKRGASYILKLANRLYGEKTYNFLPEFLVSTQKTYGADLASVDFQHASEDARKTINQWVKGQTEGKIPELLASGMVDNMTKLVLVNAIYFKGNWKDKFMKEATTNAPFRLNKKDRKTVKMMYQKKKFAYGYIEDLKCRVLELPYQGEELSMVILLPDDIEDESTGLKKIEEQLTLEKLHEWTKPENLDFIEVNVSLPRFKLEESYTLNSDLARLGVQDLFNSSKADLSGMSGARDIFISKIVHKSFVEVNEEGTEAAAATAGIATFCMLMPEENFTADHPFLFFIRHNSSGSILFLGRFSSP

SEQ ID NO: 962 - DNA, 5307 bp, Homo sapien
ccacgcgcggcgccgctcggtgcagaccatgaattacgtggggcagttagccggccaggtgtttgtcaccgtgaaggagctctacaaggggctgaatcccgccacactctcagggtgcattgacatcattgtcatccgccagcccaatggaaacctccaatgctcccctttccacgtccgctttgggaagatgggggtcctgcgctcccgagagaaagtggttgacatagaaatcaatggggaatctgtggatttgcatatgaaattgggagataatggagaagcattttttgttcaagaaacagataatgatcaggaagttatccctatgcacctggccacctcccccatcctgtcagaaggagcttcgagaatggaatgccagctgaaaaggggctctgtggacaggatgagaggcctggaccccagcacgccagcccaagtgatcgctcccagcgagacgccgtcaagcagctctgtagtaaagaagagaagaaaaaggaggagaaagtcacagctggacagcctgaagagagatgacaacatgaacacatctgaggatgaggacatgttccccatcgagatgagctcggatgaggccatggagctgctggagagcagcagaactcttcctaatgatatacctccattccaagatgatattcctgaggaaaacctctccctggctgtgatttaccctcagtcagcctcataccctaattcggatagagagtggtcacccactcccagtccttccggttcccgaccttcaacacctaaaagtgattcagaattggtcagcaagtccacggaaaggacagggcagaagaacccagaaatgctttggctgtggggagagctgccgcaggctgctaagtcttcttctccacacaagatgaaagagtccagcccattgagcagtagaaaaatttgtgataaaagtcactttcaggccattcacagcgaatcttcagacacttttagtgaccaatcgccaactctggtcggtggggcacttttggaccagaacaagcctcagacagaaatgcagtttgtgaatgaagaagacctggagaccttaggagcagcagcgccactcttgcccatgatcgaggagctcaaacccccctctgccagtgtagtccagacagcaaacaagacggattctccttccaggaaaagagataaacgaagccgacatcttggtgctgacggcgtctacttggatgacctcacagacatggatcctgaagtggcggccctgtattttcccaaaaacggagatccttccggactcgcaaaacatgcaagcgacaacggagcccggtcagccaaccagtccccgcagtcggtgggcagctcgggcgtggacagtggcgtggagagcacctcggacgggctgagggacctcccttccatcgccatctccctctgcgggggcctcagcgaccaccgggagatcacgaaagatgcattcctggagcaagctgtgtcatatcaacagtttgtggacaaccccgctattatcgatgaccccaatctcgtggtaaagattgggagtaaatattataactggacaacagcagcacccctcctcctggcaatgcaggccttccagaaacctttgccaaaggccactgtggaatctatcatgagggataaaatgcccaaaaagggaggaagatggtggttttcatggaggggaagaaacaccacaatcaaggaggaaagtaagccagagcagtgcttggctggcaaggcccatagcaccggagagcaaccgccgcagctcagcttggccaccagggtaaagcatgaatcatcctccagtgatgaggagcgcgcagctgccaagccatcaaacgcaggccacctccctcttctgcctaatgtcagctacaagaagactctccggctgacttccgagcagcttaaaagcttgaagttgaagaatggccccaacgacgtggttttcagtgtcaccacgcagtaccaaggcacgtgccgctgtgagggcaccatctatctgtggaactgggatgataaagtcatcatttctgatattgatgggacaattaccagatcagatactcttggccacattttgcccacccttgggaaggattggacccatcagggcatcgctaagctgtaccataaagtgagccagaatggatataaatttctctactgttctgcccgtgccatcgggatggcggacatgacgcggggctacctgcactgggtcaacgagaggggcacggtgctgccccaggggcccctgctgctgagtcccagcagcctcttctctgccctgcacagagaagtgattgaaaagaagccagaaaagtttaaagtccagtgtttgacagacatcaaaaacctgtttttccccaacacagaacccttttatgctgcttttggaaaccgaccagctgatgtgtattcatacaagcaagtaggagtgtctttgaatagaatatttaccgtcaaccctaaaggagagctggtacaggaacatgcaaagaccaacatctcttcgtatgtgagactctgtgaagtagtcgaccacgttttcccgttgctgaaaagaagccattcttcagactttccctgttcggataccttcagtaacttcaccttttggagagagccactgccaccttttgaaaaccaggacattcattctgcctcagcgtaaaatgtcccaagcagcctcttgccagcagtgcagagcctggttgtcacccattaaaggataggtctccccggagtgcacagctccacctgggagcctggcgcgtcatcattggcctgacagcagagagaattgagaagcatttctcccctgccccaccccggggctgacatttctaagcaagataggaagggagcactttctaggctaggagttgggtgcatttgtaccgtgaaaagcattcctcagttgtggcttaatgccagttacgacgctgcctttccggcctgctccagcaagtagctactggttcacgtgcagtttggggctgtgaaacctaggcagaaggcggctgtctgagggctgtccccgcctaggacagggtcaatcgaggaatgccagatgtgcacggtttttggcaaagtagggggcacatttccattatagcaatgttagtgccaccaccttctgaacacagtggggagggctgtgaaggctcatgtgacctggatctgaggtctctgatagaaatctggacgccaccgggtccaggcctggcctcagacttggccttgtggatgggccccttacagtatttgctgactagtctcatttttaggtgataagtttttctttaattcctttggttaaagatagtctatttcattggcatatctccccccagtttttgtggctcaaggctggaatatttatgccttaatatatctatggcagacatttaagaatgcgctttatctagctcatggtaactttgcaacgccttagattaaaatgacagtaaatattactaaggcagtattttgaatgagtttgacactgccggcttccttccatccagcgaggtggtgctgacagtgtggacttgagcacacttatgccaaatgataatgatactgacttctgttgggagctctccaaagaaactggttggttttaagaaaatagtttcaagaagttcaactatattcttttagatattatgtattgttttactctgattaggttactgtgataggcatttattcatattctttctataccactgtcattaatatattaaaaagatgtatgtgttagactatcgaaagggccttattctctctttctcatagactgaccttcttttggaatttctgagtcatttattttccttagctttttccactcaaattaagggcaagcgaaaaagtaataatttggcattctttaagcctacagaatgtgattctttcacttgtttattacactggctcgtggacagaacaatttgaaaagtgaaagaattattttggtaaaagattttgctttacttttcgaagcattatttttttaaagagtgttttactccaacgattgaaacattttcctatttaaatttcatcgttagaatcacaggaggcaaaaaatggaacggttgaatgaaattttactctttctgtgaaagaaaatccacagagttgttgcctccgttgtagttggtgggccccgttagcattggatgcctttgccaaatggttcatgtggacacacaaaggcaaacagatctgccatcgatcgcagatttctgtagaaacacggatgtgcatgtgcagattcccttttgcaggtattaaaaataattaaaaatagtcctgcctgaggttgcagtgagccgagcttgcactactgcactccagcctgggtgacagagtaagactccatgtcaaaaaaaaaaaaaaaaaaaaaaagtcctgccttaactaactcctctgcgcttgttcactagtaacctaaagaggctatattcattctttatgcaatgagggtatttttgagtgaattttaactgctctgaactaagtataagctcatgggcctgcaaaggttcagacggtttctcctttgcacccaggaggaactttggctgcgagaatggggggatgtatccctcatgcagttggcatccaggcagccctctgcagcagcacaccctgcaggcggagttttcagaggatgcaattttggatcccgaattttgatgtaccttaaacttccacatcactgcaccctgaaacagagcatgctttccagaaagtcacactctcagatctgtgtcaagttcaatgtgagccctggcaaggctggcatattaacacctgccttctggcttctgaaagtgagatttgtatatgggctgcactcacgcatatacgagttggtttatctttgtgtacatgactataacccagtgatgctgaggtcatgtgctggaatgctgtatttggaccacacatttcaaagttgccctatggaaatgaatcctacttagtgacaagtcatcaaatgtttgtcacatgtgatgaagacaaatatgtatacctggcatagagaaaaatatatacctggtacattggagaaaaataattacactttcaaagagaattccctttgcaattttatgtttggatcaccactgtaagcacactttatttgcatttgatctgtatttgtatatgctgatgcaatgataaaaatcactgtaatacttcattgtgttgtactggatgcaaagctagaaaatattgcaataaatgagaccgatgaaagac

SEQ ID NO: 963 - DNA, 2002 bp, Homo sapien
ctcttctcacatcagcgggtccaggcccaaccgacagactatgggggctccttcaccaggcgctgcgtggagtggctgctgggcctctacttcctcagccacatccccatcaccctgttcatggacctgcaggcggtcgtgccgcgcgagctctacccagtcgagtttagaaacctgctgaagtggtatgctaaggagttcaaagacccactgctacaggagcccccagcctggtttaagtcctttctgttttgcgagcttgtgtttcagctgcctttctttcccattgcaacgtatgccttcctcaaaggaagctgcaagtggattcgaactcctgcaatcatctactctgttcacaccatgacaaccttaattctgatactctccacatttctgtttgaggatttctccaaagccagtggtttcaagggacaaagacctgagactttgcatgaacggttaacccttgtgtctgtctatgccccctacttactcatcccattcatacttttaattttcatgttgcggagcccctactacaagtatgaagagaaaagaaaaaaaaaatgaaggaaacaaccactggcccagggtagagatgcctacagggtggttgcttgttggatacatacaggaacactgctcagaacccacgtcttcagcagcatttgaaacactggcagcaatgcacaagagcaagatggtgtcaggaaccatgtcaaaccctcaccttcttccattttttttttttttttgagacagtctcactctgttgccaggctggagtaaagggcagtggcatgatctcggctcactgcaacctccgcctcctgggctcaagccatcttccttagcctcccaagtagctagaactacaggtgtgtaccaacacgtatggctaatttgttttgttttttttgtgtgtgtggagacagggttttgccatgttgcccaggttggtctcgaacgcctaggctcaagtgatctgcccacctcagtctccctaagtgctgggattacagacgtgaaccactgggcccagcccaaaccttcaccttctaagggcactgggatgaacagaccgatcggcttgagggtgggcaaaggggtgtgggctaggttataaggaagtggtaccaaataactgtgttgcctgagttccaccgcaagattactaaaagcaggaccagaccagaaactgctaaagaacatggcctgtttgacatgttcatgagtcacctgacccacagcatatatgcttatgactaaaccctccactcctgattctcaagagtgtatcacctgtcagcaaaatgaatagtgggatattttgggccattttaaatgtgaaattttgcctctttaatgttaattcaaaactatatcaatgttttcttgttcccacctctaacccaaggaaaaaagagaaaacatactatgcaaaggaagtttaaacttaagttttccttaagggtcagcccaacaatgactttcagtcaaatggattaaactggaaaatgtttttgtttctgttgtaaacagatcatcctaggcgaaagttttttttgtttgtttgcttttaaattagtttatttctaaatcttagtcttccacatttctagaggccacctgacacaagtccctgtatctgaagtctagcatctcaaggctgatctggaagtgtgctagtatgctccctagtggataacttaatcttttaatacagttccgtcattcccatcttgttttcagaagagaaggtggctacagccaggcataacttatccactgtgtgcatagagggtctcttcacgttgatgcttggcattccatcagctttctctaagtctttgctcaagttcaaggttaaaatgatgttagacaacaggtcccagtcagtcccctctattttcacccattttgctcacaagccatattggcccgattagtggtactgtctgactcacgtgtgtgatccaaataaaggtagctgccgggaatt

SEQ ID NO: 964 - DNA, 2023 bp, Homo sapien
gaaaggaccagccaggtctggtgtggaggtcctatttaatgaattagaaattcccgtggaagaatactcctttggtagatcaaagatattcatccgaaacccaagaacattattcaaattagaagacctgaggaagcaacgcctggaggacttggccactctcattcagaagatatatcgggggtggaaatgccgcacacacttcctgctaatgaaaaaaagccaaattgtgattgccgcctggtacaggagatatgcgcaacaaaagaggtaccagcagacaaagagttccgccttagtaattcagtcttatatccggggttggaaggctcgaaaaattctgcgggaactgaagcatcaaaagcgctgtaaggaagcagtcacgaccattgctgcatattggcatgggacccaggtacgtagagaatacaggaaattcttcagagccaatgctggaaagaaaatctatgagtttacgcttcagagaattgtgcaaaaatacttcttggaaatgaaaaataagatgccttccttatctccaatagacaagaattggccctcaagaccttacttattcttggattctactcacaaggagctaaaaaggattttccacttgtggaggtgtaaaaaatacagggaccaattcacagaccagcagaaacttatttatgaagagaaactagaagccagtgaactcttcaaagacaagaaggctttatacccatctagtgttgggcaaccattccaaggggcttacctggaaatcaacaagaaccccaagtataagaaactcaaagatgccattgaagaaaagatcatcattgctgaagtcgtgaacaaaattaaccgtgctaatgggaagagtacatctcggattttcctcttaacaaacaataatctccttcttgctgaccaaaagtctggacaaatcaagtcagaggttccactggtggatgtgaccaaggtatcaatgagctcacaaaatgatggcttcttcgccgtccacctcaaagagggctcagaagcagctagtaaaggagactttctcttcagcagtgatcacctgattgaaatggccaccaagctctatcgcacaactctcagccaaaccaaacagaagctcaatattgagatttccgatgagttcctggtacagttcagacaggacaaagtatgtgtgaagtttattcagggaaaccagaaaaatgggagtgtcccaacatgtaaacgaaaaaacaaccgtctccttgaagttgctgtcccttaactggcgcctcctctctactttcatggacttgttcctttgtaatagtgcaatttggttttgttttatttggggttcattgtatgtttgggaatcaccaaaggcttttagagttctttggcaaaataaaaatatttgactaatcaatttttattattggaatagttttaacctttcaaatacatgttctgtcctggagcaggattgtagaaactaacagtgtctattttcatgtctgatgtgttcttcctttagtcatcatgttaggtctgtgtaccctaaatcagcatattactcataaatcattaattaatataagcataggaaatggtcttaaaagatactgcattcattcatcagatatttattccatgcctactctatgctaggcactgtgctagatggtatgaaaacttattaggaacctttttgtttttgagaccattgcattctggctggtttgtgctggtttaacgacatctaagaaggtttagaaatggtgagaccaaaacaataactgttaatgatggacagcattattaggaaccctgtagtatgatatttaacaatataggcttcaagaagggctggtctcaagagggggcagaaatgaatgaccaggttaaatccctctacatgtggtttctgtttgaaaaaaagaaaactgacatttgaacaggacttttaatttgtttaaaactctggtaattacttgtaacagtagaaaatagaagtcattcttattttagaaaaagt

SEQ ID NO: 965 - DNA, 6578 bp, Homo sapien
ggtgaacagctcaaatccattttttacatcacagaccaaagccaatgggaatcctgcttgttcggcccagttgcagcatgtctcgccacccatttttccagctcatttagcaagtgtgtcaactccattgttgtcctcaatggaaagtgtcataaatccaaatataacttctcaggataaaaatgaacaaggtggtatgttatgttcccaaatggaaaatttacctagtactgccttgccagcacaaatggaagatctaaccaaaacagttctgcctttgaatattgacagtggctcagatcctttccttcctttacctgcagaaagtagttcaatgtctctcttcccttcaccagcagatagtgggactaattctgttttttcccaactggaaaataatacaaatcattattcctcacagattgaaggaaacactaattcctcctttctaaaggggggtaatggtgaaaatgcagtttttccttcacaagtgaatgttgcaaataacttcagtagcaccaatgcccaacagtctgcacctgaaaaagttaaaaaagaccgtgggcggggcccaaatgggaaggaaagaaaacctaagcacaacaaaagggctaaatggcctgcaattatcagagatgggaaatttatctgtagcaggtgttacagggcttttactaatcccagatcactgggtgggcacttatccaagcgatcttactgtaaaccactggatggagccgaaattgctcaagaacttctacagagtaatggacagccttctcttcttgccagcatgattctctccacaaatgcagtaaatttgcagcagccacaacaatctaccttcaatccagaagcatgttttaaagatccatcatttctacagcttcttgctgaaaatcgctcgccagcatttttaccaaatacatttcctcgatctggtgtgactaactttaataccagtgtcagtcaagaaggtagtgaaattattaaacaggctttggaaactgctggcattcccagtacatttgagggtgccgaaatgctttctcatgtttcaacaggttgtgtctctgatgcatcacaagtaaatgcaacggtgatgccaaatccaactgtaccacccctgttgcacactgtatgccatccaaacaccttgctgaccaaccagaataggacgtcaaactccaaaacttcctccattgaggaatgtagcagcttgcctgtttttccaacgaatgacttactactgaagactgttgaaaatggtttgtgctctagttcatttcctaattctggtgggccatcacaaaattttaccagtaacagttctcgtgtttctgttataagtggtcctcagaacacaagatccagtcatttaaataaaaagggaaacagtgcttctaagagaagaaagaaagttgctcctccactaattgcacctaacgcttcccaaaacttggtaacaagtgacttaacaacaatgggactcatagcaaagagtgttgaaatcccaactactaaccttcattcaaatgtaattccaacttgtgaacctcagagtttggtggaaaatctaacacagaaattaaataatgttaacaatcagttatttatgactgatgtaaaagagaatttcaaaaccagtcttgagtcccatacagtgttagcccctttaacattaaaaactgaaaatggtgattcccaaatgatggctttgaattcatgcacaacttcagtaaattctgatttgcagatttctgaagacaatgttatacaaaactttgaaaagactcttgaaattattaaaactgctatgaattctcaaatacttgaggtaaaaagtggatctcagggtgctggtgaaacttcacaaaatgctcaaataaattataacattcagcttccttcagtaaacactgtgcaaaataacaaattacccgattcttctccgttttcctcctttataagtgtcatgccaacaaaaagtaacattcctcagtctgaagtatcacataaggaggatcaaatacaggaaattttagaaggcttacagaaattaaaattagaaaatgacctatccactccagcatcccaatgtgtactgataaatacatcagtgacactgactcccacgcctgttaaatcaactgcagatatcacagttattcagccagtttctgaaatgataaacattcaatttaatgacaaagttaataaaccctttgtgtgtcaaaaccaaggctgtaactacagtgctatgacaaaggatgcactatttaagcactatggtaaaattcatcaatacactccagaaatgattcttgaaattaagaagaatcaattgaaatttgctccctttaaatgtgtagtacctacatgtacaaaaacatttacaagaaattctaacctccgggcacactgtcagttggtgcatcattttacaactgaagaaatggtaaagttaaaaattaaaaggccttatggaagaaaatctcagagtgaaaatgtgccggcctcacgaagtacacaagtgaaaaaacagctagctatgacagaggaaaataaaaaggaatctcagcctgctttagaattgagagcagagacccaaaatacccacagtaatgtagcagtgatcccagaaaaacaacttatagaaaaaaaaagtcctgacaaaacagaaagttctttacaagtgattacagttacttcagaacaatgtaatacaaatgcactcacaaacacacaaaccaaaggacggaagattaggaggcataaaaaagaaaaggaggagaaaaaacgaaagaagccagtttcccaatcccttgagtttccaacaagatacagtccttacagaccttatcgatgtgttcaccagggatgctttgctgcctttacgatacagcaaaatttgattctccattaccaggctgtacacaaatcagatctacctgcattttcagcagaggtcgaagaggaaagtgaagctggtaaagaaagtgaagaaactgaaactaaacaaactttgaaagaatttcgatgtcaggtaagtgactgttctcgaattttccaagcaattactggcctaatacaacactacatgaaacttcatgaaatgactcctgaagaaattgaaagtatgactgcttcagtggatgttgggaagtttccatgtgaccagttagagtgtaaatcttcatttactacatatttgaactatgttgttcatctagaggcagaccacgggattggactaagggcaagtaaaacagaagaagatggtgtatacaaatgtgattgtgaaggctgtgaccgtatatatgcaacccggtcgaatctcctccgacacatttttaataagcataatgacaaacataaggctcatttgattcgtccaagaagattaacaccaggccaggaaaatatgtcaagcaaggcaaaccaagaaaaatcaaagtctaaacatcgggggacgaagcacagcagatgtggaaaggaaggaataaaaatgcccaagaccaaacgaaagaaaaaaaataatttagaaaacaagaatgcaaagattgtgcagattgaagaaaataagccttattctctgaaacgtgggaagcatgtatattctataaaggctagaaatgatgccctgtctgagtgtacaagcagatttgtaacccagtatccatgtatgataaagggatgtacttcagttgttacaagtgaaagcaatataattagacattataagtgccataaattatctaaggcatttacatcacaacaccgaaatcttcttattgtattcaaacggtgttgcaactcacaagtaaaggaaacgtctgagcaagaaggtgctaagaatgatgtgaaagattctgacacgtgtgtatcagagagcaatgataattcaagaacaacagctacagtttcacaaaaggaagttgaaaaaaatgaaaaagatgaaatggatgaactaacagaattgtttattacaaaattaataaatgaagatagcacaagtgtagagacccaagctaatacttcttcaaatgtaagtaatgattttcaggaagataacctctgccagtcagaaagacaaaaagcaagtaatttgaagagagttaataaggaaaaaaatgtctcacaaaataaaaaaaggaaagttgaaaaagctgaaccagcatcagcagctgagttaagtagcgtgcgtaaagaagaagaaactgctgttgccattcaaaccattgaggagcatcctgcatcttttgactggagctcttttaagccaatgggatttgaagtatcatttctgaagtttcttgaggagtctgcagtgaagcagaagaaaaatactgacaaagaccatccgaatactggaaacaaaaaaggatcccattcaaattcaagaaaaaatattgataagactgctgtgactagtggaaatcatgtatgtccttgtaaagaaagcgaaacgtttgtacagtttgccaatccatcacagcttcagtgcagtgataatgtaaaaattgttttagacaagaatcttaaagattgcactgagcttgtcttaaagcaacttcaggaaatgaaacctaccgtcagtctgaaaaaacttgaagtacattcaaatgatccagatatgtctgttatgaaagatatcagtataggtaaagccacaggcagaggtcagtactgataattaatgtagtataaatacatcatttaccattttattttaaataggaagccatcaagcatgctagaattgtgaaactttcattatatttttttgttgttgacatgaattaacctggccaaaaacaaaaaagaaaaaaaaaacatgacatttgtcatgtaaaacttttttttatccctatgggacttgaggaacagaatcagtacttcagttattgtaaatagtgagctaaacctcaaatttctatcacccagttgcccttttcatgaactaaacaattatctgtgtgattggtatgtttcaccaggtcactgctcatgtataacagtactctttatttgtagataccttttttgtatatatttattattgtaaatcatgtgctgccaccagcagtctgtaagtctaaactattaaatgacacatttatatttggaattttaatttttaactaagcgatcaagttttttaaattgttcttttattgttttaaattaagaactttttgaactaaaaccagaaactctgccatagttcattgatttttacatgaaacatttatttacaagatgatatcaagattacttttcacaaaataggcacattatatcaacactttgctctgctttgtaaatttgccatccaggattttggggtggtattcatgtgaaattaaagcagattctctagcagtttcctatagctacagtttttttttttcattgcttctaattggatatagttactatgagtccatgaaatacaatggaaatgtgaataaagaatttactacattgaagattttaaacatttggtattaaaaaaaaatcctttgtgaatgtgatagaaaactagtagtgtggagcagtgtaaatatttgaggtggtgatttgtgaagtagcccagtattgccttaaataaaatcacatttcatttcttgttttatacatgtgatcttataaagattttttgttttgttttgttttccattttctgagatttatagattggtgtatagctttaaactgtataaagttttgtggaaagatttttttaaacatttttataaatcttaaaattgatatcatcaaagtgagcccatcttgtgtttataaaatacaagagtccttaacatttataattacatagataaaacactttctataaggaagttggatgttttgattttactgtttatagatgttagattgtacagatttgtctgtatttctcaccatatctaatgatacttttttcattagattggtcttcaagaacagtattagttataattattttggttattcagtatatagttagctcttacagtttagctttattcaccatatttatactgtggattcacagcgagaggtagaggttattccaggagagttgatgaccttcatttaaagtccaactaaaatcagtagtagaaacataagaaaacatctttgcaatatttacttttgtttctgtttgccgtaaatagtaacattgtttttttttattttgtgtttgttataaaacagttgcattcacaatattattggcctgagatattgatgatattgtgatggtatgaaaatgtgtacattccctgtgcaacatcagatttgcaggaaaaatgaagcacttactgaaatcgctggtactctgaataaataagcatggtcaaggagtgaactattttcttttggaaatttctttttaatttttattattaaagtattttatttttagggccttttgggttttattgaatagttcatttcacctgtttaagacttactaccaataagcataaaacctgacacgttaaaatccctgccctttggtgagcccactgttatttattaaaataaaagttattttatgggtgatt

SEQ ID NO: 966 - protein, 1563 aa, Homo sapien
VNSSNPFFTSQTKANGNPACSAQLQHVSPPIFPAHLASVSTPLLSSMESVINPNITSQDKNEQGGMLCSQMENLPSTALPAQMEDLTKTVLPLNIDSGSDPFLPLPAESSSMSLFPSPADSGTNSVFSQLENNTNHYSSQIEGNTNSSFLKGGNGENAVFPSQVNVANNFSSTNAQQSAPEKVKKDRGRGPNGKERKPKHNKRAKWPAIIRDGKFICSRCYRAFTNPRSLGGHLSKRSYCKPLDGAEIAQELLQSNGQPSLLASMILSTNAVNLQQPQQSTFNPEACFKDPSFLQLLAENRSPAFLPNTFPRSGVTNFNTSVSQEGSEIIKQALETAGIPSTFEGAEMLSHVSTGCVSDASQVNATVMPNPTVPPLLHTVCHPNTLLTNQNRTSNSKTSSIEECSSLPVFPTNDLLLKTVENGLCSSSFPNSGGPSQNFTSNSSRVSVISGPQNTRSSHLNKKGNSASKRRKKVAPPLIAPNASQNLVTSDLTTMGLIAKSVEIPTTNLHSNVIPTCEPQSLVENLTQKLNNVNNQLFMTDVKENFKTSLESHTVLAPLTLKTENGDSQMMALNSCTTSVNSDLQISEDNVIQNFEKTLEIIKTAMNSQILEVKSGSQGAGETSQNAQINYNIQLPSVNTVQNNKLPDSSPFSSFISVMPTKSNIPQSEVSHKEDQIQEILEGLQKLKLENDLSTPASQCVLINTSVTLTPTPVKSTADITVIQPVSEMINIQFNDKVNKPFVCQNQGCNYSAMTKDALFKHYGKIHQYTPEMILEIKKNQLKFAPFKCVVPTCTKTFTRNSNLRAHCQLVHHFTTEEMVKLKIKRPYGRKSQSENVPASRSTQVKKQLAMTEENKKESQPALELRAETQNTHSNVAVIPEKQLIEKKSPDKTESSLQVITVTSEQCNTNALTNTQTKGRKIRRHKKEKEEKKRKKPVSQSLEFPTRYSPYRPYRCVHQGCFAAFTIQQNLILHYQAVHKSDLPAFSAEVEEESEAGKESEETETKQTLKEFRCQVSDCSRIFQAITGLIQHYMKLHEMTPEEIESMTASVDVGKFPCDQLECKSSFTTYLNYVVHLEADHGIGLRASKTEEDGVYKCDCEGCDRIYATRSNLLRHIFNKHNDKHKAHLIRPRRLTPGQENMSSKANQEKSKSKHRGTKHSRCGKEGIKMPKTKRKKKNNLENKNAKIVQIEENKPYSLKRGKHVYSIKARNDALSECTSRFVTQYPCMIKGCTSVVTSESNIIRHYKCHKLSKAFTSQHRNLLIVFKRCCNSQVKETSEQEGAKNDVKDSDTCVSESNDNSRTTATVSQKEVEKNEKDEMDELTELFITKLINEDSTSVETQANTSSNVSNDFQEDNLCQSERQKASNLKRVNKEKNVSQNKKRKVEKAEPASAAELSSVRKEEETAVAIQTIEEHPASFDWSSFKPMGFEVSFLKFLEESAVKQKKNTDKDHPNTGNKKGSHSNSRKNIDKTAVTSGNHVCPCKESETFVQFANPSQLQCSDNVKIVLDKNLKDCTELVLKQLQEMKPTVSLKKLEVHSNDPDMSVMKDISIGKATGRGQY

SEQ ID NO: 967 - DNA, 1342 bp, Homo sapien
ggggagactgacgtgtgagctgcatcgcgggaggcgcatggcggggatggcgctggcgcgggcctggaagcagatgtcctggttctactaccagtacctgctggtcacggcgctctacatgctggagccctgggagcggacggtgttcaattccatgctggtttccattgtggggatggcactatacacaggatacgtcttcatgccccagcacatcatggcgatattgcactactttgaaatcgtacaatgaccaagatgcgaccaggatcagaggttccttggggaagacccaccctacgaagttggaatgagaccatcagatgtgataagaaactcttctagatgtcaacataaccaaccttataaagactaaaattcatgagtagaacaggaaaatcatcctgactcatgtgttgtgttctttatttttaattttcaaagaggctcttgtatagcagtttttgtctattttaacattgtagtcatttgtactttgatatcagtattttcttaacctttgtgactgtttcaatattacccccgtgaaagcttttcttaatgtaactttgagtacattttaattgccttctatttttaaaactcaaaatcattagttgggctttactgttcttgctattgtatggcatatacatctgcctggatatatttctactcttgaccaaagttttgtaaagaacaatataagatttcgggtaggggtatggggagggaagatattttattgagaactacttaacaaaagatttatctgtaagcttgaactcaggagtacagttttagctatctagactctaacagcttttgctttaaaattattaaagtgtttcttaatgaaaaagaaaagatcttgctaaagttaaaataaggaacatttcaccttttaaatatttaattcttatgtggacttatttccagaaaactttggtgataattcttgagacaaaaggtggttaagtagcattattatgtaatgcttatataccatagagtttttaatagaagagaaatccatttcctccgagggtcactattaacaatgtacttccttaaatttagtttaatgattgtaatgggtgctgcatttgcacattgcattaagttatgatgagacgaattgttgttaaaaattatagcaaaaagaaatgtaaacttggttaaaatcctttcactctttgtattgttttttttaaggtttttattccttaaatgtaaaatgactacctaattttttgatgtaaatacattaaattcaaagagaaaaaaaaaaaaaaaaaaaaaaaaaaaaaataaaaaaaaaaaaaaaaaaaaaaaaaaaaaa

SEQ ID NO: 968 - protein, 68 aa, Homo sapien
MALARAWKQMSWFYYQYLLVTALYMLEPWERTVFNSMLVSIVGMALYTGYVFMPQHIMAILHYFEIVQ

SEQ ID NO: 969 - DNA, 9284 bp, Homo sapien
caacgatttgtcttctcggctggtctccccccggctctacatgttccccgcactgaggagacggaagaggagccgtagccaccccccctcccggcccggattatagtctctcgccacagcggcctcggcctccccttggattcagacgccgattcgcccagtgtttgggaaatgggaagtaatgacagctggcacctgaactaagtacttttataggcaacaccattccagaaattcaggatgaatggggatatgccccatgtccccattactactcttgcggggattgctagtctcacagacctcctgaaccagctgcctcttccatctcctttacctgctacaactacaaagagccttctctttaatgcacgaatagcagaagaggtgaactgccttttggcttgtagggatgacaatttggtttcacagcttgtccatagcctcaaccaggtatcaacagatcacatagagttgaaagataaccttggcagtgatgacccagaaggtgacataccagtcttgttgcaggccgtcctggcaaggagtcctaatgttttcagggagaaaagcatgcagaacagatatgtacaaagtggaatgatgatgtctcagtataaactttctcagaattccatgcacagtagtcctgcatcttccaattatcaacaaaccactatctcacatagcccctccagccggtttgtgccaccacagacaagctctgggaacagatttatgccacagcaaaatagcccagtgcctagtccatacgccccacaaagccctgcaggatacatgccatattcccatccttcaagttacacaacacatccacagatgcaacaagcatcggtatcaagtcccattgttgcaggtggtttgagaaacatacatgataataaagtttctggtccgttgtctggcaattcagctaatcatcatgctgataatcctagacatggttcaagtgaggactacctacacatggtgcacaggctaagtagtgacgatggagattcttcaacaatgaggaatgctgcatcttttcccttgagatctccacagccagtatgctcccctgctggaagtgaaggaactcctaaaggctcaagaccacctttaatcctacaatctcagtctctaccttgttcatcacctcgagatgttccaccagatatcttgctagattctccagaaagaaaacaaaagaagcagaagaaaatgaaattaggcaaggatgaaaaagagcagagtgagaaagcggcaatgtatgatataattagttctccatccaaggactctactaaacttacattaagactttctcgtgtaaggtcttcagacatggaccagcaagaggatatgatttctggtgtggaaaatagcaatgtttcagaaaatgatattccttttaatgtgcagtacccaggacagacttcaaaaacacccattactccacaagatataaaccgcccactaaatgctgctcaatgtttgtcgcagcaagaacaaacagcattccttccagcaaatcaagtgcctgttttacaacagaacacttcagttgctgcaaaacaaccccagacttctgtggtacagaatcaacaacagatatcacaacagggacctatatatgatgaagtggaattggatgcattggctgaaattgagcgaatagagagagaatcagctattgaaagggagcgcttctcaaaagaagttcaagataaagataagcctttgaaaaaaagaaaacaagattcttacccacaggaggctgggggtgctacaggaggtaatagaccagcttctcaggagacgggttctacgggaaatgggtcaaggccagcattaatggttagcattgatcttcatcaggcaggaagagtggactctcaggcttctataactcaggattcagactccataaaaaagcctgaagaaatcaaacaatgtaatgatgcacctgtttctgttcttcaggaagatattgttggaagtcttaaatctacaccagaaaaccatcctgagacacctaaaaaaaagtctgatcctgagctttcaaagagtgaaatgaaacaaagtgaaagtagattagcagaatctaaaccaaatgaaaaccgattggtggagacaaaatcaagtgaaaataagttagaaactaaagttgagacccaaacagaagaacttaaacagaatgagagcagaacaactgaatgcaaacaaaacgagagcaccatagttgagcctaaacaaaatgaaaatagactgtctgacacaaaaccaaatgacaacaaacaaaataatggcagatcagaaacaacaaaatcaaggcctgaaaccccaaagcaaaagggtgaaagccggcctgagactccaaaacaaaagagtgatgggcatcctgaaaccccaaaacagaagggtgatggaaggcctgaaactccaaagcaaaaaggtgagagccgccctgaaactccaaagcaaaaaaatgaagggcgacctgaaacaccaaaacacaggcatgacaataggagggattctggaaagccatctacagagaaaaaacctgaagtgtctaaacataaacaagatactaaatctgactcacctcggttaaaatcagaacgagctgaagccttaaagcagagacctgatgggcgatctgtttctgagtcactaagacgtgaccatgataataaacaaaaatcagatgacaggggtgaatcagagcgacatcgaggggatcagtctagggttcgaagaccagaaacattgagatcctctagtagaaatgaacatggcattaaatctgatagttcaaaaactgataaactagaacgaaaacacaggcatgaatcaggggactcaagggaaagaccatcttctggggaacaaaaatcaagacctgacagtcctcgtgttaaacaaggagattctaataaatcaagatctgataaacttggttttaaatcaccaactagtaaagatgacaaaaggacagagggtaacaagagtaaagtagacactaataaagcacaccctgacaataaggcagaatttccaagttatttgttggggggcaggtctggtgcgttgaaaaattttgtcattccgaaaatcaagagggataaagatggcaatgttactcaggagacaaagaaaatggaaatgaaaggagagccgaaagacaaagtagaaaaaataggattagttgaagatctaaataaaggagctaagcctgtagttgtgctacaaaaactgtctttggatgatgttcagaaacttattaaagatagagaggacaaatcaagaagttcccttaaacctatcaagaataaaccatcaaagtcaaataaaggtagtatagatcaatcagtgttaaaagaattaccccctgaactcctggcagaaattgagtccaccatgccactttgtgaacgtgtgaaaatgaacaaacgcaagcgtagcacagttaatgaaaagccaaaatatgctgaaatcagttcagatgaagataatgatagtgatgaagcttttgaatcctctaggaaacgacataaaaaagatgatgataaagcttgggaatatgaagagcgtgacagaagaagctctggggatcataggagaagtggccactctcatgaaggaagaaggagttcaggtggtggtcgttatcgaaaccgaagtccgtcagattctgacatggaagattattctcctcctcccagccttagtgaggttgctaggaaaatgaagaaaaaagaaaaacagaagaaaaggaaagcatatgaaccaaaactaacacctgaagaaatgatggactcttcaacttttaagagattcacagcctcaatagagaatattttggataatttggaagatatggattttactgcgtttggtgatgatgatgaaattcctcaggaactgctcttaggaaaacatcagcttaatgaacttggcagtgaatctgctaaaataaaagcaatgggtataatggataagctttcaactgacaaaactgtgaaagtcttaaatatcttggagaagaatattcaggatgggtcaaagctttccactttgttaaatcataataacgatactgaagaagaagaaaggttatggagagaccttattatggagagagttacaaaatcagcggatgcttgtcttacaactatcaacattatgacatcccctaacatgccaaaagctgtgtacattgaggatgtaattgaaagagttatacagtacactaaatttcatttgcagaatacactttatcctcagtatgatcctgtttacagattagatcctcatggaggaggcttattaagttcaaaagcaaaacgggctaaatgttctacccataagcagagagtaatagtaatgctttataacaaagtttgtgacattgttagcagcttatcagaattgctagagatacaacttcttacagacacaacaattcttcaggtttcatctatgggaataacaccattttttgtggaaaatgtcagtgaactacagttgtgtgccattaagttagtcactgcagtattctcaagatatgaaaaacataggcagttaattttggaagaaatttttacttcacttgcaagattaccaaccagcaagaggagtttaaggaacttcaggttaaacagtagtgatatggatggagaacctatgtatattcagatggttacagcactggttttacaacttattcagtgtgtggtacacttaccatcatcagagaaggactctaatgcagaagaagattcaaataaaaaaattgaccaggatgttgtcattactaactcttatgaaacagctatgcgaacagcccaaaacttcctctccatcttccttaaaaaatgtggtagtaagcaaggtgaagaagattacagaccactgtttgaaaattttgttcaagaccttctttcaacagtcaataagcctgaatggccagctgctgaactactccttagtttgttagggagactgttggttcatcagttcagtaacaagtcaacagagatggctttaagagtggcatctcttgattaccttggaactgttgctgcacggctaagaaaagatgctgttacaagcaaaatggatcaaggatctatagaacgcattttaaaacaggtttcaggaggggaagatgaaatccaacaattacaaaaagcattgcttgattacttggatgaaaacactgagactgatccttcactagtgttttctcgtaaattctatatagcccagtggtttcgagacacaactctggaaacagaaaaagcaatgaaatcacaaaaagatgaagaatcatctgaaggaacacatcatgcaaaggaaattgagacaactggccaaattatgcatcgagctgaaaaccgaaaaaagtttcttagaagcattatcaaaaccacaccttctcagtttagcacattaaagatgaactctgatactgtggactatgatgatgcttgcttgattgttcgatacttggcctccatgaggccgtttgcccagagctttgatatttatttgacacagatcctacgagttcttggtgaaaatgcaattgctgttcgaacaaaagccatgaagtgtttgtctgaggttgttgctgtagaccccagtattctagcaaggcttgatatgcaacgaggtgttcatggacgattgatggataattcgactagtgtccgagaagcagcagtagaattactaggtcgatttgtcctttgtcgacctcagcttgctgaacagtattatgatatgctgattgaaagaatattggatactggtatcagtgtcaggaaaagagtaataaagattctcagagacatttgtattgaacaaccaacatttccaaaaatcacagaaatgtgtgtaaaaatgattcgcagagtcaatgatgaagagggcattaagaaattagtaaatgaaacattccagaaactctggtttactccaactccacacaatgacaaagaagcaatgacaaggaaaattttaaacattaccgatgtggttgcagcatgcagagatactggatatgactggtttgagcaactgcttcaaaacttgttgaagtccgaagaggattcctcatataaacctgtgaagaaagcttgtactcaacttgttgataacctagttgagcacattcttaaatatgaggaatctctagctgactctgacaataaaggtgtgaattctggaagattggtagcttgcataaccactttgttcttattcagcaaaataagaccccagctcatggttaaacatgcaatgactatgcaaccataccttaccactaaatgtagtacgcaaaatgatttcatggttatctgcaatgttgcaaaaatcctagagctagttgtaccactgatggagcatccaagtgaaacttttcttgccactattgaggaagatctaatgaagctcatcatcaaatatggcatgactgtagtgcaacattgtgtgagctgtcttggagctgttgtaaataaagtgacacaaaattttaaatttgtgtgggcttgtttcaatagatactatggtgccatttcaaaattaaaaagtcaacaccaagaggacccaaataacacttcacttctaacaaacaaaccagcacttcttagatcccttttcaccgttggagcactatgtcggcattttgattttgatctggaagattttaaaggcaacagcaaggttaacataaaagataaagtacttgaactattgatgtattttacaaaacactcagatgaagaagtacaaacaaaagctatcattggtctaggatttgcctttattcagcatccaagtctaatgttcgagcaagaagtgaagaatctatataataatattttatctgataagaactcctcagtcaatttaaaaatacaagtgttaaaaaacctccagacctacctacaagaagaagatacacgtatgcagcaggcagatagagactggaagaaagttgcaaaacaggaagacttaaaagaaatgggtgatgtttcctcagggatgagtagttccatcatgcagctttatctcaaacaggtgcttgaggcattttttcacacccagtcaagtgtacgccactttgccctaaatgtcattgcattgactctaaatcaaggtcttattcatccagttcagtgtgtgccatatttaattgctatgggcacagacccagaacctgctatgcggaacaaggctgatcagcaacttgtggaaatagacaaaaaatatgctggattcattcatatgaaagcagtggctggtatgaagatgtcttaccaggtacaacaggcaatcaacacatgcctaaaagatcctgtaaggggtttcagacaagacgagtcctctagcgctttgtgttcacacctttactccatgatccgtggaaaccgccaacacagacgagcctttcttatttctttactcaacctctttgatgacacagcaaaaacagacgtgactatgctcttgtatatagcagacaatctagcctgttttccataccagacacaggaagagccgttgtttataatgcatcatatagacattacactctcagtttctggtagtaacctactgcagtcattcaaggagtctatggtaaaggacaaaaggaaagagagaaaatcatcacctagtaaggaaaatgagtcaagcgacagtgaagaagaagtttccaggcctcggaagtcacggaaacgtgtagattcagattcagattcagattcagaagacgatataaattcagtgatgaaatgtttgccagaaaattcagctcctttaatcgaatttgcaaatgtgtcccagggtattttattacttctcatgttaaaacaacatttgaagaatctttgtggattttctgatagtaaaattcagaagtactctccatctgaatctgcaaaagtatatgataaagcgataaaccgaaaaacaggagttcattttcatccaaaacaaacactggacttcctgcggagtgacatggctaattccaaaatcacagaagaggtgaaaaggagtatagtaaaacagtatctagatttcaaacttctcatggaacatctggaccctgatgaagaagaagaagaaggggaggtttcagctagcacaaatgctcggaacaaagcaattacctcactgcttggaggaggcagccctaaaaataatacagcagcagagacagaagatgatgaaagtgatggggaggatagaggaggaggcacttcagggtcattgagaaggtcaaaacgaaattcagactctacggagttggcagcacagatgaatgaaagtgttgacgtcatggatgtcatcgctatttgctgtccaaagtacaaagatcgaccacaaattgcaagagtagtgcagaaaaccagcagtggcttcagtgttcagtggatggcaggctcctacagtggctcctggactgaggctaagcgccgtgatggccgcaaactggtgccttgggtagacactattaaagagtcagacattatttacaaaaaaattgctctaacgagtgctaataagctgactaataaagttgttcagactttacgatccctgtatgccgccaaggatgggacttccagctaatgaatttgtacatgcagccaaatttacaggaatttttttaaaaggcagaaaaacttgaaataccaacattctggcaaaaaaaaatcagttttatgaagagtaagtggaacctgggatgcaggaacaaaagaaggaaatgttgggcaaacatttttgtgggagctcccttcgctgttgtgcagcagaaacagattctcagttcatttttactcccactgtattatagtttaacaaaaattgtttatatcttggaaaaaaaactttctgtttaaaaaaaataaacaagtgaatgttggaaattagtctgttaatgttcttaataaagtgttcttggagtttaacctagcagcggatggctttctttagcttagcccagtttccagggaagcattgttttttccaggctgtaaaatggcagaatctcctggatatataatttattctgttgaaaaataaaaaagcatgcagtatctatgacctatctgcagaaggagtttttgtaaatgtagattttgatgtattaggtcaccctgaaaacaatacaagaaaagggatccccaggtaatctggtggagcgaatactgcaataaatttttttacttctctttgttacttgtctgtttccattt

SEQ ID NO: 970 - protein, 2804 aa, Homo sapien
MNGDMPHVPITTLAGIASLTDLLNQLPLPSPLPATTTKSLLFNARIAEEVNCLLACRDDNLVSQLVHSLNQVSTDHIELKDNLGSDDPEGDIPVLLQAVLARSPNVFREKSMQNRYVQSGMMMSQYKLSQNSMHSSPASSNYQQTTISHSPSSRFVPPQTSSGNRFMPQQNSPVPSPYAPQSPAGYMPYSHPSSYTTHPQMQQASVSSPIVAGGLRNIHDNKVSGPLSGNSANHHADNPRHGSSEDYLHMVHRLSSDDGDSSTMRNAASFPLRSPQPVCSPAGSEGTPKGSRPPLILQSQSLPCSSPRDVPPDILLDSPERKQKKQKKMKLGKDEKEQSEKAAMYDIISSPSKDSTKLTLRLSRVRSSDMDQQEDMISGVENSNVSENDIPFNVQYPGQTSKTPITPQDINRPLNAAQCLSQQEQTAFLPANQVPVLQQNTSVAAKQPQTSVVQNQQQISQQGPIYDEVELDALAEIERIERESAIERERFSKEVQDKDKPLKKRKQDSYPQEAGGATGGNRPASQETGSTGNGSRPALMVSIDLHQAGRVDSQASITQDSDSIKKPEEIKQCNDAPVSVLQEDIVGSLKSTPENHPETPKKKSDPELSKSEMKQSESRLAESKPNENRLVETKSSENKLETKVETQTEELKQNESRTTECKQNESTIVEPKQNENRLSDTKPNDNKQNNGRSETTKSRPETPKQKGESRPETPKQKSDGHPETPKQKGDGRPETPKQKGESRPETPKQKNEGRPETPKHRHDNRRDSGKPSTEKKPEVSKHKQDTKSDSPRLKSERAEALKQRPDGRSVSESLRRDHDNKQKSDDRGESERHRGDQSRVRRPETLRSSSRNEHGIKSDSSKTDKLERKHRHESGDSRERPSSGEQKSRPDSPRVKQGDSNKSRSDKLGFKSPTSKDDKRTEGNKSKVDTNKAHPDNKAEFPSYLLGGRSGALKNFVIPKIKRDKDGNVTQETKKMEMKGEPKDKVEKIGLVEDLNKGAKPVVVLQKLSLDDVQKLIKDREDKSRSSLKPIKNKPSKSNKGSIDQSVLKELPPELLAEIESTMPLCERVKMNKRKRSTVNEKPKYAEISSDEDNDSDEAFESSRKRHKKDDDKAWEYEERDRRSSGDHRRSGHSHEGRRSSGGGRYRNRSPSDSDMEDYSPPPSLSEVARKMKKKEKQKKRKAYEPKLTPEEMMDSSTFKRFTASIENILDNLEDMDFTAFGDDDEIPQELLLGKHQLNELGSESAKIKAMGIMDKLSTDKTVKVLNILEKNIQDGSKLSTLLNHNNDTEEEERLWRDLIMERVTKSADACLTTINIMTSPNMPKAVYIEDVIERVIQYTKFHLQNTLYPQYDPVYRLDPHGGGLLSSKAKRAKCSTHKQRVIVMLYNKVCDIVSSLSELLEIQLLTDTTILQVSSMGITPFFVENVSELQLCAIKLVTAVFSRYEKHRQLILEEIFTSLARLPTSKRSLRNFRLNSSDMDGEPMYIQMVTALVLQLIQCVVHLPSSEKDSNAEEDSNKKIDQDVVITNSYETAMRTAQNFLSIFLKKCGSKQGEEDYRPLFENFVQDLLSTVNKPEWPAAELLLSLLGRLLVHQFSNKSTEMALRVASLDYLGTVAARLRKDAVTSKMDQGSIERILKQVSGGEDEIQQLQKALLDYLDENTETDPSLVFSRKFYIAQWFRDTTLETEKAMKSQKDEESSEGTHHAKEIETTGQIMHRAENRKKFLRSIIKTTPSQFSTLKMNSDTVDYDDACLIVRYLASMRPFAQSFDIYLTQILRVLGENAIAVRTKAMKCLSEVVAVDPSILARLDMQRGVHGRLMDNSTSVREAAVELLGRFVLCRPQLAEQYYDMLIERILDTGISVRKRVIKILRDICIEQPTFPKITEMCVKMIRRVNDEEGIKKLVNETFQKLWFTPTPHNDKEAMTRKILNITDVVAACRDTGYDWFEQLLQNLLKSEEDSSYKPVKKACTQLVDNLVEHILKYEESLADSDNKGVNSGRLVACITTLFLFSKIRPQLMVKHAMTMQPYLTTKCSTQNDFMVICNVAKILELVVPLMEHPSETFLATIEEDLMKLIIKYGMTVVQHCVSCLGAVVNKVTQNFKFVWACFNRYYGAISKLKSQHQEDPNNTSLLTNKPALLRSLFTVGALCRHFDFDLEDFKGNSKVNIKDKVLELLMYFTKHSDEEVQTKAIIGLGFAFIQHPSLMFEQEVKNLYNNILSDKNSSVNLKIQVLKNLQTYLQEEDTRMQQADRDWKKVAKQEDLKEMGDVSSGMSSSIMQLYLKQVLEAFFHTQSSVRHFALNVIALTLNQGLIHPVQCVPYLIAMGTDPEPAMRNKADQQLVEIDKKYAGFIHMKAVAGMKMSYQVQQAINTCLKDPVRGFRQDESSSALCSHLYSMIRGNRQHRRAFLISLLNLFDDTAKTDVTMLLYIADNLACFPYQTQEEPLFIMHHIDITLSVSGSNLLQSFKESMVKDKRKERKSSPSKENESSDSEEEVSRPRKSRKRVDSDSDSDSEDDINSVMKCLPENSAPLIEFANVSQGILLLLMLKQHLKNLCGFSDSKIQKYSPSESAKVYDKAINRKTGVHFHPKQTLDFLRSDMANSKITEEVKRSIVKQYLDFKLLMEHLDPDEEEEEGEVSASTNARNKAITSLLGGGSPKNNTAAETEDDESDGEDRGGGTSGSLRRSKRNSDSTELAAQMNESVDVMDVIAICCPKYKDRPQIARVVQKTSSGFSVQWMAGSYSGSWTEAKRRDGRKLVPWVDTIKESDIIYKKIALTSANKLTNKVVQTLRSLYAAKDGTSS

SEQ ID NO: 971 - DNA, 4043 bp, Homo sapien
cgaagcgggtcctgccccgctgtcagctgcggcccccggcgccgggcgggggtggccgcgaccattggcggagaggcgaaaggggcggggccgccgccagccgctgcgggcaaggctgaacaggcggaggtgggcagccggccagggaagcacggtccaggcggctacattcggcccggccatggcagcggcgcccctgaaagtgtgcatcgtgggctcggggaactggggttcagctgttgcaaaaataattggtaataacgtcaagaaacttcagaaatttgcctccacagtcaagatgtgggtctttgaagaaacagtgaatggcagaaaactgacagacatcataaataatgaccatgaaaatgtaaaatatcttcctggacacaagctgccagaaaatgtggttgccatgtcaaatcttagcgaggctgtgcaggatgcagacctgctggtgtttgtcattccccaccagttcattcacagaatctgtgatgagatcactgggagagtgcccaagaaagcgctgggaatcaccctcatcaagggcatagacgagggccccgaggggctgaaactcatttctgacatcatccgtgagaagatgggtattgacatcagtgtgctgatgggagccaacattgccaatgaggtggctgcagagaagttctgtgagaccaccatcggcagcaaagtaatggagaacggccttctcttcaaagaacttctgcagactccaaattttcgaattacggtggttgatgatgcagacactgttgaactctgtggtgcgcttaagaacatcgtagctgtgggagctgggttctgcgacggcctccgctgtggagacaacaccaaagcggccgtcatccgcctgggactcatggaaatgattgcttttgccaggatcttctgcaaaggccaagtgtctacagccaccttcctagagagctgcggggtggccgacctgatcaccacctgttacggagggcggaaccgcagggtggccgaggccttcgccagaactgggaagaccattgaagagttggagaaggagatgctgaatgggcaaaagctccaaggaccgcagacttctgctgaagtgtaccgcatcctcaaacagaagggactactggacaagtttccattgtttactgcagtgtatcagatctgctacgaaagcagaccagttcaagagatgttgtcttgtcttcagagccatccagagcatacataaagtgaatcatgcaacgtgttgggggaagttctgcctttctgatcaatcttttgggttcacgtggaaaccaggacttggcaacatgatgtttgactgtaatctcatcacggatatgtatgaatttttacaggttcgtttttgaattgtgagaggcagttcattagcaaagatgtactgggcagtaactaaacacacatgcaaacatgtgaatggtggtttattcctcattctgtggatgtttctatgagccaaaatttgatgtctttttttcaaaattgcttatgaaatttccacacaatcgtagcttataagattggaacgatctcagccaaatattttaggtgtaattcatatgtatttgagtggaggattttttttctcatttttctagtgttaaattttaaccagcattaacatggtagagtggaggagtgagtgtgttcaaagatcaacatatttaacttttaaacactatctcaaagccagcataattaactactttgattgtgggctgacctttgtttttttaacaatcaggcatttttaattagataatccactcatgtatttccccctcactgcagttgtctgcatttttagcctcttttctcttcgttagttgtcagaatatgcctttgtcaaggctcagaggtaacaagacagaaaattcatctgggattttcctgctgtggctggcacattcttctgattaacagacacttgtatgatgctttaggctagttagtgcattttttagcaaacatttatcttaaacatcacagatccactggggggtgcaaggggctactgttagtcctcttgttagatgcagtcactcctcctggtcacctagtgagcagggacagagccaggagtcaagtgcagtgccaaggtgcatgaccctctgagaagtcactgggctgatttgacctccgactcattggttgtgtaaatgccatgtgcagcctttcctgaggccataggagggcttcctgcagctgagatctatgcaggccatcctctcaacaggtgccactccaagggcggtcctcggtgcagcagcatcagcttcacttgtgggggggtgggggaaggggcggtctcagaaatgcaggttcccaggtcccaccctggacttctgaaggggtgtggcatctgtgtttctgatgcttactacaatatgtgaaccactactttagaaaatctgctttaacttggtattcctctaattgtgttccctaggaaatgactgtcccaagagccagtgattattccaggtgttccctggaaaggtcaagtgagtctgggaaacactatgtctgtacacctcttgaaggtgtcgaatgtatgtttatacatcagtggaacccatttttctagcctagcaagtcccaaacacattacactgaagagattttggtgaggaaacttgctggagttttcagggaacactgttctaggcttaggtgaccttaggatcactcaagtagacccttcactccctgcgagaaattaggatgaataactacctgtggcattgttggttctgaacttttacagttcaggcctgctgtgaatctttgatgaagctttaaggtgacactgttgtacaagatgtcagctttgctgaaacgcacattacctggaataagtgctttaattgtagaattagaatgggatttactgtactgttttaaatgagattggcttcagaatccattacagttaccttacatagcacttgatacgtgttaaatgaacatatgaatgtaatttatatattcctagaatttaagttactttgtgagatttgggcctgtccctcaatgccagtttaggatttctttttttctataccttgaaatgattataaaatagattttcatgggaattttaaaaactctatccaaaacatttttggagcattttaaagccccatacacagaagtatacgaaagcacacaaaacactccaagtttcagcagttttagcgccaccattaacccactttgcttgtctcatgaaaaatctttgttaaagtttgtacacaggtaacaaaaagttactttaaaagatatataaagggctgtaagctaattgtggtgtctagtaagtagcataatgagatgtgaggagttggaactttgcgtgttttgcgtattttcatctgcattcagcttcttactctgggtttgtactcgagtgttatttctttacaaatgcccttgtaattaccactctgaagtctgctgactgtgtctcttgaacatacttaggatattctgcacattatggaaaaaggtaaattttagaagtttctgctctactaactgtagatatttatgactctgcgagttatctatttttataaccacctgtggtccattgttcattttaattcacatttcttatgaagtatggtaacagggagggagacacctagattagcagctcaatttgtactacttcagccaatctgtgaatgtaaaaactacactgttgccttgctaggatccaccctcctataatatggaacaaatatctgaatgaaatccaccctaggagacggagtcaaactaaacttgtggtttttcatttaacttttgactacagcatggccccatggcatccacaccaagagggtgttgtgatgaggtgccggtgtgcaaagggaactttagtttttccactggttcttatctgctagccttttacatacatgtgtactatatttgtttatagactgtaggtggatatataatttaaaagcttgatttaataaacatttaaccccctaaacttgggg

SEQ ID NO: 972 - protein, 411 aa, Homo sapien
EAGPAPLSAAAPGAGRGWPRPLAERRKGRGRRQPLRARLNRRRWAAGQGSTVQAATFGPAMAAAPLKVCIVGSGNWGSAVAKIIGNNVKKLQKFASTVKMWVFEETVNGRKLTDIINNDHENVKYLPGHKLPENVVAMSNLSEAVQDADLLVFVIPHQFIHRICDEITGRVPKKALGITLIKGIDEGPEGLKLISDIIREKMGIDISVLMGANIANEVAAEKFCETTIGSKVMENGLLFKELLQTPNFRITVVDDADTVELCGALKNIVAVGAGFCDGLRCGDNTKAAVIRLGLMEMIAFARIFCKGQVSTATFLESCGVADLITTCYGGRNRRVAEAFARTGKTIEELEKEMLNGQKLQGPQTSAEVYRILKQKGLLDKFPLFTAVYQICYESRPVQEMLSCLQSHPEHT

SEQ ID NO: 973 - DNA, 5322 bp, Homo sapien
ctttccccttactccgctcccctcttttccctccctctcctccccttccctctgttctctcctcctcttcccctcccctcccccgtccggggcactctatattcaagccaccgtttcctgcttcacaaaatggccaccgcacgcgacacctacggtcacgtggcctgccgccctctcagtttcgggaatctgcctagctcccactaaggggaggctacccgcggaagagcgagggcagattagaccggagaaatcccaccacatctccaagcccgggaactgagagaggaagaagagtgaaggccagtgttaggaaaaaaaaaaacaaaaacaaaaaaaacgaaaaacgaaagctgagtgcatagagttggaaaggggagcgaatgcgtaaggttggaaaggggggcgaagaggcctaggttaacattttcaggcgtcttagccggtggaaagcgggagacgcaagttctcgcgagatctcgagaactccgaggctgagactagggttttagcggagagcacgggaagtgtagctcgagagaactgggacagcatttcgcaccctaagctccaaggcaggactgctaggggcgacaggactaagtaggaaatcccttgagcttagacctgagggagcgcgcagtagccgggcagaagtcgccgcgacagggaattgcggtgtgagagggagggcacacgttgtacgtgctgacgtagccggctttccagcgggtatattagatccgtggccgcgcggtgcgctccagagccgcagttctcccgtgagagggccttcgcggtggaacaaacactcgcttagcagcggaagactccgagttctcggtactcttcagggatgagtcatgtggcagtggaaaatgcgctcgggctggaccagcagtttgctggcctagacctgaactcttcagataatcagagtggaggaagtacagccagcaaagggcgctatattcctcctcatttaaggaaccgagaagctactagaggtttctacgataaagacagttcagggtggagttctagcaaagataaggatgcgtatagcagttttggatctcgtagtgattcaagagggaagtctagcttcttcagtgatcgtggaagtggatcaaggggaaggtttgatgatcgtggacggagtgattacgatggcattggcagccgtggtgacagaagtggctttggcaaatttgaacgtggtggaaacagtcgctggtgtgacaaatcagatgaagatgattggtcaaaaccactcccaccaagtgaacgcttggaacaggaactcttttctggaggcaacactgggattaattttgagaaatacgatgacattccagttgaggcaacaggcaacaactgtcctccacatattgaaagtttcagtgatgttgagatgggagaaattatcatgggaaacattgagcttactcgttatactcgcccaactccagtgcaaaagcatgctattcctattatcaaagagaaaagagacttgatggcttgtgcccaaacagggtctggaaaaactgcagcatttctgttgcccatcttgagtcagatttattcagatggtccaggcgaggctttgagggccatgaaggaaaatggaaggtatgggcgccgcaaacaatacccaatctccttggtattagcaccaacgagagagttggcagtacagatctacgaagaagccagaaaattttcataccgatctagagttcgtccttgcgtggtttatggtggtgccgatattggtcagcagattcgagacttggaacgtggatgccatttgttagtagccactccaggacgtctagtggatatgatggaaagaggaaagattggattagacttttgcaaatacttggtgttagatgaagctgatcggatgttggatatggggtttgagcctcagattcgtagaatagtcgaacaagatactatgcctccaaagggtgtccgccacactatgatgtttagtgctacttttcctaaggaaatacagatgctggctcgtgatttcttagatgaatatatcttcttggctgtaggaagagttggctctacctctgaaaacatcacacagaaagtagtttgggtggaagaatcagacaaacggtcatttctgcttgacctcctaaatgcaacaggcaaggattcactgaccttagtgtttgtggagaccaaaaagggtgcagattctctggaggatttcttataccatgaaggatacgcatgtaccagcatccatggagaccgttctcagagggatagagaagaggcccttcaccagttccgctcaggaaaaagcccaattttagtggctacagcagtagcagcaagaggactggacatttcaaatgtgaaacatgttatcaattttgacttgccaagtgatattgaagaatatgtacatcgtattggtcgtacgggacgtgtaggaaaccttggcctggcaacctcattctttaacgagaggaacataaatattactaaggatttgttggatcttcttgttgaagctaaacaagaagtgccgtcttggttagaaaacatggcttatgaacaccactacaagggtagcagtcgtggacgttctaagagtagcagatttagtggagggtttggtgccagagactaccgacaaagtagcggtgccagcagttccagcttcagcagcagccgcgcaagcagcagccgcagtggcggaggtggccacggtagcagcagaggatttggtggaggtggctatggaggcttttacaacagtgatggatatggaggaaattataactcccagggggttgactggtggggtaactgagcctgctttgcagtaggtcaccctgccaaacaagctaatatggaaaccacatgtaacttagccagactataccttgtgtagtttcaagaactcgcagtacattaccagctgtgattctccactgaaattttttttttaagggagctcaaggtcacaagaagaaatgaaaggaacaatcagcagccctgttcagaaggtggtttgaagacttcattgctgtagtttggattaactcccctcccgcctacccccatcccaaactgcatttataattttgtgactgaggatcatttgtttgttaatgtactgtgcctttaactatagacaactttttattttgatgtcctgttggctcagtaatgctcaagatatcaattgttttgacaaaataaatttactgaacttgggctaaaatcaaaccttggcacacaggtgtgatacaacttaacaggaatcatcgattcatccataaataatataaggaaaaacttatgcggtagcctgcattagggctttttgatacttgcagattgggggaaaacaacaaatgtcttgaagcatattaatggaattagtttctaatgtggcaaactgtattaagttaaagttctgatttgctcactctatcctggataggtatttagaacctgatagtctttaagccattccagtcatgatgaggtgatgtatgaatacatgcatacattcaaagcactgttttcaaagttaatgcaagtaaatacagcaattcctctttcaacgtttaggcagatcattaattatgagctagccaaatgtgggcatactattacagggaaagtttaaaggtctgataacttgaaaataggtttttaggagaattcatctacttagactttttaagtgcctgccataaatgaaattgaaatggtagaatggctgaccacagcaatgaccagccctcattagggccctggatgatttttggtctaataacgcatgctagtgttgatgttttttggtcagagggtatgaacaggaagaattaaatgcagcaggctttattttaaatgccgattcacattactctgttcaagctgcgttgagatgttaaactggcttactatagacttcgtaaaaatggctccagaaaagtaacaaactgaaatctttgagatcacacaggttggaaatatgtacataactgcacaaggtgtcaattctgctctacagtgcagttttagtcagttttagttgcataggtttccattgtatttatagtctgtttatgctaaatctggccaaagatgaacattgtccaccactaaaatgcctctgccactttgaattctgtgctaattttgtggccagaatgcggtgatcaaaacgctccatctttttacagtggcataggaagacggcaaaaatttcctaaagtgcaatagattttcaagtgtattgtgccttgttctaaaacttttattaagtaggtgcacttgacagtattgaggtcatttgttatggtgctatttcaattagtctaggtttaggcccttgtacattttgcccataactttttacaaagtacttcttttattgcacattcagagaattttatatatatgtcttgtgtgcgtgtccttaaacttccaatcttactttgtctcttggagattgttgaacgcagcttgtctaggaaggggatgggactagattctaaaatttatttgggaccatgggaatgatagttgggaagaaaactatttgcacacgacagatttctagatactttttgctgctagctttatgtaatatttattgaacattttgacaaatatttatttttgtaagcctaaaagtgattctttgaaagtttaaagaaacttgaccaaaagacagtacaaaaacactggcacttgaatgttgaatgtcaccgtatgcgtgaaattatatatttcggggtagtgtgagcttttaatgtttaagtcatattaaactcttaagtcaaattaagcagacccggcgttggcagtgtagccataactttctgatgttagtaaaaacaaaattggcgacttgaaattaaattatgccaaggttttgatacacttgtcttaagatattaatgaaacacttcaaaacactgatgtgaagtgtccagattctcagatgtttgttgtgtggattttgtttagttgtgtgtttttttttttttcagtgaatgtctggcacattgcaatcctcaaacatgtggttatctttgttgtattggcataatcagtgacttgtacattcagcaatagcatttgagcaagttttatcagcaagcaatattttcagttaataaggtttcaaaaatcatgtaaggatttaaacttgctgaatgtaaagattgaacctcaagtcactgtagctttagtaattgcttattgtattagtttagatgctagcactgcatgtgctgtgcatattctgattttattaaaataaaaaaaaaa

SEQ ID NO: 974 - protein, 662 aa, Homo sapien; identical to SEQ ID NO: 108

SEQ ID NO: 975 - DNA, 597 bp, Homo sapien
atgcccctaggtctcctgtggctgggcctagccctgttgggggctctgcatgcccaggcccaggactccacctcagacctgatcccagccccacctctgagcaaggtccctctgcagcagaacttccaggacaaccaattccaggggaagtggtatgtggtaggcctggcagggaatgcaattctcagagaagacaaagacccgcaaaagatgtatgccaccatctatgagctgaaagaagacaagagctacaatgtcacctccgtcctgtttaggaaaaagaagtgtgactactggatcaggacttttgttccaggttgccagcccggcgagttcacgctgggcaacattaagagttaccctggattaacgagttacctcgtccgagtggtgagcaccaactacaaccagcatgctatggtgttcttcaagaaagtttctcaaaacagggagtacttcaagatcaccctctacgggagaaccaaggagctgacttcggaactaaaggagaacttcatccgcttctccaaatatctgggcctccctgaaaaccacatcgtcttccctgtcccaatcgaccagtgtatcgacggctga

SEQ ID NO: 976 - protein, 198 aa, Homo sapien
MPLGLLWLGLALLGALHAQAQDSTSDLIPAPPLSKVPLQQNFQDNQFQGKWYVVGLAGNAILREDKDPQKMYATIYELKEDKSYNVTSVLFRKKKCDYWIRTFVPGCQPGEFTLGNIKSYPGLTSYLVRVVSTNYNQHAMVFFKKVSQNREYFKITLYGRTKELTSELKENFIRFSKYLGLPENHIVFPVPIDQCIDG

SEQ ID NO: 977 - DNA, 573 bp, Homo sapien
ttaagcacttgttttgggtacaaggcatttctgacattttataaacctacatttaaggggaatttttaaaggaaatgttttttcttttttttttgtttttcgagggggcaaggagggacagaaaagtaacctcttcttaagtggaatattctaataagctaccttttgtaagtgccatgtttattatctaatcattccaagttttgcattgatgtctgactgccactcctttctttcaaggacagtgttttttgtagtaaaatcactggtttatacaaagctttatttagggggtaaagttaagctgctaaaaccccatgttggctgctgctgttgagatactgtgctttgggagtaaaaaaagaaagttatttctttgtcttaaagaatttttaaaaaattagtcatgagacttattcatctttccagggaacatactgattggtcttaaaagactagacagttaagtaaaaggtggctggaacatctatttttctacaaaactggaaaaatgaacctggttctagaagaatgtacaccaaaataaaacatgtgaagcagtattgattcttt

SEQ ID NO: 978 - protein, 22 aa, Homo sapien
LSTCFGYKAFLTFYKPTFKGNF

SEQ ID NO: 979 - DNA, 761 bp, Homo sapien
  Unsure 698, 717, 731: Unknown base
gcacgagcatagacttttaaactggtacggttcttagagatggtccttggccttctgttgttgttgtkgtttttttctttttcttcttctccttctccttcttcttctcttctccttctttcttcttttttttttcagagtcttgctctgtcaccaagactggagtgaagtgatgtgatctcggcttactgcaacctgggaggcagaggttgcagtgagtcgagatggtgccattgctctcgtttgggcaacaagagtgaaactcttgtctcaaaaaaaaaaaaaaaatgaggtttaagacagttttgtcattactggtgggatctggtcacacaagatagcattaaacgtgacatggcacataaaattggttaaaaaattttgttttttaattacgtaatgtaaaagcccaacaaacactttatgcaagattggaatgtatcttcaaattcagatttaataaacatgtaaagatcctctgtatataaaagttgtatttaatcccttgtgccccaagaatgctataaaagatcccaagaatgttatctatgaaaagatagcaatagggaatggtgaacaaataatttaatttgccaattctaaaaaacatggacttaaaccccatgaaaacttggttccatagttttaactgttttatggttccaatacaaaaccagagtggtttacattccacaatnaccaaatttgcatccaatnttggggtaattttnggtatttgccatgggatactattcattttt

SEQ ID NO: 980 - protein, 42 aa, Homo sapien
  unsure 10: unknown amino acid
  Unsure 698, 717, 731: Unknown amino acid
MVLGLLLLLXFFSFSSSPSPSSSLLLLSSFFFQSLALSPRLE

SEQ ID NO: 981 - DNA, 12565 bp, Homo sapien
gtcgacctgcaggtcaacggatctgagaggagagtagcttcttgtagataacagttggattatataccatgtcctgatccccttcatcatccaggagagcagaggtggtcaccctgatagcagcaagcctgggggctgcagcttggtgggtagaggtactcaggggtacagatgtctccaaacctgtcctgctgccttagggagcttctaataagttgatggatttggttaaaattaacttggctacttggcaggactgggtcagtgaggaccaacaaaaagaagacatcagattataccctgggggtttgtatttcttgtgtttctttctcttctttgtactaaaatatttacccatgactgggaaagagcaactggagtctttgtagcattatcttagcaaaaatttacaaagtttggaaaacaatattgcccatattgtgtggtgtgtcctgtgacactcaggattcaagtgttggccgaagccactaaatgtgagatgaagccattacaaggcagtgtgcacatctgtccacccaagctggatgccaacatttcacaaatagtgcttgcgtgacacaaatgcagttccaggaggcccaaatgaaaatgtttgtactgaaatttgttaaagcttcccgacaaactagatttatcagtaaggattgttttctgcaagggggatgaaacttgtggggtgagccatttgggctgaggaggagggaggttggagctgagaaatgtggagacaatttccctttagaaggactgaatctccctgcctctctggggtgcggcagccagcaggatccaatggtgtatatgtctccccagctccccattcagtgatatcatgtcagtagcttgaaattatccgtggtgggagtattatgtcatggaaattggcaaatggaaacttttattggagattcaattgttaaacttttaccagcacaacactgccctgccttcagagtcaatgaccctatccaagtttaatccatctgtccactgtctccaacacgatctttataaaacacacctgacaacattacccttttattcagttttttaaaagataagtttccagctcatcggggtggctttaaaggccatttctcctctggacctcacccaacttttcaaatcacttttcctacccctacctctaaatgctactcaaactccagccatcctgaataataagacttttgaaaagtagattatgggctgggcacagtggctcacacctgtaatcccagcactttgggaggccaagatgggtggatcacctgaggtcgggagttcgagaccagcctgactaacatagtgaaaccctgtctctactaaaaatacaaaattagttgggggtggtggcacaagcctgtaatcccagctactcaggaggttgaggcaggggaattgcttgaacctgggaggcggaggttgcggtgagcctagattgctccactgcactccagcctgggcaacaagagcgaaactccatctcaaaaaaataaataaataaataaagtagattacatcagatacctctggcctaggttgtttatgaccaactctcctgctgagaataactagaaaagctagacaaaacatatttccaaaagatctctttggaggcatcagagaatggccaaggctgtaaggaactgcctgagcccagagaggtggagcccagcactggtgccctttactcctggggacatgtgctggtttcaaaaacttcagctgagcttttgagcattcatggaacttggtgggggagatgaaatttgtaccttaaatcctgcctacagggagggtccctgataatccccacccaatttggaaatctgggtcagccttcacaggtactgaagccctcctctgaatgatctcaagtcctgctagggtagaggttacctgcttttgaaaggctcctggcctacctgtgcagcaggagcaaaagtgaaccatctcagggtacagataacaatcatccagagccttgaatgacctctactgtgcttaatatatagtattcagcagtcagtaaaaaggatttaggcacatgcaagatgacctgtgtatcagggagaaataggcaataaattgagatccagcagggatttgaatcatggatttgaatcaggggcagccttcgaaagaactatggagaatatactcagatttaaaacataagattggaatttttggcagagaactaacaactgtacaaaaaaggaaccaaatggaaatcctagaactgaaagatgcaattaaccgatgttgagaaatagccaacatctattgaacacttcccatgtggacagctgtgctaaacactttacaggcatcaacataagatgtgtccccttacagcagtgcagtgtccctcctaagacatggacagcctggtttccctatctctctgcttcatcaaaacccctttacgtggggcttagacactcctgttgtctctagtgtctagtagcacagggctcagcacatggaagccactagatacaatttgatgaccaggacctccgatgaaagccatgggtgctgattgggaaggcattgtcttttatgtgctatggtcttaaagcttcatccaggaagcagaactcggggggtgctgaggacccagaaccgagaataagattagtcagagatttcctgtgggcagaaatcataaggacgccaactgtttgggtgagataagacgaaaccaagagtggacttgtggccagaagcgtgaggaagagggagagagcttcccttgtcccctttcttcctctccctaagccacagtgattgacagcccccccgctttggagtcagagcaggcttgagactggactgggaaaggagggtgggtcaggatacagagcaggaaggctgggagtgcagggcaggagcaaggggctggggcattcattgtgcctgatctctcccactttacctggggtaaagaagcatatgcaaaagccacggtgtgagtatttcccaagtgccagggtcagggcatgattcatcacgtgcagcatttcattcaatccttatagtaaccgatgatgtggcttctattattagctctatcagataatgaaactgagaccaagacaggctctgcacattgtgtggggtaatgacacagggggattcagacctagactccataactcctgccccagggaccacccccaccctcaccctgtgcatgtcgacaaaggacagactgggccacttctcaggacacagcggggaaatgacacagagcagggaggttccaggagccccgagcgtcttttctccaggagaatactctctgaattcagactggggtcagagaaacatttacccaggagccgcagtgtgggtggggctttttacttgaaacgctgtctgaaggcagtggcaggatgaactctccaccctaccttggcaagccacttctcttctgcaatctgtaaggacattgttgagagaattatggtcttccaattccggagggttgaagaaagacaaataggagagaacctatcatagtcaggtgctagctgccttctctttcagagagtgtgagaataaagtgatacacttgattattagcaaatactttggaaattttaaacgctaatattcaacacactctggaagaggcaaataagtagacaggttcatatacatcatctccttcagctagtcctcacaaaaacaaacaaatgaataaacaaaattcttctttggccctcataggaagacactgtttcttgaacgtgtttcaaaaaggatgggtgactcactcaaggtcacactgtttatgaggacagtacaggaatacagacatgccattttgcctgaaaaaatccatcacccagggaggtgacacaattttgcagaaatgttctatttcctctgaaggatacattctttaaacctttgggaaattcattcatagtcttcctcctttgaaggattactctctggacacaaagtgtttgattctgatttgttggttggaagatgtgttggttgagagaaagattctgatttgttggttgaaaatagactcatcaagatcaactgctgtagtagtaaatattttgacattttgtctgtattcctgtgctgccctcacaagctgcatcaccttgagtgagtcattcatacttttttgtttgtttttgttttggagatggagtcttactctgttgcctaggctggagtgcggtggcgtgatcttggctcactgcgacctccatctcctgggttcaagtgatcctcctgcctcagcctcccgagtagctgggattacaggcacatgccaccatccctgctaatttttgcattttcagtagagacggagtttcaccatgttggtcaggttggtcttgaactcctgacctcaggtgatccgcccacctcagcctccccaagtgctgggattacaggtgtgagccaccgtgcccagcccagccatcatttttgaaacacgtttgagaaatagtgtcttcctttgagggccaaggagacattttttttgtttatttgtttgtttttgtgaggactagctgaagggggtgatgtatattaacctgcctacttatttgcctcttcccagagtgtgatgaatattagggtttaaagtttctgaagcatttgttaataaagcccggggctggaggtcagaagacctggatttctctgcatacttttgccatcagcaagctgtgtgaccttggacagatcccttttttgtctaaatctttctgagtcttcttgaaaacaatgccaggttgggacaggatgattgccaagctcccgtccagctctaaaacactgcaacgtatgcttctgcaccagcactgtccatcctgtagatcatgcagaaattctcttcaactttttcctacccataaaataggagcatgcttacctttttcctaatgttccaggccccgggtctagatattgtaagtaaggaagttaatgtgtatcagagcccattatgggccagaagttctcctcttccttcctacacctgcttcctccctccctccctccctctttcccttccttccttccatccatttgtgaagaagacatgatcaccctcattctgagagtgaagagacagaggctcaactaatgaaatgatttgttcaaggtcacacgggtggcacaaggcaagtggcagaggttgaatttagacccattcctgtccaaatgctgagtttatgtcatcgtcccgagaccataactttaaagatgtaagatagtgggaaaagagttgatttcaaagcacctctcagaaggactcactttacatcaggggtcagcagactcaggccaaatccggtccattccccgcttttgcaaagaaagttgtagtggaacacagctaggcttattgatttatggattgccaacgtccttttgtgaaacagacagctgagctgagtaatcgtggcgcacaaaacctaaaatatttactatctcgtcctttacagaatgtttgccaatctatggtccggagtccaaggctgtccatttttcaaagaacacaaagtgacatgagactgtcccatgtgcagggagccctatcattttattatgaaaaaacggcctttctgctcaaatctgttttttaaaaagtcaacaaacagactctgggtacctgtcaggaacagtagggagtttggtttccattgtgctcttcttcccaggaactcaatgaaggggaaatagaaatcttaattttggggaaattgcacaggggaaaaaggggagggaatcagttacaacactccattgcgacacttagtggggttgaaagtgacaacagcaagggtttctctttttggaaatgcgaggagggtatttccgcttctcgcagtggggcagggtggcagacgcctagcttgggtgagtgactatttctttataaaccacaactctgggcccgcaatggcagtccactgcttgctgcagtcacagaatggaaatctgcagaggcctccgcagtcacctaatcactctcctcctcttcctgttccattcagagacgatctgccgaccctctgggagaaaatccagcaagatgcaagccttcaggtaaggctaccccaaggaggagaaggtgagggtggatcagctggagactggaaacatatcacagctgccagggctgccaggccagagggcctgagaactgggtttgggctggagaggatgtccattattcaagaaagaggctgttacatgcatgggcttcaggacttgtgtttcaaaatatcccagatgtggatagtgcgaccggagggctgtcttactttcccagagactcaggaacccagtgagtaatagatgcatgccaaggagtgggactgcgattcaggcctagttgaatgtgctgacagagaagcagagaggggcaccaggggcacagcccgaaggcccagactgatatgggcaaggcctgtctgtgctgacatgtcggagggtcccactctccagggaccttggtttccccgtctgtgacatctgtgacatgagagtcacgataactccttgtgtgccttacagggttgttgtgaaaattaaatgcacagataatagcgtaacagtattccgtgcattgtaaagagcctgaaaaccattatgatttgaaaatggaatcggctttgtgagaccatcactattgtaaagatgtgatgctgatagaaatgacaggactgcttgtgcatgccctctgcagtgtgacattccagcagtgaaatcatgttggggtgacttctcccccactctgacctttatgtttgtctgggccgaggctgcaagtcgggctctgtgggtgtatgagtgacaagtctctcccttccagatatggggactgtctgcttccctaggttgcctctccctgctctgatcagctagaagctccaggagatcctcctggaggccccagcaggtgatgtttatccctccagactgaggctaaatctagaaactaggataatcacaaacaggccaatgctgccatatgcaaagcactttggtttgcctggccacccctcgtcgagcatgtgggctcttcagagcacctgatgaggtgggtacagttagccacacttcacaggtgaagaggtgaggcacaggtcccaggtcaggctggccggagctctgtttattacgtctcacagctttgagtcctgctctcaaccagagaggccctttaccaagaagaaaggattgggacccagaatcaggtcactggctgaggtagagaggaagccgggttgttcccaagggtagctgctcctgcaggactctgagcaggtcaccagctaatggaggaaaggctctagggaaagacccttctggtctcagactcagagcgagttagctgcaaggtgttccgtctcttgaaacttctacctaggtgctatggtagccactagtctcaggtggctatttaaatttatacttaaatgaatgaaaatagaagaaaatttaaaatccagacccttggtcacactatccacatttaaagaggtcaatagccacatgtggttagtggccaccctattgggcagtgcagctacagaacatttttgcatcccagaaagttcttttggatgttgctgctctacagcatgctttgctgaaacagaagtgccttccctgggaatctcagatgggaagcaagtaaggaggggagtcaaatgtgggctcactgctcaccagctgtgagggttgggcctgcctcttaaccattgtcagcctcagtcttctcatccatgcatgccgtgggtatactaaaatactatacccctggaagagctggatgcaaatttgacaagttctgggggacacaggaaggtgccaagcacaaggctgggcacatggtggctgtgcactacagctgagtccttttccttttcagaatctgggatgttaaccagaagaccttctatctgaggaacaaccaactagttgctggatacttgcaaggaccaaatgtcaatttagaaggtgagtggttgccaggaaagccaatgtatctgggcatcacgtcactttgcccgtctgtctgcagcagcatggcctgcctgcacaaaccctaggtgcaatgtcctaatccttgttgggtctttgtattcaagtttgaagctgggagggcctggctactgaagggcacatatgagggtagcctgaagagggtgtggagaggtagagtctaggtcagaggtcagtgcctataggcaagtggtcccagggccacagctgggaagggcaaataccagaaggcaaggttgaccattcccttcctcaagtgcctattaaggctccatgttcctatgttgttcaaaccctaactcaatcccaaattaatccaccatgtataaggttgagctatgtctcttattcctggacaccatactcagccatatctggtccacacattaacagctggatgaccttgaagaagcttcacccactctgttcctcagctttcccttcagtgggatgatatcaactggacaacaggatgtgcgattcttttagttccagccttccaggatgttttcactcccctgtttgttgttgtaggatggtattacctccaccttcccaccttccctatgccctggttctgtctcctgtgcctcgctctgaaagtggatgagacctacaattcctgtcctggtagttctcctaatgaacacactgaagcacgaggaagctgagatttttgttgctacatgagagcatggaggcctcttagggagagaggaggttcagagactcctaggctcctggtggagccccactcatggccttgttcattttccctgcccctcagcaacactcctattgacctggagcacaggtatcctggggaaagtgagggaaatatggacatcacatggaacaacatccaggagactcaggcctctaggagtaactgggtagtgtgcatcctggggaaagtgagggaaatatggacatcacatggaacaacatccaggagactcaggcctctaggagtaactgggtagtgtgcatcctggggaaagtgagggaaatatggacatcacatggaacaacatccaggagactcaggcctctaggagtaactgggtagtgtgcatcctggggaaagtgagggaaatatggacatcacatggaacaacatccaggagactcaggcctctaggagtaactgggtagtgtgcttggtttaatcttctatttacctgcagaccaggaagatgagacctctctgcccttctgacctcgggattttagttttgtggggaccaggggagatagaaaaatacccggggtctcttcattattgctgcttcctcttctattaacctgaccctcccctctgttcttccccagaaaagatagatgtggtacccattgagcctcatgctctgttcttgggaatccatggagggaagatgtgcctgtcctgtgtcaagtctggtgatgagaccagactccagctggaggtaaaaacatgctttggatctcaaatcaccccaaaacccagtggcttgaaacaaccaaaattttttcttatgattctgtgggttgaccaggattagctgggtagttctgttccatgtggtggaacatgctggggtcactttggaagctgcattcagcagagtgccaggcttgcgctgggcatccaaggtggtccctcatcctccaggctctctttccatgtgatctctcagtgtttaagagttagttggagcttccttacagcatggcggctgacttccaaaagggattattccaaaaagagcctcaacatgcaggcgcttattatgacttctgcttgcatcatcctattggccaaagccagtcacgtggctaagtctagccccctgtgagaggagactgcataagagtgtgaacaccaggagacacggtcactgggggccaccactgtaaccatctaccacaggacctgaatctctgtgtgctactcccttgctcaagggcccccctacccacgcagacctgctgtcttctagcaaagcccatcctcaggacctttctcttccaatccttattgactcaaattgattagttggtgctccacccagagccctgtgctcctttatctcatgtaatgttaatgggtttcccagccctgggaaaacatggctttgtctcaggggcttgctggatgcaaccttaacctcaatgtgagtggccatactgtggcactgtcccatccctcaccagggacactgttctggagggtgactgcctgttctgtgaggagtggggatggctaggacattgcatggaacacaccaccaccccatcttctcagagctcaaaccctgacagaacaccagctccacaggccttggcttctgctgatggtgccgtgtatttaccagacttagtggtccaaggccagagtggcagatttcccaaagtcaaggtgtgacagtgggacagcctctttgtgtctttgctgtcctaagaaacctgggccaggccaggcgcagtggctcacgccttgtaatcccagcactttgagaggccaaggtgggcagatcacgaggtcaggagtttgagaccagcctggccaacattggtgaaaccctgtctctattaaaaatagaaaacattagacaggtgtggtggtgcatgcctgtaatcccagctactcaggaggctgaggcaggagaatcgcttgaacccaggaggtggaggttgcagtgagccgagattgtgccactgcactccagcctaggcgacagagcaagactccgtctcgggaaaattaattaataaataaataaacctaggtcccagagtcccacagaatggcagacaggagcacctgggggcttttagggtatggcatttcccctgtactaactctgggctgtccagaggcgatttcatggcgtggagtggagagggaggcagcacaggacttcctaggcctcagctctcacctgcccatcttttgatttccaggcagttaacatcactgacctgagcgagaacagaaagcaggacaagcgcttcgccttcatccgctcagacagtggccccaccaccagttttgagtctgccgcctgccccggttggttcctctgcacagcgatggaagctgaccagcccgtcagcctcaccaatatgcctgacgaaggcgtcatggtcaccaaattctacttccaggaggacgagtagtactgcccaggcctgcctgttcccattcttgcatggcaaggactgcagggactgccagtccccctgccccagggctcccggctatgggggcactgaggaccagccattgaggggtggaccctcagaaggcgtcacaacaacctggtcacaggactctgcctcctcttcaactgaccagcctccatgctgcctccagaatggtctttctaatgtgtgaatcagagcacagcagcccctgcacaaagcccttccatgtcgcctctgcattcaggatcaaaccccgaccacctgcccaacctgctctcctcttgccactgcctcttcctccctcattccaccttcccatgccctggatccatcaggccacttgatgacccccaaccaagtggctcccacaccctgttttacaaaaaagaaaagaccagtccatgagggaggtttttaagggtttgtggaaaatgaaaattaggatttcatgatttttttttttcagtccccgtgaaggagagcccttcatttggagattatgttctttcggggagaggctgaggacttaaaatattcctgcatttgtgaaatgatggtgaaagtaagtggtagcttttcccttctttttcttctttttttgtgatgtcccaacttgtaaaaattaaaagttatggtactatgttagccccataattttttttttccttttaaaacacttccataatctggactcctctgtccaggcactgctgcccagcctccaagctccatctccactccagattttttacagctgcctgcagtactttacctcctatcagaagtttctcagctcccaaggctctgagcaaatgtggctcctgggggttctttcttcctctgctgaaggaataaattgctccttgacattgtagagcttctggcacttggagacttgtatgaaagatggctgtgcctctgcctgtctccccaccaggctgggagctctgcagagcaggaaacatgactcgtatatgtctcaggtccctgcagggccaagcacctagcctcgctcttggcaggtactcagcgaatgaatgctgtatatgttgggtgcaaagttccctacttcctgtgacttcagctctgttttacaataaaatcttgaaaatgcctatattgttgactatgtccttggccttgacaggctttgggtatagagtgctgaggaaactgaaagaccaatgtgtyttycttaccccagaggctggcgcctggcctcttctctgagagttcttttcttccttcagcctcactctccctggataacatgagagcaaatctctctgcgggg

SEQ ID NO: 982 - DNA, 5857 bp, Homo sapien
agggcgtggtcagcgcggccgaagggcgtggttggcgctcggtcctgccctgcgcgttttgggctgcggttggagggccgcagttgcagtcagggtccgccagctcggggccagcgcatggggctgctgagaccgctccggacgtgcgaagcgttcgcggtgcggtaggaagctgaagtcttcagcagaaccctgacctaggtagggagtctcaatggccctgggtgaagaaaaggcagaagcggaagcatctgaagacacaaaggcccagtcctatgggagagggagctgcagggagcgggagctggacatcccagggcccatgagtggggagcagcccccacgcctggaagctgagggagggctcatctcccctgtatggggggcagaagggatacctgcccctacttgctggattgggactgaccctggcggcccctctagagcccaccagccacaggccagtgatgccaacagagagcccgtagctgagaggtctgagcctgcactcagtggcctgcctcctgccaccatggggtctggagaccttctgctctccggggaaagccaggtggagaagaccaagctttcttcctccgaggagttccctcagactctgagccttcccagaacaacaactatttgctcaggacatgatgctgataccgaagatgatccatccctagcagatttgccccaggcactggacctcagccagcagcctcacagctcaggtctctcttgcctgtcacagtggaagtccgtgctgagcccaggttccgcagctcagccttccagctgcagcatctctgcttcctccacaggcagcagtctccagggtcaccaggagagggcggagcctcgtggtggttctctggccaaggtctcctcctccctggagccggtcgtcccccaggaaccttcctctgtggtggggctaggacctcggccccagtggtcaccacagcctgtgttctctgggggtgatgcttctgggctaggcaggagacgcctctccttccaggctgagtactgggcctgtgtgctgccagattccctgcctccatcacccgaccgccactcccctctctggaacccaaataaagagtatgaagatctgcttgactatacttacccactgaggcccgggcctcagctcccaaagcaccttgatagccgtgtgccagctgaccctgtcctgcaggactccggggtagacctggatagcttctctgtctctccagcaagcaccctcaaatcacctactaatgtctcccccaactgcccaccagcagaggccactgccctgccattttctgggcccagagagccaagccttaagcagtggccctccagagtaccccagaaacagggtggcatgggcttggcatcttggagccaacttgcatctacccccagagccccaggcagtagggatgctcgttgggagcgcagagagccagccctgaggggtgcgaaggaccggctgactataggcaagcaccttgatatgggctctccccagctaaggacacgggacagagggtggccctcgcccaggccagagagggagaagaggaccagccagagtgcccggcgccctacctgcacagagtctaggtggaaatcagaagaggaagtggaaagtgatgacgagtatcttgccctccccgctcggctgacacaggtttctagcctggtttcgtatctaggatccatttctaccttggttaccctgcccactggggatatcaaagggcagagccccttggaagtgtcagacagtgatgggccagcttccttcccttcaagctccagccaaagccagcttccccctggagctgccctccaaggatctggggatcctgagggccagaatccctgtttcctgcgctccttcgtccgtgcccacgactccgcaggggaaggcagtctggggagcagccaggccctcggggtctcctctggactgctgaaaacacgcccctccttgccagctaggttggaccggtggccattctcagacccagatgttgaagggcagcttcccaggaaaggaggagaacagggaaaagaatcactggtgcaatgtgtgaagacattttgctgtcagctggaagagctgatctgctggctgtataatgttgcagatgttactgaccacgggactgcagccaggtccaatcttacaagtctcaagtcttctctgcagctttaccggcaatttaagaaagatatagatgaacatcagtctctgacggagagtgtcttacagaagggggagattcttcttcagtgcctgttggagaacaccccagttttagaggatgtccttgggaggatcgcaaagcagtctggtgagctggagagccacgcagatcgcctgtatgactctatcttggcctctctggacatgctggctggctgcacccttatccctgacaaaaagcccatggcggcaatggagcacccatgtgaaggggtttaacctggcatcttctcaggcagaggtgcaacctgtcggccaaacactggctagtgagaaaaaatccttcaagaagtccttgcaagagccattcaacactgaagtcaagggggaaaccttcaatatactagctttaaaatgcctttctcctccctgaatggagggctgagttactatttttatttacaatgaatccttccaaactaaggttttccttttggtgcttctccacaaagagcgtgtagctttgcaatttttgataaaataagacgtgttgccttcccctctatcccattaaaaaagagcagataaagctcaaactattccacctggtagggtcatttaccaagggctggtaggagattccgaatactcaatattctcaggcatgcaagaggacctaagagactgaaaaaagtgaattgttggccagaaaccttgggtcttttcataaaggaaatttgggcttgtcaatccctctttaaagatataggtagaaagaagagatttttaaccctttgtctgcaaaagaaaaagggttaaatgaagcatctatacagatgactttgggagattatgacaccttttgccatcttcagggcttacgtctttactttcttggctaaccagtttcttagaagaaaatgtgtcagggacttggggatctacagtcatgctttagcatggctatggagctaattatcaagcttaaagggtaactttgggaggactcctcccttcactcctagtctcccttggaagagcagtccaggctcagggaagggaatggataggatgacacagtaagtacagaaactgaagctgtcaatagtgaaggaaaaaggggaattcttcgttgctttggcattgacacataagtactttgattaaaaaaaaaaaaaactatggatcaaccattcaaagcatcaattctatagctttttgcagcaagatgatcagttattgctggtaactgcagattctacagaaaagcacttttaaagttctgttgggccatgaatgaacctggaaggaggaaagcacagtaacaatggaaactaaagtcctattattaatgtgacttttctgcttcagaatttctgagactttatagtcactggaaaatagccattaaattctttaaagattagctcttcaacagtagctacacataaaatgcagtatttcaagtgcctgatgctgctgtggtatgctttatcataatgcttaagggcatgatcaaaattaaaatggcttatgagtttgccatattaatcatcttagttccatacacactgagactttaaaagggaaaaaccactctagcaaataattgtcaattataaacctgtatgtaaaacattcttgaaaacctagagttggttaaaaaggtagagatgtctgacggcctcttcttaaattgatatattttaccttctcttagatgtatatttataagtaggaacatgtccttccactgagtatgttactgaatagcccttaggaaattaaacccatttatttactaatatttgacaggcatagaagtgtattaattagcataaaagttggagatgaaaaccctatagaaacaaattggccaatattatactaattgaatgcagaatgtggcattctattcccattcaactaataatcagcttcaactgacaggaatttgcacagaatgttacacaataccctgtttcccaagaaagtactaccttacctagagatgatctaagatatttttgttcatcctctgaataaggtgagactaaagggtgctaactccctggacctggctgtgaatgctactgaagagtatcaacacaactgttaattataccgccgtgctttaagtttaagacttaccttaaaactcaagctgaaggctgggcacggtggctcatgcctgtaatcccagcactttgggaggccgaggcgggtggatcacaaggtcaggagatcgagaccatcctggctaacacggtgaaaccccatctctactaaaaatacaaaaagaaattagccaggcgtggtgatgggcgcctgtagtcccagctacttgggaggctgaggcatgagaatggcatgaacccgggaggcggagcttgcagtgagctgagatggcaccactgcactccagcctgggcaacagagtgagactcttgtctcaaaaaaaaaaaatcaagctgaaattgtttcagcctagtaagatgctgccagcagcatttctatgagcaaacatggccaaattagagtcaagtagctgagcttgctaactgcactgtgatgccacactggaataacttagtagtcccttaaaattaatggaagttaaatccacagggaagtgatgatactcaaagctggatcagcagtttcaagatctgggttcttggagatccataggtaagctcagcaaatggaagacgacgtcaacacagggctattttgaagcttaggtgggaatggaacacaaagaaggtttgaggtaagatatgctggaaaggcaagatgtaggctaagggaaattcaatccaaggtcgaagaataggaaattactgctcagaccacaatgactatcattctgaaaggatttcacagagtgtgcagctgcttagatttaagaacactcttcttcactatgtaaactaatttatggcagcaccttatatttagaacaagtggtaattccctttactaagtgaacagattattaaaacctgtagtagctttgaaccgtttgtacttgaaaatgggggtataaaggggtatatattttttccagaaccacatttattggcgtatacatagaagcaaatcttaaggcatgctgaaatttgttgtaaatcccaatctttactgccatggggaaaagaacgctggaattttccaaacttaagtctgtaaatatgctcatcttaagttcatgtaatgtttccgctaactcaccaagaataagctgacaatttaaacaacttttactgtgtaaaaatgaagtgcacggcatggcatcacagtatcttgacatttgttttgtgtcatttagctactttagaaaatagtttctgaactctttccccctttatactgtattaaggcaaaaacaaaacttctgaagcattaaagatcttcaccaaaataactattggtaacttcaggaatttgtcagttgccttatgtgaggatgaatagatccaccaagcacgcctataatacaaagtaaactatgatttttattgtgaaattttcatagatggaaaattgaatattctgtccatttcattttacaattatcttaccacttatttttgtaccatgtatttcaattgcctgtttagtgaaaaataaaaattaaaaaaacct

SEQ ID NO: 983 - DNA, 6651 bp, Homo sapien
ggccgagtcgtggcgggagacggtgcagctgtacgaggacgaggtgcgcgagctggaggaggcgctgcggcgcggccaggagagcagactccaggcggaggaagagacgcggctgtgcgcgcaggaggcagaggcgctgcggcgcgaggcgctcgggttggagcagctgcgcgcgcggctggaggacgcgctgctgcggatgcgcgaggagtacgggatacaggccgaggagcggcagagagcgattgactgcctggaggatgagaaggcaaccctcaccttggccatggctgactggctgcgggactatcaggacctcctgcaggtgaagaccggcctcagtctggaggtggcgacctaccgggccttattggaaggagaaagtaatccagagatagtgatctgggctgagcacgttgaaaacatgccgtcagaattcagaaacaaatcctatcactataccgactcactactacagagggaaaatgaatggaatctattttcaaggcagaaagcacctttggcaagtttcaatcacagctcggcactgtattctaacctgtcagggcaccgtggatctcagacgggcacatctattggaggtgatgccagaagaggcttcttgggctcgggatattcttcctcggccactacccagcaggaaaactcatacggaaaagccgtcagcagtcaaaccaacgtcagaactttctctccaacctatggccttttaagaaatactgaggctcaagtgaaaacattccctgacagaccaaaagccggagatacaagggaggtccccgtttacataagtgaagattccacaattgcccgcgagtcgtaccgggatcgccgagacaaggtggcagcaggtgcttcggaaagcacacggtcaaatgagaggaccgtcattctgggaaagaaaacagaagtgaaagccacgagggagcaagaaagaaacagaccagaaaccatccgaacaaagccagaagagaaaatgttcgattctaaagagaaggcttctgaggagagaaacctaagatgggaagaattgacaaagttagataaggaagcgagacagagagaaagccagcagatgaaggagaaggctaaggagaaggactcaccgaaggagaagagtgtgcgagagagagaggtgccgattagtctagaagtatcccaggacagaagagcagaggtgtccccgaaaggtttgcagacgcctgtgaaggatgctggtggtgggaccggtagagaggcagaagcaagagagctacggttcaggttgggcaccagtgatgccactggttctctgcaaggcgattccatgacagaaaccgtagcagaaaacatcgttaccagtatcctgaagcagttcactcagtctccagagacagaagcatctgctgattcttttccagacacaaaagtcacttacgtggacaggaaagagcttcctggggaaaggaaaacaaagactgaaatagttgtggagtctaaactgactgaggatgttgatgtttccgatgaagctggcctggactaccttttaagcaaggatattaaggaagtggggctgaaaggcaagtcagccgagcagatgataggagacatcatcaacctcggcctgaaagggagggaggggagagcaaaggtcgtcaacgtggagatcgtggaggagcccgtgagttatgtcagcggggagaagccggaggagttttccgtcccattcaaagtggaggaggtcgaagatgtgtcgccaggcccctgggggttggttaaggaggaggaaggttatggagaaagcgatgtcacattctcagttaatcagcatcgaaggaccaagcagccccaggagaacacgactcacgtggaagaagtgacagaggcaggtgattcagagggcgagcagagttattttgtgtccactccagatgaacaccccggggggcacgacagagatgacggctcggtgtacgggcagatccacatcgaggaggaatccaccatcaggtactcttggcaggatgaaatcgtgcaggggactcgaaggaggacacagaaggacggtgcagtgggcgagaaggttgtgaagcccttggatgtcccagcgccctctctggagggggacctgggttccactcactggaaagaacaagctagaagcggtgaatttcatgccgaacccacagtcattgaaaaagaaattaaaataccccacgaattccacacctccatgaagggcatctcctccaaggagccccggcagcagctggtggaggtcatcgggcagctggaggaaacccttcccgagcgcatgagggaggagctgtccgccctcaccagagaggggcagggtgggccggggagcgtttccgtggatgtcaagaaggtccagggtgctggtggcagttccgtgaccctggttgctgaagtcaacgtctcacaaactgtggatgccgatcggttagacctggaggagctgagcaaagatgaggccagtgagatggagaaggctgtggagtcggtggttcgggagagcctgagcaggcaacgcagcccagcgcctggcagcccagatgaggaaggtggagcggaggccccggctgctggcattcgcttcaggcgttgggccacccgggagctgtacatcccttcaggcgagagcgaggttgctggtggggcctctcacagctcgggacagcgcactccccagggcccagtgtcggccactgtggaggtcagcagccccacaggctttgcccagtcacaggtgctggaggatgtgagccaggctgcaaggcacataaaactcggcccctctgaagtctggaggactgagcgaatgtcatatgaaggacccactgcagaagtggtggaggtaagtgcgggaggtgacctaagtcaggcagcgagcccgaccggagccagccggtctgtgaggcatgtcacgctgggtcccggtcaaagtccactgtccagagaagtcatcttcctaggccctgcccctgcctgtccagaggcatggggctcgccagaacctggcccagcagagtcttctgcagatatggacggatcagggaggcacagcacatttggctgcagacaatttcatgctgaaaaggagattatttttcagggccccatttctgctgcagggaaggttggtgattattttgcaacagaagagtcagtgggtacccagacttctgtcaggcaactccagttaggccctaaagaagggttcagtgggcaaatccagttcacagctccactttcagacaaggtggagttgggtgtcataggagattctgtacacatggaagggttgccagggagcagcacatccatcaggcacatcagcattgggcctcagaggcatcagaccacccagcagatagtttaccatgggctggttccccaactgggggaatctggtgactcagagagcactgtgcacggagagggctcagcagatgtgcaccaggccactcacagtcatacctcgggtagacaaaccgttatgactgaaaagagcaccttccaaagtgtcgtttctgaatctccccaggaggatagtgcaggggacacatcaggggcagaaatgacatcgggtgttagcagatcctttaggcacattcgactaggtcctacagaaacggaaacctctgaacacattgccatccgtggacccgtgtccagaacatttgtgcttgctggttcagcggactcccctgagctaggcaagttagcagacagcagcagaacgctaaggcacattgcaccagggcccaaagaaacttcgtttacctttcagatggatgtgagtaacgtagaggcgatccgcagccggacacaggaagcgggagctctcggtgtgtctgaccgtggttcctggagagacgcggacagtaggaatgaccaggcagttggtgtgagctttaaggcctctgctggggaaggagaccaggcccacagagaacagggcaaggagcaggccatgtttgataagaaggtgcagctccagagaatggtagaccaaaggtcggtgatttcagatgaaaagaaagttgccctcctctatctagacaatgaggaggaggagaatgatgggcattggttttaataagcagaaacattttgttttaatggcagcctgttggcgacgtgccaacatccaaaggccttaacttattttaagaggccgagggagtctatgaaaatctccccttttttacttttttaaagagtactcccggcatggtcaatttcctttatagttaatccgtaaaggtttccagttaattcatgccttaaaaggcactgcaattttatttttgagttgggacttttacaaaacacttttttccctggagtcttctctccacttctggagatgaatttctatgttttgcacctggtcacagacatggcttgcatctgtttgaaactacaattaattatagatgtcaaaacattaaccagattaaagtaatatatttaagagtaaattttgcttgcatgtgctaatatgaaataacagactaacattttaggggaaaaataaatacaatttagactctaaaaagtcttttcaaaaagaaatgggaaataggcagactgtttatgttaaaaaaattcttgctaaatgatttcatctttaggaaaaaattacttgccatatagagctaaattcatcttaagacttgaatgaattgctttctatgtacagaactttaaacaatatagtatttatggcgaggacagctgtagtctgttgtgatatttcacattctatttgcacaggttccctggcactggtagggtagatgattattgggaatcgcttacagtaccatttcattttttggcactaggtcattaagtagcacacagtctgaatgcccttttctggagtggccagttcctatcagactgtgcagacttgcgcttctctgcaccttatcccttagcacccaaacatttaatttcactggtgggaggtagaccttgaagacaatgaagagaatgccgatactcagactgcagctggaccggcaagctggctgtgtacaggaaaattggaagcacacagtggactgtgcctcttaaagatgcctttcccaaccctccattcatgggatgcaggtctttctgagctcaagggtgaaagatgaatacaataacaaccatgaacccacctcacggaagctttttttgcactttgaacagaagtcattgcagttggggtgttttgtccagggaaacagtttattaaatagaaggatgttttggggaaggaactggatatctctcctgcagcccagcaccgagatacccaggacgggcctggggggcgagaaaggcccccatgctcatgggccgcggagtgtggacctgtagataggcaccaccgagtttaagatactgggatgagcatgcttcattggattcattttattttacacgtcagtattgttttaaagtttctgtctgtaaagtgtagcatcatatataaaaagagtttcgctagcagcgcattttttttagttcaggctagcttctttcacataatgctgtctcagctgtatttccagtaacacagcatcatcacactgactgtggcgcactggggaataacagtctgagctagcaccaccctcagccaggctacaacgacagcactggagggtcttccctctcagattcacctggaggccctcagacccccagggtgcacgtctccccaggtcctgggagtggctaccgcaggtagtttctggagagcacgttttcttcattgataagtggaggagaaatgcagcacagctttcaagatactattttaaaaacaccatgaatcagatagggaaagaaagttgattggaatggcaagtttaaacctttgttgtccatctgccaaatgaactagtgattgtcagactggtatggaggtgactgctttgtaaggttttgtcgtttctaatacagacagagatgtgctgattttgttttagctgtaacaggtaatggtttttggatagatgattgactggtgagaatttggtcaaggtgacagcctcctgtctgatgacaggacagactggtggtgaggagtctaagtgggctcagtttgatgtcagtgtctgggctcatgacttgtaaatggaagctgatgtgaacaggtaattaatattatgacccacttctatttactttgggaaatatcttggatcttaattatcatctgcaagtttcaagaagtattctgccaaaagtatttacaagtatggactcatgagctattgttggttgctaaatgtgaatcacgcgggagtgagtgtgcccttcacactgtgacattgtgacattgtgacaagctccatgtcctttaaaatcagtcactctgcacacaagagaaatcaacttcgtggttggatggggccggaacacaaccagtctttttgtatttattgttactgagacaaaacagtactcactgagtgtttttcagtttcctactggtggttttgatattgtttgtttaagatgtatatttagaatgacatcatctaagaagctgattttgctaaactcctgttccctacaatgggaaatgtcacaagaatgtgcaaaaataaaaatctgagg

SEQ ID NO: 984 - DNA, 4019 bp, Homo sapien
cccgggtatcaaaagaaggatcggctccgcccccgggctccccgggggagttgatagaagggtccttcccaccctttgccgtccccactcctgtgcctacgacccaggagcgtgtcagccaaagcatggagaatcaagagaaggcgagtatcgcgggccacatgttcgacgtagtcgtgatcggaggtggcatttcaggactatctgctgccaaactcttgactgaatatggcgttagtgttttggttttagaagctcgggacagggttggaggaagaacatatactataaggaatgagcatgttgattacgtagatgttggtggagcttatgtgggaccaacccaaaacagaatcttacgcttgtctaaggagctgggcatagagacttacaaagtgaatgtcagtgagcgtctcgttcaatatgtcaaggggaaaacatatccatttcggggcgcctttccaccagtatggaatcccattgcatatttggattacaataatctgtggaggacaatagataacatggggaaggagattccaactgatgcaccctgggaggctcaacatgctgacaaatgggacaaaatgaccatgaaagagctcattgacaaaatctgctggacaaagactgctaggcggtttgcttatctttttgtgaatatcaatgtgacctctgagcctcacgaagtgtctgccctgtggttcttgtggtatgtgaagcagtgcgggggcaccactcggatattctctgtcaccaatggtggccaggaacggaagtttgtaggtggatctggtcaagtgagcgaacggataatggacctcctcggagaccaagtgaagctgaaccatcctgtcactcacgttgaccagtcaagtgacaacatcatcatagagacgctgaaccatgaacattatgagtgcaaatacgtaattaatgcgatccctccgaccttgactgccaagattcacttcagaccagagcttccagcagagagaaaccagttaattcagcgtcttccaatgggagctgtcattaagtgcatgatgtattacaaggaggccttctggaagaagaaggattactgtggctgcatgatcattgaagatgaagatgctccaatttcaataaccttggatgacaccaagccagatgggtcactgcctgccatcatgggcttcattcttgcccggaaagctgatcgacttgctaagctacataaggaaataaggaagaagaaaatctgtgagctctatgccaaagtgctgggatcccaagaagctttacatccagtgcattatgaagagaagaactggtgtgaggagcagtactctgggggctgctacacggcctacttccctcctgggatcatgactcaatatggaagggtgattcgtcaacccgtgggcaggattttctttgcgggcacagagactgccacaaagtggagcggctacatggaaggggcagttgaggctggagaacgagcagctagggaggtcttaaatggtctcgggaaggtgaccgagaaagacatctgggtacaagaacctgaatcaaaggacgttccagcggtagaaatcacccacaccttctgggaaaggaacctgccctctgtttctggcctgctgaagatcattggattttccacatcagtaactgccctggggtttgtgctgtacaaatacaagctcctgccacggtcttgaagttctgttcttatgctctctgctcactggttttcaataccaccaagaggaaaatattgacaagtttaaaggctgtgtcattgggccatgtttaagtgtactggatttaactacctttggcttaattccaatcattgttaaagtaaaaacaattcaaagaatcacctaattaatttcagtaagatcaagctccatcttatttgtcagtgtagatcaactcatgttaattgatagaataaagccttgtgatcactttctgaaattcacaaagttaaacgtgatgtgctcatcagaaacaatttctgtgtcctgtttttattcccttcaatgcaaaatacatgatgatttcagaaacaaagcatttgactttctgtctgtggaggtggagtaggtgaaggcccagcctgtaactgtcctttttcttcccttaggcaatggtgaactgtcattacagagcctagaggctcacagcctcctggaggaagcagcctccactttggatcaggaaatagtaaaggaaagcagtgttgggggtagcggcatgcagaccctcagaccagaatggggacatcttgtggtctgctgcctcaggaatctcctgaccacttgtagtccctccgacttctctagacatctagtctcagtgctagcttatttgtatttttcctctttcacttcttatggaggagagtgtttaactgagttagaatgttgaaactgacttgctgtgacttatgtgcagctttccagttgagcagaggaaaatagtggcaggactgtcccccaggaggactccctgcttagctctgtgggagaccaactacgactggcatcttctcttccccctggaaggcagctagacaccaatggatccttgtcagttgtaacattctatttcaacttcaggaaagcagcagttttcttttaatttttcctatgaccataaaattagacatacctctcaacttacatatgtcttcaacatggttacctctgcataaatattagcaaagcatgccaatttctcttaagtactgaaatacatatgataaatttgactgttatttgttgagactatcaaacagaaaagaaattagggctctaatttccttaaagcaagctcacttgctttagttgttaagttttataaaagacatgaaattgagtcattttatatatgaaaactaagttctctatcttaggagtaatgtcggcccacaagggtgcccacctcttgttttccccttttaaaaactcagatttttaaaagccctttccaaaggtttcaactgtaaaatacttctttttacaatgtatcaacatatttttatttaaggggaattaacaattgccagggaaaccagccaacccaagtttattatatcattaaccttatcataaattcaaacctaagttgctggaccctggtgtgaggacataaatcttccaaagttttgcctatcctaagagctgcatttttctactgctctttaccttgcattttagctaatttaggagttttgagaatgtattggatacgctccagtacataaggagttgccgcatattatatcagactgctttgagaaatctcatccctagtctattgcagttgtttctattagcttactgattaactcagtcctgacacaccttttgggaaatgctgatttaaacttcttaactggcaacagttggaacagtaatcagtttgctaacatatttaaagtcttgaatgttgaagaactcatgtgatttacccttttcaactttttggaaaacgatttaatttattctaattagattaaccctattaatctatggattgggtatcaaaatgaatgccagtccagatgtgcctagacacgaaattggagctgaggactctcacgatatgcaagttcatccaacgtgaagataccataagctttttctctgaaccagagaaatgaaagtcagtttaagaggctgatagatcttggccctgttaaggcatccacttcacagttctgaaggctgagtcagccccactccacagttaggccaagaattagattttaaaacttcatctgtctgtcccagttaactgttaaataaggcctcatcctccactgaagagtatggattgaaggattgtgaactatgtttagtgtgattgtgaacttggtgcctaatgttccatgtctgaagtttgccccagtgctacacgttggagtatacctatgtgtgtgctttgccactgaagtaagattttgcctgtatggtactgttttgtttgttaataaagtgcactgccacccccaatgcaaa

SEQ ID NO: 985 - protein, 568 aa, Homo sapien
RVSKEGSAPPPGSPGELIEGSFPPFAVPTPVPTTQERVSQSMENQEKASIAGHMFDVVVIGGGISGLSAAKLLTEYGVSVLVLEARDRVGGRTYTIRNEHVDYVDVGGAYVGPTQNRILRLSKELGIETYKVNVSERLVQYVKGKTYPFRGAFPPVWNPIAYLDYNNLWRTIDNMGKEIPTDAPWEAQHADKWDKMTMKELIDKICWTKTARRFAYLFVNINVTSEPHEVSALWFLWYVKQCGGTTRIFSVTNGGQERKFVGGSGQVSERIMDLLGDQVKLNHPVTHVDQSSDNIIIETLNHEHYECKYVINAIPPTLTAKIHFRPELPAERNQLIQRLPMGAVIKCMMYYKEAFWKKKDYCGCMIIEDEDAPISITLDDTKPDGSLPAIMGFILARKADRLAKLHKEIRKKKICELYAKVLGSQEALHPVHYEEKNWCEEQYSGGCYTAYFPPGIMTQYGRVIRQPVGRIFFAGTETATKWSGYMEGAVEAGERAAREVLNGLGKVTEKDIWVQEPESKDVPAVEITHTFWERNLPSVSGLLKIIGFSTSVTALGFVLYKYKLLPRS

SEQ ID NO: 986 - DNA, 5205 bp, Homo sapien
gctctcgcggcagttcagacctcgtgctcgtccccttcgcctgtctgtgtgtggtatccgtaggtccggggcactttttttttggtgtgtgtgtgtgtgcgtgcgcgcgtgtgtgtgtgttgggtgtgtgtgttttgggggtttgccggggcgcggagaggagagccgggccgaggggaaggaaggaagccgtagagctccccggtctcgggctgcgtctcccctccagcgctctcctgcctgtgcgctccgacgcggcagcggcggtggcgctgagcgctcctcggtggggacgcggtgctcaagctgggagcagcgagaaccctttgcggaggcttcccgtgcccgctggacttaggatgccagggcgtttgatttgcacctactgagcccggagttcctccccggccctgggaagggcttgcagcggcggcggcggcggcggcagcggcagtagcagacggaacagcaggctctcctctccgagggggggcgtcgaagcgcccgcgccgggctcccgccctcaccctccggcgctcctgcggccccaagccaccacctcgtagcccgcctccttcctcttctcgccgcgagccccaggcccggacgcctctaggatcggacccgcgcgccccggatgcttggggctgccccggcgcgcccccctacaggcgcgacccgctgagtgacccggagggggcccgagctcgccccaggaggggcccccggcctcgggaccccgcgccggacctgctggggagccgacgatgtccgcgcagtcccaggcattgacgcgctcgacgcagcccagggaaggcggccggccgctgcccgccgagccctaggcgcacaaagcccgcgcccgccgcccggccccggcgcccgccgacgactttgccgcctgctccgcggctctttgtctccacttggggcgggcgcccgactctgggatttcgctgcgagaacgagctgggggggccgggggcgagctctcggtttcccggccgccccccgctcgggctcggctcccccctcccccgcacctccccggcccgggctctcggcgcttccacgctctcggaatcacgacccctccctgccatgtatccgcagggcagacatccggctccccatcaacccgggcagccgggatttaaattcacggtggctgagtcttgtgacaggatcaaagacgaattccagttcctgcaagctcagtatcacagcctcaaagtggagtacgacaagctggcaaacgagaagacggagatgcagcgccattatgtgatgtactatgagatgtcctatggcttgaacattgaaatgcacaagcagacagagattgcgaagagactgaacacaattttagcacagatcatgcctttcctgtcacaagagcaccagcagcaggtggcgcaggcagtggagcgcgccaagcaggtcaccatgacggagctgaacgccatcatcgggcagcagcagctccaggcgcagcacctctcccatgccacacacggccccccggtccagttgccaccccacccgtcaggtctccagcctccaggaatccccccagtgacagggagcagctccgggctgctggcactgggcgccctgggcagccaggcccatctgacggtgaaggatgagaagaaccaccatgaactcgatcacagagagagagaatccagtgcgaataactctgtgtcaccctccgaaagcctccgggccagtgagaagcaccggggctctgcggactacagcatggaagccaagaagcggaaggcggaggagaaggacagcttgagccgatacgacagtgatggggacaagagtgatgatctggtggtggatgtttccaatgaggaccccgcaacgccccgggtcagcccggcacactcccctcctgaaaatgggctggacaaggcccgtagcctgaaaaaagatgcccccaccagccctgcctcggtggcctcttccagtagcacaccttcctccaagaccaaagaccttggtcataacgacaaatcctccacccctgggctcaagtccaacacaccaaccccaaggaacgacgccccaactccaggcaccagcacgaccccagggctcaggtcgatgccggcctcggctctgcgcacgcccatctccatcaccagctcctatgcggcgcccttcgccatgatgagccaccatgagatgaacggctccctcaccagtcctggcgcctacgccggcctccacaacatcccaccccagatgagcgccgccgccgctgctgcagccgctgcctatggccgatcgccaatggtgagctttggagctgttggttttgaccctcaccccccgatgcgggccacaggcctcccctcaagcctggcctccattcctggaggaaaaccagcgtactcattccatgtgagtgctgatgggcagatgcagcccgtgcccttcccccacgacgccctggcaggccccggcatcccgaggcacgcccggcagatcaacacactcagccacggggaggtggtgtgtgccgtgaccatcagcaaccccacgaggcacgtctacacaggtggcaagggctgcgtgaagatctgggacatcagccagccaggcagcaagagccccatctcccagctggactgcctgaacagggacaattacatccgctcctgcaagctgctccctgatgggcgcacgctcatcgtgggcggcgaggccagcacgctcaccatctgggacctggcctcgcccacgccccgcatcaaggccgagctgacgtcctcggctcccgcctgttatgccctggccattagccctgacgccaaagtctgcttctcctgctgcagcgatgggaacattgctgtctgggacctgcacaaccagaccctggtcaggcagttccagggccacacagatggggccagctgcatagacatctcccatgatggcaccaaactgtggacagggggcctggacaacacggtgcgctcctgggacctgcgggagggccgacagctacagcagcatgacttcacttcccagatcttctcgctgggctactgccccactggggagtggctggctgtgggcatggagagcagcaacgtggaggtgctgcaccacaccaagcctgacaagtaccagctgcacctgcacgagagctgcgtgctctccctcaagttcgcctactgcggcaagtggttcgtgagcactgggaaagataaccttctcaacgcctggaggacgccttatggagccagcatattccagtctaaagaatcctcgtctgtcttgagttgtgacatttcagcggatgacaaatacattgtaacaggctctggtgacaagaaggccacagtttatgaggtcatctactaaacaagaactccagcagggctgtcaaactctgggagaaaccgactcggctctgacagggagacccccaggcgaggggccccgaggatggcggaggatgggccgcaggcagccgagcgttcagggctgcgctccggccggctgagagggcacgtgccccgtcacagtctggactcctgggcctggattgatgtgtctcacagactcggaagggttctgctcctcctcctccccctgaacaatgctggcagttgctacaaatagatttattggaggcttatggctccggttcccccacagacccgctcatgagtctctgtttgttcttcccttttcttttgccctgtccctcaccttgggtcgggggtgctggagtggaccacaatgttgtgctgggggatgggggggtctctctttgccgattgtgcagtgcacaagatttgtgaaaaatgtaaataacagactcctattgcggactgatcagtgggagaggaggccccttcccaccggaaactctgagtgtgtatttcgcctgctgtatttgtaatccactcgtggtggtggctttttttttttttttttttaaataaacagatgctctcacctgggaagaggagacagggaggggaaccaattgaagaaagaggagaaaagtcttagagtgtggaaaaggcaaccaggttggccgtaaggtgcctgctggaatgcgtgtgcctccacacgggtctgggcatccggactgataaccagccggccagactgagggatggaaggcactgagatgggggcccgtccaggcggacacccgcagaaatggagctttctgtggtctcttgcactctggctgcctcttgccctctctgtgtctctctttcttggtctctccctctctcctcctcagcctggtctttctctttggtgcacacttagttattgttgtgagcaatggaagttcaaaggaactccctctccagctcttctgaatcttgggacacagcctaaaaaggacaaaaagttagaagacagcatagcaactcagctcagggagctaccagagaaaaatagcaactgatgtgggtgcttttttttttttttaatttgaataaaaagaattagaagtgatgtccttttataaaatgccttctcccccttcccgcctacagtctcttcctctccccttagaggggggaaagtgtataaacctacagggttgtgagtctgaaaagaggatccccctcacccccaccctgggcagagcagtgggggttggggggtgggagagggggacacagatcctggcacactgtggatatttcttgcagattgcagtctcttgtggcccaaacaggttaggtagactatcgcctctggcaggtgccaccttttggtaccaacatgttctgaggtgttaggatttgggttgggttttttttgtttgtttttttttttccttttggtctttttttttttctccttttaaagaaaagctaaaggccgctgtgagtcctggtggcaggctctccatggatgtagcatatcgaagataatttttatactgcatttttatggattattttgtaatgtgtgattccgtctgctgaggaggtgggaggggctccagggaaagccacccaccttcagtgaggttgctccccagctgagcgcaccgggcatgggatgtggaggctggcgacacaccctgtgcctctccaaggctgggcgcgtggggcgtccagagtctctctgggtctcagatgtccatctgccacctcttgttaaggctctagccagaagggagggtgagggtagaagaaagttattctc

SEQ ID NO: 987 - DNA, 6846 bp, Homo sapien
ctgtgcaacggggtcaacgactgtggtgacaacagcgacgaaagcccacagcagaattgccggccccggacgggtgaggagaactgcaatgttaacaacggtggctgtgcccagaagtgccagatggtgcggggggcagtgcagtgtacctgccacacaggctaccggctcacagaggatgggcacacgtgccaagatgtgaatgaatgtgccgaggaggggtattgcagccagggctgcaccaacagcgaaggggctttccaatgctggtgtgaaacaggctatgaactacggcccgaccggcgcagctgcaaggctctggggccagagcctgtgctgctgttcgccaatcgcatcgacatccggcaggtgctgccacaccgctctgagtacacactgctgcttaacaacctggagaatgccattgcccttgatttccaccaccgccgcgagcttgtcttctggtcagatgtcaccctggaccggatcctccgtgccaacctcaacggcagcaacgtggaggaggttgtgtctactgggctggagagcccagggggcctggctgtggattgggtccatgacaaactctactggaccgactcaggcacctcgaggattgaggtggccaatctggacggggcccaccggaaggtgttgctgtggcagaacctggagaagccccgggccattgccttgcatcccatggagggtaccatttactggacagactggggcaacaccccccgtattgaggcctccagcatggatggctctggacgccgcatcattgccgatacccatctcttctggcccaatggcctcaccatcgactatgccgggcgccgtatgtactgggtggatgctaagcaccatgtcatcgagagggccaatctggatgggagtcaccgtaaggctgtcattagccagggcctcccgcatcccttcgccatcacagtgtttgaagacagcctgtactggacagactggcacaccaagagcatcaatagcgctaacaaatttacggggaagaaccaggaaatcattcgcaacaaactccacttccctatggacatccacaccttgcacccccagcgccaacctgcagggaaaaaccgctgtggggacaacaacggaggctgcacgcacctgtgtctgcccagtggccagaactacacctgtgcctgccccactggcttccgcaagatcagcagccacgcctgtgcccagagtcttgacaagttcctgctttttgcccgaaggatggacatccgtcgaatcagctttgacacagaggacctgtctgatgatgtcatcccactggctgacgtgcgcagtgctgtggcccttgactgggactcccgggatgaccacgtgtactggacagatgtcagcactgataccatcagcagggccaagtgggatggaacaggacaggaggtggtagtggataccagtttggagagcccagctggcctggccattgattgggtcaccaacaaactgtactggacagatgcaggtacagaccggattgaagtagccaacacagatggcagcatgagaacagtactcatctgggagaaccttgatcgtcctcgggacatcgtggtggaacccatgggcgggtacatgtattggactgactggggtgcgagccccaagattgaacgagctggcatggatgcctcaggccgccaagtcattatctcttctaatctgacctggcctaatgggttagctattgattatgggtcccagcgtctatactgggctgacgccggcatgaagacaattgaatttgctggactggatggcagtaagaggaaggtgctgattggaagccagctcccccacccatttgggctgaccctctatggagagcgcatctattggactgactggcagaccaagagcatacagagcgctgaccggctgacagggctggaccgggagactctgcaggagaacctggaaaacctaatggacatccatgtcttccaccgccgccggcccccagtgtctacaccatgtgctatggagaatggcggctgtagccacctgtgtcttaggtccccaaatccaagcggattcagctgtacctgccccacaggcatcaacctgctgtctgatggcaagacctgctcaccaggcatgaacagtttcctcatcttcgccaggaggatagacattcgcatggtctccctggacatcccttattttgctgatgtggtggtaccaatcaacattaccatgaagaacaccattgccgttggagtagacccccaggaaggaaaggtgtactggtctgacagcacactgcacaggatcagtcgtgccaatctggatggctcacagcatgaggacatcatcaccacagggctacagaccacagatgggctcgcggttgatgccattggccggaaagtatactggacagacacgggaacaaaccggattgaagtgggcaacctggacgggtccatgcggaaagtgttggtgtggcagaaccttgacagtccccgggccatcgtactgtaccatgagatggggtttatgtactggacagactggggggagaatgccaagttagagcggtccggaatggatggctcagaccgcgcggtgctcatcaacaacaacctaggatggcccaatggactgactgtggacaaggccagctcccaactgctatgggccgatgcccacaccgagcgaattgaggctgctgacctgaatggtgccaatcggcatacattggtgtcaccggtgcagcacccatatggcctcaccctgctcgactcctatatctactggactgactggcagactcggagcatccaccgtgctgacaagggtactggcagcaatgtcatcctcgtgaggtccaacctgccaggcctcatggacatgcaggctgtggaccgggcacagccactaggttttaacaagtgcggctcgagaaatggcggctgctcccacctctgcttgcctcggccttctggcttctcctgtgcctgccccactggcatccagctgaagggagatgggaagacctgtgatccctctcctgagacctacctgctcttctccagccgtggctccatccggcgtatctcactggacaccagtgaccacaccgatgtgcatgtccctgttcctgagctcaacaatgtcatctccctggactatgacagcgtggatggaaaggtctattacacagatgtgttcctggatgttatcaggcgagcagacctgaacggcagcaacatggagacagtgatcgggcgagggctgaagaccactgacgggctggcagtggactgggtggccaggaacctgtactggacagacacaggtcgaaataccattgaggcgtccaggctggatggttcctgccgcaaagtactgatcaacaatagcctggatgagccccgggccattgctgttttccccaggaaggggtacctcttctggacagactggggccacattgccaagatcgaacgggcaaacttggatggttctgagcggaaggtcctcatcaacacagacctgggttggcccaatggccttaccctggactatgatacccgcaggatctactgggtggatgcgcatctggaccggatcgagagtgctgacctcaatgggaaactgcggcaggtcttggtcggccatgtgtcccacccctttgccctcacacagcaagacaggtggatctactggacagactggcagaccaagtcaatccagcgtgttgacaaatactcaggccggaacaaggagacagtgctggcaaatgtggaaggactcatggatatcatcgtggtttcccctcagcggcagacagggaccaatgcctgtggtgtgaacaatggtggctgcacccacctctgctttgccagagcctcggacttcgtatgtgcctgtcctgacgaacctgatagccagccctgctcccttgtgcctggcctggtaccaccagctcctagggctactggcatgagtgaaaagagcccagtgctacccaacacaccacctaccaccttgtattcttcaaccacccggacccgcacgtctctggaggaggtggaaggaagatgctctgaaagggatgccaggctgggcctctgtgcacgttccaatgacgctgttcctgctgctccaggggaaggacttcatatcagctacgccattggtggactcctcagtattctgctgattttggtggtgattgcagctttgatgctgtacagacacaaaaaatccaagttcactgatcctggaatggggaacctcacctacagcaacccctcctaccgaacatccacacaggaagtgaagattgaagcaatccccaaaccagccatgtacaaccagctgtgctataagaaagagggagggcctgaccataactacaccaaggagaagatcaagatcgtagagggaatctgcctcctgtctggggatgatgctgagtgggatgacctcaagcaactgcgaagctcacgggggggcctcctccgggatcatgtatgcatgaagacagacacggtgtccatccaggccagctctggctccctggatgacacagagatggagcagctgttacaggaagagcagtctgagtgtagcagcgtccatactgcagccactccagaaagacgaggctctctgccagacacgggctggaaacatgaacgcaagctctcctcagagagccaggtctaaatgcccacattctcttccctgcctgcctgttccttctcctttatggacgtctagtccttgtgctcgcttacaccgcaggccccgcttctgtgtgcttgtcctcctcctcctcccaccccataactgttcctaagccttcaccggagctgtttaccacgtgagtccataactacctgtgcacaagaaatgatggcacatcacgagaatttagacctggattttaccatgaacctcacatcttgtactccatcctgggccccctgaaactgcttattcgtgattcctcaccagcgtagagctccacctcccctttccccagtaccctcagtgcctgcttctcagtgctgatgcagctgatgacccaggactgcgctctgccccatcacagccagcatgactgcttctctgagagaacttgcccatcaggggctgggacatgggggtgtgggtaaagacagggatgaaggatagaggctgagagaagaaggaagaatcagcccagcaggtatgggcatctgggaaacctccagcctcaagtgtgttggtaacatgaaaaagctctggggggtagttggatctgggtgtctggtccattgctggcagtggacattattcttgccctaagagacactgccttttcagcagcagatactggtgagatgggggtggctcaggctgttcttcctcctcctagaatgtctggagctgtttctacattcagataactgggtcccctatcacaaggctactggctaataggaattccctcctggtgccaccactggccagtacctttcctaagtctttgctcaaattaaccaggttgtgagccagtggcttgagtgaatgttaggccttgggggctgagtctctgaaaagtctaagaagctctgcctagaccaaatatggtatacctcctgacccctctctccctcatgtcctgggattctggggaagagacctagaaacaagctttcaaagaaaaaccagaagttgtcataaatggtcagaaagaacgatcaggttggagacttgggaaacccagggcctaaagagaagtatccatgagggtcaaacttcctgttgaacttcctatgttctttctcaagtgctcagggatctaagttagtggacagcaagcctgtggctacggggtggtgatgttcctcttccagctgtcccctcagctaaggggcttagtttccatgtgggatgccatcacttggttcatgctcattcacacaaagggcacgtgtctcagcctggtatcagggaaattgagacttatttttgccctaaaacgtctccctagctgttcttcgtggggtttttttgtttgtttttttgcctaatttgctttttctgaccaagccttgtggcaccagcaatctccaaagtcctgtggtgggagggctgaataaataaaaatacaaagaggtgggtaaggagtaggaaggtagagagcaccactgatgaggccctcctagcccatggcagacccagacctcttctcccccaggaattagaagtggcaggagagaacaacaggggctgggaatggaggggagaatttctaggggaagtttcctgagttgaaacttctcctgtggttactggtattgagaaatcagctaccaaagtgaaaaaggacaagatcaattcttttctagtcagttctaagactgctagagagagataccaggcccttagccttgctctcagtagcgtcagccccagttctgagcctccccacattacacttaacaagcagtaaaggagtgagcactttgggtccttagactcatgtctggggaggaagagcaagtagaaaagtggcattttcttgattggaaagggggaaggatcttattgcacttgggctgttcagaatgtagaaaggacatatttgaggaagtatctatttgagcactgatttactctgtaaaaagcaaaatctctctgtcctaaactaatggaagcgattctcccatgctcatgtgtaatggttttaacgttactcactggagagattggactttctggagttatttaaccactatgttcagtattttaggactttatgataatttaatataaatttagcttttcttaatc

SEQ ID NO: 988 - protein, 1576 aa, Homo sapien
LCNGVNDCGDNSDESPQQNCRPRTGEENCNVNNGGCAQKCQMVRGAVQCTCHTGYRLTEDGHTCQDVNECAEEGYCSQGCTNSEGAFQCWCETGYELRPDRRSCKALGPEPVLLFANRIDIRQVLPHRSEYTLLLNNLENAIALDFHHRRELVFWSDVTLDRILRANLNGSNVEEVVSTGLESPGGLAVDWVHDKLYWTDSGTSRIEVANLDGAHRKVLLWQNLEKPRAIALHPMEGTIYWTDWGNTPRIEASSMDGSGRRIIADTHLFWPNGLTIDYAGRRMYWVDAKHHVIERANLDGSHRKAVISQGLPHPFAITVFEDSLYWTDWHTKSINSANKFTGKNQEIIRNKLHFPMDIHTLHPQRQPAGKNRCGDNNGGCTHLCLPSGQNYTCACPTGFRKISSHACAQSLDKFLLFARRMDIRRISFDTEDLSDDVIPLADVRSAVALDWDSRDDHVYWTDVSTDTISRAKWDGTGQEVVVDTSLESPAGLAIDWVTNKLYWTDAGTDRIEVANTDGSMRTVLIWENLDRPRDIVVEPMGGYMYWTDWGASPKIERAGMDASGRQVIISSNLTWPNGLAIDYGSQRLYWADAGMKTIEFAGLDGSKRKVLIGSQLPHPFGLTLYGERIYWTDWQTKSIQSADRLTGLDRETLQENLENLMDIHVFHRRRPPVSTPCAMENGGCSHLCLRSPNPSGFSCTCPTGINLLSDGKTCSPGMNSFLIFARRIDIRMVSLDIPYFADVVVPINITMKNTIAVGVDPQEGKVYWSDSTLHRISRANLDGSQHEDIITTGLQTTDGLAVDAIGRKVYWTDTGTNRIEVGNLDGSMRKVLVWQNLDSPRAIVLYHEMGFMYWTDWGENAKLERSGMDGSDRAVLINNNLGWPNGLTVDKASSQLLWADAHTERIEAADLNGANRHTLVSPVQHPYGLTLLDSYIYWTDWQTRSIHRADKGTGSNVILVRSNLPGLMDMQAVDRAQPLGFNKCGSRNGGCSHLCLPRPSGFSCACPTGIQLKGDGKTCDPSPETYLLFSSRGSIRRISLDTSDHTDVHVPVPELNNVISLDYDSVDGKVYYTDVFLDVIRRADLNGSNMETVIGRGLKTTDGLAVDWVARNLYWTDTGRNTIEASRLDGSCRKVLINNSLDEPRAIAVFPRKGYLFWTDWGHIAKIERANLDGSERKVLINTDLGWPNGLTLDYDTRRIYWVDAHLDRIESADLNGKLRQVLVGHVSHPFALTQQDRWIYWTDWQTKSIQRVDKYSGRNKETVLANVEGLMDIIVVSPQRQTGTNACGVNNGGCTHLCFARASDFVCACPDEPDSQPCSLVPGLVPPAPRATGMSEKSPVLPNTPPTTLYSSTTRTRTSLEEVEGRCSERDARLGLCARSNDAVPAAPGEGLHISYAIGGLLSILLILVVIAALMLYRHKKSKFTDPGMGNLTYSNPSYRTSTQEVKIEAIPKPAMYNQLCYKKEGGPDHNYTKEKIKIVEGICLLSGDDAEWDDLKQLRSSRGGLLRDHVCMKTDTVSIQASSGSLDDTEMEQLLQEEQSECSSVHTAATPERRGSLPDTGWKHERKLSSESQV

SEQ ID NO: 989 - DNA, 2067 bp, Homo sapien
ggcacgagggttctccttcgctgcccccagctcagaggatgatgtgttcatccccactgtgagggaagtgcagtgtccagaggccaatattgatacagccctttgtaaggaaagtccggggctctggggagccagcatcctgaaggcaggtgctggggtccctggggagcagcctgtggaccttaacctgcctttggaagctcccccaatttcaaaggtcagagtgcatattcagggtgctcaggttgaaagtcaagaggtcactatacacagcatagtgacaccagagtttgtagatctctcagtacccaggactttttccactcagattgtgcgggaatcagagatccccacgtcagagattcaaacaccttcgtacggattttccttattaaaagtgaaaatcccagagccccacacgcaggctagagtgtacacaacaatgactcaacactctaggactcaggagggcacagaagaggctcccatacaagccaccccaggagtagactccatttctggagatctccagcctgacactggagaaccatttgagatgatctcttccagcgtcaatgtactgggacagcaaacactcacatttgaagttccttctggccaccagcttgcagacagctgttcagatgaggagccagcagaaattcttgagtttccccctgatgatagccaagaggcaaccacaccactggcagatgaaggcagggctccaaaagacaaaccagaaagtaaaaaatctggtctgctctggttttggcttccaaacattgggttttcctcttctgttgatgagacaggtgttgattccaaaaatgacgtccagagatctgctcccattcaaacacagcctgaggcacgaccagaggcagaactgcctaaaaaacaggagaaggcaggctggttccgatttcccaaattagggttctcctcatctcctaccaagaaaagcaaaagcaccgaagatggggcagagctggaagaacaaaaacttcaagaagaaacaatcacgttttttgatgcccgagaaagtttctcccctgaagagaaggaagagggtgaactgatcgggcctgtgggcactgggctggactccagagtgatggtgacatccgcggcaagaacagagttaatcctgcccgagcaggacagaaaagctgacgatgaaagcaaagggtcaggcctgggaccaaatgaaggctgagaggtatggctcatcggtacaagagagatgcaaaaaactaagttggaaagtaaaggctacacacacatatggagcaccccatcccacagcacattacatccacctcacttcacagaacggagaacagagcagaaatgaccagaacacctttgtcaccatcacacagccctcctaaaatggaaccaaagcttcccagctccctcaaagctttggatgcaaagaaggcaccctgacttccacaagacaccagaattcacacggtactcagaggcactgctggggaagtttgttggtctttattagataaatttccagagacctgtccataatacccaacagaacatgactgtttctttgaggaaagggttataatgtctgtggtgtacaagtcgtttttggtataacttctttcctgctgctgctgcttcccggcaaacatagttttcctatttcaggcagagtgcggtatattccaggaaacactgtttcctactcacttagcttacttctttgttgaatgcctcactaatggcaagtttcaagatgttttgggtgacaatgcacacatgctgggcaaaagggtgatggccagtggctggcagctgggccagcagaagctaggacatctgtgagttgtcattctcatctatccatgtccactggcctgccagcatccgccagtgccttgccagtgtgcacggtcccacactgtggcccctgagtcccctaatgtacacgctgcagccagaatgcagatggagctggcttggctgttccctggatgggcaataaagaaagtgctgcatcccaaaaaaaaaaaaaaaaaaaaaaaaaaaaaaaaaaaaaaa

SEQ ID NO: 990 - DNA, 8988 bp, Homo sapien
  Unsure 5325-5343, 7848, 8971: Unknown base
aattgcggccgcgtcgacgctgcgagaagacgacagaagggggttgcatgtactgtatgtggagcagtgtacagtgaagcggaggcagagcggctccgcgagcttctctccactttcccatagagaaaccctgactggccgctgagggctagctacacacacgccctcacgcccggcgagcccgcgaggtcactatcatatgacaaaggctttgccgcagttcatcttcctccctgtgtactttccatttgccttcctggaatcctgctgcatcacagaagctggaagttctgatgttccactgaaatcacaatggaaagtcttgacttgactggtcacagtaatgaaaggcagtaatagaaataaggatcattcagcagaaggagaaggggttggaaaacgaccaaaacgaaagtgtcttcagtggcatccattgctagcaaagaaacttcttgatttttcagaagaggaagaagaggaagacgaagaggaggatattgataaggttcaacttcttggggccgatggcctagagcaagatgttggtgaaactgaagatgatgaatcaccagagcagcgagcccggagaccaatgaatgcatttcttttattttgcaaacgccatcgctctcttgtacgtcaggaacaccccaggcttgataaccgaggtgctaccaagatactagctgattggtgggctgttcttgatccaaaggaaaagcagaaatacacagacatggccaaggagtataaggatgcatttatgaaagcaaatcctggctacaaatggtgtcctaccacaaacaagcctgtgaaatccccaacacccactgtcaatccacgaaagaaactttgggccttcccatctgactcttcaagagacttgccaagccccaagaaagcaaagactgaagaaatgcctcagcttaactttggaatggctgatcctactcaaatgggaggcctgagtatgctgctgttagctggagaacatgctcttggcacaccagaggtatcctctggcacatgcaggcctgatgtttcagaatctcctgaattacgtcagaagtcaccattgtttcagtttgccgagatatcttcaagtacgtcccactctgatgcttctacaaagcagtgtcaaacatctgccttgtttcagtttgcagagatttcttcaaacacttcgcagttgggtggtgctgagcctgtaaaacgctgtggaaagtctgcactctttcaactggcagagatgtgcctggcatcagaagggatgaaaatggaagaatcaaagctaataaaagcaaaagaatccgatggtggaagaattaaagaattagagaagggaaaggaagaaaaagaaattaaaatggagaaaacagatgaaactaggttacagaaggaagcagaatttgaaaaatcggctaaggaaaatttaagagattctaaggaattgagaaattttgaggcattgcaaatagatgacataatggctataaaaatggaagatcccaaagaaattagaaaggaagagttagaagaagatcacaaatgtagtcattttcctgatttttcttattctgccagtagcaagataataattagtgatgttcccagtagaaaggatcatatgtgccatcctcatggaattatgatcattgaggatcccgcagcattaaacaagccagaaaagctaaaaaagaaaaagaagaaaagcaaaatggatcgacatggaaatgataaatccacacccaagaagacttgcaaaaagaggcagtcttcggaatctgacattgagagcgtcatatataccattgaagccgtcgcaaaaggagactggggcatagagaaacttggagatacccctcgcaagaaggtccgcacatcctcaagtggcaagggaagcattttggatgccaagccaccaaagaaaaaagtgaaatcaagagagaagaaaatgtcaaaggagaaatcctcagacaccaccaaagagtcaagacctccagatttcattagtatttctgctagcaagaacatttctggtgagacaccagagggtataaaagcagaaccattgacccctatggaagatgcactaccacccagcctatcaggacaggccaagcctgaggacagtgactgtcacagaaaaatagaaacttgtggttccaggaaatccgagaggtcttgcaaaggtgctctttataaaaccctggtgtctgagggcatgctcacctctctgcgagctaatgttgacagaggaaaacgaagctcaggaaaaggaaactcctctgatcatgaagggtgttggaatgaagaaagctggacatttagtcagagtgggaccagtgggagcaagaagttcaagaagacaaagccaaaagaagactgtctccttggctccgcaaagctggatgaagaatttgaaaaaaaattcaacagcctccctcaatatagtcctgttacatttgaccggaaatgtgtacctgtcccaagaaaaaagaagaagactggaaatgtgtcctcagaaccgactaaaaccagcaaaggaagtggggataaatggtcaaacaagcaactcttcttggatgccattcaccctacagaagccatattttcagaagacagaaacaccatggagcctgttcataaggttaaaaatatcccatccattttcaacactccagagccaacaacaacgcaagaacctttggtgggcagccaaaagagaaaagcaaggaaaaccaagattacacaccttgtcaggacagcagatggccgggtatcaccagcaggaggtactttggatgacaaaccaaaggaacaactgcagaggagtctccctaaagcaactgagacagactgcaatgacaaatgctcacacaacaccgaggtcggggagacgcggagcagtactccagaaatgcctgccgtgtctgcgttctttagcctcgctgcgctggctgaagtggcagccatggaaaatgtgcacagaggtcagaggtcaactccgctcacccatgatggacagccaaaagaaatgccgcaggctcctgtacttatttcctgcgctgaccagtgaagcgccctttcattgtaaaacattgtgctttacctactaccctagccttgtctttaccgagggatgctagtgagtccaagtggtggaaaatatagactgcaaacaagtgcttgttgccccacacggcccagattcacttgaagcagaagttagcatcctgggccagtttgttctctcagaacccagaatctttgagggtaaggttatctgtctgatactgagcagaaacagaatgatcctggagctttgctttctattgaaggcttttgacggtaataggtggtaacttggtaaaaggctgcctttactgtagctcacccagcatctcttttaccaaccagagagtgtgaaactagtttcatatattacctagttattctttcaaaacaaaacaaaaaaaaaacaaaaactgacgcactgcactagttattattagatattcttagtcttttttgtacatggagatttaagtttaagatggtttatataataggttatacctacatttatattgtagaataaatattaaaaagcctgttccagagactcccaagcagcctgggcaggcagatgtaccattgttagtggtgtatgctcggcctcgtggtccatatattctgcacttttatatttgccaccagaatggtagtttgctggcaaaaaaaaaaaaaagagagagagaaaaaattacaactcttacaatctgaatttttttcttagccttgagtgaccaagaagaatttgcttgaggcaaattgtggcaaatattttcccagacaggggaagagtcctgcagattacagattactggtgttttcatgccttgaggattcttttatttttacataggggtctaagtgaccaatggattgttcatacaaacaaaaaaaaagacaaaaatattattcagaagtgaccttagtattacttcactattctaaacacattgaagacactcacttcatgtggacttggagctacagaccttttacatccatcacagattggctggacgggttgcaattgctatgcacagcctgattggcactgcaggtttttagagccattttgagtttgtgttgtttaggaggtactgagtcaatgatgagggaggtatgcctgaccagagtgggactctcagtcatagatccacctgcaagtctctgtttcctttttgtgttttgttgcttttgaacataaaaccaaccatacataagcagcgccaagtggattaactggcttagaacattcaacatattgacttaaccacctgacattcacagtgtcttgtttcctagcaacagatgcaaagtgataaatcaaaattagtctgaggctacagattttacagggtatttgttctatagcacaaagtatttccccactcttgcgtcacagcacaaactaccaaattttaattattggattccagcaataatttttaatggttttcaaactggcggaattttgacagtgctagttcgagtttgaagcttttgaattagatctctaaatggtgacagtttacatggttttatctagctttcttatttatacttgactgaattgtaatgattttttttctaattgtaatttgacgtaatagccatacaaaaaatgactctattcatactaggtttagcttctcatggttgtagatattacttcagttccggtgctggaaaatatgtacaacatactaacaggattgaaaaaaaaatagaggtttttcttctggtttttttttccaaagcaggtaaagagggtagcaaagcatcggaatgatgtgctcaaaaatgcatattcctggtggggatggaggaagaaggcattagtaaaaggttaatcaaacgttacaacttaaccccattcatgcaggaataaatcaagtgagcagttccagacttttgcataatatttttactatgatgctgttttattaatattttctaaatttcaaaacaaaaagtgaatgtttgaaattgctgggtcccgatgttggtggctgttggagttttggaccactcgctagcagtgatttgaagattataattagctaaaatccaaaacaaaaaaccaacaacaaaaattgtatggtgcggaacatgcaccttgacaatggtactaacttgttattctatagaacacgttagaatagatctatttttgccagagcaccctccttcagtcctccgattacatttcactagagttccttacgagattgctgtatattcctgggaccnnnnnnnnnnnnnnnnnnnagcaaagcaaaagattactttttttctatgtgattaatatcttacttgatctgcttttcctaaacctcagtggcttttcccttaggcagggttgggggtgggagggcaacttactggagatgactgttttcagatactttaaaacaaacctttttgtagaaatgcttaatttttaagcggttaggcactgagagtagcagaaatcctgcaaagctttatagttccttagactcaccttgtcgattctctgagtaaagtcttgatttcaataattgtgcttctcatgccctgaatctgctggagaggagtgttgttattttcaggtaacaacattcgttagcacaaatatttcagaccaatattagtgctctccaccccaccttttgttatcattttcatttcatttctctcattcttttttattttggaaaatcatattgctatagtgtgtactttaatctgccagcagataccatctacactaacatttgtcccacagcatcctcaagagaaaaagttgttgcaccttatatatatctcaagcaaaccaaaatatgatgctcttctgctttgttttattctaaattgttgtatcatatctttctgaaaccattctgaatttagttgaaattatcaatatttatgcttttaaccttaatttctggattcaagcctgtatataaatcttttgaaaaaaaattgtcctagcccttctctgcgatgctggaagtagaagattgcgtctcagatggagacgcagtactgttccagttttctttagccttttatttatttagttattctgggtatttcctatgtaattttgaagtgtgtagagtatattatagtaactgaagctgcagctgtaagaagctgagtgaaagaaaaaatactgtaagacatccttaaagtttttatttgtttgggtactgtatatgagatcaggaaaaagaaaaatgtcccacagccacattggaaatacaggttcttgtccccaaattaggttagttcccagattttagatcaaaactgttaattcattaaaaccccttttaaaaggtaaattctactgttgtaattccgatagtctttttcccacaaatatcagaaatatatttatttaattctgtcagatgagctttctaccgatgccatgtcccaaagccatgttaaaataattcccacgttatcattgtgattctacttcctgccactaaaattgctggagaaacaaaataatgatggaacactatgaacaaaaaggagcatctgaactggtctggttatttagaatccaatgtgttcaaatccttttgttttcttattaagtcagatgctactgtaagtcagataaaattttgtttgcactctgcagtctttggctcaatgtatggaaatgtttgcacctatgtaaagtcacaagctaattacaaattgctacagaacaggagtaagctgaaaactgaatgccatgttttgtttataaggtggggaggggagggaaaataccaaaaaactctgttccaagtttggcatttgacattaatgtgaagcagtgggaccatgctgcctgctaaactactgtatgaatcgtaaatgttctgaagacgagcagctggaggctggaggatggcattccatacagcaaaggagaagcacccaccacttcatctgggaaaaggaaggaaattgcaggaggcctggagccatcatttgtaaaggggatgttgcggggtgtgatgctgttgaggagattcaccttcaattgcactgctccacagagccctcatataaggccaatcctaatgggctacctcggctttaaaagttaatttcagtaagtcctgtttcaaaagtttgtctttttttgcttctaccttcagtgccactattttccactgcagtgttttgacttcacaaactgcctcctccagagagaacaatgtattgctgaaaatgggcagtagaagcaaatgctgttgttacatttgacctataaagtattcagagtgactgctaggtagaaattaaaacttagctttcccaaatagctccttattttgcaccttataaaaagtatactaattgttaattagatgttgcttttgtttatacaagcattcccaaagaactagatttggattttgttttgagtttttggatttttaaaaattatcttatttagattgactaacagcatacttacaattttaaaagaagctgttgttcagttcatcttaccagatgtgtctggcgaagtattcagggtttgatggactgctttactttcgtttggaagtgatagctaagtttattatactctatattaaacaactttgttcatttcactgaggaccttatcttccttatatttcagaacaaagaagcaacaagcgtgaataaaaagacaaatgtatttgactccctcataatccccatctgtatgtgctacccttccttcaaatatataaatgtgcatctttttttttaaaaaaaaaaaaaaanaaggttcctcttctggccaaatttgatctatggtggtatgattcatactgttaaattgagagaggaaaccttgtggttaaaaattatatggctgctgttttctttttgcagtcagtggtcaaaactgatcatgtgcttaaatcgatttttatgcacagaactagttattgtgaacattactgctccctccaaagatttcctgataacttgggccagaggtggttactgagtaacaaggatctaattcaatgcctcaaaactcttccacccacaatgcaaatcttacctcacaagctctaacctaaatcacagagacatgcatgtttcatgcattaacactgatttcgctctgtggcccaccagaggggtgggctcatgtcccctgactcctcacatgagtgcctcagctctaagagccgtggaacggggggtagggaaggtttgcgatctggagctcagcaactggctcagcaacgttttctccatttcattagcactaaacaagtctcttgctctcaggaatttgtcagaaaaaagaataaaatcacctgagactccacataccagattataaactcttctcgtaggtttgaattgcttactcacatgtcataaattaaccacagcttcatttgaccaccaggtctaaagtctgttgacagtttcagcatgactgaatcgctcattttttttttttgctttcagaaattggcttggttctctttagagttggtgtaaacatgccatgtaataaatgatttccacttaatggtacaacagaattattgctttcttagatgtatgtgtagtaaaagtcaatatacacatttatataatttctttcttcaaaatcttatacctaatttgatatttctaaaaattgcacatgtaagtcatgtgtataacatgctaaagtactttaactgtgatcttaaaactgaataaaaatatttaataaaactttgaaatattttaaagatattattcaaatatatttctttatgttcacactactggccgtagagtatgtgcctttaatgtaccattttcactaaaaacagtaggaaaaatactaataaaagtaagatatttcaactattttagaacatcgaatgatgtgtcnccctaaactgtgtttgc

SEQ ID NO: 991 - protein, 911 aa, Homo sapien
  Unsure 5325-5343, 7848, 8971: Unknown amino acid
MKGSNRNKDHSAEGEGVGKRPKRKCLQWHPLLAKKLLDFSEEEEEEDEEEDIDKVQLLGADGLEQDVGETEDDESPEQRARRPMNAFLLFCKRHRSLVRQEHPRLDNRGATKILADWWAVLDPKEKQKYTDMAKEYKDAFMKANPGYKWCPTTNKPVKSPTPTVNPRKKLWAFPSDSSRDLPSPKKAKTEEMPQLNFGMADPTQMGGLSMLLLAGEHALGTPEVSSGTCRPDVSESPELRQKSPLFQFAEISSSTSHSDASTKQCQTSALFQFAEISSNTSQLGGAEPVKRCGKSALFQLAEMCLASEGMKMEESKLIKAKESDGGRIKELEKGKEEKEIKMEKTDETRLQKEAEFEKSAKENLRDSKELRNFEALQIDDIMAIKMEDPKEIRKEELEEDHKCSHFPDFSYSASSKIIISDVPSRKDHMCHPHGIMIIEDPAALNKPEKLKKKKKKSKMDRHGNDKSTPKKTCKKRQSSESDIESVIYTIEAVAKGDWGIEKLGDTPRKKVRTSSSGKGSILDAKPPKKKVKSREKKMSKEKSSDTTKESRPPDFISISASKNISGETPEGIKAEPLTPMEDALPPSLSGQAKPEDSDCHRKIETCGSRKSERSCKGALYKTLVSEGMLTSLRANVDRGKRSSGKGNSSDHEGCWNEESWTFSQSGTSGSKKFKKTKPKEDCLLGSAKLDEEFEKKFNSLPQYSPVTFDRKCVPVPRKKKKTGNVSSEPTKTSKGSGDKWSNKQLFLDAIHPTEAIFSEDRNTMEPVHKVKNIPSIFNTPEPTTTQEPLVGSQKRKARKTKITHLVRTADGRVSPAGGTLDDKPKEQLQRSLPKATETDCNDKCSHNTEVGETRSSTPEMPAVSAFFSLAALAEVAAMENVHRGQRSTPLTHDGQPKEMPQAPVLISCADQ

SEQ ID NO: 992 - DNA, 4392 bp, Homo sapien
gtgggaggatttttaacactttgcagtgtagctgtgaagcagtgcaccctgagatgggcctgggctgcaaagcgactgttctgcctactgtgacaaacttcaacttacacaggttcccctctctaacttcccacctgggttgcaagctgaactcattactggttttcataacaacacaatagtaagaacaagcaaacacaacaaattctcctggaggcagacttggcttaaaaaggcagacttggcttggtgatagtttttcttgaaagttccagatccacagtggagagtgagcctgtctcatatttggcaaaaatatttgttgaaatgtccacataggggatgttggatgtttaacacttttgagagtttaacacatgaatattctttctcctagaaaacacattagacctgttggagggagtctcccgtattccttttctgccacttttcgtccccatttcatttcattaatgataggatatgatttacctgtgacttactacttcaaatggatggcagtgcacttggatttttttttaatatccagaagattgaacagagggttgctattgttgaatgtatttggactgatagattaaaatcaaagttcaatttttaaggaacaaaaaagtaaatcctgttttcattttacctccccttttaaaactgagaaccagagcagaagggaaatatagaattttaagcaattaatcttcctgtggatgaattaaacccattagatgctgatgggatttttttaaggaatggtaccttaactatatatttgatttcgtttcccctgagggctagaggctgaatggaggctggttttattttgcctttccctcaccgcccagtcccattgagtgtattcattactagaaggaaaatctttcagaattggtgacacatggtaggctgtcttaaggagtcccctggcccccttcccctaggccatggcctaataaaataaactgtcaattgttctcacagcatatcatttaataatgaatactttagaacaatgcttatgggctggagaattgtatttgattagcccattcagtttgatagcccaaatgctgaacagcacagcgggatcctagcagtgcaagttcaaaagtaagtccaatcatttctgtgatactcgccctggtagcaaacagatcatctcagccaagctcttcatgtatctttgacctattaggtgaacaaatgaacctcacaggacacacagtattttttaaaggcagactcgctctcttttttgccagtgagcagttctagctaaccaagttacacactgtgggtattcctgcctgcctcttgaatacaaaggcctagttcaagtgttgctttttttatttcaaatcaattttttcttctttcctttttgagataaaactattaaaagtactactatatatataaaatctcaaatcaacttttcggcctcctcctcgtgtaccaggaagtatattctgacgaagggccccacttttgcaggtcttgcacgcccctcccttacccagaactgcagagcttcaggatggcgaaggtcacccaagggcatgagtagggagtggtgtctccaaccatcagttccgtggcactgttcagcctttgtgtgctgccctgccacccaccactcacagtgcctctgaagcgtgttacccctggagtgacgtgagcatttgaggcttgtctaaggaaaaaaataaaaggcagtgaaggagactgtacataaagacatggcaaaaatcttaattatagcaatatagttatcgggtaatgttcgggtgggcagctccattaaaaaatatgtgaatgaatctgtgaagctgcaagtagcgagaagagcgaaaggtcttcttaatgaaccgcctaccttgtagacagtaatttgtacactgtatagttttgttaagaattttttttaaattaaaattcccatgtttgtaaagctaactttttaacaattataatggaactatatgttgtttccatttttaaagtaaacaagaatattccttgtttagagactggacttgagttaaaactctccagtctcttaagttatgtattaaaaagaaaatctgtccatgttaggagttatttcacagattcctgtgcttgaaaagcataggatactaatcctttaaaaaagtgtaaatggagaaaagttatattttatgaaggttattttgttgtatttagtattggaaaagttggtttccagagcatttcagaatgtcgaagcaccactgtctttttattagtatatacggcctttagcaaaagtttttgtgattgttacgtgatggtatttaaggttaagtttcacagagcattcaggataggcagaaaactaaaacagtgctatgtctcacataacgtgtcctcagggagcagaatcttggatttgtgacttgtagcttcataaggactcaacgaaagagattgcacagggacatcttcagcggtgtgacagcaggacatgttctttacctagattcaaattctatgtactgtgtgaaatgatgaaggctgcagaaagttatcccatattcagtgtacagtattcatttttaatgaaacaactctacaatattgctggcagataggccccaagcatgacattcaatatagtttacatgttcctgtcaaggtcttttgttaacattaaccagctgcatgctttctggactttaagaaattgggtttctatagaaaactttttttttttttttttttttaatgtgcaggctattcaagttcaatagtaaaagctcaaaaatgaatgttctactccatgctgaaggagctgaaagctgccttcttcatattttgcactttctggtagttcccctgttttttctaattccctaaaattgtgtgggtggagtggagccctgcagttggggggtaacatggaccactgattttgccctttgaccctgcacaatgacctttgcatcagccaaactcattgccatgacaactctttgtactgtgtccgtgccacagatctgttggtcacattgttaatagtaaaggggacaagttggagacggtcaatttttacattttttgttgcaattttttcttcaatggttgtaagtagttttttttttttttaataataaaagggttcactagttaatactctagaaatatctgtgtgttgcaattcaaatgtatgttgagattgtgaaaagcgcttcagtgccactagcttaccggtacactagactaagcccttgatgacttattgcatgatacagtaccaggaacaacaggtggcctaaatacatgaaaagcagtgtaagctagtgacactaaagccagtcttgtattactgtatttttgacagaatggttttgaaaactgtgctacagggactgatgtggcaaatatatctctttatgcagaaggaagtctttttttttcttttttttttttttaagaagtatggctttttatgcatccttcatcgagggcattgaagttgcatggactgataaaagttgatgcaaaacaagaaagaaacaaacaaaaaaaaaaaccagcaaaatgtttaccaaaaaactcaaacaaatgagcagtgcctgttcaatttcacagtctctgttgagttcagttgtaaatatgtttcaaatgacattttcttgggaaaaaaaatctctacaacattgtagaatgtgaggggtaactacatcccaggcataggtttctcaaagctgcagtagattatgtcttcatcaagctgttaatttgtgcttatatcatatagaacttttagcatcctgggaagagctgcccccacctcaatgatatttctctgagaacaacttttgtaggactgtgtgtttctttagatacatttagtacaactgtaggtgacgagtagtcagttattgcttgctagctacacaccagggttgatccattttaaaacttttggcattttgtcctcatgggccataaatacagaaccttgtattttaattaaatttttttacaaaaggaggcacatgcacaatctccatgtaacaaacctttagcagtaggatgtattatacgacagttacttaatttctagagttcaggcctctgggatcaaccccagactgggccagaatgttagtgaaggttttattgtgcccggttggaggataacgttctttgggtactttttgtgggttgcaaatgaactcaattgccacaagttttaaactggtgtaaatcaagcttgacttaatgtgattgttactgttatatccagcctatactgctagcagctgctcatactgcagtcaattactggaagcggatatatttcctatgcaaaaactgtttaaacaataaaatgagctatgctacagaaaa

SEQ ID NO: 993 - protein, 59 aa, Homo sapien
GRIFNTLQCSCEAVHPEMGLGCKATVLPTVTNFNLHRFPSLTSHLGCKLNSLLVFITTQ

SEQ ID NO: 994 - DNA, 1418 bp, Homo sapien
agaagaagctggccaaggatatgggagcaaccaccatggaccagaagtctctctgggcaggtgtagtggtcttgctgcttctccagggaggatctgcctacaaactggtttgctactttaccaactggtcccaggaccggcaggaaccaggaaaattcacccctgagaatattgaccccttcctatgctctcatctcatctattcattcgccagcatcgaaaacaacaaggttatcatcaaggacaagagtgaagtgatgctctaccagaccatcaacagtctcaaaaccaagaatcccaaactgaaaattctcttgtccattggagggtacctgtttggttccaaagggttccaccctatggtggattcttctacatcacgcttggaattcattaactccataatcctgtttctgaggaaccataactttgatggactggatgtaagctggatctacccagatcagaaagaaaacactcatttcactgtgctgattcatgagttagcagaagcctttcagaaggacttcacaaaatccaccaaggaaaggcttctcttgactgcgggcgtatctgcagggaggcaaatgattgataacagctatcaagttgagaaactggcaaaagatctggatttcatcaacctcctgtcctttgacttccatgggtcttgggaaaagccccttatcactggccacaacagccctctgagcaaggggtggcaggacagagggccaagctcctactacaatgtggaatatgctgtggggtactggatacataagggaatgccatcagagaaggtggtcatgggcatccccacatatgggcactccttcacactggcctctgcagaaaccaccgtgggggcccctgcctctggccctggagctgctggacccatcacagagtcttcaggcttcctggcctattatgagatctgccagttcctgaaaggagccaagatcacgcgcctccaggatcagcaggttccctacgcagtcaaggggaaccagtgggtgggctatgatgatgtgaagagtatggagaccaaggttcagttcttaaagaatttaaacctgggaggagccatgatctggtctattgacatggatgacttcactggcaaatcctgcaaccagggcccttaccctcttgtccaagcagtcaagagaagccttggctccttgtgaaggattaacttacagagaagcaggcaagatgaccttgctgcctggggcctgctctctcccaggaattctcatgtgggattccccttgccaggctggcctttggatctctcttccaagcctttcctgacttcctcttagatcatagattggacctggttttgttttcctgcagctgttgacttgttgccctgaagtacaataaaaaaaattcattttgctccagta

SEQ ID NO: 995 - protein, 385 aa, Homo sapien
MDQKSLWAGVVVLLLLQGGSAYKLVCYFTNWSQDRQEPGKFTPENIDPFLCSHLIYSFASIENNKVIIKDKSEVMLYQTINSLKTKNPKLKILLSIGGYLFGSKGFHPMVDSSTSRLEFINSIILFLRNHNFDGLDVSWIYPDQKENTHFTVLIHELAEAFQKDFTKSTKERLLLTAGVSAGRQMIDNSYQVEKLAKDLDFINLLSFDFHGSWEKPLITGHNSPLSKGWQDRGPSSYYNVEYAVGYWIHKGMPSEKVVMGIPTYGHSFTLASAETTVGAPASGPGAAGPITESSGFLAYYEICQFLKGAKITRLQDQQVPYAVKGNQWVGYDDVKSMETKVQFLKNLNLGGAMIWSIDMDDFTGKSCNQGPYPLVQAVKRSLGSL

SEQ ID NO: 996 - DNA, 1146 bp, Homo sapien
ggcacgaggccgcgatgccgctgctcgtcgaggggcggcgagtgcggctgccgcagtcagccggggacctcgtccgagcccacccgcctttggaggaaagagccagacttctcagaggtcagtctgttcaacaagtgggaccccagggccttctgtatgttcagcaaagagagcttgcagtgacctccccaaaggatggctccatctccattctgggttctgatgatgccactacttgtcacattgtggtcctgaggcacacaggtaatggggccacctgcttgacacattgtgacggaaccgacaccaaagctgaggtccccttgatcatgaactccataaaatccttttctgaccacgctcaatgtggaaggctggaagtacaccttgttggaggcttcagtgacgacaggcagttgtcacaaaaactcactcatcaacttcttagtgaatttgacaggcaagaagatgacattcacttagtgacattatgtgtgacagaattaaatgaccgggaagaaaacgaaaaccactttccagtaatatatggcattgctgtcaacattaagactgcagagatttacagagcatcctttcaagatcggggtccggaggagcagcttcgtgctgcgcgaactttagcaggaggaccaatgattagcatttatgatgcagagacagaacaacttcgtataggaccgtactcctggacaccatttccacatgtggatttctggttgcaccaagatgacaagcaaatactagagaatctttccacttcgcctctggctgagccaccccactttgttgaacatattagatctaccttgatgtttttaaaaaaacacccatctccagctcacacactgttttctggaaataaagccctactctacaaaaaaaatgaagatggcttgtgggaaaagatctcttctccaggaagttaaaaaacatgaattaccaaagaaagcaccttcttggcctgacagaccattggtggggctggcacgaatccagatctggatcctacatctgttgggtcttaggcctccttccctcctcagtgtctttcaaatgactttcatcaaatgactttcaaaataaaaccttattttggcaaaaaaaaaaaaaaaaaaaaaaaaaaaa

SEQ ID NO: 997 - protein, 310 aa, Homo sapien
MPLLVEGRRVRLPQSAGDLVRAHPPLEERARLLRGQSVQQVGPQGLLYVQQRELAVTSPKDGSISILGSDDATTCHIVVLRHTGNGATCLTHCDGTDTKAEVPLIMNSIKSFSDHAQCGRLEVHLVGGFSDDRQLSQKLTHQLLSEFDRQEDDIHLVTLCVTELNDREENENHFPVIYGIAVNIKTAEIYRASFQDRGPEEQLRAARTLAGGPMISIYDAETEQLRIGPYSWTPFPHVDFWLHQDDKQILENLSTSPLAEPPHFVEHIRSTLMFLKKHPSPAHTLFSGNKALLYKKNEDGLWEKISSPGS

SEQ ID NO: 998 - DNA, 1354 bp, Homo sapien
ggcacgagggtcactccagtggcagctccagaaacggaggctgttgcttttatccctaaactgcatccacagagaagccccaagaaggaggttggggccagctcataaaaagcctgaatgccaagccaaggagtggatgcctccagtcatatttagaacaaagtcaagtataaatttacagagaaaaaattctaagacagttggatgttgtcctgttggtgaggaagggaaaggtttttcttgtagggaactggaaccagcccacaactgcacgcttgtgagctgtcatggaaacctgatccccaacagcttttgaggttgtttgtttgtttgtttgtttacctgtcttgggctttgttgcttttggcaaaaggtacttcaaacaagggagggcctggactgagggggaccaggtcttcttgctgacctcgtctacaaaggcaaaggaaggcaaaggaagctgtctcgggtgtttctgaacaacgtgactcatgaggggctttggctacctcttgcgttccccctagagatgtccaggccttacatttaatcggctttctctgcggtggggtagagaatggagctcccgccttgcgggcagtgctaaaggtggagctgggggattttcctgggaatgatttgagggctcttgaaagcccatgtgttccaaagcgtctttaactctgggatagcattggaagccgctgtcatgacaggacatggcactggatggctggcagagagccctggctgggagttagggagccctgggttggaatccagccccacctcttttatgccacaggtttggtcaagttctctcccgctcagggtagggctgtgaactccctcttacagctaagaacatgcagcttagtgaggacaagacccttctagagctttacccctaatccccccccaggagccccgaggccggcattattcctccccattacaggtgatgagcctcaaattcagagagcttaagcaacctgctcagggtcacgtctccaacaggcagtagagtcaaggtataaaccaggtctgtttttgtaccagagtcccagactaactgttggtaggaatcttgtaaccagtcatgttttcttccttgttttggccgctgggaagctcaaagtcaaattcgagacccttttttttccaattgtgctgagtctcctactagactcgcttcattctagctttctgcttttacctttaccctaatctttttatttttattctattgtactttatttttgtaagttgctgagatatctgttttgcaacaagatgggctatatctaaataaagacatgatcaaaggtttgatttaaaaaaaaaaaaaaaaaaa

SEQ ID NO: 999 - DNA, 3113 bp, Homo sapien
taaagctggaaagatctaaataacccaacaggaaatgcggatgaaagtgcaagagttggtttgtggtcatctgcagtccatgtccaagactgctggaccttcaaattctgcaacttcaaccatttacttggtgtaaagaacttaatttcagtataaactgactctgggcagcattggtgatgctgtatcctgagttgtagcctctgtaattgtgaatattaactgagatagtgaaacatggtgtccggttttctattgcattttttcaagtggaaaagttaactaaatggttgacacacaaaaattggtggagaaattgtgcatatgccaattttttgttaaaaccttttgttttgaactatactgctttgagatctcatttcagaagaacggcatgaacagtcttcagccacagttgtgatggttgttaaatgctcacaattgtgcattcttagggtttttccatccctggggtttgcaagttgttcacttaaaacattcttaaaatggttggcttcttgtctgcaagccagctgatatggtagcaaccaaagattccagtgtttgagcatatgaaagactctgcctgcttaattgtgctagaaataacagcatctaaagtgaagacttaagaaaaacttagtgactactagattatccttaggactctgcattaactctataatgttcttggtattaaaaaaaaagcatatttgtcacagaaatttagttaacatcttacaactgaacatgtatgtatgttgcttagataaatgtaatcactgtaaacatctatatgatctgggattttgtttttattttgaaatgggagcttttttgtttacaagttcattaaaaactaaaaactgtttctgtaaggaaatgagattttttttaaacaacaaaaaatgccttgctgactcactattaaataaaaatctccccaattttttgatagactacttcaagccatttgttacatggtattcctttgcaagtcaatttaggtttcgtgttataacttttcctctttttttaagaaaaatgaaaaaagtaattcttttgtctgaaggggaaaggcattctttcatttttttctttgtttttttttttttttatgacttgcaggcacaatatctagtactgcaactgccagaacttggtattgtagctgctgcccgctgactagcagctggactgattttgaataaaaatgaaagcattaaagggtttccctacaaaacatttttctttttttatttgaaaactactttagcaataattaattccatgattatcacattctgccattaagggatattagtacccgtaatactgaagaaattttattaagtctgaacttctggggtaggcagcttctttgtttcttttctatccacccttgtcggttgaggtatttgtttcttgactaataaaccctttgatacttttagccagaaatcagtctcataaagctatttttgagtatagtttgtgtaaaataaaaatgtttagctttggtaataacttccaagctgaactccctctagcaagatatttttcagtgcttttatttactatgcacttagactatgcactttttctgaaatatttttgtaacacttttttgtatttttgccatttgaaaaggttgtggtgtagttggtctgtaattaagttgcagatttaaaactgctgttagctttgtaaatcaaaatataggtgttttttgtcctggtatatcgtcattccatctgcagctggagctggaatcccattgatcttctagctaccattcattttcttcactgttcacaaaagaagagtgtgaaattcagtgaatgctgttactaatcctgttacgagatgaatctcatttcaccaaaattaaattatgtttttccgctaaaatgatgatacaagttgaagacacatcactctgaaattggaagacctcaccacttaaggctccacagtggcttactcagctgaactctaggttactactctttactttgttcacccattggggggtgcagtttttttaaaatgttgggagatggccattctaactactgttgaatgtctctgttttgggaaggtataacaagaaataaaaaagaatatatatgaagggagagactggttatctcctccctatatggttgtgcttatcctcttacggcttacaaatgaatatttggaggtttgctttcacaatgatttcccatcaacaaatatttttagtaggatttttcctgtttctgttagtccttgcagtactcataaatgttttaagctgagcatactgtaatagtcataagtttaatttcattataataaaaataatcaaacaaaaggcctttagaacccaagacaatgagctagttttccctaaagtttgctgaactattaaggaatatgttcttatagcttttgactagaatgagtcatgggaattctaagaagggatggcctagacatttttagctcagttaaattcagcatttaatgcaggtgagttcctgggtcgttttccaactagtctggaacagtctggttctgactcaaactggtataaagcattattttaggttttctctttgccagtttttaagcagttataaccatgtaaatcaagatgtgaggacatctatatgaagtatagtaaagaagtggtgtcagcagatcaatatgtgtgtcctgggtgtgctgctctcttaagtgagactttgtgagactatactttaaatgcattattaccattgcttacattttgggggatttttcttcctccacaaaacttccatttctattgtaatattcttaatgacaatcttttttttttttagcagtgtatgtttgaaacagccaaagatggcgatgaaccaagtgtaaattgatctaagcagcccatgcagtttgtgttgaatcaacaaacagtgtattgttgaagtgaaattattttctgaaatgacttgttagaccagttttgaggacatactcaaaagtagagtaataatggctcctgggatggagaaatatgagatgaacctggaacattctattatggtgccccaaaggaaatataaaaaaaaaaaaaaaaaaaaaaa

SEQ ID NO: 1000 - protein, 166 aa, Homo sapien
MFLVLKKKHICHRNLVNILQLNMYVCCLDKCNHCKHLYDLGFCFYFEMGAFLFTSSLKTKNCFCKEMRFFLNNKKCLADSLLNKNLPNFLIDYFKPFVTWYSFASQFRFRVITFPLFLRKMKKVILLSEGERHSFIFFFVFFFFYDLQAQYLVLQLPELGIVAAAR

SEQ ID NO: 1001 - DNA, 2741 bp, Homo sapien
gcgcgggggagccattaggaggcgaggagagaggagggcgcagctcccgcccagcccagccctgcccagccctgcccggaggcagacgcgccggaaccgggacgcgataaatatgcagagcggaggcttcgcgcagcagagcccgcgcgccgcccgctccgggtgctgaatccaggcgtggggacacgagccaggcgccgccgccggagccagcggagccggggccagagccggagcgcgtccgcgtccacgcagccgccggccggccagcacccagggccctgcatgccaggtcgttggaggtggcagcgagacatgcacccggcccggaagctcctcagcctcctcttcctcatcctgatgggcactgaactcactcaagtgctgcccaccaaccctgaggagagctggcaggtgtacagctctgcccaggacagcgagggcaggtgtatctgcacagtggtcgccccacagcagaccatgtgttcacgggatgcccgcacaaaacagctgaggcagctactggagaaggtgcagaacatgtctcaatccatagaggtcttggacaggcggacccagagagacttgcagtacgtggagaagatggagaaccaaatgaaaggactggagtccaagttcaaacaggtggaggagagtcataagcaacacctggccaggcagtttaaggcgataaaagcgaaaatggatgaacttaggcctttgatacctgtgttggaagagtacaaggccgatgccaaattggtattgcagtttaaagaggaggtccagaatctgacgtcagtgcttaacgagctgcaagaggaaattggcgcctatgactacgatgaacttcagagcagagtgtccaatcttgaagaaaggctccgtgcatgcatgcaaaaactagcttgcgggaagttgacgggcatcagtgaccccgtgactgtcaagacctccggctcgaggttcggatcctggatgacagaccctctcgcccctgaaggcgataaccgggtgtggtacatggacggctatcacaacaaccgcttcgtacgtgagtacaagtccatggttgacttcatgaacacggacaatttcacctcccaccgtctcccccacccctggtcgggcacggggcaggtggtctacaacggttctatctacttcaacaagttccagagccacatcatcatcaggtttgacctgaagacagagaccatcctcaagacccgcagcctggactatgccggttacaacaacatgtaccactacgcctggggtggccactcggacatcgacctcatggtggacgagagcgggctgtgggccgtgtacgccaccaaccagaacgctggcaacatcgtggtcagtaggctggaccccgtgtccctgcagaccctgcagacctggaacacgagctaccccaagcgcagcgccggggaggccttcatcatctgcggcacgctgtacgtcaccaacggctactcagggggtaccaaggtccactatgcataccagaccaatgcctccacctatgaatacatcgacatcccattccagaacaaatactcccacatctccatgctggactacaaccccaaggaccgggccctgtatgcctggaacaacggccaccagatcctctacaacgtgaccctcttccacgtcatccgctccgacgagttgtagctccctcctcctggaagccaagggcccacgtcctcaccacaaagggactcctgtgaaactgctgccaaaaagataccaataacactaacaataccgatcttgaaaaatcatcagcagtgcggattctgacatcgagggatggcattacctccgtgtttctccctttcgagccggcgggccacagacgtcggaagaaactcccgtatttgcagctggaactgcagcccacggcgccccggttttcctccccgccctgtccctctctggtcaaacaacatactaaagaggcgaggcaatgactgttggccagttctcaccggggaaaaacccactgttaggatggcatgaacatttccttagatcgtggtcagctccgaggaatgtggcgtccaggctctttgagagccatgggctgcacccggccgtaggctagtgtaactcgcatcccattgcagtgccgtttcttgactgtgttgctgtctcttagattaaccgtgctgaggctccacatagctcctggacctgtgtctagtacatactgaagcgatggtcagagtgtgtagagtgaagttgctgtgcccacattgtttgaactcgcgtaccccgtagatacattgtgcaacgttcttctgttattcccttgaggtggtaacttcgtatgttcagtttatgcgatgattgttgtaaatgcaatgccgtagtttggattaataagtggatggtttttgtttctaaaaagaaaaaaaaaatcagtgttcacccttatagagacatagtcaagttcatgttgataataatcaaaggaattactctcttcttgttaaattagctaaatcatgtaaccgcagataggaagggctcacctggggaaactctggtttccgatgggacaggaaagtcatacgggcaacagtatgcggaaagtacgtttttttaagtaaaaaacaaaggcaaactttgtactatccagttatctaaggaacaataaaaacattaggagaaaaaaaaaaaaaaaaaaaaaaaaaaaaaaaaaaaaaaaaaaaaaaaaaaaa

SEQ ID NO: 1002 - protein, 467 aa, Homo sapien
MPGRWRWQRDMHPARKLLSLLFLILMGTELTQVLPTNPEESWQVYSSAQDSEGRCICTVVAPQQTMCSRDARTKQLRQLLEKVQNMSQSIEVLDRRTQRDLQYVEKMENQMKGLESKFKQVEESHKQHLARQFKAIKAKMDELRPLIPVLEEYKADAKLVLQFKEEVQNLTSVLNELQEEIGAYDYDELQSRVSNLEERLRACMQKLACGKLTGISDPVTVKTSGSRFGSWMTDPLAPEGDNRVWYMDGYHNNRFVREYKSMVDFMNTDNFTSHRLPHPWSGTGQVVYNGSIYFNKFQSHIIIRFDLKTETILKTRSLDYAGYNNMYHYAWGGHSDIDLMVDESGLWAVYATNQNAGNIVVSRLDPVSLQTLQTWNTSYPKRSAGEAFIICGTLYVTNGYSGGTKVHYAYQTNASTYEYIDIPFQNKYSHISMLDYNPKDRALYAWNNGHQILYNVTLFHVIRSDEL

SEQ ID NO: 1003 - DNA, 1746 bp, Homo sapien
gatttcttttagtcatgttgatttgatttcagtttctggctatgaaaaacatttttaaactcgtcacccacaacaaactgaacaaaactactacagtgaaagcccttttcagtgaaagatgtcagaaacctcaaaacctttggcctgactcagaactaccatgtgaaaatcagtactctcttaatgtttgaaataaaaactgaaaaaaaaaacaaaaaaacaaaaaaccttttttgaagcaccttaacgtggccatccatttgagaagtgggtgccactttttttctttgagcaccttattgatgtgtttgctatctgctgtctttctgttacctgttggctgaatggctagctgttaacatatacatgtgcacagaagagatatctgggcatgtatgttctcaatgaagtttactgtggtgactgctgaaaggtgaacccatttcctgatttttcccgccgcagtgttgtgataagattcgaagaaacctttttccctgcacagaaatgtttcttatcacattgtatcttagtatggaaaggaatatggtcccttttttgcaattgctactgtgtacacacacacacacacacacacacacacacacacacacacactctgtatgtttagacctaaaatacacacacccacgcacacactgtatgtttatgtgacctaaaacatacacacatgcacacacacatacatatccattcattcattcattcaagtggtgtttccagtgtctgtgtgtcactgtttatgcagtttccatttcccagtgaattatgagtggagggcaacttttctaaccagattgtcttttcagaacaaagacctgggaattgaggaagagtttggaaagagggagaggcaaggaaagagagctttaaattgaaaggttaatttcctaagaggaacctgggctgaatgactacagtgttataccctccaatctttgcaggtgggcatggaacactgcttgtatcactctgtgcacggtataaatccatatatccacaaaaacacacatccatccatcaacatatacatggtttgggatgagcaggtcaatagttttgagagggagtttgttcctttttttttctcattatactcttaaattgttgtcagttatcaaacaaacaaacagaaaaattgtttggaaaaaccttgcatacgccttttctatcaagtgctttaaaatatagactaaatacacacatcctgccagttttttcttacagtgacagtatccttacctgccatttaatattagcctcgtatttttctcacgtatatttacctgtgacttgtatttgttatttaaacaggaaaaaaaacattcaaaaaaagaaaaattaactgtagcgcttcattatactattatattattattattattgtgacattttggaatactgtgaagttttatctcttgcatatactttatacggaagtattacgccttaaaaatacgaaaataaattttacaaggtttctgttttgtgtggaagagtaattgatgttgctaagaatgatgtttgtttttttggggtttttgttgttttttttttaaatgttaccagcactttttttgtaagtttcactttccgaggtattgtacaagttcacactgtttgtgaagtttgaatatgaaggaataattaaaaaaaaaaaaaactcttaaaaaaaaaaaaaaaaaaaaaaaaaaaaaaaaaaaaaaaaaaaaaaaagggcggccg

SEQ ID NO: 1004 - DNA, 2815 bp, Homo sapien
gaattcggcacgagctcttctcccctgattcaagactcctctgctttggactgaagcactgcaggagtttgtgaccaagaacttcaagagtcaagacagaaggaagccaagggagcagtgcaatggatttctcagtaaaggtagacatagagaaggaggtgacctgccccatctgcctggagctcctgacagaacctctgagcctagattgtggccacagcttctgccaagcctgcatcactgcaaagatcaaggagtcagtgatcatctcaagaggggaaagcagctgtcctgtgtgtcagaccagattccagcctgggaacctccgacctaatcggcatctggccaacatagttgagagagtcaaagaggtcaagatgagcccacaggaggggcagaagagagatgtctgtgagcaccatggaaaaaaactccagatcttctgtaaggaggatggaaaagtcatttgctgggtttgtgaactgtctcaggaacaccaaggtcaccaaacattccgcataaacgaggtggtcaaggaatgtcaggaaaagctgcaggtagccctgcagaggctgataaaggaggatcaagaggctgagaagctggaagatgacatcagacaagagagaaccgcctggaagatcgagagacagaagattctgaaagggttcaatgaaatgagagtcatcttggacaatgaggagcagagagagctgcaaaagctggaggaaggtgaggtgaatgtgctggacaacctggcagcagctacagaccagctggtccagcagaggcaggatgccagcacgctcatctcagatctccagcggaggttgacgggatcgtcagtagagatgctgcaggatgtgattgacgtcatgaaaaggagtgaaagctggacattgaagaagccaaaatctgtttccaagaaactaaagagtgtattccgagtaccagatctgagtgggatgctgcaagttcttaaagagctgacagatgtccagtactactgggtggacgtgatgctgaatccaggcagtgccacttcgaatgttgctatttctgtggatcagagacaagtgaaaactgtacgcacctgcacatttaagaattcaaatccatgtgatttttctgcttttggtgtcttcggctgccaatatttctcttcggggaaatattactgggaagtagatgtgtctggaaagattgcctggatcctgggcgtacacagtaaaataagtagtctgaataaaaggaagagctctgggtttgcttttgatccaagtgtaaattattcaaaagtttactccagatatagacctcaatatggctactgggttataggattacagaatacatgtgaatataatgcttttgaggactcctcctcttctgatcccaaggttttgactctctttatggctgtgctccctgtcgtattggggttttcctagactatgaggcaggcattgtctcatttttcaatgtcacaaaccacggagcactcatctacaagttctctggatgtcgcttttctcgacctgcttatccgtatttcaatccttggaactgcctagtccccatgactgtgtgcccaccgagctcctgagtgttctcattcctttacccacttctgcatagtagcccttgtgctgagactcagattctgcacctgagttcatctctactgagaccatctcttcctttctttccccttcttttacttagaatgtctttgtattcatttgctagggcttccatagcaaagcatcatagattgctgatttaaactgtaattgtattgccgtactgtgggctggaaatcccaaatctagattccagcagagttggttctttctgaggtctgcaaggaagggctctgttccatgcctctctccttggcttgtagaaggcatcttgtccctatgactcttcacattgtctttatgtacatctctgtgcccaagttttccctttttattaagacaccagtcatactggctcagggcccaccgctaatgccttaatgaaatcattttaacattatattctctacaaagaccttatttccaaataagataatatttggaggtattgggaataaaatttgaggaaggcacgatttcactcataacaatcttaccctttcttgcaagagatgcttgtacattattttcctaataccttggtttcactagtagtaaacattattattttttttatatttgcaaaggaaacatatctaatccttcctatagaaagaacagtattgctgtaattccttttcttttcttcctcatttcctctgccccttaaaagattgaagaaagagaaacttgtcaactcatatccacgttatctagcaaaagtcataagaatctatcactaagtaatgtatccttcagaatgtgttggtttaccagtgacaccccatattcatcacaaaattaaagcaagaagtccatagtaatttatttgctaatagtggatttttaatgctcagagtttctgaggtcaaattttatcttttcacttacaagctctatgatcttaaataatttacttaatgtattttggtgtattttcctcaaattaatattggtgttcaagactatatctaattcctctgatcactttgagaaacaaacttttattaaatgtaaggcacttttctatgaattttaaatataaaaataaatattgttctgattattactgaaaagatgtcagccatttcaatgtcttgggaaacaattttttgtttttgttctgttttctttttgcttcaataaaacaatagctggctctaaaaaaaaaa

SEQ ID NO: 1005 - protein, 442 aa, Homo sapien
MDFSVKVDIEKEVTCPICLELLTEPLSLDCGHSFCQACITAKIKESVIISRGESSCPVCQTRFQPGNLRPNRHLANIVERVKEVKMSPQEGQKRDVCEHHGKKLQIFCKEDGKVICWVCELSQEHQGHQTFRINEVVKECQEKLQVALQRLIKEDQEAEKLEDDIRQERTAWKIERQKILKGFNEMRVILDNEEQRELQKLEEGEVNVLDNLAAATDQLVQQRQDASTLISDLQRRLTGSSVEMLQDVIDVMKRSESWTLKKPKSVSKKLKSVFRVPDLSGMLQVLKELTDVQYYWVDVMLNPGSATSNVAISVDQRQVKTVRTCTFKNSNPCDFSAFGVFGCQYFSSGKYYWEVDVSGKIAWILGVHSKISSLNKRKSSGFAFDPSVNYSKVYSRYRPQYGYWVIGLQNTCEYNAFEDSSSSDPKVLTLFMAVLPVVLGFS

SEQ ID NO: 1006 - DNA, 6305 bp, Homo sapien
cggacgcgtgggttggattttttccgtggatctatcaattcacaattcgaatttggaagaaagaaggaaaacatgacgtctccagccaaattcaaaaaggataaggagatcatagcagagtacgatactcaggtcaaagagatccgtgctcagctcacagagcagatgaaatgcctggaccagcagtgtgagcttcgggtgcaactgttgcaggacctccaggacttcttccgaaagaaggcagagattgagatggactactcccgcaacctggagaagctggcagaacgcttcctggccaagacacgcagcaccaaggaccagcaattcaagaaggatcagaatgttctctctccagtcaactgctggaatctcctcttaaaccaggtgaagcgggaaagcagggaccataccaccctgagtgacatctacctgaataatatcattcctcgatttgtacaagtcagcgaggactcaggaagactctttaaaaagagtaaagaagtcggccagcagctccaagatgatttgatgaaggtcctgaacgagctctactcggtgatgaagacatatcacatgtacaatgccgacagcatcagtgctcagagcaaactaaaggaggcggagaagcaggaggagaagcaaattggtaaatcggtaaagcaggaggaccggcagaccccacgctcccctgactccacggccaacgttcgcattgaggagaaacatgtccggaggagctcagtgaagaagattgagaagatgaaggagaagcgtcaagccaagtacacggagaataagctgaaggccatcaaagcccggaatgagtacttgctggctttggaggcaaccaatgcatctgtcttcaagtactacatccatgacctatctgaccttattgatcagtgttgtgacttaggctaccatgcaagtctgaaccgggctctacgcaccttcctctctgctgagttaaacctggaacagtcgaagcatgagggtctggatgccatcgagaatgcagtagaaaacctggatgccaccagtgacaagcagcgcctcatggagatgtacaacaacgtcttctgcccccctatgaagtttgagtttcagccccacatgggggatatggcttcccagctctgtgcccagcagcctgtccagagtgagctggtacagagatgccaacaactgcagtctcgcttatccactctaaagattgaaaacgaagaggtaaagaagacaatggaggccaccctgcaaaccatccaggacattgtgactgtcgaggactttgatgtgtctgactgcttccagtacagcaactccatggagtccgtcaagtccacggtctctgaaaccttcatgagcaagcccagcattgctaagaggagagccaaccagcaagagacagagcagttttatttcacaaaaatgaaagagtacctggagggcaggaacctcatcaccaagttacaagccaagcatgaccttctgcagaaaaccctgggagaaagtcagcggacagattgcagtctagccaggcgcagctcaactgtgaggaaacaggactccagccaggcaattcctctggtggtggaaagctgtatccggtttatcagcagacacggactacagcatgaaggaattttccgggtgtcaggatcccaggtggaagtgaatgacatcaaaaatgcctttgagagaggagaggaccccctggctggggaccagaacgaccatgacatggattccatagctggtgtcctgaagctttacttccgggggctggaacaccctctcttccccaaggacatctttcatgacctgatggcctgcgtcacaatggacaacctgcaggagagagctctgcacatccggaaagtcctcctagtcctgcccaaaaccactctgattatcatgagatacctctttgccttcctcaatcatttatcacagttcagtgaagagaacatgatggacccctacaacctcgccatctgcttcgggccctcgctaatgtcagtgccagagggccacgaccaggtgtcctgccaagcccacgtgaatgagctgatcaaaaccatcatcatccagcatgagaacatcttcccaagccccagggagctggagggccctgtctacagcagaggaggaagcatggaggattactgtgatagccctcatggagagactaccccggttgaagactcaacccaggatgtgaccgcagagcaccacacgagcgatgacgaatgtgagcccatcgaggccattgccaagtttgactacgtgggccggacagcccgagagctgtcctttaagaagggagcatccctgctgctttaccagcgggcttccgacgactggtgggaaggccggcacaatggcatcgacggactcatcccccatcagtacatcgtggtccaagacaccgaggacggtgtcgtggagaggtccagccccaagtctgagattgaggtcatttctgagccacctgaagaaaaggtgacagccagagcgggggccagctgtcccagtgggggtcatgtagccgatatttatcttgcaaacatcaacaagcaaaggaagcgtccagaatctgggagcatccggaaaacttttcggagtgacagccatgggctgagcagttccctgactgactcctcctccccaggggtgggggctagctgccgcccatcctcccagcccatcatgagccagagcctccccaaagaagggccagataagtgttccatcagtgggcacgggagcctcaactccatcagccgccactcatccctgaagaatcggctggatagtccacagatccggaagactgccacagcgggaaggtcaaaaagcttcaataaccatcggcccatggaccctgaggtcattgctcaggatattgaggcaacaatgaactcggccctgaatgagctacgggaactagaacggcagagcagtgtcaaacacacccctgacgtggttctggacaccttggagcccctcaaaacctccccagtggtggcccccacgtcagagccctccagccctctgcacacccagctcctcaaggaccccgagcccgccttccagcgcagcgccagtactgctggggacatcgcctgcgccttccggcctgtcaagtctgtcaagatggctgccccggtcaaaccaccagccacacggcccaagcccactgtcttccccaaaacaaatgccactagccctggtgtcaactcatcaacttccccacagtctactgacaagtcttgtactgtctgagggataataatttaattgttctagacaaggggactatagggactgactgttattaaaatcttcctatttaactagcttggggacttcagttgaaaattaggttctaagttgttcttgcaggaattagcctccccgtctcccaaaaccttgagaatgaagcccttggtatcgcctctcccttcccactgccctctgcttcccccagtcgtcgtaattcagccagctgcagtccgtaccgttcttaggttagccagagacaggttttcattatcaggtcactgtgaaatctggtaaggcagtcctgaggacatgggctcaagtctcagtcccctcagaccacggtgatgccttgaccagatggttggctactgccatccagctttcagtggcatcttgttttgggaactgattatagagaatcatatatagtccagtcttcattttacatacacacacatattttacacacacacacattttacacacacacacacacacacacacacacacatatgtttttctagtctctggcatgtgtagcctctcctggtcatagaccagtctctttgtaagttattgtggcagttcacacagtagccaccaggggtctctgtttccattacaaactttgttctgtctgggccagagaacctagcctttgaaatctctccatcatgtgaaacataacgggatgggacaatcccgtaacctgtttggggttgggggctttctctctgtgttctttccattgatgtgaattggtcattggtgtttgctcttgcctctcctccatcccctagaagtacacccccgtcttattaaggagcttttaaagtttttctgaatgtatagacatttctcgggttcctacctttgtctctgatggaccattttccatttaagacattttcctgtataagacagttttatagctggttccttttagggtaaagagtcttaagagagttttattgtgtctatggcaggtttgggaaaggtaagaaatgggtcctttttcctcctaatgtttttggcacttaaaacataaaattcattatcctattaaaaaattaaattcagctttgctaatccagaaattgttcccaaatgaaaacttgttttaagtccaccccttagtttccttattttacaaggtctctcttcagggaccaacaggggcttagagagccttagttagattaaagggagaccctacctcttaaaaccagttttcatttatgcaaacaaggacaattaagggaaccctgaccccacaggctctcaagtcttcccaaggccagaatcgaaagaaaattaaaatttgaatgctgaatattctggctctactctggccttttttctggttcccttccaaaatgcacaaatcatacccttgtctgctccaattcagtctccaaacctggtgcctgtgctcctggcccccctagcatcatgctatcccaggagtatcaggaccagacacatccacagccaggctcatgggtctcagacagcaacttgagttaaagctgaaactcatccttcttctctgtgttttctggtttaaaagctgcacttatattttagccttattattttctgtagttccggagagatggtgggttgccattctggtaggaaaatctgagttttcttatctttgacctagaagagattctttttggaccaacctgcgaaattggtagttaggtctatggaaagtggtaggatttttttttttttaatcctgtgcaaaggaaaagaggtgctttgtgggaaatcactaatgagaaggctaacctgcagcaccagagaaacctttccaagtgctaggcaggagaactgaagaactctttcagtgaagtgagtcagcctagaagaggcaacccacagtcttgatttttgttgctgtttcctgacctgttcttgcctgtcacctgggcctacacaggtcccgagccaacggggctttcatacccaaggatctgtttccttgctgaaaatgaaaccctatctttcactttacattcctttcaatccaactgatcaaaactggtacccacacttgccctttctccctctctccagcacactcccctctaagaaagtaaaagcaaagctttcttaatggcaacactttgggcctgttctgttgctcctgccttatttctctttcaaccctgtacatgactcgtgttcaccatccccttgatcagtgtccatccgcgctaatttgcatcatgaactgaacagtgtgtgagtggtcacctactaaacccagctctgggggcagagctgtcttccccatctctggtgctcctaacacctgtgagatggtcctgtcgagaggactaggaaccgataggaggagagtccttctcggcagagctcactgcaaacaactggaattgaggttgcacactgtgatttttacaccgaaaagccaaaaggagctggccatccagggcctagggagaccagccttcctcagctatgcttgccgaaaccagcatgatgcttcaaagagccctgctccacccctcatggcatggatccttttcctggtgtggactctgaagggtcagtcttcggggaagagaggtggggtggggctactagcatcccaatttagaaaatagaggagtttgtagccagcagcctgtaaactggaaacactggtctcagccaacctcctcagggcgccctggcttctccccaaggagatgaggagcggtgatgccagcaccgggatgcgcagagcactggaagggctggtgcagatctacttcccatgcagaagagaagtcacatcttccagggaatcgcaatgttgtggcgtctgacttgtatgtcacatttgtgtaaaatggtatattctttaaaatagtgttgataactggaatattgtatgtatgcttggagatgctttgtgtgaacctaagactgtcactcaacagatgttggattggggaaaatccaaagcacaacttcaaaataaaatacatttttaggtttcg

SEQ ID NO: 1007 - protein, 1095 aa, Homo sapien
RTRGLDFFRGSINSQFEFGRKKENMTSPAKFKKDKEIIAEYDTQVKEIRAQLTEQMKCLDQQCELRVQLLQDLQDFFRKKAEIEMDYSRNLEKLAERFLAKTRSTKDQQFKKDQNVLSPVNCWNLLLNQVKRESRDHTTLSDIYLNNIIPRFVQVSEDSGRLFKKSKEVGQQLQDDLMKVLNELYSVMKTYHMYNADSISAQSKLKEAEKQEEKQIGKSVKQEDRQTPRSPDSTANVRIEEKHVRRSSVKKIEKMKEKRQAKYTENKLKAIKARNEYLLALEATNASVFKYYIHDLSDLIDQCCDLGYHASLNRALRTFLSAELNLEQSKHEGLDAIENAVENLDATSDKQRLMEMYNNVFCPPMKFEFQPHMGDMASQLCAQQPVQSELVQRCQQLQSRLSTLKIENEEVKKTMEATLQTIQDIVTVEDFDVSDCFQYSNSMESVKSTVSETFMSKPSIAKRRANQQETEQFYFTKMKEYLEGRNLITKLQAKHDLLQKTLGESQRTDCSLARRSSTVRKQDSSQAIPLVVESCIRFISRHGLQHEGIFRVSGSQVEVNDIKNAFERGEDPLAGDQNDHDMDSIAGVLKLYFRGLEHPLFPKDIFHDLMACVTMDNLQERALHIRKVLLVLPKTTLIIMRYLFAFLNHLSQFSEENMMDPYNLAICFGPSLMSVPEGHDQVSCQAHVNELIKTIIIQHENIFPSPRELEGPVYSRGGSMEDYCDSPHGETTPVEDSTQDVTAEHHTSDDECEPIEAIAKFDYVGRTARELSFKKGASLLLYQRASDDWWEGRHNGIDGLIPHQYIVVQDTEDGVVERSSPKSEIEVISEPPEEKVTARAGASCPSGGHVADIYLANINKQRKRPESGSIRKTFRSDSHGLSSSLTDSSSPGVGASCRPSSQPIMSQSLPKEGPDKCSISGHGSLNSISRHSSLKNRLDSPQIRKTATAGRSKSFNNHRPMDPEVIAQDIEATMNSALNELRELERQSSVKHTPDVVLDTLEPLKTSPVVAPTSEPSSPLHTQLLKDPEPAFQRSASTAGDIACAFRPVKSVKMAAPVKPPATRPKPTVFPKTNATSPGVNSSTSPQSTDKSCTV

SEQ ID NO: 1008 - DNA, 1320 bp, Homo sapien
catcttgctcagggtggtcctctgggagtctttccccagggctgatgctgggtgccctgccccagtgagatatgtgtgggtggtatctgtaaagaggtttgtcttgcagttgaaggtgggaaaagaaggaagggggggcatgcaatatgggtgagggtagggtattaccttttttttgcagcatttttcggcctctttatttagaacccggcggacgaggggccggggcagtggtacagacggctcaggaaccattttaacagacttgtcttcaagtttcagataaacacagtcataataagagagacagcgaaagcgcgaagagactgcaagctagatgggcatgtatggcagctacagcttgtgagtgacccccttccccagagtccgcgatgaaaataaagttacacttgtcaataaccagatgtgggagatggagagtgcctttggcataaccaataaccgagctagtgcgtggcagagcggtccacgcctggacataaatagaaaatataagttagtataactttaaaaactttttgtacaaatatacatggtttttttattttttccttttttttttcttttttcttttttttgcactgagtttcagcagagattaaacattttatataaatgactcttaaagctttacaccttgggaccagtgtaccttctcgtgcagaatacatttagatataaaaagacgttattaatacattgcacagttttcaaaatttaaaaacaaaaccgaacgctgctctgcggcagccgccgccggttgctgctacatgaacggtcccagccgaggcccagcgcccttccaacgtccgctgccccggcaggttccctcggggctctttgggctctaaattggctcaccgcagcctcttgcgcggggtctgctccaccgagcccacgccaggggcggcgcttggagagggacacggcgcggggacatcgcccgacgacttctcaggcgctgatctcttgcgcttggcgaagaaatctgcaccgactcgcggatagaacgcgggcaccgagtcgactgtccacttcggtccagctgcaggcgtccagggccccgcagcggcatgtcctgctggaagtcgtaatcccagcggttctggtcctcggcgttcagctcggccaggcgggcctgcagctcgcggctcagctcctcgtggtccaccggcccgaagaggctgcggcaggcgctggtgcgcactagtgctgggaaggtcccacgggcgacagacgctccatcgtggatgtgctggctgtccggtggttgactcttctgcgtcgggtcgcctgtct

SEQ ID NO: 1009 - protein, 50 aa, Homo sapien
ILLRVVLWESFPRADAGCPAPVRYVWVVSVKRFVLQLKVGKEGRGGMQYG

SEQ ID NO: 1010 - DNA, 1971 bp, Homo sapien
gacagagcaagatcttgtctcaaaaaaaaaaacagctctggatgggaagggaggccagttgctttaagtaggggagatagagttaaaggaggctttgttttatttaaaggtgggacaaacttaagcatgttaataaaattcagagaagagaaagagaatgactatcagagccatgtttggaagaaaatggggtccagagcacaggaaggggacctgtgttcagagggtgcctcactgctgaggccacaggaaagaatctgtaggtggaggggaggccgaagaggggaagtttcatgcttgataattaaaattttctgagataggaatgtcatatttacctatttaagccaagtttttttagataaaaggtatggaacctgctttccccttggctagttcagcgtttgggctccggagtgctgaagatgaggactggacttcgagctggtgtgatcccagtattcagtgtcagtactcagtgacaaaataaatgagagaaacgggaataagaattgtcgcctacacaaaaataccagcaactgttaactcttcccagaagattttcattctgaatgctcctgtagctaggaaccctaaaaagtctttgaagcaactcaagttttaaaaaaggggaggaactcctggaaatctcaggatggggccaagatgtggctggagagtgtgtggtgatggagggcgtgtcttttgccgagcacactcagggcccacgggaagcccatagacttcaaggacatcaagccccaaggtggtgggattttccccaccagtacttggcagcctagggggaaggggagggcgggagaagataatggggatccctggctccaaacataggaggacacatctgtgctacagtgcgcacatgcctggatgtacactctgtctttggagacactggctaagattctctgctccatgtttggacagggtcgtgcctgatctgagataaatggacaagaacaactgaagcctgtcttctggtgcatgtgtcacctgccgataactgcatcttgtgataaagttgggtgatttacagtctccaccaaatgctaaactctggggtcttacgcctttataactccatgggccccagcaaaggttcaggctcaaaacaggtgtcaaatagataactgttgaatgattgttccccagttgcaggctctgccacctggcgttcatactgtctgtgaaaggacccagctcacctttccctctttatctcccagtccttcccaacagcgccgacacctcatggaaactgattgcaaatgtgctacttctcacttctgtgtggcccgaggaggctgggttaatgctgggcttggtaccttaagcaccctttctcccttccccatcttcattctcagaattacacctgtctgaagcaggcattttccaatgccctagatgggaatataagtgtaaggagatgtgaagcatttgcctgtgtgtcagaacattcactgaggatcctcataggcacttctagaaaccaaatccttgaagatgactaaccagaaatgcccgtcatagcactgtttacagttgcaaaaactgaagccaattgaaatgtccatcaggaggggattaaatgaattatggtacagttacaccgttgaatattttacagccattgaagatgatatatagctatattcattgacaaggaaaactcatattttttagtgaaaaaagcaggttatagaattgcatgatattcacatttatataaaactttatatatgggaaggatgttgattgaattgttaataactatggtcacctctagagatggaagtttgcattacctttaatttttaataccattttgtattgcttaaaatttgtatgtattatcgttaaaataagaaaaatcaaataaagctattttcattatgggaaacgaaaaaaaatctatgtcggtgcggagaaagaggtaatgaaatggca

SEQ ID NO: 1011 - protein, 105 aa, Homo sapien [sequence omitted]

SEQ ID NO: 1012 - DNA, 5337 bp, Homo sapien
atgaggcgctgccggtgggccgccctggccctggggctgctgcgcctctgcttggctcaggccaacttcgccccgcacttcttcgacaacggggtcggcagcaccaacggaaacatggctctgttcagcctcccagaggacacccctgtaggctctcacgtatacaccctgaatgggacagaccctgagggagaccccatctcctaccacatcagctttgaccccagcactagaagcgtcttttctgttgaccccacttttggaaacatcaccctggttgaagagctggacagagagagggaagatgagattgaagccatcatcagcatttctgatggcctgaatctggtggccgaaaaagtcgtgatcctggtgaccgatgccaatgatgaggcgcccaggttcatccaggagccttatgttgccctggttcccgaggacatacctgctgggagcatcatctttaaggtccatgcagtggacagggacacaggctctggagggagtgtcacctacttcctgcagaacctgcactccccatttgccgtggaccgccacagcggtgtgctgcgcctccaggctggggccactctggactacgagaggtcccggacccactacatcaccgtggtcgccaaggatggcggtgggaggcttcatggggctgatgtggtgttctcagccaccaccacggtcacggtcaatgtggaggatgttcaggacatggcccctgtcttcgtgggcacaccctactatggctatgtgtacgaggacacccttccgggctcggaggtactgaaggtggtcgccatggatggagaccggggcaaacccaatcgaattctctacagccttgtaaatgggaacgatggagcctttgaaattaatgagacatctggagccatctccatcactcagagcccggcccagctccagagagaggtgtatgagctgcatgtacaggtgactgaaatgagccctgcggggagcccagctgcccaggccaccgtcccagtcaccatcaggattgtggacctcaacaaccacccgccaacattctatggagagagcggaccccaaaacaggtttgagctgtccatgaatgagcacccaccccagggagagatcctgcggggcctcaagatcaccgtcaatgactccgaccagggagccaatgccaaattcaacttgcagctggtgggacccaggggcatcttccgagtggttccacagacagtcctgaatgaagcccaagtcacaatcattgtggagaactcagctgccattgactttgaaaagtccaaagtattaaccttcaagctcctggctgttgaagtgaacaccccagagaagttcagttccacagcggatgttgtgatccagctcctggacaccaatgacaatgtccccaagttcgactccctctactacgttgccaggattcctgagaacgccccagggggctccagcgtggtggctgtcacagctgtggatccagatacaggaccctggggcgaagtgaaatattccacctatgggactggggcagacctcttcctgatccacccatccactgggcttatctacacccagccctgggctagcctggacgctgaggccactgccaggtacaacttctatgtgaaggcagaggacatggaaggcaagtacagcgtagctgaggtgtttatcacactgctggatgtcaatgaccacccccctcagtttggaaagagcgttcagaagaagacgatggtgctagggaccccagtgaaaattgaggccatagacgaggatgcagaggaacccaacaacctggtggactattccatcacccatgcagagcccgccaacgtgttcgacatcaattcccacacgggggagatctggctcaagaattccatccgctccctggatgccctgcacaacatcacacctggaagggactgcctatggtccctagaggtgcaggccaaggaccggggctccccatccttcagcaccacagccttactcaagattgacatcacagatgctgagaccctctcccggagccccatggctgccttcctgatacagaccaaggacaaccccatgaaggccgtgggtgtgctggccggcaccatggccaccgtcgtggccatcactgtcctcatctccaccgccaccttctggcgcaacaagaagtctaacaaggtcctgccaatgcggcgggtgctccgcaagcggcccagccctgcgccccgcaccatccgcattgagtggctcaagtccaagagcaccaaagccgctaccaagttcatgctcaaagagaaacctcccaatgagaactgtaacaacaacagcccagaaagctctctgctcccgagagctccggctctccctccaccacccagcgtggcgcccagcactggcgcagcccagtggaccgtgcctactgtctctggctctctcactccgcagccgacccaacccccgccaaaacccaaaactatgggaagccccgtccagtcaactctgatctctgagctcaagcaaaagtttgagaagaagagtgtgcacaacaaggcttacttctagtgtatgccctatgaccccccatctttcctccgcccctgacccccaccaccctgctgctcggactatgctccccttcctctgctccttaaggtcactgacccctgttttgcacaatggtataatccccactgtcctcatctctaccgccaccttctggcgcaacaagaagttgcgctctgacagggctctagtcagggccttgggcaagacattgggctctaggatgcaattggcaaatacgtccccgttactcaaatccttggcactactacaatgccctccattcttcagggctgagaattgacgagaagccagctcacccatcccagacctcacagtccctcaggttctactgggatctcatcatcatccttagtcaagcagcagggccctggccacgtggagcaacactgactagaatctggatcctgacgcctgcagctgagagcaggagcaggaaaaggaggctcagcactgtctcaggctggaggtcagcgaacctcgtgggctgtaggaaagcaaatgtaggtaaggggagagcaaggatgcacagaaaacacactgactgtgggactgtgccaggatgcatttggaaagatagagcattctgtctgggcagagactgtggaccctggtatgcccacgtgggacagaggacacagaggtggaagattgatcttgccaagagtgagggcagatgtctccagccaggactgccctgagccgcaaaatgtcaaagctggagctatagaggtagccctaaaggcaactagaagagcatcagggctgctctctgaggagctgccccaccagccatccttgaagagacaattcagggcagttgatgaatatcagggctgagatgtggtgagacttccgtttttatccagctcttttgctcacatcgcgtaaccttgggaaagctgtttaaagtcgctgatcatcctcttcctcatctgtaaatgaagaaagtaggccctgtctacctcacatgcaggtctagggtgaggattgaagaaaatagtggtgatgagggctttaaccaagtgcaaagcggcatgaatgcaaagtatttttctgcagcccagttctgtgggtgcagctcttccagaaagtattaggagcctcacatctactctgccaagcgccccagcaggcactgtgctgggcttaggggctaccactggatgatggcattgccgtgactcacacacctctacttctgttcttccctcactccatccccgctaccgtcctggccagctaccgtcagagagaaccagagctccaagtctttaatttgccaagatgaagaaaatgagttctcaaggagggaatgctttgcttgaggccacacagcaggttggtagcaaagatcttgtctagccagggcagcccttatcagcttgtgacaaccttccccaggacagaagtcatacaaggcctctggggttaatacaaataggttgtgccctgctttaaggaacctgctatcaggaaatctacatgtgtgcacagagagagaaaagtagaacagttctttgcatttggctctacttactaacaacccctctagaatacattggtgatttcatttaaagagattgtatgcatttgtggctttcctgatttctgagtctgtgtttggaggtgttactgagatgtgccagtgtgcagaatccttgctggggtttctacagtccccaacgtgaacagtattaagcaagaggtggactcgagcaatccaggagcccagactgagcaaataagtactttccagcctgtgtttcaggagaggactgtgctggatcatgcttgccctccacagggaatacagcatccttacagcttgcatgcaatcaacctcttttgtaaatggaaaataaagtctgttacccaaaggccatgctgatcccctgctccctgctttcatttatgtttgctgacctgtggagaccagtctttctgacacacagtgaagctcaacttgcctcctggctgcttcagcaggtggatccattcttcgacccccagatgtgactctaaagaaggctgaaaatttttgtccaaattgccatgcagatatcttgaacagcaggacatttgcaggccttgtctactggacttttctcccaaacaggacaagcccaggcagggctgcatggagaggaatggaacctggagctagaattaattgcccactctcccaccctaccagtgcagcccggcaagggcaggaattgggaggcctagggtgggcatgaaagcttgggaagcactgtcgtctctcagacaggcgtcctaaagacctctaggctggaagcttgggcttgcaagtggatccgggaccgagggtggtctcttggacaaccccaggaacttggaccaaggcagagccaatcttgcaaactggccatggatggggaagtgcccggtagccagcatgagccacactaggaaagaggaggagggtgcagccaaacttaaggcaccggcaagtgttgtcagcactggaggagaccccgccagtggggtgaggccagccaagtccctgtgttacgaatggtgggccaaggggctgtctgctaggtcccagtaggacaggcagagctccaggctggcaccatggtaggcctccagggaaagagctgggaggcaggaatggcacactgggcaggcttgcccattcctggccctgagaatggagctgtagcctcatggacaataaatggatgtgacaccaaaaaaaaaaaaaaa

SEQ ID NO: 1013 - protein, 859 aa, Homo sapien
MRRCRWAALALGLLRLCLAQANFAPHFFDNGVGSTNGNMALFSLPEDTPVGSHVYTLNGTDPEGDPISYHISFDPSTRSVFSVDPTFGNITLVEELDREREDEIEAIISISDGLNLVAEKVVILVTDANDEAPRFIQEPYVALVPEDIPAGSIIFKVHAVDRDTGSGGSVTYFLQNLHSPFAVDRHSGVLRLQAGATLDYERSRTHYITVVAKDGGGRLHGADVVFSATTTVTVNVEDVQDMAPVFVGTPYYGYVYEDTLPGSEVLKVVAMDGDRGKPNRILYSLVNGNDGAFEINETSGAISITQSPAQLQREVYELHVQVTEMSPAGSPAAQATVPVTIRIVDLNNHPPTFYGESGPQNRFELSMNEHPPQGEILRGLKITVNDSDQGANAKFNLQLVGPRGIFRVVPQTVLNEAQVTIIVENSAAIDFEKSKVLTFKLLAVEVNTPEKFSSTADVVIQLLDTNDNVPKFDSLYYVARIPENAPGGSSVVAVTAVDPDTGPWGEVKYSTYGTGADLFLIHPSTGLIYTQPWASLDAEATARYNFYVKAEDMEGKYSVAEVFITLLDVNDHPPQFGKSVQKKTMVLGTPVKIEAIDEDAEEPNNLVDYSITHAEPANVFDINSHTGEIWLKNSIRSLDALHNITPGRDCLWSLEVQAKDRGSPSFSTTALLKIDITDAETLSRSPMAAFLIQTKDNPMKAVGVLAGTMATVVAITVLISTATFWRNKKSNKVLPMRRVLRKRPSPAPRTIRIEWLKSKSTKAATKFMLKEKPPNENCNNNSPESSLLPRAPALPPPPSVAPSTGAAQWTVPTVSGSLTPQPTQPPPKPKTMGSPVQSTLISELKQKFEKKSVHNKAYF

SEQ ID NO: 1014 - DNA, 4479 bp, Homo sapien
  Unsure 4054-4142: Unknown base
atgaaagtgatcatagtcactgttatctccaatactgtctcagagttgactgttgtacacaagtgaaattagattaggtacagattaaattctacttaaaatttgttctttattgattcctttaggtttctttaaaccaagctcatgctatttagtcagaacatgacttctagaatggtcttccagagtcagaattctctgtttacaaagataatttcaaatgtagtatccctctttacattcagtgtttcaccaaataactcattatagccagaagagggtattgcttctttcatttgtggcactagatagggtcctatgtttttcactatttagtatgtatacatttctccatataacagtaataggcttcaggctttgaagtgctagaatagtttagaaagaaatgttacagatgtatgtttatagttttaatcattgcctcagtgctttcttgtggcagcgtgacaggtataaggagaggggcactggagattgtatttctgatgtcttgaatgtcaagtgtgaaaagtaaccaagattgctttgcagctttgtgagatcaacatcatgaatttgttttcatttcctctggttggaagtttcctaggttagaagctgaggtttcagttactttaaatatggaatttgggaacagggattgaggctttctagcacagtaaatgtgactgaataccctttctaaactaagtggggcacaatgattttttttccttccattttttttttacatgacactttatttctttcacatgttgacatggcttgtattacattctaaatttcatctgtttctgtaactttagctgtgtctataacagatagagcatcagtcaaactagagtggacagggagaaaatgctctactggggaagcactctggaatcttctgattaagtcatttgcaaaagattaatagccataagccttactcttaatggatctgccatttcagtttcaatggcttttgaggaaaaaggagtcatttaaggaaggagataggaagtgtaggccgatccatccacttttcttagtctcccaattttaagagaccctttcttgcacaaaattttttgtaactttccataagtaaagaggaaggtaatggagccgtagaaatgtcaacccatcaaagactagtttgtcgtgtcattacaacaaggcatttagggaacatctttccttaattttactaatagaccaaccaaggaagccttctgaatcgctagtaagattcagctctgggtgattcttcatttctaatggctcatagtgattacagtttatgttaataatcactcctacttctgtcaacctccagcaagagtaaattgatagcaggataaattaaaagtctgatcttaatgtcataaatgtgactagaatatggtactaactttttcgggtctagatagctggaatgaggcttgcaaacagtgttatctggagagagcttgctggtctaacaactttgtgtgataatttggcatctgattagagagcatgagtctgataaattttataatccacacagagatcatgctgtggttggacacatcatttaataatatttagcatgatataatattccattttctctacaggagcacagactctttctcatactggattattttacctttgacagtcatttttcaatgacagtaattttaaataaagcatcgtgtgcttatagaacctgtgcttgagtaaaaatagtcttcaaataaaaataatgaagtaaatttttacttaggccatgcttaattggaagcatagaacttaaattgagaaaaaaatccatatgatagattttgtttttctcatgcttcccttttgaataatagcaaataatgcagagtaatggttctaagagttcagggtagatgaagtctgtaggttttagaagtatagagttgaaaagaacctccaagaggacttatttaatgagtgaaataaatgtccttagatagatattgtccctaaactcttttctattgaaagtttatagtattgaaaatttgatgattattagtacctagtataaatcaacattcatctgatgttctctttttagatagccaagttataacttttttgaaaagacattattggactaagttagtaggtcagccttttcctttgatagtgtgtactcttatctgtcacccaaccttctccacaccctcttctcttcattcagttgtggacagcagtaattttttcaggacctttgcttcttagaggaaatacatttttccttatttatatttttaaaagatgtttctattacattatatatagcaagagatctattaaggatccagaaaatcttaacctgtagaggatatgagttcctcatcataagaattagtttccttgagggttctttagtatattctatttacacagtttatgcataagtaaactctgtggccgatgtacataaaaaaacctatcacttttatgctcattcatcctcctaattcagtgtctgggtcatgagatgtttggttcatagcttcaaaaactgttcaagaagactgatttcagttctctctatgttgatcttccagttgaatctggagtcttctgattgtggaaaggagtagcagatcacattatactgaaaattgtccttttcattgagaaataaaggttgactgagctacctaaagtcactttcctttggactgtaagccttagagagaacaataatacctttgcttttcttgaggtagtattagaaaactctagttcccattgataggataaacttgttttctcgtttcatggtctttttatagaaaacagtcacaaaatcttgacatttggcatccctgaaaagctcaagtggccttttcaagtagggtatcatgtagtattctgcaggtttacagtcagtatcctgcaaggaaaggtgacaaacttcctgtgaagttaggaagaaatattagtaacccacacacttgaagtgagttttccattttaccttgtagaaattgtactagagatagaacaaatgaaattagttttcttttccaggtatatcctgtgagataccagcacagagtattttctctgagttctctcagggttaaagctcagtgagcttttcttttctctttggtagtgtggaaccatttgtaccgtagaaagaatagctggaaatatggaactccaatgtggcaatacagtaataaacagaaggaatgagtcagtaggataatatattcgagtgatttctgtatatttcagttataatgttttttatatagtgtatatttcagttatttcagttataatgtgttttagaatgtggatttaagccaccttctcaccctttgcaccagtagctttgttaaaacattttattatgatcaaataacaagcctgttgcttttaagtaatctaagtattaacagaaggtaagtcttcaacttctccctgttctcacctgggccaagatcaattttctaaataaaaaatagctttgtaatttgtctccaacaaagaatgggaaatggaagggaacacaaaactgtggtcctgacaatactaattctacccgttttcaaataagaataattaaacttataaagtgatatactgattatttttgtgttactctcccttttttttgtttaaagtcaaattccagaagtaaaaatctttatcatactgttttcctcttactaaaactggaagggtaaaatagaaagttcagcaacatcagaaaatgttgtatttaaaataatatggagaataggggttttaagtacataaaccatattggcttccttgtaggtttacttttagtatataacatgaatatgtagtgcttctttttacaataatcaaagtcatagctccaagatattgacctctttctcaatctataacctttgtaggcatgcatttataccagcatgttttataaattatgagtttctatctgtgtccatgaagtcttactagttttcacttaaacttttgtgggttgttaagaagaattaaagtgattcataacttnnnnnnnnnnnnnnnnnnnnnnnnnnnnnnnnnnnnnnnnnnnnnnnnnnnnnnnnnnnnnnnnnnnnnnnnnnnnnnnnnnnnnnnnnttcaacatcacacatcacacatcacacagtggttcataacatcagatgaagaaggaggtgagtgatatgttaaatgatcagaaacttggcattacattatttccaggaccatttccctaccaaagctgtgtatttttcatttcttcatggcactgtgctgttaatttctgttaacatttgtgctaaaatggagtgtaatttttacatataagtgttagaattttagctatcttagttgaaacacaaaaagttgttactgatccaataaaattatcaaaggccacaaaaaaaatctatgtcgggtgcggagaaagaggtaatgaaatggcaggaattc

SEQ ID NO: 1015 - protein, 24 aa, Homo sapien
  Unsure 4054-4142: Unknown amino acid
ESDHSHCYLQYCLRVDCCTQVKLD

SEQ ID NO: 1016 - DNA, 1663 bp, Homo sapien
aaaaaaagaaatcaagcagatggcttaaagctggttataggatttctcacattcttttagcattatgcatgtaacttaattgttttagagcgtgttgctgttgtaacatcccagagaagaatgaaaaggcacatgcttttatccgtgaccagatttttagtccaaaaaaatgtatttttttgtgtgtttaccactgcaactattgcacctctctatttgaatttactgtggaccatgtgtggtgtctctatgccctttgaaagcagtttttataaaaagaaagcccgggtctgcagagaatgaaaactggttggaaactaaaggttcattgtgttaagtgcaattaatacaagttattgtgcttttcaaaaatgtacacggaaatctggacagtgctccacagattgatacattagcctttgctttttctctttccggataaccttgtaacatattgaaaccttttaaggatgccaagaatgcattattccacaaaaaaacagcagaccaacatatagagtgtttaaaatagcatttctgggcaaattcaaactcttgtggttctaggactcacatctgtttcagtttttcctcagttgtatattgaccagtgttctttattgcaaaaacatatacccgatttagcagtgtcagcgtattttttcttctcatcctggagcgtattcaagatcttcccaatacaagaaaattaataaaaaatttatatataggcagcagcaaaagagccatgttcaaaatagtcattatgggctcaaatagaaagaagacttttaagttttaatccagtttatctgttgagttctgtgagctactgacctcctgagactggcactgtgtaagttttagttgcctaccctagctcttttctcgtacaattttgccaataccaagtttcaatttgtttttacaaaacattattcaagccactagaattatcaaatatgacgctatagcagagtaaatactctgattaagagaccggtactagctaactccaagagatcgttagcagcatcagtccacaaacacttagtggcccacaatatatagagagatagaaaaggtagttataacttgaagcatgtatttaatgcaaataggcacgaaggcacaggtctaaaatactacattgtcactgtaagctatacttttaaaatatttattttttttaaagtattttctagtcttttctctctctgtggaatggtgaaagagagatgccgtgttttgaaagtaagatgatgaaatgaatttttaattcaagaaacattcagaaacataggaattaaaacttagagaaatgatctaatttccctgttcacacaaactttacactttaatctgatgattggatattttattttagtgaaacatcatcttgttagctaactttaaaaaatggatgtagaatgattaaaggttggtatgatttttttttaatgtatcagtttgaacctagaatattgaattaaaatgctgtctcagtattttaaaagcaaaaaaggaatggaggaaaattgcatcttagaccatttttatatgcagtgtacaatttgctgggctagaaatgagataaagattatttatttttgttcatgtcttgtacttttctattaaaatcattttatgaaatccaaaaaaa

SEQ ID NO: 1017 - protein, 60 aa, Homo sapien [sequence omitted]

SEQ ID NO: 1018 - DNA, 13268 bp, Homo sapien
ggtcctccccttctcctcccctgctcgctgcagactccctcctcactgtcgctgccgagatccacagtcggttgtggctcagcccctgttgcaggggacaagtgagggagacttccctgtcctgccctgagacgccgccctcccggggttggggacagagcaggtgcagaggcactgcagctgctcggttgcccagcctcctgaatgatgccagcccagtatgctctaacctccagcctggttctcctggtgctgctgagcacagccagagcaggccccttctcttcacggtccaatgtgacactgccagccccccggccccctccccagccagggggccacacagtgggggctggagtgggaagcccctcttctcagctttacgagcacacagtggaaggaggggagaagcaggtggtattcacccaccgcattaacctgcccccttccactggctgtggctgtcccccaggcaccgagcccccagtccttgcttcagaggtacaggccctgagggtccgtctagagatcctggaggagttggtgaaggggctcaaggaacagtgcactgggggatgttgtcctgcctctgcccaagctggcacaggtcagacagatgtgcggaccctctgcagtctccatggtgtgtttgatctgagccgctgcacctgttcctgtgagccaggctggggtgggcccacctgctcagaccccacagatgctgagatccctccctcttccccaccctcagcctcggggtcctgcccagatgactgcaatgatcagggtcgctgtgtccgtggtcgttgcgtgtgctttcccggctacactggccccagctgtggctggccatcctgtcccggggactgccaaggccgtgggcgctgcgtgcagggcgtgtgtgtgtgccgggcaggcttctcaggccccgactgcagccagcgctcctgccctcgaggttgcagccagaggggacgctgtgagggtgggcgctgcgtgtgtgacccaggctacactggtgacgactgtggcatgaggagctgccctcgcggttgcagtcagagggggcgctgtgagaatgggcgctgcgtgtgtaaccccggctacactggcgaggactgtggggtgaggagctgccctcggggctgcagccagcggggacgctgcaaggacgggcgctgcgtgtgtgaccccggctacactggcgaggactgtggtacgcggagctgcccctgggactgtggcgagggcgggcgctgcgtggacggccgctgcgtgtgctggcccgggtacacaggcgaggactgcagcacgcggacatgtccgagggactgccggggccgcgggcgctgcgaggacggcgaatgcatttgcgacacgggctacagcggggacgactgcggcgtgcgcagctgccctggcgactgcaaccaaaggggccgctgcgaggacggccgctgcgtgtgctggccggggtacactggaaccgattgcggctcgcgcgcctgcccacgcgactgtagaggtcgcgggcgctgcgagaacggcgtgtgtgtttgcaatgcgggctacagcggcgaggactgcggtgtgcgcagctgtcctggggactgtcgtggccggggccgctgtgagagtggccgctgcatgtgttggccggggtacacaggccgggactgcggcacgcgcgcctgtcctggcgactgtcgcgggcgcgggcgctgcgtggatggccgctgcgtgtgcaacccgggcttcaccggtgaggactgtgggagccgtcgctgtcccggggactgccgtgggcacggcctttgcgaggatggcgtgtgcgtgtgtgacgcaggctactcaggggaagactgcagcacgcgcagctgccccgggggctgccgaggccgcggccagtgcctagatgggcggtgtgtgtgcgaggacggctactctggcgaggattgcggtgtgaggcagtgcccgaatgactgcagccagcacggcgtgtgccaggacggtgtgtgcatctgttgggaaggctacgtgagtgaggactgcagcatccgcacctgcccctccaactgccacgggaggggccgctgtgaggaagggcgctgcctgtgcgacccaggctacaccggccctacctgtgccacccgcatgtgcccggctgactgccggggacgtgggcggtgtgtgcaaggagtgtgcctgtgccacgtgggctatggcggtgaggactgcgggcaggaagagcctccagccagcgcctgccctggaggctgcgggccccgggaactgtgccgggcaggccagtgtgtgtgtgtagagggcttccgaggccctgactgtgccatccagacatgcccaggggactgccgtggccgaggagagtgtcacgatggcagctgtgtctgcaaagatgggtatgctggcgaagactgcggagaagcacgggttccaagctctgcctcagcctatgaccagagaggactggcccctggacaggagtaccaggtcactgtccgagcccttcgagggaccagctggggccttcctgcctccaagaccatcaccaccatgatcgatgggccccaggacctccgagtggtggctgtgacaccgacaacactggagcttggctggctgcgtccccaggctgaggtggaccgatttgtggtgtcctacgtcagtgccggcaaccagagggtgaggctggaagtgccccctgaagcagacgggacgctgctgactgacctgatgccaggcgtagaatatgtggtgactgtcacagcggagcggggccgggcagtcagctacccagcttctgtcagggccaacacagaggaaagggaggaggagtccccgcccaggccaagcctgtcccagcccccacggcggccttggggcaacctgacggccgagctgagccgtttccgcggcacggtgcaggacctggagcgccacctgcgggctcacggctacccactgcgggccaaccagacttacacgtcggtggcgcgccacatccatgaatacttgcagcggcaggtgctgggcagttccgccgatggcgcgcttctcgtgtctctcgacgggctccgcggccagttcgagcgcgtggtgctgcgctggcggcctcagccgcctgcagagggccccggcggtgagctgactgtgccgggcaccacgcgcaccgtcagcctgcccgacctcaggcccggcaccacctaccacgtggaggtccacggggtgcgggcggggcagacctccaagtcctacgccttcatcaccaccacaggcccctcgacgacgcaaggggcccaggctcctctcctgcagcagcgcccccaggagctgggagagttgagggtgctgggcagagatgagacagggcgcctccgtgtggtctggaccgcccagcctgacacctttgcctacttccaactgcgcatgcgggtgcccgaggggccgggggcacatgaggaagtgctgccaggggacgtccgccaggctctggtgcctccaccccctcctggaaccccgtatgagctgtcacttcatggggtccctcctgggggcaagccctctgaccccatcatctaccaaggcattatggacaaggatgaggagaagcctgggaagtcctcaggcccaccacgcctgggtgagctgacggtgacagacaggacctccgactccttgctcctgcgctggacggtccccgagggcgagtttgactccttcgtgatccagtacaaagacagggacgggcagccccaggtggtgcccgtggaaggaccccagcgctcggccgtcatcacctccctggatcctggccgcaagtacaaatttgtcctgtatgggtttgttggcaagaagaggcatggtccgctggtggctgaagccaagatcttgcctcagagtgacccaagtccagggactccaccccacctgggaaacctgtgggtgacagaccctaccccagattcactgcacctctcctggactgtccctgagggccagtttgacaccttcatggtccagtacagggacagggatggacggccccaggtggtacctgtggaagggcccgagcgttcatttgttgtctcctcactggaccctgaccacaagtacagattcactctgtttggaattgcgaacaagaagcggtatggccccctcacggccgatggcaccactgctccagagaggaaagaggagcccccccgccctgagttcctggagcagcccctcctgggggaactgacagtgaccggcgtgaccccagactccttgcgtctctcatggacagtggcccagggccccttcgactcattcatggtccagtacaaggatgcacaggggcagccccaggcagtgcctgttgcgggggatgagaatgaggttactgtccccggcctggatcccgaccggaagtataagatgaacctctacgggcttcgtggcaggcagcgtgtggggcccgagtctgtggtggccaagactgctcctcaggaggatgtggacgagacccccagccccacagaactgggcacggaggccccggagtcccccgaggagccgctcctgggggagctgacagtgacaggatcctcccctgattcgctgagcctcttctggaccgtcccccagggcagcttcgactctttcaccgtgcagtacaaggacagggatgggcggccccgggcggtgcgtgttgggggcaaggagagtgaggtcaccgtgggaggcctagagcccgggcacaagtacaagatgcacctgtacggcctccacgaggggcagcgcgtgggcccggtgtccgccgtgggcgtgacagccccacaacaagaagagacccctccagccactgagtccccgctggagccacgcctaggagagctgacagtgacagatgtgacccccaactctgtgggcctctcctggacagtccccgagggccagtttgactccttcatagtccagtacaaggacaaggacgggcagccccaggtggtgccggtggcggcagaccagcgagaggtcacagtctacaacctggagcctgagagaaaatataagatgaacatgtatggactacatgatgggcaacgcatgggccccctgtctgtggtcatcgtgacggccccagccacagaggcctccaagcctcccctggagccacgcctaggggagctgacagtgacggatataacccctgactctgtgggcctctcatggacagtccctgagggtgaattcgactcctttgtggttcagtacaaggacagggacgggcagccccaggtggtgcccgtggctgcagatcagcgggaggtcactatccctgacctggaaccctcccgcaagtacaagttcctgctctttgggatccaggatgggaaacgacgcagcccagtctctgtggaggcaaagacggttgcccgaggtgacgccagcccaggggccccaccccgccttggggagctgtgggtgacagaccccaccccagactcactgcgcctctcctggacggttcctgagggccagttcgactcttttgtggtccagttcaaggacaaagacgggccccaggtggtgcccgtggagggccatgagcgctctgtcactgtcacccctctggatgccggccgcaagtacagattcctcctctatggcctcctgggcaagaagcgccatggccctctcactgccgacggcaccacggaagcccggagtgctatggatgatactggaacaaagcgtcccccaaaaccccgtctgggggaggagctgcaggtgaccaccgtgacccagaactccgtgggcctctcctggacagtccctgagggccagtttgactcctttgtggtccagtacaaagacagggacgggcagccccaggtggtgcccgtggagggcagcctcagggaggtcagcgtgccgggcctggaccctgcccacaggtacaagctgctgctctacgggctgcaccacggcaagcgtgtgggccccatctcggccgtcgccattactgccggcagggaagaaacggaaactgagaccacggccccgacccctccagcgcctgagccccacctcggggagttgacagtggaggaggccacgtcacacaccctgcatctctcctggatggtgactgagggagaatttgactccttcgaaatccagtacacagatagagacgggcaactccaaatggtccgcataggaggtgaccggaatgacatcaccctctctggcctggaatccgaccacagatacctggtgaccctgtatggtttcagtgatgggaagcatgtaggtcctgtccatgtcgaggccctgacagtcccggaggaggagaagccttcagaacctcccaccgcaacccccgagccccccatcaagcctcgcctgggggagctgaccgtgacagatgccacccctgactccctcagcctgtcctggacagttcccgagggacagtttgaccacttcctggtccagtacaggaatggagatgggcagcccaaggcagtgagggtgccagggcacgaggaaggggtcaccatctcgggcctggagccagaccataaatacaagatgaacctgtacggcttccacggtggccagcgcatgggccctgtgtctgtcgtcggggtgacagaacccagcatggaggccccggagcccgctgaggagccgctcctgggggagctaacagtgacaggatcctcccctgactcgctgagcctctcctggaccgtcccccagggccgcttcgactccttcaccgtgcagtacaaggacagggacgggcggccccaggtggtgcgtgttgggggcgaggagagtgaagtcaccgtggggggcctggagcctgggcgcaagtacaagatgcacctgtacggcctccacgaggggcggcgcgtgggcccagtgtctgctgtgggcgtcacggcccccgaagaggagtcccctgatgctcctcttgcaaagctgcgcctagggcagatgacagtgagagacatcacctccgactccctcagcctctcctggacagtccccgagggccagtttgaccatttcttggtccagtttaagaatggggacgggcagcccaaggcggtgcgggtgccgggacacgaggatggggtcaccatctcgggcctggagccagaccacaagtacaagatgaacctgtacggcttccacggtggccagcgcgtgggccccgtgtctgctgttggtttaactgcctcgacagaacctcccacccctgaaccccccatcaagcctcgcctggaggagctgaccgtgacagatgcgacccctgactccctcagcctgtcctggacggttcccgagggacagtttgaccacttcctggtccagtacaagaatggggatgggcagcccaaggcaacacgggtgccaggacatgaggacagggtcaccatctccggcctggagccagacaacaagtacaagatgaacctgtacggcttccacggtggccagcgtgtgggccccgtgtctgccatcggggtgacagaggaagagacccccagccccacagaacccagcatggaggccccggagccccctgaggagccgctcctgggggagctaacagtgacaggatcctcccctgactcgctgagcctctcctggaccgtcccccagggccgcttcgactccttcaccgtgcagtacaaggacagggacgggcggccccaggtggtgcgtgttgggggcgaggagagcgaggtcaccgtggggggcctggagcctgggcgcaaatacaagatgcacctgtatggcctccacgaggggcggcgcgtgggcccggtgtccaccgtgggcgtgactgccccacaagaggatgtggacgagacccccagccctacagaaccaggcacagaggccccagagccccccgaggagcctctcctgggggagctgacagtgacaggatcctcccctgactcgctgagcctttcctggaccgtcccccagggccgctttgactccttcaccgtgcagtacaaggacagggacgggcggccccaggcggtgcgtgttgggggccaggagagcaaggtcactgtgaggggcctggagcctgggcgcaagtacaagatgcacctgtacggcctccacgaggggcggcgcctgggcccggtgtctgccgtgggcgtcacagaggatgaagccgagaccacccaagcagtgcctaccatgacccctgagccccccatcaagcctcgcctgggggagctgaccatgacagatgccacccctgactccctcagcctgtcctggacggttcccgagggccagtttgaccacttcctggtccagtacaggaatggggatgggcagcccaaggcggtgcgggtgccggggcacgaggacggggtcaccatctcaggcctggagccagaccataaatacaagatgaacctgtacggcttccacggtggccagcgcgtgggccccatctctgtcattggggtgacggaggaagagacccccagccccacggaactcagcactgaggcccgggagccccctgaggagccgctcctgggggagctgacagtgacaggatcctcccctgactcgctgagcctctcctggaccatcccccagggccacttcgactccttcaccgtgcagtacaaggacagggacgggcggccccaggtgatgcgtgtcaggggcgaggagagcgaggtcaccgtggggggcctggagcccgggcgcaaatacaagatgcacctgtacggcctccacgaggggcggcgtgtgggcccggtgtccaccgtgggtgtgacagtgcccaccacaacccctgagccccccaacaagcctcgcctcggggagctgaccgtgacagatgccacccctgactccctcagcctgtcctggatggtccccgagggccagtttgaccacttcctggtccagtacaggaatggggatgggcagcccaaggtggtgcgggtgccggggcacgaggacggggtcaccatctcaggcctggagccagaccacaagtacaagatgaacctgtacggcttccacggtggccagcgcgtgggccccatctctgtcattggggtgacagaggaagaaactcccgcccccacagaacccagcacggaggccccggagccccctgaggagccgctcctgggggagctgacagtgacaggatcctcccctgactcgctgagcctctcctggaccatcccccagggccgcttcgactccttcactgtgcagtacaaggacagggacgggcggccccaggtggtgcgtgtcaggggcgaggagagcgaggtcaccgtggggggcctggagcccgggtgcaaatacaagatgcacctgtacggcctccacgaggggcagcgcgtgggcccagtgtccgctgtgggtgtgacagctccaaaggatgaagccgagaccacccaagcagtgcctaccatgacccctgagccccccatcaagcctcgcctgggggagctgaccgtgacagatgccacccccgactccctcagcctgtcctggatggttcccgagggccagtttgaccacttcctggtccagtacaggaatggggatgggcagcccaaggcggtgcgggtgccggggcacgaggacggggtcaccatctcaggcctggagccagaccataaatacaagatgaacctgtacggcttccacggtggccagcgcgtaggccctgtgtctgccattggggtgacggaggaagagacccccagccccacagaacccagcactgaggccccggaggcccctgaggagccgctcctgggggagttgacagtgacaggatcctcccctgactcgctgagcctctcctggaccgtcccccagggccgcttcgactccttcaccgtgcagtacaaggacagggacgggcagccccaggtggtgcgtgtcaggggcgaggagagcgaggtcaccgtggggggcctggagcccgggcgcaaatacaagatgcatctgtacggcctccacgaggggcagcgcgtgggcccagtgtccaccgtgggcatcacggcgcccctgcccacaccactgccggtggagccccgcctgggggagctggcggtggcggccgtgacctcggactcagtgggcctctcatggacggtggcccagggcccctttgactccttcctggtacagtacagggacgcgcaggggcagccccaggcagtgcctgtgagcggagacctccgagcggtcgccgtctcggggctggacccggcccgcaagtacaagttcctgctctttggactccagaatgggaaacgccacggcccagtccctgtggaggccaggaccgccccagacaccaaaccgtctccccgcctgggggagctgactgtgacagatgcgacccctgactccgtgggcctctcgtggacggtccctgagggcgaattcgactccttcgtggtccagtacaaggataaggatggtcggctccaggtggtgccggtggcagccaaccagcgggaggtcacagtccagggcctggagcccagtaggaaatacaggttcctgctctatggtctgtcaggcaggaaacgactgggccccatctctgctgacagcaccacagctcccctggagaaggagctacctccccacctgggggaactgaccgtggctgaggagacctccagctctctgcgcctgtcctggacggtagcccagggcccctttgactccttcgtggtccagtacagggacacggacgggcagcccagggcagtgcctgtggccgcagaccagcgcacagtcaccgtagaggacctggagcctggcaagaaatacaagtttctgctctacgggctccttgggggaaagcgcctgggcccggtctctgccctgggaatgacagccccagaagaggacacaccagccccagagttagccccagaggcccctgagcctcctgaagagccccgcctaggagtgctgaccgtgaccgacacaaccccagactccatgcgcctctcgtggagcgtggcccagggcccctttgattccttcgtggtccagtatgaggacacgaacgggcagccccaggccttgctcgtggacggcgaccagagcaagatcctcatctcaggcctggagcccagcaccccctacaggttcctcctctatggcctccatgaagggaagcgcctggggcccctctcagctgagggcaccacagggctggctcctgctggtcagacctcagaggagtcaaggccccgcctgtcccagctgtctgtgactgacgtgaccaccagttcactgaggctcaactgggaggccccaccgggggccttcgactccttcctgctccgctttggggttccatcaccaagcactctggagccgcatccgcgtccactgctgcagcgcgagctgatggtgccggggacacggcactcggccgtgctccgggacctgcgttccgggactctgtacagcctgacactgtatgggctgcgaggaccccacaaggccgacagcatccagggaaccgcccgcaccctcagcccagttctggagagcccccgtgacctccaattcagtgaaatcagggagacctcagccaaggtcaactggatgcccccaccatcccgggcggacagcttcaaagtctcctaccagctggcggacggaggggagcctcagagtgtgcaggtggatggccaggcccggacccagaaactccaggggctgatcccaggcgctcgctatgaggtgaccgtggtctcggtccgaggctttgaggagagtgagcctctcacaggcttcctcaccacggttcctgacggtcccacacagttgcgtgcactgaacttgaccgagggattcgccgtgctgcactggaagcccccccagaatcctgtggacacctatgacgtccaggtcacagcccctggggccccgcctctgcaggcggagaccccaggcagcgcggtggactaccccctgcatgaccttgtcctccacaccaactacaccgccacagtgcgtggcctgcggggccccaacctcacttccccagccagcatcaccttcaccacagggctagaggcccctcgggacttggaggccaaggaagtgaccccccgcaccgccctgctcacttggactgagcccccagtccggcccgcaggctacctgctcagcttccacacccctggtggacagaaccaggagatcctgctcccaggagggatcacatctcaccagctccttggcctctttccctccacctcctacaatgcacggctccaggccatgtggggccagagcctcctgccgcccgtgtccacctctttcaccacgggtgggctgcggatccccttccccagggactgcggggaggagatgcagaacggagccggtgcctccaggaccagcaccatcttcctcaacggcaaccgcgagcggcccctgaacgtgttttgcgacatggagactgatgggggcggctggctggtgttccagcgccgcatggatggacagacagacttctggagggactgggaggactatgcccatggttttgggaacatctctggagagttctggctgggcaatgaggccctgcacagcctgacacaggcaggtgactactccatgcgcgtggacctgcgggctggggacgaggctgtgttcgcccagtacgactccttccacgtagactcggctgcggagtactaccgcctccacttggagggctaccacggcaccgcaggggactccatgagctaccacagcggcagtgtcttctctgcccgtgatcgggaccccaacagcttgctcatctcctgcgctgtctcctaccgaggggcctggtggtacaggaactgccactacgccaacctcaacgggctctacgggagcacagtggaccatcagggagtgagctggtaccactggaagggcttcgagttctcggtgcccttcacggaaatgaagctgagaccaagaaactttcgctccccagcggggggaggctgagctgctgcccacctctctcgcaccccagtatgactgccgagcactgaggggtcgccccgagagaagagccagggtccttcaccacccagccgctggaggaagccttctctgccagcgatctcgcagcactgtgtttacaggggggaggggaggggttcgtacaggagcaataaaggagaaactgaggtacccgg

SEQ ID NO: 1019 - protein, 2000 aa, Homo sapien
MMPAQYALTSSLVLLVLLSTARAGPFSSRSNVTLPAPRPPPQPGGHTVGAGVGSPSSQLYEHTVEGGEKQVVFTHRINLPPSTGCGCPPGTEPPVLASEVQALRVRLEILEELVKGLKEQCTGGCCPASAQAGTGQTDVRTLCSLHGVFDLSRCTCSCEPGWGGPTCSDPTDAEIPPSSPPSASGSCPDDCNDQGRCVRGRCVCFPGYTGPSCGWPSCPGDCQGRGRCVQGVCVCRAGFSGPDCSQRSCPRGCSQRGRCEGGRCVCDPGYTGDDCGMRSCPRGCSQRGRCENGRCVCNPGYTGEDCGVRSCPRGCSQRGRCKDGRCVCDPGYTGEDCGTRSCPWDCGEGGRCVDGRCVCWPGYTGEDCSTRTCPRDCRGRGRCEDGECICDTGYSGDDCGVRSCPGDCNQRGRCEDGRCVCWPGYTGTDCGSRACPRDCRGRGRCENGVCVCNAGYSGEDCGVRSCPGDCRGRGRCESGRCMCWPGYTGRDCGTRACPGDCRGRGRCVDGRCVCNPGFTGEDCGSRRCPGDCRGHGLCEDGVCVCDAGYSGEDCSTRSCPGGCRGRGQCLDGRCVCEDGYSGEDCGVRQCPNDCSQHGVCQDGVCICWEGYVSEDCSIRTCPSNCHGRGRCEEGRCLCDPGYTGPTCATRMCPADCRGRGRCVQGVCLCHVGYGGEDCGQEEPPASACPGGCGPRELCRAGQCVCVEGFRGPDCAIQTCPGDCRGRGECHDGSCVCKDGYAGEDCGEARVPSSASAYDQRGLAPGQEYQVTVRALRGTSWGLPASKTITTMIDGPQDLRVVAVTPTTLELGWLRPQAEVDRFVVSYVSAGNQRVRLEVPPEADGTLLTDLMPGVEYVVTVTAERGRAVSYPASVRANTEEREEESPPRPSLSQPPRRPWGNLTAELSRFRGTVQDLERHLRAHGYPLRANQTYTSVARHIHEYLQRQVLGSSADGALLVSLDGLRGQFERVVLRWRPQPPAEGPGGELTVPGTTRTVSLPDLRPGTTYHVEVHGVRAGQTSKSYAFITTTGPSTTQGAQAPLLQQRPQELGELRVLGRDETGRLRVVWTAQPDTFAYFQLRMRVPEGPGAHEEVLPGDVRQALVPPPPPGTPYELSLHGVPPGGKPSDPIIYQGIMDKDEEKPGKSSGPPRLGELTVTDRTSDSLLLRWTVPEGEFDSFVIQYKDRDGQPQVVPVEGPQRSAVITSLDPGRKYKFVLYGFVGKKRHGPLVAEAKILPQSDPSPGTPPHLGNLWVTDPTPDSLHLSWTVPEGQFDTFMVQYRDRDGRPQVVPVEGPERSFVVSSLDPDHKYRFTLFGIANKKRYGPLTADGTTAPERKEEPPRPEFLEQPLLGELTVTGVTPDSLRLSWTVAQGPFDSFMVQYKDAQGQPQAVPVAGDENEVTVPGLDPDRKYKMNLYGLRGRQRVGPESVVAKTAPQEDVDETPSPTELGTEAPESPEEPLLGELTVTGSSPDSLSLFWTVPQGSFDSFTVQYKDRDGRPRAVRVGGKESEVTVGGLEPGHKYKMHLYGLHEGQRVGPVSAVGVTAPQQEETPPATESPLEPRLGELTVTDVTPNSVGLSWTVPEGQFDSFIVQYKDKDGQPQVVPVAADQREVTVYNLEPERKYKMNMYGLHDGQRMGPLSVVIVTAPATEASKPPLEPRLGELTVTDITPDSVGLSWTVPEGEFDSFVVQYKDRDGQPQVVPVAADQREVTIPDLEPSRKYKFLLFGIQDGKRRSPVSVEAKTVARGDASPGAPPRLGELWVTDPTPDSLRLSWTVPEGQFDSFVVQFKDKDGPQVVPVEGHERSVTVTPLDAGRKYRFLLYGLLGKKRHGPLTADGTTEARSAMDDTGTKRPPKPRLGEELQVTTVTQNSVGLSWTVPEGQFDSFVVQYKDRDGQPQVVPVEGSLREVSVPGLDPAHRYKLLLYGLHHGKRVGPISAVAITAGREETETETTAPTPPAPEPHLGELTVEEATSHTLHLSWMVTEGEFDSFEIQYTDR

SEQ ID NO: 1020 - DNA, 2306 bp, Homo sapien
ggcacgagggaggtctgcatgaaggggatcccctacatcgcagcctaccagaaggaactggctcattcccagccggcggtgcagccccggctcaagctgctcctgatggggcataaggctgcaggaaagactttgctgcgccactgcctcaccgaggagagagtggagggatgcccaggaggaggggacaaggagaagtgctacccaccgtcacctccccctgtgagcaagggcatcgaggtgaccagctggacggccgatgcctcccggggcctgcggttcatcgtgtatgacttagctggggatgaaagttatgaggtgatccagcccttcttcctgtccccaggggccctatacgtgctggtggtcaacttggccacctatgagcctcgccactttcctaccaccgtgggctccttcttgcatcgggtcggggcgagagtgccccacgcggtggtgtgcatcgtgggcacccacgcagacctgtgcggagagcgtgagctggaggagaaatgtctggacattcaccgccagatcgccctgcaggagaagcacgacgcggagggactgagccgcttggccaaggtggtggacgaggcactggcccgggacttcgagctgcgctctgccagcccccacgcagcctactatggcgtttcggacaagaaccttcgacggcgcaaggcccattttcaatacctgctcaaccaccggctgcagatcctctcccccgtgttgcctgttagctgcagggacccgcgccacttacgacgccttcgggacaagttgctgtcagttgctgagcaccgagagatcttccccaacttacacagagtactgcctcgatcctggcaggtgctggaggaactgcatttccagccacctcaggcccagcgactgtggctaagctggtgggactcggcgcgcttgggcctgcaggcgggtctgaccgaggaccgactgcagagtgccctctcctacctgcatgagagcggcaagctactctactttgaggacagtccggctctcaaggagcacgtcttccacaacctcacccgcctcatcgacatcctcaatgtcttcttccagagggatccctctttgctgctgcataagctgctcctagggaccagtggagagggcaaggcggagggggaaagctccccgcccatggcgcggtccacccccagccaggaactgctccgggccacccagctccatcagtatgtggagggctttctgttgcatgggctcttgccagctcatgtcattcggttgctgcttaagcctcatgtccaggcccagcaggacttgcagctgttgctggagctgctggagaagatgggactctgttactgcctcaataaacccaagggcaagcctttgaatgggtccacagcttggtacaagttcccatgctatgtgcagaacgaggtgccccatgcagaagcctggattaatgggaccaacctagctgggcagtcttttgtggctgagcagttgcagattgaatatagctttccttttacttttccacctgggttgtttgcacgctacagtgtccagatcaacagccatgtggtgcacaggtcggatggtaaatttcagatctttgcctatagagggaaagttcctgtggttgtgagttacagacctgccaggggagtcctgcagccagacaccctgtccattgctagccatgcatcattaccaaatatatggaccgcatggcaagccataacccccttggtggaggaactgaatgtcctacttcaggaatggcctggactgcactacaccgtgcacattctctgttctaagtgccttaagagaggatcgcccaatccacatgcttttccaggggagttgctgagtcagcccagaccggaaggagtggcagagatcatttgccccaagaacggcagcgagcgagtaaatgttgccttggtttacccacccacgccgactgtgatcagcccctgttccaagaagaatgttggtgaaaagcacagaaaccagtgacgtttgtggctgtggaatttccatggagaaaagagagcatctgaacacctggaccatcttttgcacctggcagaccctctgcactcaccccagcgtgttctgtgaacttgagtgacaacgcgtgcttgcagggtgctttttggatgactggggaagaggtggggagggggtggtggggggaagcatggacgagaacatggagcaaatgttttacaacctgaacctcagaactgtgatcctccaaggagcgcgctacttgaagaaaaaaaaaaaaaaaaaaaaaa

SEQ ID NO: 1021 - DNA, 1711 bp, Homo sapien
gcggccgccccaacatcagaatggtataggccagtagacccccggtcaccctgaggctggtggtccctgctagtcagtgtggctctctcattggaaaaggtggatgcaagatcaaggaaatacgagagagtacaggggctcaggtccaggtggcaggggatatgctacccaactcaactgagcgggccatcactattgctggcattccacaatccatcattgagtgtgtcaaacagatctgcgtggtcatgttggagactctctcccagtcccccccgaagggcgtgaccatcccgtaccggcccaagccgtccagctctccggtcatctttgcaggtggtcaggacaggtacagcacaggcagcgacagtgcgagctttccccacaccaccccgtccatgtgcctcaaccctgacctggagggaccacctctagaggcctataccattcaaggacagtatgccattccacagccagatttgaccaagctgcaccagttggcaatgcaacagtctcattttcccatgacgcatggcaacaccggattcagtggtatggatacctcagtgtttatttctgtaaggtgtagtgcaagagagaggccagtcccaaggtctcagcttgacatctgtttaaaacaaacttcgttatccagcatcctgctggtttaaacttgcctgtctactatggctaagcccaaggaggtaatgtgtttgttaacgtggttttcatttggggtcagttattctaaaagaaaaaaaaagccctggaaggtttgggggtgaggtttggggatgcttgtcaggcaaagggtaggctgatatttctttgagcccatcctgactgctgcccccttgatctgatcagcaccccctttctctccaccagcaattcacaggcttgggtagagaccatccatttgtgccaaattgtgtagtgttttttttgtttttgtttttgtttttattttgtttcgtttttggggcttttctgtataaggaataacttgtccgatagggttaggatgagaccaccaaactcattttcacttgtatcttaacaggcattgaatccagctctccagaggtgaaaggctattggggtaatgattaaaaaaaaaaaaatctgtagtattctacggttatattaataaacgggggggagtctggtttcactgcccatgaaccataccagcaacatgcacatggcagagaggagctgagagagcaaaggggtgggcctggagcccccgagggtcccttgatggatctggccaacccccttctaaaaatgatgagacagcagccatagctgagatcaggactaagcttgagtgttagccagctggcctggttcagtccaggtgttgttaaagatgggtacgggtatttgctgatgggatttttttttctttctttttctttggaaaacaaaatgaaagccagaacaaaattattgaacaaaagacagggactaaatctggagaaatgaagtcccctcacctgactgccatttcattctatctgaccttccagtctagcaggtttggatgcatctgctcagactacttctcatgaactcaccattccaaacgatttgattggctgcataatcgggcgtcaaggcgccaaaatcaatgagatccgtcagatgtctggggcgcagattaaaattggtgacccagtggaaggatctactgataggcaggtta

SEQ ID NO: 1022 - protein, 169 aa, Homo sapien
MLPNSTERAITIAGIPQSIIECVKQICVVMLETLSQSPPKGVTIPYRPKPSSSPVIFAGGQDRYSTGSDSASFPHTTPSMCLNPDLEGPPLEAYTIQGQYAIPQPDLTKLHQLAMQQSHFPMTHGNTGFSGMDTSVFISVRCSARERPVPRSQLDICLKQTSLSSILLV

SEQ ID NO: 1023 - DNA, 777 bp, Homo sapien
atggctgagacggaggagcggagcctggacaacttctttgccaagagggacaagaagaagaagaaggagcggagcaaccgggcggcgagtgccgcgggcgcagcgggcagcgccggcggaagcagtggagccgcgggtgcggcgggcggcggggcgggcgcggggacccggccgggtgacggcgggaccgccagcgcgggggctgcgggcccaggggccgccaccaaggctgtgacgaaggacgaagatgaatggaaagaattggagcaaaaagaggttgattacagcggcctcagggttcaggcaatgcaaataagcagtgaaaaggaagaagacgataatgaaaagagacaagatccaggtgataactgggaagaaggtggaggtggtggtggaggtatggaaaaatcttcaggtccctggaataaaacagctccagtacaagcacctcctgctccagtaattgttacagaaaccccagaaccagcgatgactagtggtgtgtataggcctcctggggccaggttaaccacaacaaggaaaacaccacaaggaccaccagaaatctacagtgatacacagttcccatccctgcagtcaactgccaagcatgtagaaagccggaaggataaagaaatggagaagagctttgaagtagtaagacacaaaaatagaggtagggatgaggtttcaaaaaaccaggcccttaaacttcagctagacaaccaatatgctgtgcttgaaaatcagaaaagcagccactcacaatacaattaa

SEQ ID NO: 1024 - protein, 258 aa, Homo sapien
MAETEERSLDNFFAKRDKKKKKERSNRAASAAGAAGSAGGSSGAAGAAGGGAGAGTRPGDGGTASAGAAGPGAATKAVTKDEDEWKELEQKEVDYSGLRVQAMQISSEKEEDDNEKRQDPGDNWEEGGGGGGGMEKSSGPWNKTAPVQAPPAPVIVTETPEPAMTSGVYRPPGARLTTTRKTPQGPPEIYSDTQFPSLQSTAKHVESRKDKEMEKSFEVVRHKNRGRDEVSKNQALKLQLDNQYAVLENQKSSHSQYN

SEQ ID NO: 1025 - DNA, 2634 bp, Homo sapien
  Unsure 2131-2459: Unknown base
ggggccggaagccacggctcacttctgcttgcacttaggcgacctcgggagctcggactcctacgcagtcaccgggaagggccgccgccccgcccgcggctgctggcccgggtgacacttccgcctgctataagagcagcggccctcggtgcctccttcctgacctcgcacccagctcggagcccggagcgtgcctcggcggcctgtcggttttcaccatggagcagctgagctcagcaaacacccgcttcgccttggacctgttcctggcgttgagtgagaacaatccggctggaaacatcttcatctctcccttcagcatttcatctgctatggccatggtttttctggggaccagaggtaacacggcagcacagctgtccaagactttccatttcaacacggttgaagaggttcattcaagattccagagtctgaatgctgatatcaacaaacgtggagcgtcttatattctgaaacttgctaatagattatatggagagaaaacttacaatttccttcctgagttcttggtttcgactcagaaaacatatggtgctgacctggccagtgtggattttcagcatgcctctgaagatgcaaggaagaccataaaccagtgggtcaaaggacagacagaaggaaaaattccggaactgttggcttcgggcatggttgataacatgaccaaacttgtgctagtaaatgccatctatttcaagggaaactggaaggataaattcatgaaagaagccacgacgaatgcaccattcagattgaataagaaagacagaaaaactgtgaaaatgatgtatcagaagaaaaaatttgcatatggctacatcgaggaccttaagtgccgtgtgctggaactgccttaccaaggcgaggagctcagcatggtcatcctgctgccggatgacattgaggacgagtccacgggcctgaagaagattgaggaacagttgactttggaaaagttgcatgagtggactaaacctgagaatctcgatttcattgaagttaatgtcagcttgcccaggttcaaactggaagagagttacactctcaactccgacctcgcccgcctaggtgtgcaggatctctttaacagtagcaaggctgatctgtctggcatgtcaggagccagagatatttttatatcaaaaattgtccacaagtcatttgtggaagtgaatgaagagggaacagaggcggcagctgccacagcaggcatcgcaactttctgcatgttgatgcccgaagaaaatttcactgccgaccatccattccttttctttattcggcataattcctcaggtagcatcctattcttggggagattttcttccccttagaagaaagagactgtagcaatacaaaaatcaagcttagtgctttattacctgagtttttaatagagccaatatgtcttatatctttaccaataaaaccactgtccagaaacaagtctttcattttctttgtaagtttggctctgttggctgtttacacccatgaattttggcatgggtatctatttttcttttttacattgaaaaaaatccagtggttgcttttgaatgcatcaagtaaagaagaagaaaagaatacatccgatgcgtagattcttgaccatgtagtaatctataaaattgctatatcctcctgatagccatgggaaaacatgataagatggtcatttattttgcagttagaattttggaagccacaaaatagacagacaccctgactgttgaagggaggtttaaaaacagatattcaattgaaatgtaagagagcaccccaattgagagcccaggttacgaagacaagcttgcctcgcctgacttttctgtcccttgttctgcaggattagtattctgttacagacctctagtttttagactcttcaattaaagggccaatggttataacctgcattcccttttttgttcttctttatgtataatatatagttcatgtggcgctgcatgaaatcaagaagtgggtgtcttaggataaaagataccaagagtctacaaaaataaccatgtagtaagataaactgctgaacaaaggttttactgttagccaccttctcatgtgttttcttttctctttttccgtnnnnnnnnnnnnnnnnnnnnnnnnnnnnnnnnnnnnnnnnnnnnnnnnnnnnnnnnnnnnnnnnnnnnnnnnnnnnnnnnnnnnnnnnnnnnnnnnnnnnnnnnnnnnnnnnnnnnnnnnnnnnnnnnnnnnnnnnnnnnnnnnnnnnnnnnnnnnnnnnnnnnnnnnnnnnnnnnnnnnnnnnnnnnnnnnnnnnnnnnnnnnnnnnnnnnnnnnnnnnnnnnnnnnnnnnnnnnnnnnnnnnnnnnnnnnnnnnnnnnnnnnnnnnnnnnnnnnnnnnnnnnnnnnnnnnnnnnnnnnnnnnnnnnnnnnnnnnnnnnnnnnnnnnnattaaggctcttgacttccaaggctgtgtggggagatggggtgggggctcttggactgatataaaactttgtcaaatgtagttctttgaatggagcttgaaacgccgcatattcttgctcccacaaggatagtgggcatcatgaattaataaaacgtcctaggattctgcaagct

SEQ ID NO: 1026 - protein, 451 aa, Homo sapien [sequence omitted]

SEQ ID NO: 1027 - DNA, 773 bp, Mus musculus
gccaaaatgaagtttaatccctttgtgacttccgaccgaagcaagaatcgcaaaaggcatttcaatgcaccttcccacattcgaaggaagattatgtcttcccctctttccaaagagctgagacagaagtacaacgtgcgatccatgcccatccgaaaggatgatgaagttcaggttgtacgtggacactataaaggtcagcaaattggcaaagtagtccaggtttacaggaagaaatatgttatctacattgaacgggtgcagcgggaaaaggctaatggcacaactgtccacgtaggcattcaccccagcaaggtggttatcactaggctaaaactggacaaagaccgcaaaaagatcctcgaacggaaagccaaatctcgccaagtaggaaaggaaaagggcaaatacaaggaagaaaccattgagaagatgcaggaataaagtaatcttatatacaagctttgattaaaacttgaaacaaaaaaaaaggggaagaaacgacagcctcacttctgtatggactgctgatgtggcctgccatcctgttcagcgggcattgtctttggagcagcaggagactaggatgcctctcactcacatcgagttcctggctggccagctgctcagggctcaggctggggcctcccattgacatcctccccctacactccctctctgagcctccgtcgcccctcctgttgggtaagggtgttgagtgtgacttgtgctgaaaacctggttcatatataataaataatggtgatgaaaag

SEQ ID NO: 1028 - protein, 145 aa, Mus musculus [sequence omitted]

SEQ ID NO: 1029 - DNA, 2268 bp, Homo sapien
  Unsure 2120-2139: Unknown base
ggcgccattttgctggagcctgcgaccgagtgggagtggagtggagcggctgtggttgccgactctttcctcttccccacggtccagtcagcgggttaattaggccatcggccctcgagccgagacttgtctcttatttagttctggggagcgcctcgtcgacatgagtgatgtggaggaaaacaacttcgagggcagagtgagtacaaagccgcgggagccgtctaggcggcggcccaatgctcggggtttcacgggaacaagcgcggtcgggcggggttgcgggtagtcccgcgaggagcaacctctggagccatcgcgattgattcctcccatcccaagatggcttctgggttccactccttccccaaacaccacggataacacccctcccccttttttggaggctgactgatacctggacttctgggtcctcttccctccccgcccccgcattgcttcctcccttctccccacccctgaggcttccttatgtctgctccgaggtgtgggtccccgtcgcggttgggcgggaggaggcggcagggagctcccctccgtccggatagtggtaggtgcttcctgcggtggcatttctggcgaccccgagcatcgtagagggtctcgggatcgaaagtgcgcggggctgctttccgggcggggagaagctggcgtgggactagctggggcctgtgtctccttggctctctatttcagtgagcggccgcgtctctgttggaaccggcggcgttgcgtctaaaaaggcgaaagccttgaggttgaaggtgggacgagcctaatgaagtggttagtcaacgaccgcaccgacccttaagcgttcttaagacgagagctgtgaggggaaactacgcaaggagcccttttcccttaatgtcccttcgactttcctttcacttcgaaatgaatgtggaaatgctgtcacgccttatttttctaattcctcgatgttgggttttttctcttctttatatctcaacttttaatgctcttcttcctatgacctttcatctaaaaactgaccactcctttacaggtttttacggtaaaaaaaaaaaaatcggtctttctttaatcttacatagctgaacgaattcattggctcagtatttttaagataactagtcagtatatactgttctgtaacttaaaagatgacctgaaaattaacaggccctctcccatttctcttctcactctatcccccaccgaagagggctcagaaaaaagtttttattaatatatttggggtcggagaaatacaaacatcacaaagaatacgatatccccagcttaaatgtactggaacgtttgtcagtgagtttcatttccaaagtttaccctacatagggaattgtagaagtgagttagtagaagtgagttcgtgtgaaaccctggaaagaaaacaaaagccccatgcaacacgttccgggctgttgtgtagatgtttattctagtcactaggggaagcacataaaaacacctgaggtgtgtgtgctgaagggcgaattttgtccttttggggagttcatgatataaacatctagaaccaaaaagtcaaatcagaaggtcagtttaggctttagttctctttgaggaaagatttaaagcaatagactataatagttacccggtagactaaaaaatttgcctttaattcttttgattggaatttttttttacaaagtttggagcatggaaacaaatgaaaattgaacctgcttattttttaggatggtgtattgatggccccaacagaactttctaaaatcatgcgataaacatatatgatagtagttgtaaaatgcttcttgttttgaaaatgttgagtaattatcgatagaaattttgctgtccattcatacattccttcaattaactttcattgttaaaaaattgggggattgatgtttggtttggtttgtggggagtgaagaggactactggagggaccttgtttgcttgctttttttctttttttaatttatcatcaagtctaggaaaggagtaagttgccgacaattgtcacttttccctcctaagaaagtaacatgttaagattcccacctaccagcctgggtgacagtgagactcccgtctcnnnnnnnnnnnnnnnnnnnnttcccacccacttttaagctaaagtatatgtaggcattaaagatttatttaatagaaataaagggccctcttacggccctttgtggtcataggaaatatttttttcacaagtggtacccaagtgtattt

SEQ ID NO: 1030 - protein, 54 aa, Homo sapien
  Unsure 2120-2139: Unknown amino acid
RHFAGACDRVGVEWSGCGCRLFPLPHGPVSGLIRPSALEPRLVSYLVLGSASST

SEQ ID NO: 1031 - DNA, 1939 bp, Homo sapien
gaacacaaacatgcagtctgtagcagatggtaataggctgayatattacacttgttgatgtaaatctgataggtttctttctctccaaggacagctttttaaatatttaacagtatcaataatttttcagtttctgtgagaattttataatttataatttgcagacttaatgtataatctattttgtcctaacaattacaaatatattttttatttcagattrtatatattcctaccagatggagataattacagctttaaaaatttttattttttcattttatttcacacattgacattaaatttttatggacacataataactgtacatatatatggggtagaatgtgatgttttaatacatgtactcaatgtgtaatgatcaaatcagggtaatttgcataatgatttttctgtagggagaaaattcaaaatctactcttctggctattttcaaatatataatatgttattgttaactatactcatcctactatgcaataggacaccagaacttattcctgggttctacatccgttaaggcaaccaaggattggaaatattggaaaaaaaaattgcgtctgtactgaacatgtacagacttttttcttgtccttattccttacacaatatagtacaataactatttgcatgacatttacatcggatattatgagtgatctagagttgatatgaagtatatgggaggatgtgcaaaggtgatgtgcaaatactatgtcattttatatcagggacttgagtatcctttgttaycctcaggagatcctgaaacyagtcccccatggatactgagggctgactgtatagtcctatcctcacggaactttcattctaatgrgggaagactgactataaacaaaatatatgtaataggtggtggtaagtaccgtggagaagtaacaaatggggcaaagtgagttatacagctccatycttagaaaccttggagtacttttcttagtttatactcgtggtggtttccttttgtctcctttattacatgggactctgacatgtgcccatagctagggtggcagtaggatctacccgaaaagcgtcctgctgatacaggaccaaagcatcctgttgttctcgagcctataaaaagagctaatggtcttgcttctcttaactgtggcctcctacactgtgttttggatgattggtgatgtcttggatattctgtttctttggaactttgaatatacaacactttactagggaattagcaatggaagcagagcaaagatgtacagaggaaacaatgcrtaactctgatggaattgaagtcatgaggcagcagagagcttaaattasagctttaaaaatttttattttttagagggaatttamttgggagtaacagcagtaatagttaacggagccagaatgcttgagtcatataattgcaaagcagagttgggagcaacagatgctaaagagtagttgctgtagttcctctttgggtcgtaggagcagttgtcatrttmctatayagctactgcatgaagaagagttcttagtgaggcctgggtgaacagctcttcttagtattctgtgtgaccccattygaccttttaacaaatccctaagtaaataaatagcccctmaggwaaactaagtttttctctgctgtttttttgcttgagagagctataactgtaatagacttatatttctgaacattttagtgcttgccaatatttggtaatatttatgtttcctatatttgtaatgaacattcttcttcmggtacatttyttgttaaattattgtttsatgsataaaagttcaccttttattgtataaaattgactcagattaatttatacacattgacaatgggtaaatagagtttttcagattattaaaagctgaaggatgcccatgtaagcaaaaaaaaaaaaaaaaaactcga

SEQ ID NO: 1032 - protein, 35 aa, Homo sapien
IYSSGYFQIYNMLLLTILILLCNRTPELIPGFYIR

SEQ ID NO: 1033 - DNA, 2784 bp, Homo sapien
aaaaaaaaaaaaaaaagtagacgctcgggcaccagccgcggcaaggatggagctgggttgctggacgcagttggggctcacttttcttcagctccttctcatctcgtccttgccaagagagtacacagtcattaatgaagcctgccctggagcagagtggaatatcatgtgtcgggagtgctgtgaatatgatcagattgagtgcgtctgccccggaaagagggaagtcgtgggttataccatcccttgctgcaggaatgaggagaatgagtgtgactcctgcctgatccacccaggttgtaccatctttgaaaactgcaagagctgccgaaatggctcatgggggggtaccttggatgacttctatgtgaaggggttctactgtgcagagtgccgagcaggctggtacggaggagactgcatgcgatgtggccaggttctgcgagccccaaagggtcagattttgttggaaagctatcccctaaatgctcactgtgaatggaccattcatgctaaacctgggtttgtcatccaactaagatttgtcatgttgagcctggagtttgactacatgtgccagtatgactatgttgaggttcgtgatggagacaaccgcgatggccagatcatcaagcgtgtctgtggcaacgagcggccagctcctatccagagcataggatcctcactccacgtcctcttccactccgatggctccaagaattttgacggtttccatgccatttatgaggagatcacagcatgctcctcatccccttgtttccatgacggcacgtgcgtccttgacaaggctggaccttacaagtgtgcctgcttggcaggctatactgggcagcgctgtgaaaatcttctggaggctgggaagtccaagatcaaggcgtcagaagattcattgtctgtccttgaagaaagaaactgctcagaccctgggggcccagtcaatgggtaccagaaaataacagggggccctgggcttatcaacggacgccatgctaaaattggcaccgtggtgtctttcttttgtaacaactcctatgttcttagtggcaatgagaaaagaacttgccagcagaatggagagtggtcagggaaacagcccatctgcataaaagcctgccgagaaccaaagatttcagacctggtgagaaggagagttcttccgatgcaggttcagtcaagggagacaccattacaccagctatactcagcggccttcagcaagcagaaactgcagagtgcccctaccaagaagccagcccttccctttggagatctgcccatgggataccaacatctgcatacccagctccagtatgagtgcatctcacccttctaccgccgcctgggcagcagcaggaggacatgtctgaggactgggaagtggagtgggcgggcaccatcctgcatccctatctgcgggaaaattgagaacatcactgctccaaagacccaagggttgcgctggccgtggcaggcagccatctacaggaggaccagcggggtgcatgacggcagcctacacaagggagcgtggttcctagtctgcagcggtgccctggtgaatgagcgcactgtggtggtggctgcccactgtgttactgacctggggaaggtcaccatgatcaagacagcagacctgaaagttgttttggggaaattctaccgggatgatgaccgggatgagaagaccatccagagcctacagatttctgctatcattctgcatcccaactatgaccccatcctgcttgatgctgacatcgccatcctgaagctcctagacaaggcccgtatcagcacccgagtccagcccatctgcctcgctgccagtcgggatctcagcacttccttccaggagtcccacatcactgtggctggctggaatgtcctggcagacgtgaggagccctggcttcaagaacgacacactgcgctctggggtggtcagtgtggtggactcgctgctgtgtgaggagcagcatgaggaccatggcatcccagtgagtgtcactgataacatgttctgtgccagctgggaacccactgccccttctgatatctgcactgcagagacaggaggcatcgcggctgtgtccttcccgggacgagcatctcctgagccacgctggcatctgatgggactggtcagctggagctatgataaaacatgcagccacaggctctccactgccttcaccaaggtgctgccttttaaagactggattgaaagaaatatgaaatgaaccatgctcatgcactccttgagaagtgtttctgtatatccgtctgtacgtgtgtcattgcgtgaagcagtgtgggcctgaagtgtgatttggcctgtgaacttggctgtgccagggcttctgacttcagggacaaaactcagtgaagggtgagtagacctccattgctggtaggctgatgccgcgtccactactaggacagccaattggaagatgccagggcttgcaagaagtaagtttcttcaaagaagaccatatacaaaacctctccactccactgacctggtggtcttccccaactttcagttatacgaatgccatcagctgaccagggaagatctgggcttcatgaggccccttttgaggctctcaagttctagagagctgcctgtgggacagcccagggcagcagagctgggatgtggtgcatgcctttgtgtacatggccacagtacagtctggtccttttccttccccatctcttgtacacattttaataaaataagggttggcttctgaactac

SEQ ID NO: 1034 - protein, 737 aa, Homo sapien
MELGCWTQLGLTFLQLLLISSLPREYTVINEACPGAEWNIMCRECCEYDQIECVCPGKREVVGYTIPCCRNEENECDSCLIHPGCTIFENCKSCRNGSWGGTLDDFYVKGFYCAECRAGWYGGDCMRCGQVLRAPKGQILLESYPLNAHCEWTIHAKPGFVIQLRFVMLSLEFDYMCQYDYVEVRDGDNRDGQIIKRVCGNERPAPIQSIGSSLHVLFHSDGSKNFDGFHAIYEEITACSSSPCFHDGTCVLDKAGPYKCACLAGYTGQRCENLLEAGKSKIKASEDSLSVLEERNCSDPGGPVNGYQKITGGPGLINGRHAKIGTVVSFFCNNSYVLSGNEKRTCQQNGEWSGKQPICIKACREPKISDLVRRRVLPMQVQSRETPLHQLYSAAFSKQKLQSAPTKKPALPFGDLPMGYQHLHTQLQYECISPFYRRLGSSRRTCLRTGKWSGRAPSCIPICGKIENITAPKTQGLRWPWQAAIYRRTSGVHDGSLHKGAWFLVCSGALVNERTVVVAAHCVTDLGKVTMIKTADLKVVLGKFYRDDDRDEKTIQSLQISAIILHPNYDPILLDADIAILKLLDKARISTRVQPICLAASRDLSTSFQESHITVAGWNVLADVRSPGFKNDTLRSGVVSVVDSLLCEEQHEDHGIPVSVTDNMFCASWEPTAPSDICTAETGGIAAVSFPGRASPEPRWHLMGLVSWSYDKTCSHRLSTAFTKVLPFKDWIERNMK

SEQ ID NO: 1035 - DNA, 1443 bp, Homo sapien
ggagaagcagcttgaggcatcattagatgcactgctgagtcaagtggctgatctgaagaactctctggggagtttcatttgcaagttggagaacgagtatggccggctgacctggccatctgtcctggacagctttgccttgctttctggacagctgaacactctgaacaaggtcttgaagcatgaaaaaacaccgctgttccgtaaccaggtcatcattcctctggtgttgtctccagaccgagatgaagatctcatgcggcagactgaaggacgggtgcctgttttcagccatgaggtagtccctgaccatctgagaaccaagcctgaccctgaagtggaagaacaggagaagcaactgacgacagatgctgcccgcattggtgcagatgcagcccagaagcagatccagagcttgaataaaatgtgttcaaaccttctggagaaaatcagcaaagaggagcgagaatcagagagtggaggtctccggccgaacaagcagacctttaaccctacagacactaatgccttggtggcagctgttgcctttgggaaaggactatctaattggagaccttcaggcagcagtggtcctggccaggcaggccagccaggagctgggacgatccttgcaggaacctcaggattacagcaggtgcagatggcaggagctccaagccagcagcagccaatgctcagtggggtacaaatggctcaggcaggtcaaccagggaaaatgccaagtggaataaaaaccaacatcaagtcggcttccatgcatccctaccagcggccctcctgcctgggtttcattctggctatccctctaaggcgcaaggtgaagaagcttctgggccaggaaggaaaaaaaaatgcccacctgcagctctggtgaagcttgggcctgctctcctttccatcctctaaggagccaacttggcttttacctgtcaaatagtcataaagtcccctatcctttaccccaccttatacacacgaggctttctcaggaagtggctctgccaggcaggactatgtgggaaagggtttttccttagcacacgaaaaagccccttcccctggattcatgtttcttattttggagggagaagggaattgcacttcacactgccatcagggtttagttgacctcataatggtgcccactttctcgactttggccaggatttccttcaaagaaaacgactttccttcatttccctaagcctgtggcccaaatggtggaccagaatgatggtgggagggggcaacccccagtagctttgcctgcttttataaagttgaacaaattgaatttagacattcaggctaacctgcctttcttagtactcctttgttggcatgggcaggggttgagtcagcagaagtggaccaaaggattcctctgaataaagttatttaaattgaaaaaaaaaaaaaaaa

SEQ ID NO: 1036 - protein, 212 aa, Homo sapien
MRQTEGRVPVFSHEVVPDHLRTKPDPEVEEQEKQLTTDAARIGADAAQKQIQSLNKMCSNLLEKISKEERESESGGLRPNKQTFNPTDTNALVAAVAFGKGLSNWRPSGSSGPGQAGQPGAGTILAGTSGLQQVQMAGAPSQQQPMLSGVQMAQAGQPGKMPSGIKTNIKSASMHPYQRPSCLGFILAIPLRRKVKKLLGQEGKKNAHLQLW

SEQ ID NO: 1037 - DNA, 3590 bp, Homo sapien
gggaagatgagaaggggggctcccttctctagtagcaaagggtgaggagactgagtctcctttctactgccaggtcactggggactatttgtcatgggagtggaggtgataaggaaggtaggtaggagtgaacagcctggggggctgctgtgagatcctgaggtggggcgctgccccaactcctgccactgttccctcctcctgtactttcctgtgctccccctcccaccaggagctagggagtgtggcactgagccggctcaggcagagacgcggcaccatggctagcaagaaagtctgcattgtaggctccgggaactggggctcagccatcgccaagatcgtgggtggcaatgcagcccagctggcacagtttgacccacgggtgaccatgtgggtatttgaggaagacattggaggcaaaaagctgactgagatcatcaacacgcagcatgagaatgtcaaatacctgccagggcacaagttgcccccaaatgtggtggctgtcccagatgtggtccaggctgcagaggatgctgacatcctgatctttgtggtgccccatcagttcatcggcaagatctgtgaccagctcaagggccatctgaaggcaaacgccactggcatatctcttattaagggggtagacgagggccccaatgggctgaagctcatctcggaagtgattggggagcgcctcggcatccccatgagtgtgctgatgggggccaacattgccagcgaggtggctgatgagaagttctgtgagacaaccattggctgcaaggacccggcccagggacaactcctgaaagagctgatgcagacaccaaacttccgtatcacagtggtgcaagaggtggacacagtagagatctgtggagccttaaagaatgtagtggccgtgggggctggcttctgtgatggcctgggctttggcgacaacaccaaggcggcagtgatccggctgggactcatggagatgatagccttcgccaagctcttctgcagtggccctgtgtcctctgccaccttcttggagagctgtggtgttgctgacctgatcactacctgctatggagggcggaaccggaaagtggctgaggcctttgcgcgtacaggaaagtccattgagcagctggagaaagagttgctgaatgggcagaaactgcaggggcccgagacagcccgggagctatacagcatcctccagcacaagggcctggtagacaagtttcccttgttcatggctgtgtacaaggtgtgctacgagggccagccagtgggtgaattcattcactgcctgcagaatcatccagaacatatgtgagtggggccagggcccaggccaggccgcttttttaccccagtggagaccagcagaagcctggggtacctagtcaccaggatctccaggactcccagggagcagagtcttctcatcttttcactggaggacaggaggctatggggcccagctacgcacctggagatcctgaactgtcaagccactggcagcctcatgccaccacatttgccagaaatgcagttgccctgtccctctccagatgtggggctttctccatatcctctgggaggggtggaatcaagccccagtgctgcctgcttggtggcgggggtgatgtatgtggagaagggttgggggagaggccggtagggcaggggctgctagtggctgtctcacatacaccagtaatcctgttaaagggctgaagaagtatcttagccacaggagcgatgaggcaaggattgtcagggaggggtctgggcttctgagctgatgcaggccccaaggacccctttgctgacctctgccaggacccacacagcttcgatggatctcagtgtttgttaacaaaatacaaagatctcaaacaaaccccttttagcttctcctagcaacatctgtgtcctcagaaacctctggttctcccccttccccctcccccaggctgccctggcacccaaattgctgccatgctggcatctgtagctcggtggcttgacattctccccagggacttcccggttcctagttctttgccagctcctccccactctgtgcgacctttccaagccttccctcaccctccccgccagcaccctctttggggagcaggaacttaatctgctgacagagctacacctttcataacaggctcagatcactcagctccctgtgacctttgtattcacccaggcttccttctcagtagctctagctgggggaggtgtcagctgggcccctcctgtgctatctccccagaggacatccctgactccacccctttcttcctcccaaactctgcacctcttcctcagctgctccagaccggccagggtaaccagctaaccatgcctggcatctggaagccagcaggccagagggtggcccaaaggctgatgaacggtagggaagggtgagcagattcctatgttggtgggcaccaatattccaagggcagctctctttgctgaatgagggccttctcgtgaggtactgacaacaccagcaactcgagagctgggaaactcaaggaggaggaagaaaatcaaaaccaccctactccctggggtgaggaaagaacaggaggggaggaggaggagtgtgctctgcacttgccttgctccaggatggggtggcagcagaggaatgtcacaggtcagcagcctaggcctccagctataaatagtccggagggcccgagaggctcccgcccgtccagcagggctgtcagcttcctgtgtggcagcacctggcacactggctctggccagcattatgctaaaaccctgttactctccaatgaaccagggaggcgggctcctctctgcgcctatcccttgagaattctgtcttaccagtgaagggtggggctgcccagatcaggcagcaggagtgaggggcacagtcaccccaggccttgctgagcccaggtctgggtactgagtgtccagagctgcctccccaggaggttaaggtgggggcaaaggggaagcttcaagcactttgcctacttttgttcactccccagtgcactgtgactcaggccttcccatcaggcctatttgtctacccaataaagcgtgttttttccagaaacaagaagagttgggagagggagcttcagtgcatgtggcagtgcgtgtgctggcgcgtatcattgcacgtatgttttccctcttaccgtaggaaaaacgaaaaaagaaatccctcctccataatcgcagctactccaggggtcagcggcggtgcccactcagtccccatccctctctctcccctcccgccagcgccccctcccgccctcgccgcaagctggccccggccttgccggcccttcttaggggctttatcatgcctcctgcaagaatagagatcacacacgggacggaaacgttagactctcatcccttgtgcccattccttggtcacgggccaagctgccgcatccttagcggtccaggcatcgcggtgcccctcgggcccctacctggactaggcccacagccgggctctagggggcgcgcgatccacctccagaaggccggctgcgaaaatctaccca

SEQ ID NO: 1038 - protein, 349 aa, Homo sapien
MASKKVCIVGSGNWGSAIAKIVGGNAAQLAQFDPRVTMWVFEEDIGGKKLTEIINTQHENVKYLPGHKLPPNVVAVPDVVQAAEDADILIFVVPHQFIGKICDQLKGHLKANATGISLIKGVDEGPNGLKLISEVIGERLGIPMSVLMGANIASEVADEKFCETTIGCKDPAQGQLLKELMQTPNFRITVVQEVDTVEICGALKNVVAVGAGFCDGLGFGDNTKAAVIRLGLMEMIAFAKLFCSGPVSSATFLESCGVADLITTCYGGRNRKVAEAFARTGKSIEQLEKELLNGQKLQGPETARELYSILQHKGLVDKFPLFMAVYKVCYEGQPVGEFIHCLQNHPEHM

SEQ ID NO: 1039 - DNA, 5180 bp, Homo sapien
accgggagcgcgcgctctgatccgaggagaccccgcgctcccgcagccatgggcaccgggggccggcggggggcggcggccgcgccgctgctggtggcggtggccgcgctgctactgggcgccgcgggccacctgtaccccggagaggtgtgtcccggcatggatatccggaacaacctcactaggttgcatgagctggagaattgctctgtcatcgaaggacacttgcagatactcttgatgttcaaaacgaggcccgaagatttccgagacctcagtttccccaaactcatcatgatcactgattacttgctgctcttccgggtctatgggctcgagagcctgaaggacctgttccccaacctcacggtcatccggggatcacgactgttctttaactacgcgctggtcatcttcgagatggttcacctcaaggaactcggcctctacaacctgatgaacatcacccggggttctgtccgcatcgagaagaacaatgagctctgttacttggccactatcgactggtcccgtatcctggattccgtggaggataattacatcgtgttgaacaaagatgacaacgaggagtgtggagacatctgtccgggtaccgcgaagggcaagaccaactgccccgccaccgtcatcaacgggcagtttgtcgaacgatgttggactcatagtcactgccagaaagtttgcccgaccatctgtaagtcacacggctgcaccgccgaaggcctctgttgccacagcgagtgcctgggcaactgttctcagcccgacgaccccaccaagtgcgtggcctgccgcaacttctacctggacggcaggtgtgtggagacctgcccgcccccgtactaccacttccaggactggcgctgtgtgaacttcagcttctgccaggacctgcaccacaaatgcaagaactcgcggaggcagggctgccaccagtacgtcattcacaacaacaagtgcatccctgagtgtccctccgggtacacgatgaattccagcaacttgctgtgcaccccatgcctgggtccctgtcccaaggtgtgccacctcctagaaggcgagaagaccatcgactcggtgacgtctgcccaggagctccgaggatgcaccgtcatcaacgggagtctgatcatcaacattcgaggaggcaacaatctggcagctgagctagaagccaacctcggcctcattgaagaaatttcagggtatctaaaaatccgccgatcctacgctctggtgtcactttccttcttccggaagttacgtctgattcgaggagagaccttggaaattgggaactactccttctatgccttggacaaccagaacctaaggcagctctgggactggagcaaacacaacctcaccatcactcaggggaaactcttcttccactataaccccaaactctgcttgtcagaaatccacaagatggaagaagtttcaggaaccaaggggcgccaggagagaaacgacattgccctgaagaccaatggggaccaggcatcctgtgaaaatgagttacttaaattttcttacattcggacatcttttgacaagatcttgctgagatgggagccgtactggccccccgacttccgagacctcttggggttcatgctgttctacaaagaggccccttatcagaatgtgacggagttcgacgggcaggatgcatgtggttccaacagttggacggtggtagacattgacccacccctgaggtccaacgaccccaaatcacagaaccacccagggtggctgatgcggggtctcaagccctggacccagtatgccatctttgtgaagaccctggtcaccttttcggatgaacgccggacctatggggccaagagtgacatcatttatgtccagacagatgccaccaacccctctgtgcccctggatccaatctcagtgtctaactcatcatcccagattattctgaagtggaaaccaccctccgaccccaatggcaacatcacccactacctggttttctgggagaggcaggcggaagacagtgagctgttcgagctggattattgcctcaaagggctgaagctgccctcgaggacctggtctccaccattcgagtctgaagattctcagaagcacaaccagagtgagtatgaggattcggccggcgaatgctgctcctgtccaaagacagactctcagatcctgaaggagctggaggagtcctcgtttaggaagacgtttgaggattacctgcacaacgtggttttcgtccccaggccatctcggaaacgcaggtcccttggcgatgttgggaatgtgacggtggccgtgcccacggtggcagctttccccaacacttcctcgaccagcgtgcccacgagtccggaggagcacaggccttttgagaaggtggtgaacaaggagtcgctggtcatctccggcttgcgacacttcacgggctatcgcatcgagctgcaggcttgcaaccaggacacccctgaggaacggtgcagtgtggcagcctacgtcagtgcgaggaccatgcctgaagccaaggctgatgacattgttggccctgtgacgcatgaaatctttgagaacaacgtcgtccacttgatgtggcaggagccgaaggagcccaatggtctgatcgtgctgtatgaagtgagttatcggcgatatggtgatgaggagctgcatctctgcgtctcccgcaagcacttcgctctggaacggggctgcaggctgcgtgggctgtcaccggggaactacagcgtgcgaatccgggccacctcccttgcgggcaacggctcttggacggaacccacctatttctacgtgacagactatttagacgtcccgtcaaatattgcaaaaattatcatcggccccctcatctttgtctttctcttcagtgttgtgattggaagtatttatctattcctgagaaagaggcagccagatgggccgctgggaccgctttacgcttcttcaaaccctgagtatctcagtgccagtgatgtgtttccatgctctgtgtacgtgccggacgagtgggaggtgtctcgagagaagatcaccctccttcgagagctggggcagggctccttcggcatggtgtatgagggcaatgccagggacatcatcaagggtgaggcagagacccgcgtggcggtgaagacggtcaacgagtcagccagtctccgagagcggattgagttcctcaatgaggcctcggtcatgaagggcttcacctgccatcacgtggtgcgcctcctgggagtggtgtccaagggccagcccacgctggtggtgatggagctgatggctcacggagacctgaagagctacctccgttctctgcggccagaggctgagaataatcctggccgccctccccctacccttcaagagatgattcagatggcggcagagattgctgacgggatggcctacctgaacgccaagaagtttgtgcatcgggacctggcagcgagaaactgcatggtcgcccatgattttactgtcaaaattggagactttggaatgaccagagacatctatgaaacggattactaccggaaagggggcaagggtctgctccctgtacggtggatggcaccggagtccctgaaggatggggtcttcaccacttcttctgacatgtggtcctttggcgtggtcctttgggaaatcaccagcttggcagaacagccttaccaaggcctgtctaatgaacaggtgttgaaatttgtcatggatggagggtatctggatcaacccgacaactgtccagagagagtcactgacctcatgcgcatgtgctggcaattcaaccccaacatgaggccaaccttcctggagattgtcaacctgctcaaggacgacctgcaccccagctttccagaggtgtcgttcttccacagcgaggagaacaaggctcccgagagtgaggagctggagatggagtttgaggacatggagaatgtgcccctggaccgttcctcgcactgtcagagggaggaggcggggggccgggatggagggtcctcgctgggtttcaagcggagctacgaggaacacatcccttacacacacatgaacggaggcaagaaaaacgggcggattctgaccttgcctcggtccaatccttcctaacagtgcctaccgtggcgggggcgggcaggggttcccattttcgctttcctctggtttgaaagcctctggaaaactcaggattctcacgactctaccatgtccaatggagttcagagatcgttcctatacatttctgttcatcttaaggtggactcgtttggttaccaatttaactagtcctgcagaggatttaactgtgaacctggagggcaaggggtttccacagttgctgctcctttggggcaacgacggtttcaaaccaggattttgtgttttttcgttccccccacccgcccccagcagatggaaagaaagcacctgtttttacaaattctttttttttttttttttttttgctggtgtctgagcttcagtataaaagacaaaacttcctgtttgtggaacaaaagttcgaaagaaaaaacaaaacaaaaacacccagccctgttccaggagaatttcaagttttacaggttgagcttcaagatggtttttttggttttttttttttctctcatccaggctgaaggattttttttttctttacaaaatgagttcctcaaattgaccaatagctgctgctttcatattttggataagggtctgtggtcccggcgtgtgctcacgtgtgtatgcacgtgtgtgtgtccattagacacggctgacgtgtgtgcaaagtatccatgcggagttgatgctttgggaattggctcatgaaggttcttctcaagggtgcgagctcatccccctctctccttccttcttattgactgggagactgtgctctcgacagattcttcttgtgtcagaagtctagcctcaggtttctaccctcccttcacattggtggccaagggaggagcatttcatttggagtgattatgaatcttttcaagaccaaaccaagctaggacattaaaaaaaaaaaaaagaaaaagaaagaaaaaacaaaatggaaaaaggaaaaaaaaaaagaactgagatgacagagttttgagaatatatttgtaccatattta

SEQ ID NO: 1040 - protein, 1370 aa, Homo sapien [sequence omitted]

SEQ ID NO: 1041 - DNA, 2541 bp, Homo sapien
ctgcagggaggcaggtagaaaaggcttttgggttttcaggtggggggcagtctagcctgatcagaaaggaggaaaaggccagggcagatgtctgggtggagtgaagggaaaaagtgatcccagaagaaggattagcccctgaaagtccctgaagtaggagaagggtaaaggtgtggttggtgaaggaaagcaggttttcccagattagcaaccagtcagggggaggaaggtgagagtgggagagtcataagtaaattattctgaatgtgtgtagtttaatggaattgggaaaaagatgggggaaatggatggaaggtcttggactctgagacaaggggtctataatcagtccatttcattatttctagcttccaccttcaccaaggcagacaaggagggcccacctcagctcctctgctccccctccctttcccacctattcatgtgtgcaagagtgccctgtcccacagaacacggggaacaaccatctcaatgacaaggacagcaggtggcaaggctcaacaggactcagatgtccccccagggttaactcatgaaaccctccatgaagcctgctgctcacccctccctcaaggcaagccctgcacctgggtctgaggatgagggtggcagtgaaaattaggccagtgacatcattttcagccagctagtgccaaaaaatatcaggtggtgttcatcaaataagccgagccaaccggtgatgaggatggtagtgtgagtcatgtgtgacaggtgaggaatgaaaacagagtgcccgagagcttctatttccttgaggcagggctcattcatcttataaaagccagctggccattgccttcacaccaaacccaagggaccacacagcccattctgctccgtataccaggtaagtctctgattgcaacaaactggcaattctagtgtactttttcattattagaaattagctaaaggcaaatatgtgtaagcaggttaatccagggtttcaatgggagatagagaatagtggaatatctttattttaagttaaattacagtctggatttgaaaggaccttagagatggttagggctcccacctcagtagatagtcattgaactgggagtcctggagaagattgttcaaatgcccatgggaagttcatagcagaactagaactcaggccagagcactctcagtaacactgcaatttccccctgacaagatatttatagaaattttaatttattagatggatctctactgagcatttattccatttaaggcagtatgctaggcactttggacaaatcaatgccctaacgtacttacttaacaaacataaaacctagcaggaaggtaatacatatatataaataaatgaaatgcaaagtagatagtaattggcatgacggagatgggcagagaagggctgtgcacttttgggagacttgctcaaggagacctctagggtgtcaagtgatgtgagctatgatggaggggtatttggacaagcagagatgggaagaaaagcatttggaagggactgtgtaagcacagaccagaagcaaaaccatagaggcttagatgaatataaagccatcctataagtcacaggctttctacatggtactaggagaggaaagtggtctgatgccattttccaaaagacctaatatgcggacctcatgtccctcagaagccagctttagtagggcatttttccagaacagatataaggtgccttgggtaggaagggagccaagaagagaactccaataaaatggagcagaagaaattgccttttagctcctcctcttcaaagggcctgaaaattatccaagcttatttcatttttaaatgtaatgggggagctaagggagatgaaaggctttctcttctaaagggtcctgaaataaaatctgtttggcattgaatttgtatccatctttctttaattgaatcactgtgtcagctttctgtctctagaaaaaaacacatttgaagcatgaattctcagcagcagaagcagccttgcaccccaccccctcagcctcagcagcagcaggtgaaacaaccttgccagcctccaccccaggaaccatgcatccccaaaaccaaggagccctgccaacccaaggtgcctgagccctgccaccccaaagtgcctgagccctgccagcccaagattccagagccctgccagcccaaggtgcctgagccctgcccttcaacggtcactccagcaccagcccagcagaagaccaagcagaagtaatgtggtccacagccatgcccttgaggagctggccactggatactgaacaccctactccattctgcttatgaatcccatttgcctattgaccctgcagttagcatgctgtcaccctgaatcataatcgctcctttgcacctctaaaaagatgtcccttaccctcattctggaggctcctgagcctctgcgtaaggctgaacgtctcactgactgagctagtcttcttgttgctcgggtgcatttgaggatggatttggggaaggtcaagtgaccatccctag

SEQ ID NO: 1042 - protein, 89 aa, Homo sapien [sequence omitted]

SEQ ID NO: 1043 - DNA, 2853 bp, Homo sapien
gctctgctccaggcatctgccacaatgtgggtgcttacacctgctgcttttgctgggaagctcttgagtgtgttcaggcaacctctgagctctctgtggaggagcctggtcccgctgttctgctggctgagggcaaccttctggctgctagctaccaagaggagaaagcagcagctggtcctgagagggccagatgagaccaaagaggaggaagaggaccctcctctgcccaccaccccaaccagcgtcaactatcacttcactcgccagtgcaactacaaatgcggcttctgtttccacacagccaaaacatcctttgtgctgccccttgaggaagcaaagagaggattgcttttgcttaaggaagctggtatggagaagatcaacttttcaggtggagagccatttcttcaagaccggggagaatacctgggcaagttggtgaggttctgcaaagtagagttgcggctgcccagcgtgagcatcgtgagcaatggaagcctgatccgggagaggtggttccagaattatggtgagtatttggacattctcgctatctcctgtgacagctttgacgaggaagtcaatgtccttattggccgtggccaaggaaagaagaaccatgtggaaaaccttcaaaagctgaggaggtggtgtagggattatagagtcgctttcaagataaattctgtcattaatcgtttcaacgtggaagaggacatgacggaacagatcaaagcactaaaccctgtccgctggaaagtgttccagtgcctcttaattgagggtgagaattgtggagaagatgctctaagagaagcagaaagatttgttattggtgatgaagaatttgaaagattcttggagcgccacaaagaagtgtcctgcttggtgcctgaatctaaccagaagatgaaagactcctaccttattctggatgaatatatgcgctttctgaactgtagaaagggacggaaggacccttccaagtccatcctggatgttggtgtagaagaagctataaaattcagtggatttgatgaaaagatgtttctgaagcgaggaggaaaatacatatggagtaaggctgatctgaagctggattggtagagcggaaagtggaacgagacttcaacacaccagtgggaaaactcctagagtaactgccattgtctgcaatactatcccgttggtatttcccagtggctgaaaacctgattttctgctgcacgtggcatctgattacctgtggtcactgaacacacgaataacttggatagcaaatcctgagacaatggaaaaccattaactttacttcattggcttataaccttgttgttattgaaacagcacttctgtttttgagtttgttttagctaaaaagaaggaatacacacaggaataatgaccccaaaaatgcttagataaggcccctatacacaggacctgacatttagctcaatgatgcgtttgtaagaaataagctctagtgatatctgtgggggcaaaatttaatttggatttgattttttaaaacaatgtttactgcgatttctatatttccattttgaaactatttcttgttccaggtttgttcatttgacagagtcagtattttttgccaaatatccagataaccagttttcacatctgagacattacaaagtatctgcctcaattatttctgctggttataatgcttttttttttttgcctttatgccattgcagtcttgtactttttactgtgatgtacagaaatagtcaacagatgtttccaagaacatatgatatgataatcctaccaattttcaagaagtctctagaaagagataacacatggaaagacggcgtggtgcagcccagcccacggtgcctgttccatgaatgctggctacctatgtgtgtggtacctgttgtgtccctttctcttcaaagatccctgagcaaaacaaagatacgctttccatttgatgatggagttgacatggaggcagtgcttgcattgctttgttcgcctatcatctggccacatgaggctgtcaagcaaaagaataggagtgtagttgagtagctggttggccctacatttctgagaagtgacgttacactgggttggcataagatatcctaaaatcacgctggaaccttgggcaaggaagaatgtgagcaagagtagagagagtgcctggatttcatgtcagtgaagccatgtcaccatatcatatttttgaatgaactctgagtcagttgaaatagggtaccatctaggtcagtttaagaagagtcagctcagagaaagcaagcataagggaaaatgtcacgtaaactagatcagggaacaaaatcctctccttgtggaaatatcccatgcagtttgttgatacaacttagtatcttattgcctaaaaaaaaatttcttatcattgtttcaaaaaagcaaaatcatggaaaatttttgttgtccaggcaaataaaaggtcattttaatttaaaaaaaaaaaaaaaaaaaaaaaaaaaaaaaaggccaaggaaaaaaaatattcctacttaaattttaagtctataattcaatttaaatatgtgtgtgtctcatccaggataggataggttgtcttctattttccattttacctatttactttttttgtaagaaaagagaagaatgaattctaaagatgttccccatgggttttgattgtgtctaagctatgatgaccttcatataatcagcataaacataaaacaaattttttacttaacatgagtgcactttactaatcctcatggcacagtggctcacgcctgtaatcccagcacttggggaggacaatgtggggtggatcacgaggtc

SEQ ID NO: 1044 - protein, 361 aa, Homo sapien
MWVLTPAAFAGKLLSVFRQPLSSLWRSLVPLFCWLRATFWLLATKRRKQQLVLRGPDETKEEEEDPPLPTTPTSVNYHFTRQCNYKCGFCFHTAKTSFVLPLEEAKRGLLLLKEAGMEKINFSGGEPFLQDRGEYLGKLVRFCKVELRLPSVSIVSNGSLIRERWFQNYGEYLDILAISCDSFDEEVNVLIGRGQGKKNHVENLQKLRRWCRDYRVAFKINSVINRFNVEEDMTEQIKALNPVRWKVFQCLLIEGENCGEDALREAERFVIGDEEFERFLERHKEVSCLVPESNQKMKDSYLILDEYMRFLNCRKGRKDPSKSILDVGVEEAIKFSGFDEKMFLKRGGKYIWSKADLKLDW

SEQ ID NO: 1045 - DNA, 907 bp, Homo sapien
atttataaggagaatgaacgatttcaatataaatgtaacatgggttatgaatacagtgaaagaggagatgctgtatgcactgaatctggatggcgtccgttgccttcatgtgaagaaaaatcatgtgataatccttatattccaaatggtgactactcacctttaaggattaaacacagaactggagatgaaatcacgtaccagtgtagaaatggtttttatcctgcaacccggggaaatacagccaaatgcacaagtactggctggatacctgctccgagatgtaccttgaaaccttgtgattatccagacattaaacatggaggtctatatcatgagaatatgcgtagaccatactttccagtagctgtaggaaaatattactcctattactgtgatgaacattttgagactccgtcaggaagttactgggatcacattcattgcacacaagatggatggtcgccagcagtaccatgcctcagaaaatgttattttccttatttggaaaatggatataatcaaaattatggaagaaagtttgtacagggtaaatctatagacgttgcctgccatcctggctacgctcttccaaaagcgcagaccacagttacatgtatggagaatggctggtctcctactcccagatgcatccgtgtcagctttaccctctgaacttctgatcgaaggtcatccctctccagcttgagtggatcaaagatgacaagggccaatggaaccaagtttgagtcttgccaggtcaatacttgggtcctgagtatggtgactagtatctgttttgttatgtgtgtattattccagccagaatgggaaatgctaattcagctcctccaggcagcccaatggggctggtggctttgagattattaaactctttctctgctgc

SEQ ID NO: 1046 - DNA, 1315 bp, Homo sapien
agccctatttatctgattatttaagtaaaactttaataaaccatgacctacattttctatgcaattttaagatactcagagttaatattttaatattgaggttcttgatttttttaatgatcagctttcaaattatatttcagtatatactctgagtctacgtgtatgctacaaaaggtgaaatgaagttagcttatttttcagtgagtttaggctatattaagagttaggtaagttaggtaagggtgaaactgctttggggcccagactgcgctggaatgtactgtttaaattcaaaggtaattgatggccagtgttcagttgctctatttgtaacgtttgcatgttggtctggctgaagtatcaggaaaacacaaaattcatgaaaatagcaccttttataattttatacttttataaagcacttgttaaagaagtatagcaaatttctatgtattttaacatacaagtcgctgcattttaatgttcatttttggtatagctatggtaacttataatagtcatttttatattcataacttgttttctgaaagatatagtcattattaaaataaacattcatgtaaatggagtaaatcataggggaatcaatcgtaataaataccttataaattataaacttgtttagatactagatttctataaccataaattttatactgtaaagtctgtttaaaatagggtttaatgaagttattttaatttttagagactcccctctaaataatttactcctacattgtaaatacattgatgccaacaaaattccaactgctactaacaaaggtttggttggtgataagctaataacagctactttgtgtaggaggtaaatatgtgtactggagggggtaaaaatccatttaggttatggcaaagatgggaatcaaactgtaaaactcatagccccataaaattaatattctttgttaagtgccagagggtttaagagaacttcttgcttagagtttattgataataataatgcttcagaatatcccatttaaatgtacagtgtaaatatgtaaaatattttacttcccaggcaagtttgtggctgtattgccacttagtggctctttgtgactggcagttctgtatatctgaaacaaataagctgtaagcacttttgttaaaactttgtcaaataatccttttatgtacttgttctcagacctgttctctggttatgaaatgtgttaaagacaaggtgcaaatttaaaacaatgcctgtattgaaataaatgacttaaacagaaaaaaaaaaacctagtagtcggggggaaccactagt

SEQ ID NO: 1047 - protein, 50 aa, Homo sapien
PYLSDYLSKTLINHDLHFLCNFKILRVNILILRFLIFLMISFQIIFQYIL

SEQ ID NO: 1048 - DNA, 2117 bp, Homo sapien
gcgtgctggcccggggtggcaggagccgcagaggcttgggctgcagaaaaaggatcctgtttgctgtgtaatcctgagaatggactgcaagagaggaaaaactgggcgtctgcttgggaatctattgtggaaacccagggtgtttcccgaccagtccctgggcgccaactagagtatggactgaccaggtacctggatggagacctgagctggagaaggagatgcgcttgggaggaaattgcagaggccgtcaacatggaaaagcagccccagaacagcaggagaggcctcgccccccgagaggtgccgccagctgttgggctgctgctgatcatggccctgatgaatactctactctacctctgcctcgaccacttcttcatcgctcctcgacaatccactgtggaccccacacactgtccctatggtcacttcaggataggacagatgaaaaactgctcaccttggctgtcctgcgaggagctgagaacagaagtgagacagctgaagcgtgttggggaaggagctgtaaagagagtctttctgtctgagtggaaggagcacaaagttgcactctcacagctcaccagcctggagatgaaagatgatttcctccatggactgcagatgctgaaatctctccaaggcacacatgttgtcacgctgcttggctattgtgaggatgacaacactatgcttactgaatatcaccctctaggttccttgagtaacctggaagaaacactaaacctttcaaagtaccaaaatgtgaacacgtggcagcacaggctggagctggccatggactatgtcagcatcattaattacctgcaccacagccctgtgggcacacgggtcatgtgcgactccaacgacctgccgaagacactgtcccagtatctgctaacaagcaacttcagcattttggcaaatgacttggacgccttacccctggtgaaccacagctccgggatgctggtgaagtgcggccacagggagctgcatggggatttcgtggctccagagcaactgtggccctatggagaggacgtgcctttccacgatgatctcatgccctcatatgatgagaagattgacatttggaagatcccagacatctccagtttccttctggggcacattgaagggagtgatatggtccgattccatttgtttgatattcacaaagcatgcaagagccagactccctcagaaagacccactgcccaggacgttctggagacctaccagaaggtcttggatacacttagagatgccatgatgtctcaggcaagagagatgctgtgaaaaccagtccagccaatgaaggtgggattgaagggctgaatggaagttacagcattctactctgatggtggagttttttgcctgagtttcgtgttttattgttttttttatggcttagccatgtggttcgttgtccacatccacatgtacgtttgtatgtagtccacattggttgttagattttttttttttttctttgagatgcggtcttgctctgttgctgaggctggagtgcagtgatgtgatcttggctcactgcagcctctgcctcccaggttcaagcaattctcccacctcagcctccaaagtgctgggattacaggcgtgagccactgcgcccggccacattcagttcttatcaaagaaataacccagacttaatcttgaatgatacgattatgcccaatattaagtaaaaaatataagaaaaggttatcttaaatagatcttaggcaaaataccagctgatgaaggcatctgatgccttcatctgttcagtcatctccaaaaacagtaaaaataaccactttttgttgggcaatatgaaatttttaaaggagtagaataccaaatgatagaaacagactgcctgaattgagaattttgattttttaaagtgtgtttctttctaaattgctgttccttaatttgattaatttaattcatgtattatgattaaatctgaggcagatgagcttacaagtattgaaataattactaattaatcacaaatgtgaagttatgcatgatgtaaaaaatacaaacattctaattaaaggctttgcaacaccaaaaaaaaaaaaaaaaaa

SEQ ID NO: 1049 - protein, 350 aa, Homo sapien
MEKQPQNSRRGLAPREVPPAVGLLLIMALMNTLLYLCLDHFFIAPRQSTVDPTHCPYGHFRIGQMKNCSPWLSCEELRTEVRQLKRVGEGAVKRVFLSEWKEHKVALSQLTSLEMKDDFLHGLQMLKSLQGTHVVTLLGYCEDDNTMLTEYHPLGSLSNLEETLNLSKYQNVNTWQHRLELAMDYVSIINYLHHSPVGTRVMCDSNDLPKTLSQYLLTSNFSILANDLDALPLVNHSSGMLVKCGHRELHGDFVAPEQLWPYGEDVPFHDDLMPSYDEKIDIWKIPDISSFLLGHIEGSDMVRFHLFDIHKACKSQTPSERPTAQDVLETYQKVLDTLRDAMMSQAREML

SEQ ID NO: 1050 - DNA, 1060 bp, Homo sapien
cgcgggccgactggtgtttatccgtcactcgccgaggttccttgggtcatggtgccagcctgactgagaagaggacgctcccgggagacgaatgaggaaccacctcctcctactgttcaagtacaggggcctggtccgcaaagggaagaaaagcaaaagacgaaaatggctaaattcgtgatccgcccagccactgccgccgactgcagtgacatactgcggctgatcaaggagctggctaaatatgaatacatggaagaacaagtaatcttaactgaaaaagatctgctagaagatggttttggagagcaccccttttaccactgcctggttgcagaagtgccgaaagagcactggactccggaaggacacagcattgttggttttgccatgtactattttacctatgacccgtggattggcaagttattgtatcttgaggacttcttcgtgatgagtgattatagaggctttggcataggatcagaaattctgaagaatctaagccaggttgcaatgaggtgtcgctgcagcagcatgcacttcttggtagcagaatggaatgaaccatccatcaacttctataaaagaagaggtgcttctgatctgtccagtgaagagggttggagactgttcaagatcgacaaggagtacttgctaaaaatggcaacagaggagtgaggagtgctgctgtagatgacaacctccattctattttagaataaattcccaacttctcttgctttctatgctgtttgtagtgaaataatagaatgagcacccattccaaagctttattaccagtggcgttgttgcatgtttgaaatgaggtctgtttaaagtggcaatctcagatgcagtttggagagtcagatctttctccttgaatatctttcgataaacaacaaggtggtgtgatcttaatatatttgaaaaaaacttcattctcgtgagtcatttaaatgtgtacaatgtacacactggtacttagagtttctgtttgattcttttttaataaactactctttgatttaaaaaaaaaaaaaaaaaaaaaaaaaaa

SEQ ID NO: 1051 - protein, 171 aa, Homo sapien
MAKFVIRPATAADCSDILRLIKELAKYEYMEEQVILTEKDLLEDGFGEHPFYHCLVAEVPKEHWTPEGHSIVGFAMYYFTYDPWIGKLLYLEDFFVMSDYRGFGIGSEILKNLSQVAMRCRCSSMHFLVAEWNEPSINFYKRRGASDLSSEEGWRLFKIDKEYLLKMATEE

SEQ ID NO: 1052 - DNA, 3554 bp, Homo sapien
atatcttataaatgaagtctcctcattttcctgtggtcagaagagagggggcaagcagaaaagcagaggaacaaatttggaggctaaaataacattctacataaggaactatactacagtagaattaattgatagcagggattaagagatgtaaatgaatttgagatacatattctagaggtagaatgtgcaatactttttgtatgtccatatacagaaattggttgcattttccttaaataaaaagattttttaaaagttagtgagctgttatgttttcttccctctgacttcaattccttgattctttcaatttttttaatataaatttactgtctaaaagctggatcagcttatgctcctttgttgagagaagttggcatgctgtcaagtgggctgggcacactgagtttcagtttcctttctctgagtctttgaagcttcaaggctgctgaataatttccttctcccattttgtgcctgcctagctatccagacagagcagctaccctcagctctagctgatactacagacagtacaacagatcaagaagtatggcagtgacaactcgtttgacatggttgcacgaaaagatcctgcaaaatcattttggagggaagcggcttagccttctctataagggtagtgtccatggattccgtaatggagttttgcttgacagatgttgtaatcaagggcctactctaacagtgatttatagtgaagatcatattattggagcatatgcagaagagagttaccaggaaggaaagtatgcttccatcatcctttttgcacttcaagatactaaaatttcagaatggaaactaggactatgtacaccagaaacactgttttgttgtgatgttacaaaatataactccccaactaatttccagatagatggaagaaatagaaaagtgattatggacttaaagacaatggaaaatcttggacttgctcaaaattgtactatctctattcaggattatgaagtttttcgatgcgaagattcactggatgaaagaaagataaaaggggtcattgagctcaggaagagcttactgtctgccttgagaacttatgaaccatatggatccctggttcaacaaatacgaattctgctgctgggtccaattggagctgggaagtccagctttttcaactcagtgaggtctgttttccaagggcatgtaacgcatcaggctttggtgggcactaatacaactgggatatctgagaagtataggacatactctattagagacgggaaagatggcaaatacctgccgtttattctgtgtgactcactggggctgagtgagaaagaaggcggcctgtgcagggatgacatattctatatcttgaacggtaacattcgtgatagataccagtttaatcccatggaatcaatcaaattaaatcatcatgactacattgattccccatcgctgaaggacagaattcattgtgtggcatttgtatttgatgccagctctattcaatacttctcctctcagatgatagtaaagatcaaaagaattcgaagggagttggtaaacgctggtgtggtacatgtggctttgctcactcatgtggatagcatggatttgattacaaaaggtgaccttatagaaatagagagatgtgagcctgtgaggtccaaggtaatgaatgatgcccttcgtaaacacattttctgggctagaggaagtccaaagaaaacagagtaaacatctgccaacgtttattgacagtgctgagcagtgacagataaatatttcgaacctaggcagtttgattctagaggtaaaatagtctaaacaagaattaaacgttaaactggtctaataaaatctacttatccagagaatgttttttaaaagaaacaggaaatatatggactgtaggataggtgtcataaaaattttgtttctaaatcatttagaatccactgcatgtattccaaattacaattatcagtgacattagaacttgatatgtgaagttcttcaagagtactttgtgagaccagatctccatttttttccaatgggaaattattgcaagttcctacatcttgatattgctttcgtaatttatactaacataaaataatatttttcactgttttgcaatgtctttttaatttctgtattgcagctagaggaagtccaaagaaaacttggatttgctctttctgacatctcggtggttagcaattattcctctgagtgggagctggaccctgtaaaggatgttctaattctttctgctctgagacgaatgctatgggctgcagatgacttcttagaggatttgccttttgagcaaataggtagatgtgtttggtggtgtggaagcttggaagcggtcaggtagttggctactttctgcttggatctattaaatacctggcagctctctgtctttttgtgggttgttgccctgtgattagttctgctttttaacccactccctggatgcatttttccctccttgcatttccctcttttcctggagttcatactagagaatctgcactatgtttttccctttttgtcttgagatgaaagttttaaaataatccacctctgtcatttccactctctgaacatcccaagctgtatccctggcctcttttctcagactatgtttctttacttgggacctagaactggattggattggcattgctcctgatcagatgagacctttgattatttgccccttccttaggaccttacactcctgtctttctttgacttgcctttttgtttctttccttcatcttagtccctcttcatgcagtatggtcattgctaggtagaggtatgtccttttatgtaatggccaccgcatttagtattacataaactttcttttaacaatctgtgcatagtacatgctgctctgttccatttagagatttgacagaggtttcagtttagtatactcaaatcttattttagtgcttgggaaatcaattcagaatatcacatcctctccaattctctcttactcaaattgctgggaaactctcatgttactaactttgttgctctaactctgccatcttggtttccccatcccttctcttcctcatggtacgtgtgctcctaatattagcgttggttgagattttcagtggtccaatattcctcttccctctggttgcctttcctgagataatccactaagaatattttgtgtttcttttctcagggaatctaagggaggaaattatcaactgtgcacaaggaaaaaaatagatatgtgaaaggttcacgtaaatttcctcacatcacagaagattaaaattcagaaaggagaaaacacagaccaaagagaagtatctaagaccaaagggatgtgttttattaatgtctaggatgaagaaatgcatagaacattgtagtacttgtaaataactagaaataacatgatttagtcataattgtgaaaaataataataatttttcttggatttatgttctgtatctgtgaaaaaataaatttcttataaaactcggaagtatgtagtcgggtaccg

SEQ ID NO: 1053 - protein, 392 aa, Homo sapien
MAVTTRLTWLHEKILQNHFGGKRLSLLYKGSVHGFRNGVLLDRCCNQGPTLTVIYSEDHIIGAYAEESYQEGKYASIILFALQDTKISEWKLGLCTPETLFCCDVTKYNSPTNFQIDGRNRKVIMDLKTMENLGLAQNCTISIQDYEVFRCEDSLDERKIKGVIELRKSLLSALRTYEPYGSLVQQIRILLLGPIGAGKSSFFNSVRSVFQGHVTHQALVGTNTTGISEKYRTYSIRDGKDGKYLPFILCDSLGLSEKEGGLCRDDIFYILNGNIRDRYQFNPMESIKLNHHDYIDSPSLKDRIHCVAFVFDASSIQYFSSQMIVKIKRIRRELVNAGVVHVALLTHVDSMDLITKGDLIEIERCEPVRSKVMNDALRKHIFWARGSPKKTE

SEQ ID NO: 1054 - DNA, 7888 bp, Homo sapien
tccgggtatggatgtcaatcttttgtctacaatgtgaatacatttatccttcggggaccatcaagactttcaggaaaggccccgcctgtctctgcgcggccactttgctgggacaaaggtcaactgaagaagtgggcaggcccgaggcaggagagatgctgaggagtccatgtgcaggggagggaaagggagaggcagtcagggagaggaggaggaggtaccgccagaaggggatcctcccgctccgaaaaccagacaccgggtcttgccctgtggtccaggcaggagtgcagtggtgcaacctcagctcactgcagccttgacctccccgggctcaagcgatcctccggccacagcacttggctgttcagcggctggaggagcagggccccaggtcctccccaccctcacctgctgctcccaggtcgtggccgtcttgctcttccaggtccttctctagggatgcaatattcacattgctaagatgcaggtctaacgcagaacctgtcaacagagccccccatcatccacagcccacccagcgctgcagagctcaggaagcctagctgaggaggacgaccgtcccacctgggcttagagtgagaccaagggcagaaggcgtgggagttgctggggcagccagggaaggacacccccagcccgtcctcgcagccccccacaggcagtgggaggcttggctgttcctccggcaaaacgggcatgctcagtgggccgggccggcaggtttgcgtggccgctgagttgccggcgccggctgagccagcggacgccgcgttccttggcggccgccggttcccgggaagttacgtggcgaagccggcttccgaggagacgccgggaggccacgggtgctgctgacgggcgggcgaccgggcgaggccgacgtggccgggctgcgaaagctgcgggaggccgagtgggtgaccgcgctcggagggaggtgccggtcgggcgcgccccgtggagaagacccgggcggggcgggcgcttcccggacttttgtccgagttgaattccctccccctgggccgggcccttccgtccgcccccgcccgtgccccgctcgctctcgggagatgtttatttgggctgtggcgtgaggagcgggcgggccagcgccgcggagtttcgggtccgaggagcctcgcgcggcgctggagagagacaagatgtccgccagagctgcggccgccaagagcacagcaatggaggaaacagctatatgggaacaacatacagtgacgcttcacagggctcctggatttggatttggaattgcaatatctggtggacgagataatcctcattttcagagtggggaaacgtcaatagtgatttcagatgtgctgaaaggaggaccagctgaaggacagctacaggaaaatgaccgagttgcaatggttaacggagtttcaatggataatgttgaacatgcttttgctgttcagcaactaaggaaaagtgggaaaaatgcaaaaattacaattagaaggaagaagaaagttcaaataccagtaagtcgtcctgatcctgaaccagtatctgataatgaagaagatagttatgatgaggaaatacatgatccaagaagtggccggagtggtgtggttaacagaaggagtgagaagatttggccgagggatagaagtgcaagtagagagaggagcttgtccccgcggtcagacaggcggtcagtggcttccagccagcctgctaaacctactaaagtcacactggtgaaatcccggaaaaatgaagaatatggtcttcgattggcaagccatatatttgttaaggaaatttcacaagatagtttggcagcaagagatggcaatattcaagaaggtgatgttgtattgaagataaatggtactgtgacagaaaatatgtcattgacagatgcaaagacattgatagaaaggtctaaaggcaaattaaaaatggtagttcaaagagatgaacgggctacgctattgaatgtccctgatctttctgacagcatccactctgctaatgcctctgagagagacgacatttcagaaattcagtcactggcatcagatcattctggtcgatcacacgataggcctccccgccgcagccggtcacgatctcctgaccagcggtcagagccttctgatcattccaggcactcgccgcagcagccaagcaatggcagtctccggagtagagatgaagagagaatttctaaacctggggctgtctcaactcctgtaaagcatgctgatgatcacacacctaaaacagtggaagaagttacagttgaaagaaatgagaaacaaacaccttctcttccagaaccaaagcctgtgtatgcccaagttggcaaccagatgtggatttacctgtcagtccatctgatggtgtcctacctaattcaactcatgaagatgggatttcttcggcccagcatgaaattggtaaaattcagaaaaggagatagtgtgggtttgcggctggctggtggaaatgatgttggaatatttgtagctggcgttctagaagatagccctgcagccaaggaaggcttagaggaaggtgatcaaattctcagggtaaacaacgtagattttacaaatatcataagagaagaagccgtccttttcctgcttgacctccctaaaggagaagaagtgaccatattggctcagaagaagaaggatgtttatcgtcgcattgtagaatcagatgtaggagattctttctatattagaacccattttgaatatgaaaaggaatctccctatggacttagttttaacaaaggagaggtgttccgtgctgtggataccttgtacaatggaaaactgggctcttggcttgctattcgaattggtaaaaatcataaggaggtagaacgaggcatcatccctaataagaacagagctgagcagctagccagtgtacagtatacacttccaaaaacagcaggcggagaccgtgctgacttctggagattcagaggtcttcgcagctccaagagaaatcttcgaaaaagcagagaggatttgtccgctcagcctgttcaaacaaagtttccagcttatgaaagagtggttcttcgagaagctggatttctgaggcctgtaaccatttttggaccaatagctgatgttgccagagaaaagctggcaagagaagaaccagatatttatcaaattgcaaagagtgaaccacgagacgctggaactgaccaacgtagctctggctatattcgcctgcatacaataaagcaaatcatagatcaagacaaacatgctttattagatgtaacaccaaatgcagttgatcgtcttaactatgcccagtggtatccaattgttgtatttcttaaccctgattctaagcaaggagtaaaaacaatgagaatgaggttatgtccagaatctcggaaaagtgccaggaagttatacgagcgatctcataaacttgctaaaaataatcaccatctttttacaactacaattaacttaaattcaatgaatgatggttggtatggtgcgctgaaagaagcagttcaacaacagcaaaaccagctggtatgggtttccgagggaaaggcggatggtgctacaagtgatgaccttgatttgcatgatgatcgtctgtcctacctgtcagctccaggtagtgaatactcaatgtatagcacggacagtagacacacttctgactatgaagacacagacacagaaggcggggcctacactgatcaagaactagatgaaactcttaatgatgaggttgggactccaccggagtctgccattacacggtcctctgagcctgtaagagaggactcctctggaatgcatcatgaaaaccaaacatatcctccttactcaccacaagcgcagccacaaccaattcatagaatagactcccctggatttaagccagcctctcaacagaaagcagaagcttcatctccagtcccttacctttcgcctgaaacaaacccagcatcatcaacctctgctgttaatcataatgtaaatttaactaatgtcagactggaggagcccaccccagctccttccacctcttactcaccacaagctgattctttaagaacaccaagtactgaggcagctcacataatgctaagagatcaagaaccatcattgtcgtcgcatgtagatccaacaaaggtgtatagaaaggatccatatcccgaggaaatgatgaggcagaaccatgttttgaaacagccagccgttagtcacccagggcacaggccagacaaagagcctaatctgacctatgaaccccaactcccatacgtagagaaacaagccagcagagacctcgagcagcccacatacagatacgagtcctcaagctatacggaccagttttctcgaaactatgaacatcgtctgcgatacgaagatcgcgtccccatgtatgaagaacagtggtcatattatgatgacaaacagccctacccatctcggccaccttttgataatcagcactctcaagaccttgactccagacagcatcccgaagagtcctcagaacgagggtactttccacgttttgaagagccagcccctctgtcttacgacagcagaccacgttacgaacaggcacctagagcatccgccctgcggcacgaagagcagccagctcctgggtatgacacacatggtagactcagaccggaagcccagccccacccttcagcagggcccaagcctgcagagtccaagcagtattttgagcaatattcacgcagttacgagcaagtaccaccccaaggatttacctctagagcaggtcattttgagcctctccatggtgctgcagctgtccctccgctgataccttcatctcagcataagccagaagctctgccttcaaacaccaaaccactgcctccacccccaactcaaaccgaagaagaggaagatccagcaatgaagccacagtctgtactcaccagagttaagatgtttgaaaacaaaagatctgcatccttagagaccaagaaggatgtaaatgacactggcagttttaagcctccagaagtagcatctaaaccttcaggtgctcccatcattggtcccaaacccacttctcagaatcaattcagtgaacatgacaaaactctgtacaggatcccagaacctcaaaaacctcaactgaagccacctgaagatattgttcggtccaatcattatgaccctgaagaagatgaagaatattatcgaaaacagctgtcatactttgaccgaagaagttttgagaataagcctcctgcacacattgctgccagccatctctccgagcctgcaaagccagctcattctcagaatcaatcaaatttttctagttattcttcaaagggaaagcctcctgaagctgatggtgtggatagatcatttggcgagaaacgctatgaacccatccaggccactccccctcctcctccattgccctcgcagtatgcccagccatctcagcctgtcaccagcgcgtctctccacatacattctaagggagcacatggtgaaggtaattcagtgtcattggattttcagaattccttagtgtccaaaccagacccacctccatctcagaataagccagcaactttcagaccaccaaaccgagaagatactgctcaggcagctttctatccccagaaaagttttccagataaagccccagttaatggaactgaacagactcagaaaacagtcactccagcatacaatcgattcacaccaaaaccatatacaagttctgcccgaccatttgaacgcaagtttgaaagtcctaaattcaatcacaatcttctgccaagtgaaactgcacataaacctgacttgtcttcaaaaactcccacttctccaaaaactcttgtgaaatcgcacagtttggcacagcctcctgagtttgacagtggagttgaaactttctctatccatgcagagaagcctaaatatcaaataaataatatcagcacagtgcctaaagctattcctgtgagtccttcagctgtggaagaggatgaagatgaagatggtcatactgtggtggccacagcccgaggcatatttaacagcaatgggggcgtgctgagttccatagaaactggtgttagtataattatccctcaaggagccattcccgaaggagttgagcaggaaatctatttcaaggtctgccgggacaacagcatccttccacctttagataaagagaaaggtgaaacactgctgagtcctttggtgatgtgtggtccccatggcctcaagttcctgaagcctgtggagctgcgcttaccacactgtgatcctaaaacctggcaaaacaagtgtcttcccggagatccaaattatctcgttggagcaaactgtgtttctgtccttattgaccacttttaactcttgaaatataggaacttaaataatgtgaaactggattaaacttaatctaaatggaaccactctatcaagtattataccttttttagagttgatactacagtttgttagtatgaggcatttgtttgaactgataaagatgagtgagcatgcccctgaaccatggtcggaaaacatgctacacactgcatgtttgtgattgacgggactgttggtattggctagaggttcaaagatattttgctttgtgatttttgtaatttttttatcgtcactgcttaacttcacatattgatttccgttaaaataccagccagtaaatgggggtgcatttgaggtctgttctttccaaagtacactgtttcaaactttactatggccctggcctagcatacgtacacattttattttattatgcatgaagtaatatgcacacattttttaaatgcacctggaatatataaccagtgttgtggatttaacagaaatgtacagcaaggagatttacaactgggggagggtgaagtgaagacaatgacttactgtacatgaaaacacatttttcttagggaaggatacaaaagcatgtgagactggttccatggcctcttcagatctctaacttcaccatattaccacagacatactaaccagcagaaatgccttaccctcatgttcttaattcttagctcattctccttgtgttactaagtttttatggcttttgtgcattatctagatactgtatcatgacaaagactgagtacgttgtgcatttggtggtttcagaaatgtgttatcacccagaagaaaatagtggtgtgatttggggatatttttttcttttcttttcttttcttttttttttttttttgacaaggggcagtggtggttttctgttctttctggctatgcatttgaaaattttgatgttttaaggatgcttgtacataatgcgtgcataccacttttgttcttggtttgtaaattaacttttataaactttaccttttttatacataaacaagaccacgtttctaaaggctacctttgtattctctcctgtacctcttgagccttgaactttgacctctgcagcaataaagcagcgtttctatgacacatgcaaggtcattttttttaagaaaaaggatgcacagagttgttacatttttaagtgctgcatttaaaagatacagttactcagaattctctagtttgattaaattcttgcaaagtatccctactgtaatttgtgatacaatgctgtgccctaaagtgtatttttttactaatagacaatttattatgacacatcagcacgatttctgtttaaataatacaccactacattctgttaatcattaggtgtgactgaatttcttttgccgttattaaaaatctcaaatttctaaatctccaaaataaaactttttaaaataaaaaaaaat

SEQ ID NO: 1055 - protein, 1736 aa, Homo sapien [sequence omitted]

SEQ ID NO: 1056 - DNA, 512 bp, Homo sapien
gccctttctgcctctgcggggctctggtcgccggccaaggaaaaacgaggctggaccctgaacagcgcgggctacctgctgggcccacatgccgttggcaaccacaggtcattcagcgacaagaatggcctcaccagcaagcgggagctgcggcccgaagatgacatgaaaccaggaagctttgacaggtccatacctgaaaacaatatcatgcgcacaatcattgagtttctgtctttcttgcatctcaaagaggccggtgccctcgaccgcctcctggatctccccgccgcagcctcctcagaagacatcgagcggtcctgagagcctcctgggcacgtttgtctgtgtgctgtaacctgaagtcaaaccttaagataatggataatcttcggccaatttatgcggagtcagccattcctgttctctttgccttgatgttgtgttgttatcatttaagattttttttttttggtaattattttgagtggcaaaataaagaatagcaatta

SEQ ID NO: 1057 - protein, 107 aa, Homo sapien
ALSASAGLWSPAKEKRGWTLNSAGYLLGPHAVGNHRSFSDKNGLTSKRELRPEDDMKPGSFDRSIPENNIMRTIIEFLSFLHLKEAGALDRLLDLPAAASSEDIERS

SEQ ID NO: 1058 - DNA, 6565 bp, Homo sapien
  Unsure 3839: Unknown base
tattttgacatgcaagaggagcaggcattccaggtatttgaatactgagagattcaaattatcagcaaggttctttccagttccacgtttgttgtgttatcagtgtaaaattatttgaatagctttccactgatgagttattagctgataagtgtttattgtcatggttgaaagaaaataataatgaaagaagaaacgattacctttagtgataaagttggggccggatgggacgaagcagtgcaatttttttctttataattattcccctatttgaaaaatcaacttgtatatgaggcagcaaacaccttgcagagcagcattcccttttagtttcaggacgtggtggtggatggaaccactgtaacctggcctccctccatgagaggagggaatccaggtggccatgttgaaatgtgcctgtgtgcagcaaggcttctgaaatgacaagagagcccagcagcttccaaagcagctgtgactctggatctcacccatcatctctgcttctcactgttagaggagtgaatctgtgctgccttaggaggcatggaacctgggacttttcttccttgtttaatgtttaattttattaaaataatttgtaagtgatagatgttgatctcgtgacaaaagagagattccctctttataaaactattctaactaaagatcttttgtaagcccatgtgttagaaataaaacttgaatatccccttttttgttgttgtttatgaatggccaataatttattcacatgtgacatttgagctggcattttttcctcctgagatgacagtagcgtccgctgtgttgtattctaaagcaaagtcagaatagccctttgcttttgtcccgattagtagttctgttttgccttcttgccttttccatttagaccttatggtatttcctaaaccttagactgttttgaaaggctttgattaaaatatgctgataaaagaattcgataaccaagttaggaacgacaaggctatctggagaagaccaaatgacttggcagcctaacaaattctattcagagcacacaaagagatcctggaacgttttatagggactcgtgtgtggggaatggtatgaactcaggttacctgcaaaatatggtgtcatatggaaacatttaagagcttatggaaaattctttgaaataaagtggaatgagctagcaagcatattatacctaagaagaaaaacaagagcattcattctggttttttaaggtagctgctcaaggaagggagatagatgaaagtaaattgttttctactttgtacacataatatagaagagatcacctaagcctagttttgctaaccagaccctagacttaaaattagaggtcatgatgtctagccaccttcctctgtaggaacctctcgtgataccctgaaagcctctgcttaaatacttccagagaaaagtgaggaaggtaggggtggggatgaaggtttgcaggaactcatgttgagtacctagtatctgcaagatactagagtaggtactttatcgccatctcatctgacttatgtatgagtgcaggttttataaccctcaagtttacaagtgaggaaactaagtttatataagtgtcacgaaacttgcttcagttcagatgtctagcttgaggcaaatctgaaattagaacctaggtccatcttcttgcattacactaaactgcctctcaggatgagggagagctcccttcatggctaaggcaacctcttctgtctaataatgcagattctttaaaaattctttcttttatttaactgaaatctgcctcccattaacatctctcattggtcctgattcggcctcaggaggatcacagagctgatgcaattctctttccttatgcaggtatgtttgcaaccactgctgccaaaatggcctctgccatcttttacctagttggttttttttgaaaatgaacacacacacacacacacacacacacacacacacacacactctcacacacacacactcacagaaatatcctcttattgactgcaatccatctttcaacatatggagttctttttgaatactagaggtatagccttaaagaatatgagtatcagaagatactttagtttcatctttccctgcctgattcatcagccaattgttagtatgccatcagtcaagccattaataaaaataatgaacaaggtgaacaggataggttaacttgtagtctatgtataagtttccgaggttgcatgcagaatttagcctatatgtgaatttttctggaaaaatggtcagtaactattgtcagattcctttttttttttttttttttttttgaagacaaagtcttgctctccagcctgggtgacagggcaagattccatattaaaaaaaaaaaaagtattgagaagtactcagagtagagaacttactcccgaatgaatatactaacctctttgaggagagctccccaaatgaccataaattcatatagctcagccatcactagaccgtgtatttcagccagaagatatggtgaatggtcttgtaagatgcctgactaaattaaagtattaaagtatttcttgaattctcttgatattcctggactttgagaaagaataattatgcccttaaaaatggaaaaagagactgcaatattgttatacaggccttttaaaaaaaaagtatccttaaatttttagttacagagttcacttttttcccctacttttctttgttttagattataagcccaggattgttcaccagaaggttaccctttagtctgcaggaacctttgaaaacagatgtggtattgaagaatatctctgtaagcccagaacttatccattgtataaagaattttattttccccagtagaccgggagctcctcaagggcagggacctttgcaagtctttgactccctagcactgaacccagcatctggcaaatcttatttcatgtgactttattttggctgaatggcctaaaaatgcgcttgtactgagcacctaatacatttaatttaatttttaaatttttattcaataatatagacatggagtccccctatgttgcccacgctggctcaaactcctggcctcaaggatgttcctgcctcggtctcccaaagtgctgggattacaggcatgagccactgcaccaagccctaacacatttaataaattgtaaggaggaagaacagtggaccgcagtgagatatggtctacagggaaaatgaagaacctcttcaaaaatgatgatcttcaggcctgtaatcccagaactttgggagccgaggcgggtggatcacttgagcccaggagttcaagaccagcctaggaaacatagcgaaaccacatctctaccgaaaaatacaaaaattagccatgcttgtagtcctagctattaatacgtgggaggctgaggtgggaagatggtttgagtccgggaggtggaggttacagtgagccactgtaccccaacctgggtgacagagtgagaccccatctcaaaaccaaaaaagatgacctttattatgtttgacttttaaaaaaatgtagccaaagtaaaagtgttgattagcataaccccgatcacatgttgttgttgaaaatgagcactggcttgcataaaatggacattcatggacatgaaatggacattaatgattttacatatgttaagaagagaattttagacttgagaccttagggagatctgttgatagaattccctatgctctacagataaggatacttagtgaagggactttcctaagctcacagacccagaagagtagtactctttccagccaatggtgatgcttacttatgnttttttttttttttttttttttttgagacggggtcttgctctgtcgcccaggctggagtgcagtgacacgatctcggctcactgcaggctccgcctcccgggttcacgccgttctcctgcctcagcctcctgagtagctgggactgcggacgcccaccaccacgcccggctgattttttgtgtttttggtagagacggggtttcgccgtgttagccaggatggtcttgatctcctgacctcgtgatccgttcgcctcggcctcccagagtgctgggattacaggtgtgagccaccgcgcccggcctacttatgtgttttagaaaaatctttaaaatgttaaaagatgacaggtaatttctagaccatatgaagtagcccagttgtcccaggattagtttattatgtgtatatcagccattattttacagagtcatctcacataaatccacacaaccttaaaggattaaaggatggtttctgtgcaactgaaacatatgcacagaatgacaatagtcgtgatactttctttattcttttttttttttttttgagatggagtctcactctgtcgccctggctggagtgcagtggtgtgatctcggctcactgcagcctccatctcccagattcaggcgattctcatgcctcagcctcccgagtagctgggattataggtgcacgccacccgcctgggtaatttttgtatttttagtagagatggggtttcagcatgttggccaggctgatcttggaactcctgacctcaagtgatccgcccacctcagcctcccaaagtgctgagattacaggtgtgagccaccacgcctggccagtcatgctactttataatctgaagttaccagttctttgcagtgtttcacattaggggcattctccaaagggaactttagagataacaaatatgttaaaaatatcgaataaagttagagatgtggggagacattcctactcctacagagagcaaccataccttcctatagactgtgcactgaagaaagggcggaggggatgcgcctgttagagttagaatcttggcttgataggcaaggaaattgacccggtgtggtggttcttatattggtaagaagacccttctttggtttctttttttccagatagctaaagtcaatgtcagtgattgcttcaagcatgatagtcttaccagcctacactctaagcttttcttatgcttccagaatgacttactcagcaatcacttctactttgtattaaaacagttttggttattcaggtaggaagaagagaaaaaaaccaggctgtttccagttgtctggggtttacattatgttacctctcagactgttagtgaaatcagggagactagtggtttttacggcatcagagataccaaatgtataacagacagatgtcatcttactctttttaagtcatggacaaaaagacagacacattgccctgtaactttcagatcttctgtaacctttttaaacaacataggagagaagttggtacttgtacccaagggaagagaaagttaatgagtagaaaagacagaatttatttaggaaaacgatggaattaagctctggacaaaacatgcatcagtgatgcataacatttttgttaattgggtcttaacaggtttctgactcatatggtaatcattgtagaagtgggtcttactagaccacgccagtggcaaatcgcgaagctgtaagaactcttacctccctgtgtgtgtgcacctgagtgtgtgggggggcgtacgtttctgtagcttaatttaggttccacatacacttcagtggttaaacctgagctagactcaaatagtttgtttccattaagaaaatgaatcttttatgtggaccaaggtcaggttagttaatttgtttgcttttattggaataacttttcccattccaattcatcacttaattttaagtggttctactaaaatacccattaaagtcctttacatttctcacagactagggctatgacagattcataagacgtttcttttttcctcaaggcacaaaaggtagcttttctggtcatcaacctagtcttccttgttcctaatttcacaacagtggggcaacattttatataataccaatatgaactctaattgcaaagagactaaatgaaatcttcacacgaagcaagattaattaaaatataaaatgtgcttgactgtggtaaaacatttcttttaaaaaaaatagtatgacttttttttttttttttgctaaatctttcttttttgtacacctcaccctcttcttcactgatgcattttccagcaactggaagttcactctggctaggaaagtaactaaatgtgatgttatcattctaattagtgattacaaaagatcaattaatgttataattaaaaacagtgtctagatctgttgtttgtagtgaataaatgtgacaattactttgttcattgacatagatgtgttgaatttcctccctagattttaaggggatgcattttagtgctgatgtgtgcatttaactgtggacagtaggaacaaggcaagcatattaggggaagagtagggcccctaatgtctaagctacagacatattttagcatgcttgacacctttccttggtatatgatgctatatcagcaacttgtactcattggatctggagcctctagcttttaatattttatcactaaatgcttaagtgtttatgttgc

SEQ ID NO: 1059 - DNA, 3571 bp, Homo sapien
ggcacgaggttccgagttgcgatgctgtacttctctttgttttgggcggctcggcctctgcagagatgtgggcagctggtcaggatggccattcgggctcagcacagcaacgcagcccagactcagactggggaagcaaacaggggctggacaggccaggagagcctgtcggacagtgatcctgagatgtgggagttgctgcagagggagaaggacaggcagtgtcgtggcctggagctcattgcctcagagaacttctgcagccgagctgcgctggaggccctggggtcctgtctgaacaacaagtactcggagggttatcctggcaagagatactatgggggagcagaggtggtggatgaaattgagctgctgtgccagcgccgggccttggaagcctttgacctggatcctgcacagtggggagtcaatgtccagccctactccgggtccccagccaacctggccgtctacacagcccttctgcaacctcacgaccggatcatggggctggacctgcccgatgggggccatctcacccacggctacatgtctgacgtcaagcggatatcagccacgtccatcttcttcgagtctatgccctataagctcaaccccaaaactggcctcattgactacaaccagctggcactgactgctcgacttttccggccacggctcatcatagctggcaccagcgcctatgctcgcctcattgactacgcccgcatgagagaggtgtgtgatgaagtcaaagcacacctgctggcagacatggcccacatcagtggcctggtggctgccaaggtgattccctcgcctttcaagcacgcggacatcgtcaccaccactactcacaagactcttcgaggggccaggtcagggctcatcttctaccggaaaggggtgaaggctgtggaccccaagactggccgggagatcccttacacatttgaggaccgaatcaactttgccgtgttcccatccctgcaggggggcccccacaatcatgccattgctgcagtagctgtggccctaaagcaggcctgcacccccatgttccgggagtactccctgcaggttctgaagaatgctcgggccatggcagatgccctgctagagcgaggctactcactggtatcaggtggtactgacaaccacctggtgctggtggacctgcggcccaagggcctggatggagctcgggctgagcgggtgctagagcttgtatccatcactgccaacaagaacacctgtcctggagaccgaagtgccatcacaccgggcggcctgcggcttggggccccagccttaacttctcgacagttccgtgaggatgacttccggagagttgtggactttatagatgaaggggtcaacattggcttagaggtgaagagcaagactgccaagctccaggatttcaaatccttcctgcttaaggactcagaaacaagtcagcgtctggccaacctcaggcaacgggtggagcagtttgccagggccttccccatgcctggttttgatgagcattgaaggcacctgggaaatgaggcccacagactcaaagttactctccttccccctacctgggccagtgaaatagaaagcctttctattttttggtgcgggagggaagacctctcacttagggcaagagccaggtatagtctcccttcccagaatttgtaactgagaagatcttttctttttcctttttttggtaacaagacttagaaggagggcccaggcactttctgtttgaacccctgtcatgatcacagtgtcagagacgcgtcctctttcttggggaagttgaggagtgcccttcagagccagtagcaggcaggggtgggtaggcaccctccttcctgtttttatctaataaaatgctaacctgcaaaaaaaaaaaaaaaaaaaaaaaaaatcagactaggtggactctgcctgcctacctggtctgggaagatgttctaccatatctccctagagcacgaaatcctgctgcacccgcgctacttcggccccaacttgctcaacacggtgaagcagaagctcttcaccgaggtggaggggacctgcacagggaagtgagtgtcgagctcaccgcaccgccagatcgttcgatgcgcacacggggcgctatacctgcaacccctccccaactcctactcgtcctgccacccactctggggacccctctcctctctcaggcagccagttgcttcctgctttgggttcccagggcgccctctgcaatgctggacaataagacttccttctctcagctgagatgggtcattcattgactcctcaaacattttaaaaacccttggtgtgtgccaggacccgtgttgggctcagaacaaggtagaatgggaacaagatagaatgaggacagcccctgtggagctcacagtgtaatcattgttcctgtgtctgctctccctctgtcattctgctggttttctcttatcccctgtgcccagggaccacacaccatgggcctctatatatcttctgaatgaatgaccagaaaaagcagatcgagagtttgggggaggaaggaagtagcctgggatttgaccatctctgggctttgcacagaggggcctctctgatattaatgagctgggacccagctcagggcagtggagtacttgggcctccagcatcagaaaaacctgcaggaacatgcagattcctgagcctccttattccctacagaatcaagactgtctggggcagacctgagaatctgcattttaagaagatgattctcaggcatcccgaagattgagatctgttgcctcaaggactccagccttcttggacatttattgtgaaattaccagaacagcatttggtcttacacatactgatctctgttctgtcttcttttggtcattaagctctctgggagcagaggtgctatctacttgtccttttgctctccccgaccctacccccaagagctcagcgacttttattgcagatgtctttagaggctcttggacacacagtgtcttcctgtttctcatcctccttgcaggttggactcttcacagaaattgggcccatgtcttgcttcatctctcgacattccatcccttcagagatggagtttgatcctaactccaacccaccatgttacaagacaatggatgaggatattgtgattcagcaggacgatgagatccgcttaaagattgtggggacccgtgtggacaagaatgacatttttgctattggctccctgatggacgattacttggggcttgtaagctgagcctggtggcctcctacccttggtcctactctaggaagtgtgattgtcacacttatcatgttgtccagaggtccagtctggctgctgttgtggaggcaaggaaggcaactcatcccagaaggcatctggtgcttcttgtagcttaactactgcctcctcatttttcagtatgtgttctaagtataaaaagtccttggttctcaaaaaaaaaaaaaaaaaaaaaaaaaaaaaaaaaaaaaaaaaaaaaaaaaaaaaaaaaaaaaaaaaaaaaaaaaaaaaaaa

SEQ ID NO: 1060 - protein, 504 aa, Homo sapien
MLYFSLFWAARPLQRCGQLVRMAIRAQHSNAAQTQTGEANRGWTGQESLSDSDPEMWELLQREKDRQCRGLELIASENFCSRAALEALGSCLNNKYSEGYPGKRYYGGAEVVDEIELLCQRRALEAFDLDPAQWGVNVQPYSGSPANLAVYTALLQPHDRIMGLDLPDGGHLTHGYMSDVKRISATSIFFESMPYKLNPKTGLIDYNQLALTARLFRPRLIIAGTSAYARLIDYARMREVCDEVKAHLLADMAHISGLVAAKVIPSPFKHADIVTTTTHKTLRGARSGLIFYRKGVKAVDPKTGREIPYTFEDRINFAVFPSLQGGPHNHAIAAVAVALKQACTPMFREYSLQVLKNARAMADALLERGYSLVSGGTDNHLVLVDLRPKGLDGARAERVLELVSITANKNTCPGDRSAITPGGLRLGAPALTSRQFREDDFRRVVDFIDEGVNIGLEVKSKTAKLQDFKSFLLKDSETSQRLANLRQRVEQFARAFPMPGFDEH

SEQ ID NO: 1061 - DNA, 1391 bp, Homo sapien
tgcactcacctcctagagaccaggctgccatcatgctctggaagcttgtggagaatgtcaagtacgaagatatctatgaggaccggcacgatggtgtcccgagccacagctcgcggctctcccagctgggctcggtgtcccaaggaccctactcgagcgccccgccgctgtcccacaccccgtcgtcggacttccagccgccctacttcccacccccctaccagccgctcccctaccaccagagccaggacccctactcccacgtcaacgacccctactccctgaacccactgcaccagccccagcaacatccctgggggcaacggcagcggcaagaagtgggttcggaagccggctctctcctgccccagcctcgggccgccttgccccagctctcgggccttgacccccggagggactaccactcggtccgccggccggacgtgctgctgcattcggcgcaccacggcctggacgcgggcatgggtgacagcctctcgctgcacggcctcggccatcccggaatggaagacgtccagtcagttgaagatgccaataacagcggcatgaatctattggaccagtctgtcattaaaaaagttccagttcctcccaaatcggtgacttctctaatgatgaataaagacggcttcctgggaggcatgtctgtcaacaccggcgaggtgttttgctccgtcccaggccgtttgtctctgctcagttcaacttcgaagtacaaagtaactgtgggagaagttcagagacggctgtcgccccctgaatgcctcaatgcatctctcctcggcggagtcctcagaagagccaaatcgaaaaatggggggagatctttgcgagaaaggctagaaaaaatcggtttgaatttacccgcgggcaggcgcaaagcagcaaatgtcacgttactcacctccctggtggaaggagaagctgttcacttagctagggattttgggtacatttgcgaaacggagtttcccgccaaagccgtctctgagtatttgaaccggcagcacacagacccgagtgacctgcactcccgaaagaatatgctgttggccaccaagcaactttgtaaagaatttacggatctactggcgcaggaccggacaccgatagggaacagccgacccagccccatcctggagccggggatccagagctgcctcacgcacttcagcctcatcacgcacggcttcggcgccccggccatttgcgccgcgctcacggccctgcagaactatctcaccgaggcgctcaaaggcatggacaagatgttcttgaacaacaccaccactaacaggcacacgtctggggaaggcccaggtagtaaaactggcgacaaggaggagaaacacaggaaatgaaaaattttt

SEQ ID NO: 1062 - protein, 449 aa, Homo sapien
MLWKLVENVKYEDIYEDRHDGVPSHSSRLSQLGSVSQGPYSSAPPLSHTPSSDFQPPYFPPPYQPLPYHQSQDPYSHVNDPYSLNPLHQPQQHPWGQRQRQEVGSEAGSLLPQPRAALPQLSGLDPRRDYHSVRRPDVLLHSAHHGLDAGMGDSLSLHGLGHPGMEDVQSVEDANNSGMNLLDQSVIKKVPVPPKSVTSLMMNKDGFLGGMSVNTGEVFCSVPGRLSLLSSTSKYKVTVGEVQRRLSPPECLNASLLGGVLRRAKSKNGGRSLRERLEKIGLNLPAGRRKAANVTLLTSLVEGEAVHLARDFGYICETEFPAKAVSEYLNRQHTDPSDLHSRKNMLLATKQLCKEFTDLLAQDRTPIGNSRPSPILEPGIQSCLTHFSLITHGFGAPAICAALTALQNYLTEALKGMDKMFLNNTTTNRHTSGEGPGSKTGDKEEKHRK

SEQ ID NO: 1063 - DNA, 1714 bp, Homo sapien
ggggcattttgtgcctgcctagctatccagacagagcagctaccctcagctctagctgatactacagacagtacaacagatcaagaagtatggcagtgacaactcgtttgacacggttgcacgaaaagatcctgcaaaatcattttggagggaagcggcttagccttctctataagggtagtgtccatggattccgtaatggagttttgcttgacagatgttgtaatcaagggcctactctaacagtgatttatagtgaagatcatattattggagcatatgcggaagagagttaccaggaaggaaagtatgcttccatcatcctttttgcacttcaagatactaaaatttcagaatggaaactaggactatgtacaccagaaacactgttttgttgtgatgttacaaaatataactccccaactaatttccagatagatggaagaaatagaaaagtgattatggacttaaagacaatggaaaatcttggacttgctcaaaattgtactatctctattcaggattatgaagtttttcgatgcgaagattcactggatgaaagaaagataaaaggggtcattgagctcaggaagagcttactgtctgccttgagaacttatgaaccatatggatccctggttcaacaaatacgaattctgctgctgggtccaattggagctgggaagtccagctttttcaactcagtgaggtctgttttccaagggcatgtaacgcatcaggctttggtgggcactaatacaactgggatatctgagaagtataggacatactctattagagacgggaaagatggcaaatacctgccgtttattctgtgtgactcactggggctgagtgagaaagaaggcggcctgtgcagggatgacatattctatatcttgaacggtaacattcgtgatagataccagtttaatcccatggaatcaatcaaattaaatcatcatgactacattgattccccatcgctgaaggacagaattcattgtgtggcatttgtatttgatgccagctctattcaatacttctcctctcagatgatagtaaagatcaaaagaattcgaagggagttggtaaacgctggtgtggtacatgtggctttgctcactcatgtggatagcatggatttgattacaaaaggtgaccttatagaaatagagagatgtgagcctgtgaggtccaagctagaggaagtccaaagaaaacttggatttgctctttctgacatctcggtggttagcaattattcctctgagtgggagctggaccctgtaaaggatgttctaattctttctgctctgagacgaatgctatgggctgcagatgacttcttagaggatttgccttttgagcaaatagggaatctaagggaggaaattatcaactgtgcacaaggaaaaaaatagatatgtgaaaggttcacgtaaatttcctcacatcacagaagattaaaattcagaaaggagaaaacacagaccaaagagaagtatctaagaccaaagggatgtgttttattaatgtctaggatgaagaaatgcatagaacattgtagtacttgtaaataactagaaataacatgatttagtcataattgtgaaaaatagtaataatttttcttggatttatgttctgtatctgtgaaaaaataaatttcttataaaactcggaaaaaaaaaaaaaaaaaaaaaaaaaaaaa

SEQ ID NO: 1064 - protein, 444 aa, Homo sapien
MAVTTRLTRLHEKILQNHFGGKRLSLLYKGSVHGFRNGVLLDRCCNQGPTLTVIYSEDHIIGAYAEESYQEGKYASIILFALQDTKISEWKLGLCTPETLFCCDVTKYNSPTNFQIDGRNRKVIMDLKTMENLGLAQNCTISIQDYEVFRCEDSLDERKIKGVIELRKSLLSALRTYEPYGSLVQQIRILLLGPIGAGKSSFFNSVRSVFQGHVTHQALVGTNTTGISEKYRTYSIRDGKDGKYLPFILCDSLGLSEKEGGLCRDDIFYILNGNIRDRYQFNPMESIKLNHHDYIDSPSLKDRIHCVAFVFDASSIQYFSSQMIVKIKRIRRELVNAGVVHVALLTHVDSMDLITKGDLIEIERCEPVRSKLEEVQRKLGFALSDISVVSNYSSEWELDPVKDVLILSALRRMLWAADDFLEDLPFEQIGNLREEIINCAQGKK

SEQ ID NO: 1065 - DNA, 526 bp, Homo sapien
cagctacagcacagatcagcaccatgaagcttctcacgggcctggttttctgctccttggtcctgagtgtcagcagccgaagcttcttttcgttccttggcgaggcttttgatggggctcgggacatgtggagagcctactctgacatgagagaagccaattacatcggctcagacaaatacttccatgctcgggggaactatgatgctgccaaaaggggacctgggggtgcctgggccgcagaagtgatcagcaatgccagagagaatatccagagactcacaggccatggtgcggaggactcgctggccgatcaggctgccaataaatggggcaggagtggcagagaccccaatcacttccgacctgctggcctgcctgagaaatactgagcttcctcttcactctgctctcaggagacctggctatgagccctcggggcagggattcaaagttagtgaggtctatgtccagagaagctgagatatggcatataataggcatctaataaatgcttaagaggtgg

SEQ ID NO: 1066 - protein, 122 aa, Homo sapien
MKLLTGLVFCSLVLSVSSRSFFSFLGEAFDGARDMWRAYSDMREANYIGSDKYFHARGNYDAAKRGPGGAWAAEVISNARENIQRLTGHGAEDSLADQAANKWGRSGRDPNHFRPAGLPEKY

SEQ ID NO: 1067 - DNA, 1776 bp, Homo sapien
atgaggcccaggagaccgttggtcttcatgtctttggtgtgtgcactcttgaacacatggccagggcacacagggtgcatgacgacaaggcctaatattgtcctaatcatggttgatgacctgggtattggagatctgggctgctacggcaatgacaccatgaggacgcctcacatcgaccgccttgccagggaaggcgtgcgactgactcagcacatctctgccgcctccctctgcagcccaagccggtccgcgttcttgacgggaagataccccatccgatcaggtatggtttctagtggtaatagacgtgtcatccaaaatcttgcagtccccgcaggcctccctcttaatgagacaacacttgcagccttgctaaagaagcaaggatacagcacggggcttataggcaaatggcaccaaggcttgaactgcgactcccgaagtgaccagtgccaccatccatataattatgggtttgactactactatggcatgccgttcactctcgttgacagctgctggccggacccctctcgtaacacggaattagcctttgagagtcagctctggctctgtgtgcagctagttgccattgccatcctcaccctaacctttgggaagctgagcggctgggtctctgttccctggctcctgatcttctccatgattctgtttattttcctcttgggctatgcttggttctccagccacacgtcccctttatactgggactgcctcctcatgcgggggcacgagatcacggagcagcccatgaaggctgaacgagctggatccattatggtgaaggaagcgatttcctttttagaaaggcacagtaaggaaactttccttctctttttctcctttcttcacgtgcacacacctctccccaccacggacgatttcactggcaccagcaagcatggcttgtatggggataatgtggaagagatggactccatggtgggcaagattcttgatgctatcgatgattttggcctaaggaacaacacccttgtctactttacatcagatcacggagggcatttggaagctaggcgagggcatgcccaacttggtggatggaatggaatatacaaaggtggaaaaggcatggggggctgggaaggtggaatccgcgtcccaggaattgtccgatggcctggaaaggtaccagctggacggttgattaaggaacctacaagtttaatggatattttaccaactgtcgcatcagtgtcaggaggaagtctccctcaggacagggtcattgacggccgagacctcatgcccttgctgcagggcaacgtcaggcactcggagcatgaatttcttttccactactgtggctcctacctgcacgccgtgcggtggatccccaaggacgacagtgggtcagtttggaaggctcactatgtgaccccggtattccagccaccagcttctggtggctgctatgtcacctcattatgcagatgtttcggagaacaggttacctaccacaacccccctctgctcttcgatctctccagggacccctcagagtccacacccctgacacctgccacagagcccctctatgattttgtgattaaaaaggtggccaacgccctgaaggaacaccaggaaaccatcgtgcctgtgacctaccaactctcagaactgaatcagggcaggacgtggctgaagccttgctgtggggtgttcccattttgtctgtgtgacaaggaagaggaagtctctcagcctcggggtcctaacgagaagagataa

SEQ ID NO: 1068 - protein, 591 aa, Homo sapien [sequence omitted]

SEQ ID NO: 1069 - DNA, 1336 bp, Homo sapien
gtcagtcgcgagcgaacgaccaagagggtgttcgactgctagagccgagcgaagcgatgcctaaatcaaaggaacttgtttcttcaggctcttctggcagtgattctgacagtgaggttgacaaaaagttaaagaggaaaaagcaagttgctccagaaaaacctgtaaagaaacaaaagacaggtgagacttcgagagccctgtcatcttctaaacagagcagcagcagcagagatgataacatgtttcagattgggaaaatgaggtacgttagtgttcgcgattttaaaggcaaagtgctaattgatattagagaatattggatggatcctgaaggtgaaatgaaaccaggaagaaaaggtatttctttaaatccagaacaatggagccagctgaaggaacagatttctgacattgatgatgcagtaagaaaactgtaaaattcgagccatataaataaaacctgtactgttctagttgttttaatctgtctttttacattagcttttgttttctaaatgttctccaagctattgtatgtttggattgcagaagaatttgtaagatgaatacttttttttaatgtgcattattaaaaatattgagtgaagctaattgtcaactttattaaggattactttgtctgcccaccacctagtgtaaaataaaatcaagtaatacaatcttaactgttgtggccttttttgatcataagagttggtactgtttaaggccaaaagtaacagtttttatagatcttttagtttcaactcagcttttacaataaaaaggatttgtattgcattgagtttataaacttttggtttgtgaacttcatatttgatcttttctcttccaatcaaatgtctaggcttgtttgacttccacccccaatggtttttcactctttttatttacttcattttcctttaataacttaatctcttcatgttcagtttttacttcactctttattcttttctttgattatggtatgcttatttggaaagtcagtgaaactgtcaaaatgttatctcaataagatacttatatgagaactacaatcaccgaatctactgtattcaatattagcagatctaatttgataaacaacatggcttgtgtgaaaactgagcaggtgtttgtttacccatagtgttctgtgtagttattgcttagtctgcagaaaataatgacttagatgagatgtctgacttgctttcacttattaaacatgttcaccatgggatgatgtctgtaacatcagatattgttcaactagactaggatttaataaaaattgtgaaagcttaaaaaaaaaaaaaaaaaaaaaaaa

SEQ ID NO: 1070 - protein, 127 aa, Homo sapien
MPKSKELVSSGSSGSDSDSEVDKKLKRKKQVAPEKPVKKQKTGETSRALSSSKQSSSSRDDNMFQIGKMRYVSVRDFKGKVLIDIREYWMDPEGEMKPGRKGISLNPEQWSQLKEQISDIDDAVRKL

SEQ ID NO: 1071 - DNA, 1974 bp, Homo sapien
  Unsure 1733, 1786, 1831: Unknown base
cgggatcaatttgatttgacagtcggtataactgatcctgagaagatggcgtcgggtggtggtggctgtagcgcttcggagagactgcctccgcccttccccggcctggagccggagtccgagggggcggccgggggatcagaacccgaggctggggacagcgacaccgagggggaggacattttcaccggcgccgcggtggtcagtaaacatcagtctccaaagataactacatcccttcttcccatcaacaatggctccaaagaaaatgggatccatgaagaacaagaccaagagccacaggatctctttgcagatgccacagtggagctatccttggacagcacacaaaataatcagaagaaggtgctagccaaaacactcatttytcttcctcctcaggaagccacaaattcttcgaagccccagccaacctatgaggagctagaggaagaagaacaggaggatcaatttgatttgacagtcggtataactgatcctgagaagataggggatggtatgaatgcatatgtagcctacaaagttacaacacagacaagcttaccattgttcagaagcaaacagtttgcagtaaaaagaagatttagtgactttctgggtctttatgagaagctttccgagaagcactctcagaatggcttcattgtccctccgcccccggagaagagcctcatagggatgacaaaagtgaaagttgggaaggaagattcttcttctgcagaatttcttgaaaaacggagggccgctttagaaaggtaccttcagaggattgtaaatcatcctaccatgttacaggaccctgacgtcagagagttcttggaaaaagaagagctgccacgtgccgtgggtacccagacattgagtggtgctggtctcctcaagatgttcaacaaagccacagatgccgtcagcaaaatgaccatcaagatgaatgaatcagacatttggtttgaggagaagctccaggaggtagagtgtgaggagcagcgcttacggaaactgcatgctgttgtagaaactctagtcaaccataggaaagagctagcgctgaacacagcccagtttgcaaagagtctagccatgcttgggagctctgaggacaacacggcattgtcacgggcactctcccagctggctgaggtggaagaaaaaattgagcagctccaccaggaacaggccaacaatgacttcttcctccttgctgagctcctgagtgactacattcgcctcctggccatagtccgcgctgccttcgaccagcgcatgaagacatggcagcgctggcaggatgcccaagccacactgcagaagaagcgggaggccgaggctcggctgctgtgggccaacaagcctgataagctgcagcaggccaaggacgagatcctcgagtgggagtctcgggtgactcaatatgaaagggacttcgagaggatttcaacagtggtccgaaaagaagtgatacggtttgagaaagagaaatccaaggacttcaagaaccacgtgatcaagtaccttgagacactcctttactcacagcagcagctggcaaagtactgggaagccttccttcctgaggcaaaggccatctcctaatggaccaaggaccccagagcccacctgtgtgacgctgcctttttatacactgtcctcctccaccttgatggacccctagtgatgcatcctgcctaggctggacttaaccccttcctccntgtccccacgaccaactgtccccagttactctaaccgttatttcatttagctnccatatatattttcttacctaagagaatagtttcctgctttaagnaaaagacctacaataggtggtggaattatgggatggggtggagtattgatataaatatataaatacaaatgtatatttttcaggatgtggtttaggaactgggaataacgttttcatggcaccatcaggagtaacagaaaacc

SEQ ID NO: 1072 - protein, 522 aa, Homo sapien
  unsure 115: unknown amino acid
  Unsure 1733, 1786, 1831: Unknown amino acid
MASGGGGCSASERLPPPFPGLEPESEGAAGGSEPEAGDSDTEGEDIFTGAAVVSKHQSPKITTSLLPINNGSKENGIHEEQDQEPQDLFADATVELSLDSTQNNQKKVLAKTLIXLPPQEATNSSKPQPTYEELEEEEQEDQFDLTVGITDPEKIGDGMNAYVAYKVTTQTSLPLFRSKQFAVKRRFSDFLGLYEKLSEKHSQNGFIVPPPPEKSLIGMTKVKVGKEDSSSAEFLEKRRAALERYLQRIVNHPTMLQDPDVREFLEKEELPRAVGTQTLSGAGLLKMFNKATDAVSKMTIKMNESDIWFEEKLQEVECEEQRLRKLHAVVETLVNHRKELALNTAQFAKSLAMLGSSEDNTALSRALSQLAEVEEKIEQLHQEQANNDFFLLAELLSDYIRLLAIVRAAFDQRMKTWQRWQDAQATLQKKREAEARLLWANKPDKLQQAKDEILEWESRVTQYERDFERISTVVRKEVIRFEKEKSKDFKNHVIKYLETLLYSQQQLAKYWEAFLPEAKAIS

SEQ ID NO: 1073 - DNA, 537 bp, Homo sapien
ctctcatcacttctgagcacggagcaatggcctctcgctgggctgtgcagctgctgctcgtggcagcctggagcatgggctgtggtgaggccctcaagtgctacacctgcaaggagcccatgaccagtgcttcctgcaggaccattacccgctgcaagccagaggacacagcctgcatgaccacgctggtgacggtggaggcagagtaccccttcaaccagagccccgtggtgacccgctcctgctccagctcctgtgtggccaccgaccccgacagcatcggggccgcccacctgatcttctgctgcttccgagacctctgcaactcggaactctgaacccagggcggcagggcggaaggtgctcctcaggcacctcctctctgacggggcctggctccacctgtgatcacctccccctgcttcctgctgctgtggcacagctcactcatggggtctgaggggagagaagcacaccaggggcgccctctgccttccataccccacgcttataaaacataactaagccaagagtgga

SEQ ID NO: 1074 - protein, 103 aa, Homo sapien
MASRWAVQLLLVAAWSMGCGEALKCYTCKEPMTSASCRTITRCKPEDTACMTTLVTVEAEYPFNQSPVVTRSCSSSCVATDPDSIGAAHLIFCCFRDLCNSEL

SEQ ID NO: 1075 - DNA, 270 bp, Homo sapien
atgaattctcagcagcagaagcagccttgcaccccaccccctcagcctcagcagcagcaggtgaaacaaccttgccagcctccaccccaggaaccatgcatccccaaaaccaaggagccctgccaacccaaggtgcctgagccctgccaccccaaagtgcctgagccctgccagcccaagattccagagccctgccagcccaaggtgcctgagccctgcccttcaacggtcactccagcaccagcccagcagaagaccaagcagaagtaa

SEQ ID NO: 1076 - protein, 89 aa, Homo sapien [sequence omitted]

SEQ ID NO: 1077 - DNA, 2312 bp, Homo sapien
ggcacgaggctcctccagcctctcacactctcctcagctctctcatctcctggaaccatggccagcacatccaccaccatcaggagccacagcagcagccgccggggtttcagtgccaactcagccaggctccctggggtcagccgctctggcttcagcagcgtctccgtgtcccgctccaggggcagtggtggcctgggtggtgcatgtggaggagctggctttggcagccgcagtctgtatggcctggggggctccaagaggatctccattggagggggcagctgtgccatcagtggcggctatggcagcagagccggaggcagctatggctttggtggcgccgggagtggatttggtttcggtggtggagccggcattggctttggtctgggtggtggagccggccttgctggtggctttgggggccctggcttccctgtgtgcccccctggaggcatccaagaggtcaccgtcaaccagagtctcctgactcccctcaacctgcaaatcgatcccaccatccagcgggtgcgggctgaggagcgtgaacagatcaagaccctcaacaacaagtttgcctccttcatcgacaaggtgcggttcctggagcagcagaacaaggttctggaaacaaagtggaccctgctgcaggagcagggcaccaagactgtgaggcagaacctggagccgttgttcgagcagtacatcaacaacctcaggaggcagctggacagcattgtcggggaacggggccgcctggactcagagctcagaggcatgcaggacctggtggaggacttcaagaacaaatatgaggatgaaatcaacaagcgcacagcagcagagaatgaatttgtgactctgaagaaggatgtggatgctgcctacatgaacaaggttgaactgcaagccaaggcagacactctcacagacgagatcaacttcctgagagccttgtatgatgcagagctgtcccagatgcagacccacatctcagacacatctgtggtgctgtccatggacaacaaccgcaacctggacctggacagcatcatcgctgaggtcaaggcccaatatgaggagattgctcagagaagccgggctgaggctgagtcctggtaccagaccaagtacgaggagctgcaggtcacagcaggcagacatggggacgacctgcgcaacaccaagcaggagattgctgagatcaaccgcatgatccagaggctgagatctgagatcgaccacgtcaagaagcagtgcgccaacctgcaggccgccattgctgatgctgagcagcgtggggagatggccctcaaggatgccaagaacaagctggaagggctggaggatgccctgcagaaggccaagcaggacctggcccggctgctgaaggagtaccaggagctgatgaatgtcaagctggccctggacgtggagatcgccacctaccgcaagctgctggagggtgaggagtgcaggctgaatggcgaaggcgttggacaagtcaacatctctgtggtgcagtccaccgtctccagtggctatggcggtgccagtggtgtcggcagtggcttaggcctgggtggaggaagcagctactcctatggcagtggtcttggcgttggaggtggcttcagttccagcagtggcagagccattgggggtggcctcagctctgttggaggcggcagttccaccatcaagtacaccaccacctcctcctccagcaggaagagctataagcactaaagtgcgtctgctagctctcggtcccacagtcctcaggcccctctctggctgcagagccctctcctcaggttgcctttcctctcctggcctccagtctcccctgctgtcccaggtagagctgggtatggatgcttagtgccctcacttcttctctctctctctataccatctgagcacccattgctcaccatcagatcaacctctgattttacatcatgatgtaatcaccactggagcttcactgttactaaattattaatttcttgcctccagtgttctatctctgaggctgagcattataagaaaatgacctctgctccttttcattgcagaaaattgccaggggcttatttcagaacaacttccacttactttccactggctctcaaactctctaacttataagtgttgtgaacccccacccaggcagtatccatgaaagcacaagtgactagtcctatgatgtacaaagcctgtatctctgtgatgatttctgtgctcttcgctgtttgcaattgctaaataaagcagatttataatacaaaaaaaaaaaaaaaaaa

SEQ ID NO: 1078 - protein, 564 aa, Homo sapien
MASTSTTIRSHSSSRRGFSANSARLPGVSRSGFSSVSVSRSRGSGGLGGACGGAGFGSRSLYGLGGSKRISIGGGSCAISGGYGSRAGGSYGFGGAGSGFGFGGGAGIGFGLGGGAGLAGGFGGPGFPVCPPGGIQEVTVNQSLLTPLNLQIDPTIQRVRAEEREQIKTLNNKFASFIDKVRFLEQQNKVLETKWTLLQEQGTKTVRQNLEPLFEQYINNLRRQLDSIVGERGRLDSELRGMQDLVEDFKNKYEDEINKRTAAENEFVTLKKDVDAAYMNKVELQAKADTLTDEINFLRALYDAELSQMQTHISDTSVVLSMDNNRNLDLDSIIAEVKAQYEEIAQRSRAEAESWYQTKYEELQVTAGRHGDDLRNTKQEIAEINRMIQRLRSEIDHVKKQCANLQAAIADAEQRGEMALKDAKNKLEGLEDALQKAKQDLARLLKEYQELMNVKLALDVEIATYRKLLEGEECRLNGEGVGQVNISVVQSTVSSGYGGASGVGSGLGLGGGSSYSYGSGLGVGGGFSSSSGRAIGGGLSSVGGGSSTIKYTTTSSSSRKSYKH

SEQ ID NO: 1079 - DNA, 3250 bp, Homo sapien
cggacgcgtgggccggttcagccatggggacctctccgagcagcagcaccgccctcgcctcctgcagccgcatcgcccgccgagccacagccacgatgatcgcgggctcccttctcctgcttggattccttagcaccaccacagctcagccagaacagaaggcctcgaatctcattggcacataccgccatgttgaccgtgccaccggccaggtgctaacctgtgacaagtgtccagcaggaacctatgtctctgagcattgtaccaacacaagcctgcgcgtctgcagcagttgccctgtggggacctttaccaggcatgagaatggcatagagaaatgccatgactgtagtcagccatgcccatggccaatgattgagaaattaccttgtgctgccttgactgaccgagaatgcacttgcccacctggcatgttccagtctaacgctacctgtgccccccatacggtgtgtcctgtgggttggggtgtgcggaagaaagggacagagactgaggatgtgcggtgtaagcagtgtgctcggggtaccttctcagatgtgccttctagtgtgatgaaatgcaaagcatacacagactgtctgagtcagaacctggtggtgatcaagccggggaccaaggagacagacaacgtctgtggcacactcccgtccttctccagctccacctcaccttcccctggcacagccatctttccacgccctgagcacatggaaacccatgaagtcccttcctccacttatgttcccaaaggcatgaactcaacagaatccaactcttctgcctctgttagaccaaaggtactgagtagcatccaggaagggacagtccctgacaacacaagctcagcaagggggaaggaagacgtgaacaagaccctcccaaaccttcaggtagtcaaccaccagcaaggcccccaccacagacacatcctgaagctgctgccgtccatggaggccactgggggcgagaagtccagcacgcccatcaagggccccaagaggggacatcctagacagaacctacacaagcattttgacatcaatgagcatttgccctggatgattgtgcttttcctgctgctggtgcttgtggtgattgtggtgtgcagtatccggaaaagctcgaggactctgaaaaaggggccccggcaggatcccagtgccattgtggaaaaggcagggctgaagaaatccatgactccaacccagaaccgggagaaatggatctactactgcaatggccatggtatcgatatcctgaagcttgtagcagcccaagtgggaagccagtggaaagatatctatcagtttctttgcaatgccagtgagagggaggttgctgctttctccaatgggtacacagccgaccacgagcgggcctacgcagctctgcagcactggaccatccggggccccgaggccagcctcgcccagctaattagcgccctgcgccagcaccggagaaacgatgttgtggagaagattcgtgggctgatggaagacaccacccagctggaaactgacaaactagctctcccgatgagccccagcccgcttagcccgagccccatccccagccccaacgcgaaacttgagaattccgctctcctgacggtggagccttccccacaggacaagaacaagggcttcttcgtggatgagtcggagccccttctccgctgtgactctacatccagcggctcctccgcgctgagcaggaacggttcctttattaccaaagaaaagaaggacacagtgttgcggcaggtacgcctggacccctgtgacttgcagcctatctttgatgacatgctccactttctaaatcctgaggagctgcgggtgattgaagagattccccaggctgaggacaaactagaccggctattcgaaattattggagtcaagagccaggaagccagccagaccctcctggactctgtttatagccatcttcctgacctgctgtagaacatagggatactgcattctggaaattactcaatttagtggcagggtggttttttaattttcttctgtttctgatttttgttgtttggggtgtgtgtgtgtgtttgtgtgtgtgtgtgtgtgtgtgtgtgtgtgtgtttaacagagaatatggccagtgcttgagttctttctccttctctctctctcttttttttttaaataactcttctgggaagttggtttataagcctttgccaggtgtaactgttgtgaaatacccaccactaaagttttttaagttccatattttctccattttgccttcttatgtattttcaagattattctgtgcactttaaatttacttaacttaccataaatgcagtgtgacttttcccacacactggattgtgaggctcttaacttcttaaaagtataatggcatcttgtgaatcctataagcagtctttatgtctcttaacattcacacctactttttaaaaacaaatattattactatttttattattgtttgtcctttataaattttcttaaagattaagaaaatttaagaccccattgagttactgtaatgcaattcaactttgagttatcttttaaatatgtcttgtatagttcatattcatggctgaaacttgaccacactattgctgattgtatggttttcacctggacaccgtgtagaatgcttgattacttgtactcttcttatgctaatatgctctgggctggagaaatgaaatcctcaagccatcaggatttgctatttaagtggcttgacaactgggccaccaaagaacttgaacttcaccttttaggatttgagctgttctggaacacattgctgcactttggaaagtcaaaatcaagtgccagtggcgccctttccatagagaatttgcccagctttgctttaaaagatgtcttgttttttatatacacataatcaataggtccaatctgctctcaaggccttggtcctggtgggattccttcaccaattactttaattaaaaatggctgcaactgtaagaacccttgtctgatatatttgcaactatgctcccatttacaaatgtaccttctaatgctcagttgccaggttccaatgcaaaggtggcgtggactccctttgtgtgggtggggtttgtgggtagtggtgaaggaccgatatcagaaaaatgccttcaagtgtactaatttattaataaacattaggtgtttgttaaaaaaaaaaaaaaaaaaaaaaaaaaaaa

SEQ ID NO: 1080 - protein, 655 aa, Homo sapien
MGTSPSSSTALASCSRIARRATATMIAGSLLLLGFLSTTTAQPEQKASNLIGTYRHVDRATGQVLTCDKCPAGTYVSEHCTNTSLRVCSSCPVGTFTRHENGIEKCHDCSQPCPWPMIEKLPCAALTDRECTCPPGMFQSNATCAPHTVCPVGWGVRKKGTETEDVRCKQCARGTFSDVPSSVMKCKAYTDCLSQNLVVIKPGTKETDNVCGTLPSFSSSTSPSPGTAIFPRPEHMETHEVPSSTYVPKGMNSTESNSSASVRPKVLSSIQEGTVPDNTSSARGKEDVNKTLPNLQVVNHQQGPHHRHILKLLPSMEATGGEKSSTPIKGPKRGHPRQNLHKHFDINEHLPWMIVLFLLLVLVVIVVCSIRKSSRTLKKGPRQDPSAIVEKAGLKKSMTPTQNREKWIYYCNGHGIDILKLVAAQVGSQWKDIYQFLCNASEREVAAFSNGYTADHERAYAALQHWTIRGPEASLAQLISALRQHRRNDVVEKIRGLMEDTTQLETDKLALPMSPSPLSPSPIPSPNAKLENSALLTVEPSPQDKNKGFFVDESEPLLRCDSTSSGSSALSRNGSFITKEKKDTVLRQVRLDPCDLQPIFDDMLHFLNPEELRVIEEIPQAEDKLDRLFEIIGVKSQEASQTLLDSVYSHLPDLL

SEQ ID NO: 1081 - DNA, 5886 bp, Homo sapien
attttcctgcctcagcctcccgagcagcttggactacaggtagttccaatttgccagcagaatgagtacagaaagagactcagaaacgacatttgacgaggattctcagcctaatgacgaagtggttccctacagtgatgatgaaacagaagatgaacttgatgaccaggggtctgctgttgaaccagaacaaaaccgagtcaacagggaagcagaggagaaccgggagccattcagaaaagaatgtacatggcaagtcaaagcaaacgatcgcaagtaccacgaacaacctcactttatgaacacaaaattcttgtgtattaaggagagtaaatatgcgaataatgcaattaaaacatacaagtacaacgcatttacctttataccaatgaatctgtttgagcagtttaagagagcagccaatttatatttcctggctcttcttatcttacaggcagttcctcaaatctctaccctggcttggtacaccacactagtgcccctgcttgtggtgctgggcgtcactgcaatcaaagacctggtggacgatgtggctcgccataaaatggataaggaaatcaacaataggacgtgtgaagtcattaaggatggcaggttcaaagttgctaagtggaaagaaattcaagttggagacgtcattcgtctgaaaaaaaatgattttgttccagctgacattctcctgctgtctagctctgagcctaacagcctctgctatgtggaaacagcagaactggacggagaaaccaatttaaaatttaagatgtcacttgaaatcacagaccagtacctccaaagagaagatacattggctacatttgatggttttattgaatgtgaagaacccaataaccgactagataagtttacaggaacactattttggagaaacacaagttttcctttggatgctgataaaattttgttacgtggctgtgtaattaggaacaccgatttctgccacggcttagtcatttttgcaggtgctgacactaaaataatgaagaatagtgggaaaaccagatttaaaagaactaaaattgattacttgatgaactacatggtttacacgatctttgttgttcttattctgctttctgctggtcttgccatcggccatgcttattgggaagcacaggtgggcaattcctcttggtacctctatgatggagaagacgatacaccctcctaccgtggattcctcattttctggggctatatcattgttctcaacaccatggtacccatctctctctatgtcagcgtggaagtgattcgtcttggacagagtcacttcatcaactgggacctgcaaatgtactatgctgagaaggacacacccgcaaaagctagaaccaccacactcaatgaacagctcgggcagatccattatatcttctctgataagacggggacactcacacaaaatatcatgacctttaaaaagtgctgtatcaacgggcagatatatggggaccatcgggatgcctctcaacacaaccacaacaaaatagagcaagttgattttagctggaatacatatgctgatgggaagcttgcattttatgaccactatcttattgagcaaatccagtcagggaaagagccagaagtacgacagttcttcttcttgctcgcagtttgccacacagtcatggtggataggactgatggtcagctcaactaccaggcagcctctcccgatgaaggtgccctggtaaacgctgccaggaactttggctttgccttcctcgccaggacccagaacaccatcaccatcagtgaactgggcactgaaaggacttacaatgttcttgccattttggacttcaacagtgaccggaagcgaatgtctatcattgtaagaaccccagaaggcaatatcaagctttactgtaaaggtgctgacactgttatttatgaacggttacatcgaatgaatcctactaagcaagaaacacaggatgccctggatatctttgcaaatgaaactcttagaaccctatgcctttgctacaaggaaattgaagaaaaagaatttacagaatggaataaaaagtttatggctgccagtgtggcctccaccaaccgggacgaagctctggataaagtatatgaggagattgaaaaagacttaattctcctgggagctacagctattgaagacaagctacaggatggagttccagaaaccatttcaaaacttgcaaaagctgacattaagatctgggtgcttactggagacaaaaaggaaactgctgaaaatataggatttgcttgtgaacttctgactgaagacaccaccatctgctatggggaggatattaattctcttcttcatgcaaggatggaaaaccagaggaatagaggtggcgtctacgcaaagtttgcacctcctgtgcaggaatctttttttccacccggtggaaaccgtgccttaatcatcactggttcttggttgaatgaaattcttctcgagaaaaagaccaagagaaataagattctgaagctgaagttcccaagaacagaagaagaaagacggatgcggacccaaagtaaaaggaggctagaagctaagaaagagcagcggcagaaaaactttgtggacctggcctgcgagtgcagcgcagtcatctgctgccgcgtcacccccaagcagaaggccatggtggtggacctggtgaagaggtacaagaaagccatcacgctggccatcggagatggggccaatgacgtgaacatgatcaaaactgcccacattggcgttggaataagtggacaagaaggaatgcaagctgtcatgtcgagtgactattcctttgctcagttccgatatctgcagaggctactgctggtgcatggccgatggtcttacataaggatgtgcaagttcctacgatacttcttttacaaaaactttgcctttactttggttcatttctggtactccttcttcaatggctactctgcgcagactgcatacgaggattggttcatcaccctctacaacgtgctgtacaccagcctgcccgtgctcctcatggggctgctcgaccaggatgtgagtgacaaactgagcctccgattccctgggttatacatagtgggacaaagagacttactattcaactataagagattctttgtaagcttgttgcatggggtcctaacatcgatgatcctcttcttcatacctcttggagcttatctgcaaaccgtagggcaggatggagaggcaccttccgactaccagtcttttgccgtcaccattgcctctgctcttgtaataacagtcaatttccagattggcttggatacttcttattggacttttgtgaatgctttttcaatttttggaagcattgcactttattttggcatcatgtttgactttcatagtgctggaatacatgttctctttccatctgcatttcaatttacaggcacagcttcaaacgctctgagacagccatacatttggttaactatcatcctgactgttgctgtgtgcttactacccgtcgttgccattcgattcctgtcaatgaccatctggccatcagaaagtgataagatccagaagcatcgcaagcggttgaaggcggaggagcagtggcagcgacggcagcaggtgttccgccggggcgtgtcaacgcggcgctcggcctacgccttctcgcaccagcggggctacgcggacctcatctcctccgggcgcagcatccgcaagaagcgctcgccgcttgatgccatcgtggcggatggcaccgcggagtacaggcgcaccggggacagctgatcccttacccccaggctgggatgcggccacaaagcacgtctatttttttatgaaagactctcaggactttctgtgtgtgtgtgaattgcattcatcacaaagatattgaagacaataaataatctttataacaaactccttgggttggactattaaacaatagcagagccaagaaataggacttttaaaagtcctattattcggccgggcgtggtggctcaggtctgtaatcccagcactttaggaggctgaggaggggagatcacctgaggccaggagttcgagaccagcccagccaacatggtgaaaccctgtctctaccataaattaaaaattagccgggcttggtggtgggcacccgtaatcccacctatttgagaagctgaagcagaagaatcgcttgaacctgggagatggaggttacagtgagccgagattgcgccactgcactccagcctgggtgacagagcaagactctgtcttaagaaaaatttaaaaataggccgggcatggtggctcatgcctgtcatcctagcactttgggaggccaaggcaggtggatcacttgaggtcaggagaccagcccggccaacatggtgaaaccccatctctactaaaaatacaaaaattagctggaaatcgcttgaaacctgggaggtggaggttccagtggagccgagatcgtggcactgcactcccaacctgagcaacagagtgagacaccagctcmaaaaaaaatttttttaataataataaaagtcctattattcaactggttatgtacattatggttgaaagggaacgttttaatcccagtctcaatccagggcaatagaattacaaagcatgttgtatttcagttcaaatggtattgtattataaaattacagttacattttcctttcggtgatcttcagcataatttcccagaggcccctttttcctccctataggccatcttattaacagattttaaaatttatagtaatgacaaatgacttatcagtgttcatcatctgaaagctaagtggttcgttcaatcactttttcaaagttgatagtagattgcatggtttcatgtttcctcatattggtttattaattctatttaatcaaggaaaataacttcagattccataaagtttcagtttatttttagtttactactaggtgagatagcacattacatacttttactatcaaatattattttagcagcttcccatagtaccaaatgatttgattccctactctcattttttaaagcatataaatatttatgggcttaaaaagggggtttttaaaaactgaggatatcagtaataaattgcagaatattttgcaargctttctttttggaaagccaaacttttgtgcytgcctatatgcaaagtattttatcagggacttgamcaargacctcaytctttttcactttgtcttatgtcgagagaaaaggttattggcagccacattcctargacttggggaatggtgtgtccttttaaatttgaagatgactttaggtaattatggaaactcctcaaagaggagaaagtaatttttttccagacatttttctcattctgtgtctttcacacactagtttccatagttcgagaattctgttttttaccattgggctgtgaatgttcacaatatcagtcctgttgaattcctatgaggtaatcacaatgtgtatatgttcattttctaggtatgataaaagaatgtatggctttttattctgtggaagtaaaatcctgaacgtttacaacttttccttaacttgtaaataaaaaattgtaagttttttctttttttacagaaaacttagcttgtgtaattctgttagtttcagatttctctcctgtttttgcaaattgtgggaaagattgacaatgcaaatgtgtcaaagacatactgttgggtgcaatattaacaattttaaatgcaaatttctttggataaattatttctatattctgtaaatctgagatttaatgtatattttgtttaaaaaaatgatttagtaaaatctttgaaaagtaaaaaaaaaaaaaaaaaaa

SEQ ID NO: 1082 - protein, 1251 aa, Homo sapien
MSTERDSETTFDEDSQPNDEVVPYSDDETEDELDDQGSAVEPEQNRVNREAEENREPFRKECTWQVKANDRKYHEQPHFMNTKFLCIKESKYANNAIKTYKYNAFTFIPMNLFEQFKRAANLYFLALLILQAVPQISTLAWYTTLVPLLVVLGVTAIKDLVDDVARHKMDKEINNRTCEVIKDGRFKVAKWKEIQVGDVIRLKKNDFVPADILLLSSSEPNSLCYVETAELDGETNLKFKMSLEITDQYLQREDTLATFDGFIECEEPNNRLDKFTGTLFWRNTSFPLDADKILLRGCVIRNTDFCHGLVIFAGADTKIMKNSGKTRFKRTKIDYLMNYMVYTIFVVLILLSAGLAIGHAYWEAQVGNSSWYLYDGEDDTPSYRGFLIFWGYIIVLNTMVPISLYVSVEVIRLGQSHFINWDLQMYYAEKDTPAKARTTTLNEQLGQIHYIFSDKTGTLTQNIMTFKKCCINGQIYGDHRDASQHNHNKIEQVDFSWNTYADGKLAFYDHYLIEQIQSGKEPEVRQFFFLLAVCHTVMVDRTDGQLNYQAASPDEGALVNAARNFGFAFLARTQNTITISELGTERTYNVLAILDFNSDRKRMSIIVRTPEGNIKLYCKGADTVIYERLHRMNPTKQETQDALDIFANETLRTLCLCYKEIEEKEFTEWNKKFMAASVASTNRDEALDKVYEEIEKDLILLGATAIEDKLQDGVPETISKLAKADIKIWVLTGDKKETAENIGFACELLTEDTTICYGEDINSLLHARMENQRNRGGVYAKFAPPVQESFFPPGGNRALIITGSWLNEILLEKKTKRNKILKLKFPRTEEERRMRTQSKRRLEAKKEQRQKNFVDLACECSAVICCRVTPKQKAMVVDLVKRYKKAITLAIGDGANDVNMIKTAHIGVGISGQEGMQAVMSSDYSFAQFRYLQRLLLVHGRWSYIRMCKFLRYFFYKNFAFTLVHFWYSFFNGYSAQTAYEDWFITLYNVLYTSLPVLLMGLLDQDVSDKLSLRFPGLYIVGQRDLLFNYKRFFVSLLHGVLTSMILFFIPLGAYLQTVGQDGEAPSDYQSFAVTIASALVITVNFQIGLDTSYWTFVNAFSIFGSIALYFGIMFDFHSAGIHVLFPSAFQFTGTASNALRQPYIWLTIILTVAVCLLPVVAIRFLSMTIWPSESDKIQKHRKRLKAEEQWQRRQQVFRRGVSTRRSAYAFSHQRGYADLISSGRSIRKKRSPLDAIVADGTAEYRRTGDS

SEQ ID NO: 1083 - DNA, 1835 bp, Homo sapien
gttcattactacaggaaaaactgttctcttctgtggcacagagaaccctgcttcaaagcagaagtagcagttccggagtccagctggctaaaactcatcccagaggataatggcaacccatgccttagaaatcgctgggctgtttcttggtggtgttggaatggtgggcacagtggctgtcactgtcatgcctcagtggagagtgtcggccttcattgaaaacaacatcgtggtttttgaaaacttctgggaaggactgtggatgaattgcgtgaggcaggctaacatcaggatgcagtgcaaaatctatgattccctgctggctctttctccggacctacaggcagccagaggactgatgtgtgctgcttccgtgatgtccttcttggctttcatgatggccatccttggcatgaaatgcaccaggtgcacgggggacaatgagaaggtgaaggctcacattctgctgacggctggaatcatcttcatcatcacgggcatggtggtgctcatccctgtgagctgggttgccaatgccatcatcagagatttctataactcaatagtgaatgttgcccaaaaacgtgagcttggagaagctctctacttaggatggaccacggcactggtgctgattgttggaggagctctgttctgctgcgttttttgttgcaacgaaaagagcagtagctacagatactcgataccttcccatcgcacaacccaaaaaagttatcacaccggaaagaagtcaccgagcgtctactccagaagtcagtatgtgtagttgtgtatgtttttttaactttactataaagccatttacttcaaaatgacattgctaaagactgcattattttactactgtaatttctccacgacatagcattatgtacatagatgagtgtaacatttatatctcacatagagacatgcttatatggttttatttaaaatgaaatgccagtccattacactgaataaatagaactcaactattgcttttcagggaaatcatggatagggttgaagaaggttactattaattgtttaaaaacagcttagggattaatgtcctccatttataatgaagattaaaatgaaggctttaatcagcattgtaaaggaaattgaatggctttctgatatgctgttttttagcctaggagttagaaatcctaacttctttatcctcttctcccagaggctttttttttcttgtgtattaaattaacatttttaaaaagcagatattttgtcaaggggctttgcattcaaactgcttttccagggctatactcagaagaaagataaaagtgtgatctaagaaaaagtgatggttttaggaaagtgaaaatatttttgtttttgtatttgaagaagaatgatgcattttgacaagaaatcatatatgtatggatatattttaataagtatttgagtacagactttgaggtttcatcaatataaataaaagagcagaaaaatatgtcttggttttcatttgcttaccaaaaaaacaacaacaaaaaaagttgtcctttgagaacttcacctgctcctatgtgggtacctgagtcaaaattgtcatttttgttctgtgaaaaataaatttccttcttgtaccatttctgtttagttttactaaaatctgtaaatactgtatttttctgtttattccaaatttgatgaaactgacaatccaatttgaaagtttgtgtcgacgtctgtctagcttaaatgaatgtgttctatttgctttatacatttatattaataaattgtacatttttctaattatttgcaaaaaaaaaaaaaaaaaaaaaaaaaaaaaa

SEQ ID NO: 1084 - protein, 225 aa, Homo sapien
MATHALEIAGLFLGGVGMVGTVAVTVMPQWRVSAFIENNIVVFENFWEGLWMNCVRQANIRMQCKIYDSLLALSPDLQAARGLMCAASVMSFLAFMMAILGMKCTRCTGDNEKVKAHILLTAGIIFIITGMVVLIPVSWVANAIIRDFYNSIVNVAQKRELGEALYLGWTTALVLIVGGALFCCVFCCNEKSSSYRYSIPSHRTTQKSYHTGKKSPSVYSRSQYV

SEQ ID NO: 1085 - DNA, 2175 bp, Homo sapien
attactgtgagcctccttgtcagcactccaccaaagcctctgcctcagccttactgtgagtctggttgacagtagcttctaagatgtcccagcaacacacactgccagtgaccctctcccctgccctcagtcaggagctcctcaagactgttcctcctccagtcaatacccatcaggagcaaatgaaacagccaactccactgcctcccccatgccagaaggtgcctgtcgagctcccagtggaggtcccatcaaagcaagaggaaaagcacatgactgctgtaaagggactgcctgagcaagaatgtgagcaacagcagaaggagccacaggagcaggagctgcagcaacagcactgggaacagcatgaggaatatcagaaagcagaaaacccagagcagcagcttaagcaggagaaaacacaaagggatcagcagctaaacaaacagctggaagaagagaagaagctcttagaccagcaactggatcaagagctagtcaagagagatgagcaactgggaatgaagaaagagcaactgttggagctcccagagcagcaggaggggcacctgaagcacctagagcagcaggagggacagctgaagcacccggagcagcaggaggggcagctggagctcccagagcagcaggaggggcagctggagctcccagagcagcaggaggggcagctggagctcccagagcagcaggaggggcagctggagctcccagagcagcaggaggggcagctggagctcccacagcagcaggaggggcagctggagctctctgagcagcaggaggggcagctggagctctctgagcagcaggaggggcagctggagctctctgagcagcaggagggacagctgaagcacactggagcaccaggaggggcagctggaggtcccagaggagcagatggggcagctgaagtacctggaacagcaggaggggcagctgaggcacctggatcagcaggagaagcagccagagctcccagagcagcagatggggcagctgaagcacctggagcagcaggaggggcagcctaagcatctggagcagcaggaggggcaactggagcagctggaggagcaggaggggcagcttgaagcaccctggagcagcaggaggggcagctggagcaccgtggagcaccaggaagggcagctggggctcccagagcagcaggtgctgcagctgaagcagctagagaagcagcaggggcagccaaagcacctggaggaggacgaggggcagctgaagcacctggtgcagcaggaggggcagctgaagcatctggtgcagcaggaggggcagctggagcagcaggagaggcaggtggagcacctggagcagcaggtggggcagctgaagcacctagaggagcaggagggacaactgaagcatctggagcagcagcaggggcagttggaggtcccagagcagcaggtggggcagccaaagaacctggagcaggaggagaagcaactggagctcccagagcagcaagagggccaggtgaagcacctggagaagcaggaggcacagctggagctcccagagcagcaggtaggacagccaaagcacctggaacagcaggaaaagcacctagagcacccagagcagcaggacggacaactaaaacatctggagcagcaggaggggcagctgaaggacctggagcagcagaaggggcagctggagcagcctgtgtttgccccagctccaggccaggtccaagacattcaaccagccctgcccacaaagggagaagtattgcttcctgtagagcaccagcagcagaagcaggaggtgcagtggccacccaaacataaataaccacccgcagtgtccagaggccctcagatcgtctcatacaagggaagagagagccactggctccacttatttcgggtccgctaggtggcccgtctcatctgtgaacttgactctgtccctctacatgtctctttaatggggtgagggtgggggagagagggaattattgtccagtgccaaccccaatgaccccaatcccaacctcaggtgagcagagcctctacttgagggactattgttactataggaatccttacttccccagtattgaagctgaatcagtgagtgtgtacaatgatacataataaatcctggaagtcttgggatcct

SEQ ID NO: 1086 - protein, 323 aa, Homo sapien
MSQQHTLPVTLSPALSQELLKTVPPPVNTHQEQMKQPTPLPPPCQKVPVELPVEVPSKQEEKHMTAVKGLPEQECEQQQKEPQEQELQQQHWEQHEEYQKAENPEQQLKQEKTQRDQQLNKQLEEEKKLLDQQLDQELVKRDEQLGMKKEQLLELPEQQEGHLKHLEQQEGQLKHPEQQEGQLELPEQQEGQLELPEQQEGQLELPEQQEGQLELPEQQEGQLELPQQQEGQLELSEQQEGQLELSEQQEGQLELSEQQEGQLKHTGAPGGAAGGPRGADGAAEVPGTAGGAAEAPGSAGEAARAPRAADGAAEAPGAAGGAA

SEQ ID NO: 1087 - DNA, 2487 bp, Homo sapien
gtgctcctggagggaaaaagaaatacagcctcaacagattaaaaaacaaaagtcacacttaaggatccttctagtcacatcagcagtgttctgcctttatgtagtagttgggcatataatccttccacacagcccctgcagggaaaggctaatcttacggataatccacgtgagatttccacacaagagaaaagcacacgcatagtgaaatgtcagtcttttcagtaatgaggatacctttaaggcactcttggactctcggcaaccacaacataatagttgaaagatcaagattggctccacgaaagtgatacggaggttaggatgctacttgctgcaaacaagccctactttggccaacatcctgcttatttctcaaaaaagagggacagtgaaaacaaaaacgacattgggacatgctgctcaaggtagttatatatacgataagttgtatatatgatcactggtagcctaccaaagctgtagaaatctaggactgtgctaatcagtatcaaaccaaagatttctatctcttcccgaaagagagggtatgtgcaccagtctacagttccaaaggactgcaacaaatgtagatggttctgtcctcatccctgagatcagttctactgaaatggcaacaacaactccaaatacatctctcccttcttgaaatccctaaagcactatcgcactcctaaatgcatttctccacaagttagcacttgattgtatactgtcttttaatccttcattgtttcatgtatgaagtttttaatcaccccctaacccccaaaaaagattcggttgtcaagggatatatttctatccctgccagcacagtgctggacatagtgagtactgaacacctaagaggcactcattcagactgacttctacaggacttctacgtgtgtgataaaagcctgtgaatcgtgagtccctgaaatatggtagcctggcccagcttctaaagaggaccttcgtagccacaaggcatgctaaacctctagggtctgatgctgtttttgttccaaatataaacgaaaggcactagtcagccgcctgcatagactttctaaacagtgagtaaataccatggaatgtcagaaatgactttatcatcgtcatcttgaagaaaaatatgaacactgatgaaggtcattttttttttttgacatctttctgtggcaaagctcttagaattctttgcagttagctgctgaacagtatgatgatttggggattttctgaatcatttgtacttagatactggagttcagaagatgtgatttttgttgcttttcagaaaaaggaacgtggtagggagtgttttttcccacgcttttccagtaactttgcaaaagcattaattgttcactggcaattactaaatgtattttgttgctctgagaaactcagcagtgtactgagatgtggctggctgtgccatcgtcatagtgcacagtgacttttctgtttcttatcactaaagactgaggtgaggttatgaaactttcattggtcccatcgttgtgcgcagggtgcaactggctacctagaagctgatggcaggagactgtttcacacacaggagattgtgagctgtgtaagtagtcatcgccactcaagtaggacaagggtcctacccaaggctaggaccgccctgcggaaacagaaacatagactgagaacaaacctcaagactatcagtgtgacctccccataacaagagaaccccatatatagtttgagactttcccttgagaaacttatactaaaactattactcatcagtcattcactgatcagcagctaaagtccatgagaccaaatggttttatatggaaccaacgaagtgggagctaaaactgcacagtggtcattctttggcctctccttggctttatgacttaaaccaactacaacttccctatagcttctaagcagtttcatcagcattacttgggaaaacgtgttgcaagtcaaccagtcactaggatatttctacccatgcaacggaagaaaaacccattactccagaagagtatatctaagtaactaaaatggaggcagaaaatgttttaaggattttcttcaaagaataagccacagcaatggttttgtagaaaactcctgtgcttttgagcaaggacttttgccctctagaaagcaactgaggccaggtgcggtggctcacgcctgtaatcccagcactttgggaggccgaggtgagcggatcacctgaggtcaggagttttgagaccagcctggccaacatggtaaaatcccgtctctactaaaattataaaaattagccgggcatgatggtgggcacctgtaatcccagctacttgggaggctgaggcaggagaatcacttgaacccaggaggcagaggttgcagtgagccaagattgcacactgcactccagcctgggtgactagcaaaactccatctcaaaaaaaaaaaaaaaaaaaaaaaaaaaaa

SEQ ID NO: 1088 - DNA, 342 bp, Homo sapien
aaaaaaaaaaaatcccacaaagaaaagcccaggctcagagccttcacgatagaatttttctaagcagttaaggaagaattaacaccaatccttcacagactctttccaagaatacagcaggtgggaactcttcccattcatacggaaacgggaggccgcaccccttaggaatgcacacgtggggtcctcaagaggttacatgcaaactaaccccagcagcacacagagaaggcgcataagccgcgaccaggaggggttgctcccgagtccgtggcaggaaccagaggccacatgtggctgctcgtatttaagttaattaaaatggaacgatggccgggcgtg

SEQ ID NO: 1089 - protein, 38 aa, Homo sapien
MQTNPSSTQRRRISRDQEGLLPSPWQEPEATCGCSYLS

SEQ ID NO: 1090 - DNA, 7032 bp, Homo sapien
  Unsure 3359-3527, 4172-4200: Unknown base
cactctccttccacctcggaccggccgtggctccgcagagccaaagctcgcttgtccccggaaccgccctgctgccgccgcctgcttcctctgctcgcggttagcccgtcagtccctgctctgtgcgcgcctccatctgggccatggatggcggggatctgatgagcttctttcttctggcatcattaacggaccttttaccatgaatagttctactccttctacaggtgtgtatggctttcttagaaatggcttctgaggaagctgccgttactatggtgaattattacactcctattactcctcaccttcgaagccagcctgtttatattcagtattccaatcacagagaacttaagactgacaatctacctaatcaagctcgagcccaagctgcactgcaggctgtcagtgccgtccaatcaggaagcctggccctttctggaggtccttccaatgaaggcacagtcctacctgggcagagccctgtgcttcgaataattattgaaaacctcttttaccctgttaccctggaagttcttcatcagatattttctaaatttggcacagtcttgaagattatcacctttacaaagaataatcagtttcaagccttgcttcagtatgctgacccagtaaatgcacattatgccaaaatggctctggatggccagaatatctataatgcatgctgcactctgcgcattgacttctccaagctcatcagccttaatgtgaaatataataatgacaaaagcagagacttcactcgcttagaccttcctactggtgatggccagccatcccttgaaccccctaattggctgctgcttttgggggcaccggggtataatttcttcaccatatgcaggggctgctggatttgccccagccattggatttcctcaagctacaggtctatcagttccagctgttcctggagctcttggtcctctcacaatcacctcttctgctgtcactggaaggatggccattcctggggctagtggtataccaggaaattctgttctactcgtcacaaatctcaatcctgatcttatcacaccacatgggctttttatcctatttggagtctatggtgatgtacatcgagtgaagattatgtttaataagaaagaaaatgccttggttcagatggcggatgcaaatcaagctcagctagcaatgaaccatctaagtggtcagagactttatgggaaagtgcttcgtgctacactgtccaaacatcaagcagtacagcttcctcgagagggacaagaagaccaaggtctgactaaggatttcagcaatagtcctttgcatcgctttaaaaagccgggctctaaaaacttccagaatatctttccaccatcagccactctgcatctttccaacattcccccttctgttacagtggatgatctgaagaaccttttcatagaagctggatgttcagtgaaggcttttaaattctttcagaaagatcgcaaaatggcgctcattcaattgggatctgtggaagaagcaattcaggccctcattgagcttcataaccatgaccttggagaaaatcaccacctcagagtttccttctcaaaatctacaatctgacttttctgtgaatttttctcctaaaactggaccataatttcagtaaaaccttcagacatagactgaagcagctcaagaccaattttgcctctttcacaaaaataactctttctgagtttgatattcaagtatattttaaaaatcaagggatttttttttttttgtattccccctgcccccgccagtcaaaggtttcttttccctttttaccatggtttctacaaaaataaccttcaggaaaaagaaaatcaggaaaaaaattttttttcaataatcttattccctatattaaattagatttgaagaggattaacgttgttttagtttgggtccagatcagccttatacaacatttctaaactcatttgtacttttaaaaaatttaaacacagacttctaaaattacttgatgtaagtaatttaaatcacttatgaccaagttattaaccttatgaatcagaagtctgacccttgtaggaaattatattcacatataaagtacatcagatctttgccatatattgatggttattatgcataaacacattgagttgtgttggaagcagatttataaacctgcatgttttctttgaatgatttctttttttcactgtaagacactcctttaaataatgcctatctttaactttttaagactatttggaaaaatgcagtgtctcagctgtccccagggaaattaagtggaattcaactaagatctgttaataagatgtcagaataactaataattttattaggaaaaaatcatgttttaaatttcaaaatgacacttatttgtcaagtaatatgatcttggaaaattttaaagaaaaataatcctacttataaactacttttttataattgttttcagaaaaaaagtttacagtcttaaggaaaatattcaggtctatcatatggtttgacagattttttaaaagttatttttggtaaggtcttcttttagaaaaaaattaatctcaagggttttttgtaccactataatctctaatacttactcagaattactgtgtatttacttaatttcttattatgtgccttattatgtgcttaagatacaataggttagagtttaatctaaatatcttgaaagctatattgtgggcttggtaagcattttgttttttctttctctgttttggtaaggatttaaaatttttttcattgcaattttaagtggttttcaataagtaatagtttttatcaaatttttggtgcttggtgcagagacggtgtggggaagggtgaatggttttgggaataattcagtgcacacctgtaggcctctttacattgtgactgataggggttattgcatatcaatttggggctgtagagtgcaatctcagtttcatctttttcacccatcagaatttgtctcaggattacttggtttttctcagtcctcaagcgagaacttgcttttctttgttaatgtgactttcattactgagtacccacgtatttggagtatgagaaggtgggttatttctcatactctgtccctctctttttcattgaatgtaagagtacattttaatgttgcttcagtgattgtataatgtaaaattgtttctttttaataagaaactttgctattatttcttcaattgttgatcagaattttttaaagcagaatttgtcaaaagggtcatttttttgtctaccccttttacacttttcagattctcaaagtgtctcatctcaacttttaaaagaataaaggnnnnnnnnnnnnnnnnnnnnnnnnnnnnnnnnnnnnnnnnnnnnnnnnnnnnnnnnnnnnnnnnnnnnnnnnnnnnnnnnnnnnnnnnnnnnnnnnnnnnnnnnnnnnnnnnnnnnnnnnnnnnnnnnnnnnnnnnnnnnnnnnnnnnnnnnnnnnnnnnnnnnnnnnncatagtgtgaccccttctcttaaaagtaaaaattaagaaaatctcaatctctttgctgtattccagtgattaatttgaacatagggaggtttttacagaagaaattttaccaaaaaatagagactgcaagagatgatacagattgtttaaaaagcagaattcactcaccactgagcaacacttagttggtagaatagaaaggagggatactaagttaagacttttcaaatggatcagtttggctgaatagatagatatactcatgtatgtagttgtgggagtttttagttttttgtttttttacttatgaaataagttttgacctagacacaaggggtatatgaaggaggaaaaaaatttctttgcaaaatctcccaaaacttgcttttttttcccttccacacaggcactattataattttcagtgccatgttaaattggattatttcatttactttaagttaggaattactgtgtaatttattaattcatgattctcataacattcagcataagtgtagcaaagttgctaataacggaaggggatcatagtggtgttgaatgtaactttgaagtagggaatggccttttaagtctgagagagaacatttgaatccttttcagggatttgtgtaggggtgtgtnnnnnnnnnnnnnnnnnnnnnnnnnnnnnagataagtgtatatacataaatacactcttctaaagttgtatatacatatgcacattacatacattttaatttattgacaaaattaaccaaattaagatttggagatgtgggatgttcttgttttaaaatagcatgtttgaaaccatcagtttgtgtctaaaattagctgtagcacatggatgttgtccatattaagctatttgctgtttgaattatagaggtctacagtatttgtgttggcatagtttttgtaaaaaaaagattaaaaaatatcaggatggtggaaaaactagatctgtgtatctctgttttggcatgcatttattcagtatcttctagcaatggtttttctctgttgatctaccgtagtatcctatttttaagtttattttatttttaaggagtattgtcatcacttttcaaggtgtcttgacttctacacaaagtatatatattcaggactttaaaaaatagcagtacacatttaacagtagcgaattacaccaaaatgatttactttgagatttgaataatttgcatagcagtaaaatgtgttttgtgtaacatacaaatagaaaaatgacccagtatcttaattgatacttactggagagtatcagaattacccagcagctcttacagaatgccataaattctttaagactaaatattgaaatcaattatttgaagtaatgtttctgatttactgttaaaagttgctgagctcagtttttggagatatcatttatgcctgcctgttcccttatgacagtgaggccttctttggctccacctagtatgataatcatgggttctgttttagttgatgagaagtggctcctatgaatgcctctgctcaatttctttttattttactttattttatttttaggggtctcgccaactcctgggctcgagtgatttctcctgcttccacctgccccacagtgctggggattacaggcatgagccaccacgcctggctctctgttcttttcaatgtctccgtgccatcagtcagcagtgcttacatgtttagcatattgtcatgcagtttctcttctgttcccacgagatatttttgggcaaaaaattgacaaaagtacatgtgtttttccccacctatcccttagaaaacctaatgtgtactgctatttttaaaaccaaaaagagacagcgtgacgatgcgtaaagcatttttcttagcctttcctttgtcttgatctgttaatgagaacaaaactgccagactcaaaatactctactattgtgctgaaagaaatacaatttagattgcacaaaatttgaaaatataactcagctgtcttttaaaagagttgtgttgttatctacaagactattagcagtcttttttcagagcaaattttaacagctagttgtgagtggtttaaaatatagaaaattattaaaatcttagtttgaggggttttatagtgggagaaaaaacaggaccaaagtttatgtgccttcttcagtagtcttaattgaccttttcttcctatttgagactaaagtagtatcagtattctggttttcaggaaatatgtactatatagttttaaaagaatgttgtcccaccaactattcatccaagcaaagaattgtaactataaataaagtctcagttacacttttgcctttatcacataatattcattgtagagcattgtgcaggtccaagaatagagctgctcaaaatctttgtggtagtttccttagtttttgtaacctgaggcatatgttccagagaacagggatatttgtctggtccagtgaccttggtgatcatagtcataattgaaagatgcctatggcatgcttaaatcagcattgtcaactgatttgttgttgtattattttcacttcttggatctatgtagtagttgtaataacaaatatttaaatagctatttttttgatgccattaaaaaaatcatactctggccttttttcccccttactgttgtttcccagatcttttaaaaattcatcccatatccagaaagtaccagttataaagattgctgaccaagcaaagttttgcatcaaagtgtcacctcattgctctgaccaaagactgactgttgtggttttaactcctctctgtaaagcattttgcattttccccaagctcctttctgaaagaagaaccagtgcagagcggcctttactttcaatttctactgctgaatagactacttagagaaaatgtgagtttcagtgtgaacagaatggattaggatgacgagtttgatgggcattttcagtactgtatctaagaaaaaaaaaatagcacagctaggagcctctgacattgtctggtgttttacgtggtctgttcatcaaaattccccttttcagtttttaagaatgttcgtctaacagaagaaaatgctgtaaatatttgtaacaacattttttttaacaaggccaaaaaagaaaaaaaggtttttgggaacaaatgaacttataaagtggttttatataaaacatcaattgtcttgtatattttggataagcagcagtaccagctttcatttgtaacagtctgtggcattggaaaaaaaggagtctgtgattgttgaagtgaattatgttataaatgcaaagagaagataaaatattaaaaaacatattttctaaatgcgtagtgcatggttaattcaagcttctgtacactacagtatattccattttcgttcagtttgtatatttgctgactattacttgatatctctaatctcttttcctaacaaatatagcattgtagcatgccttttaataaatgtcatgacatctgtactctctta

SEQ ID NO: 1091 - protein, 536 aa, Homo sapien
  Unsure 3359-3527, 4172-4200: Unknown amino acid
TLLPPRTGRGSAEPKLACPRNRPAAAACFLCSRLARQSLLCARLHLGHGWRGSDELLSSGIINGPFTMIVLLLLQVCMAFLEMASEEAAVTMVNYYTPITPHLRSQPVYIQYSNHRELKTDNLPNQARAQAALQAVSAVQSGSLALSGGPSNEGTVLPGQSPVLRIIIENLFYPVTLEVLHQIFSKFGTVLKIITFTKNNQFQALLQYADPVNAHYAKMALDGQNIYNACCTLRIDFSKLISLNVKYNNDKSRDFTRLDTFLLVMASHPLNPLIGCCFWGHRGIISSPYAGAAGFAPAIGFPQATGLSVPAVPGALGPLTITSSAVTGRMAIPGASGIPGNSVLLVTNLNPDLITPHGLFILFGVYGDVHRVKIMFNKKENALVQMADANQAQLAMNHLSGQRLYGKVLRATLSKHQAVQLPREGQEDQGLTKDFSNSPLHRFKKPGSKNFQNIFPPSATLHLSNIPPSVTVDDLKNLFIEAGCSVKAFKFFQKDRKMALIQLGSVEEAIQALIELHNHDLGENHHLRVSFSKSTI

SEQ ID NO: 1092 - DNA, 1578 bp, Homo sapien
acgaacaggccaataaggagggagcagtgcggggtttaaatctgaggctaggctggctcttctcggcgtgctgcggcggaacggctgttggtttctgctggttgtaggtccttggctggtcgggcctccggtgttctgcttctccccgctgagctgctgcctggtgaagaggaagccatggcgctccgagtcaccaggaactcgaaaattaatgctgaaaataaggcgaagatcaacatggcaggcgcaaagcgcgttcctacggcccctgctgcaacctccaagcccggactgaggccaagaacagctcttggggacattggtaacaaagtcagtgaacaactgcaggccaaaatgcctatgaagaaggaagcaaaaccttcagctactggaaaagtcattgataaaaaactaccaaaacctcttgaaaaggtacctatgctggtgccagtgccagtgtctgagccagtgccagagccagaacctgagccagaacctgagcctgttaaagaagaaaaactttcgcctgagcctattttggttgatactgcctctccaagcccaatggaaacatctggatgtgcccctgcagaagaagacctgtgtcaggctttctctgatgtaattcttgcagtaaatgatgtggatgcagaagatggagctgatccaaacctttgtagtgaatatgtgaaagatatttatgcttatctgagacaacttgaggaagagcaagcagtcagaccaaaatacctactgggtcgggaagtcactggaaacatgagagccatcctaattgactggctagtacaggttcaaatgaaattcaggttgttgcaggagaccatgtacatgactgtctccattattgatcggttcatgcagaataattgtgtgcccaagaagatgctgcagctggttggtgtcactgccatgtttattgcaagcaaatatgaagaaatgtaccctccagaaattggtgactttgcttttgtgactgacaacacttatactaagcaccaaatcagacagatggaaatgaagattctaagagctttaaactttggtctgggtcggcctctacctttgcacttccttcggagagcatctaagattggagaggttgatgtcgagcaacatactttggccaaatacctgatggaactaactatgttggactatgacatggtgcactttcctccttctcaaattgcagcaggagctttttgcttagcactgaaaattctggataatggtgaatggacaccaactctacaacattacctgtcatatactgaagaatctcttcttccagttatgcagcacctggctaagaatgtagtcatggtaaatcaaggacttacaaagcacatgactgtcaagaacaagtatgccacatcgaagcatgctaagatcagcactctaccacagctgaattctgcactagttcaagatttagccaaggctgtggcaaaggtgtaacttgtaaacttgagttggagtactatatttacaaataaaattggcaccatgtgccatctgtaaaaaaaaaaaaaaaaaaaaaaaaaaaaaaaaaaaaaa

SEQ ID NO: 1093 - protein, 433 aa, Homo sapien
MALRVTRNSKINAENKAKINMAGAKRVPTAPAATSKPGLRPRTALGDIGNKVSEQLQAKMPMKKEAKPSATGKVIDKKLPKPLEKVPMLVPVPVSEPVPEPEPEPEPEPVKEEKLSPEPILVDTASPSPMETSGCAPAEEDLCQAFSDVILAVNDVDAEDGADPNLCSEYVKDIYAYLRQLEEEQAVRPKYLLGREVTGNMRAILIDWLVQVQMKFRLLQETMYMTVSIIDRFMQNNCVPKKMLQLVGVTAMFIASKYEEMYPPEIGDFAFVTDNTYTKHQIRQMEMKILRALNFGLGRPLPLHFLRRASKIGEVDVEQHTLAKYLMELTMLDYDMVHFPPSQIAAGAFCLALKILDNGEWTPTLQHYLSYTEESLLPVMQHLAKNVVMVNQGLTKHMTVKNKYATSKHAKISTLPQLNSALVQDLAKAVAKV

SEQ ID NO: 1094 - DNA, 1601 bp, Homo sapien
ggaaacatgcagcatgtagtaatttatgacagcttctttcacttagcatgaggttttcaaagttcattgatgtggtagcatttgtcagtactctgtgcctttttatggctgaataatattttatcatatggatttaccacattttatcattttatttatccatcatcagttgattgacatttgagttgcttctactttttgagtattatcaataattctgttatgaacattcttgtacaattttttggtagacatttatcttcatatttcttggatatatacctaggagcagaattgctgcgtcagatggtaatgctgtttaaccttttcaggaactgtcagactgttctgaagtgggtacattattttacattccaaccagcagtgtatgagaattccagtttccccacatcctcatcaacagttgttattgtctgtcttttttattatattcatctgtaatgtgaagtgtttatctcattgtggttttgatttacatttccctgatggttgatgattttcaacatcttttcatatacttattagtcattatgtatcttctttggagaatgtctgttcagatcctttacctactttataattggtttatctttttaatattgaactgtaatagtttttaaaaaatatatcctaaatacaagtctcttatcagataatatgatttgcagatattttctgtcattctatgtactgtcttttcacattcttgatgatagacttttcagcccaaatgtttttaacttgatggaatacaatttattttttcttttgttgcttgtgctttcagtcatatttgtgaaaactttgcttatcccacattacaaagatttactatttctaagtgatttataattttaccacctacctttaggtctctgatccattttgagttaatttttatgtgcgaggagggagtctaacttgattcttttacatgtggatatttagttgtcccaggaccatttgttgaattaagtgcccagaacaagtacatctatatatagagaaagtagattagtggttgtcagagactgtaagaagtggggaattggagagtgactgcccataggtacaggcatgctttttggcattatgaaaatattctggaattaggtagtggtgatggttgcagaacttttggaatatggtaaaagacactgaaatatatgcttaaaaatggtgatttttgtgatatatgaattatactatagaactaataataacagtaataaagcaaggtgtctttccacatctccatgccttgtattttcattaaaaaaaaaaaaaaaaaagcatttcagggccaggctcagtggtttactcttgtaatcccagcacttttggaggcctaggtgggaggatcacttgaggccagaagttcaaaaccagcctgagcaacatagcaagaccttgtctccatgaaaaataaaaaattagccagaaatggtgatgtgtgcctagagttccaactacttggaaagctgaggcaagaggatcgcttgagcctaggagttcaaggttgcagtgatctataatcaccactgcactccagcctgggtgacagaacaagaccctgtctc

SEQ ID NO: 1095 - DNA, 6542 bp, Homo sapien
gaaacatgtcattaagtttcttaaatgacgaagaggccaggaagatccttcaggtgctggaaaggaatgaggagttacagagggccgagaaggacaggatcagcaaacttcagaagacaaagagggatatcagatggcttcagggagtgactggtgaatggtttgaagaaattcaaagaaaaaagttttgcaatgaaacagatgttagccaaatgttaaaacaaccacttacatacaggctaagtaaggagatggcaaaaaatgatccgatagaattacctacatcaagatctaaaaatgtaactaatcaaaaaaagccgacacctttttcttcccggatgagcttcagatcgtcatttgcttccctgttctcattcaggaaatctggaaaggagacttcaaagcttccatcactgggacagaaaggatgtgatggccatgcaggacctcctatgcctgtgaggggagctgctgtgcaggcaaaaatatacaattcacctctggaaaatcatctagttgacagtacatttgtcccaaagccagcagtcatgagggaggagagtggcatgcctccaccgtgggatgcttcactgctggagaatgagtttttccaagttttagatgacttggatagcaaattggctcaggaacagtctgcaagctcagtgaataccagaacacccctcaactatggatcaagaacacagttcggtcacttttattccagtggtaacagacatggtaatatcacagaaaggcacaaaaaacactataatgaaacttccaatatgtctatctatgacatcctaagaccaggaactcctagggaaggttttaaaaccttttctcctaggacaagcacaatttatgatatgtataggacaagggagcccagagtctttaaagaagattatgtgcaaaagaatacttttggcagtacttcgctgtgttttgacagcaggcaacggtcggccttaccagccacagggcatttcacagcaagaagcttacattttccagccacaactcagagcaagagtgggtttataccaccaaggcaccagcagagtccaaagagaactcctttatcatccatcatatggaacagatcagattcctctagagacagggagaaccaggaagagttcctgagggcaccatcaccaatggaaattgatcccgctgacaagtatgtgtatcccaggggttttcaggagaataagagatatgaatcgtaccattcacagaatgtttaccaacgtgttagtttaaatgctcccatggagaatgcaatgagtcccgacacttttgagaactcagagaacatgccattctaccatcaaagcaacacatttaccagatctttcttcagcaatacctttggacgaagcggagaacagaggagatttggacaaggtcctttttggggccaagagaaaggacattctttctggtctgactttcatcgaagcaggaaatcattcagttcttctgacagagactttgaaatgatttccatggaagcaaatagtgtatcagccattcatggccataatgtttcttctgaacactgggaatcattttcttctggttatggaacagatgtttccagaggccaagaagagccacatccttggcagtttgattttcagagatccacactggatagcatggtggtatcacatggtaatgagacccagttgactcctcattttggcacaccaaatgtttgctccatgactggttcaagctatcacgtcaaatctagtgagttggtaagtcaacaggacagttctcctgtagaagtacatataaacaaagaagcttcctcatttggaattgctcagactctagcatcctcattcaaaacttccttttcccagatttctgatgacagaaggaatcctcagagtcccaacttgcagaatcccacagtcactttgcagaaaatttttccaaataagcctgcctctcatccaatgagaagccatacagaagtcactgtgaccaacagcaattcagttgactctctgcctcttgccaaaagccagcccaatatcttggtcacagaagtaaataatgagaaagacttaaatgaatctatttcagaagaagacaaacagctaagcaagatggaccagacaaacaaggcaggtgaaataccccaacctgtttcacagacagggatctcaaactctttacctgattttcaaaatcccttatcccaggactcagccaagagcaacgggtttggttttaatgcatctaccataataagttcaaaaaagtcacccagagtcttttccaggaaagatacctccaaaatgtatataccgcacacagataaatccaatgacattaaacaagataagaggtttactgaaaacagaaaacttggctcaacagcttcccttcctttcattcaggaacacagaacaccaccatctttccccaggacagaccaaggttgtcaccaggaattaactgtaaataatgaagatatttcaagaattattacaaataaccactggagctctgcactgactgatactcaaaatgcacaatactcaaaatgcaagttaactcctggccacaagacctcgtgtgattctttagatctgtcatcagctgcactaccagattcctcaccatcaaagaattcttcccttgatgctcctgtggttccatctactacagtgttctccaggagaagtccttcagacaaagatccatcgctaggagaaagagaagaaaaagacaatgctgggaagaaccaaaagaatcagtttattgtaagccactcagaaaaccaagagagaaatgatagtcctgtgcctacacatgatgaagtggttgatgtcaaatgccattcacactctccttttaggaatgaaagaggaaaaggaaaaataaggcatcatatatcctgtattgaaaagttaagcaaaacagaaagtatatcagtacccaccagtgatcacaggagcctcattgaagcaaatcaaagcaattccaaagtttctgaacttgacacaatttattgtaccttgccaagaaaatcaagcagttttctcatacatggcaggcagtcaggaagtaaaataatggctgcttcattgaggaatgggccacctcccttccaaatcaaaaataatgtggaagatgcaatggggaactatatgttaaacaaatttagtcccagttctcctgagtcagcgaatgaatgttccaaagtcctttcagactcagccctggaagcacctgaagccacagagagaatgacaaatgtaaaaagcagtggatctacttccgttagaaaaggaccacttccattcctcatcaacagggctatgtcatgtccctcaggggagccacatgcctcaactggaagagaaggaagaaaaaagccattgacctcaggcatggatgcttctgagctaacaccaagggcttgggagagaatcattagccctgtggaaagtgactcatctgttagagattgttctttaaccaaaagacaacaccaaaaggaaaacttccaagaatacactgagaaagagggtaaaatggctgcctccaggagaagtgtatttgctctttcaaatgaagaccctttacctttttgctcagacttgtcaggaaaagaacgtgggaaaacattacataaagttaagacgactagtacgttttctgtttctggtgatgaagataatgtaaaatgtctggaggtggtctcaatatattacactctaccgaggaaacccagcaaaaaattctgtaacctccttcaacagtatacacaaaatactaatttacttatagaatcacctcaagtggagactgaaacatttcctaacgctttagaaaaagacaaacagaattattctacacgagagcagtcaggaacaccttcatgtgaaaatctaaagatgtccgtcaactctgatcagacgctcaccactgaaaatatgactgccttccgattatcaaatagggggcccctagctcctacattacaggaaatggcttctgttgaggcagctgtttctcttcctgaagaggaatctaaagctagagagattttttcagataatttagctaaaacacctctaggtgattcagaaaacaagaaggaaagaggcaaaaagttgcaaagtgaaaccctgcatacttcattgatgcttcagagaaaaaatgtatccgaagaaaaatctgaaaattgtcaacaatccattaattcaagtaacagtggtccctctagtcttccagctctttcagaagttaatattggaaattcccaaactagaagaagttcttgggagtgtacagggagtggtagagccattccatttactggaagtggcaagtgtccccagaaagatcacacatccacagctgtaggtgatggctccagtggatcacagcctagggaaggcagaggggacattggaaccaactgccaaaaaatgactaataaaacactttctcactcagagagtcaagtctttgcccttactccagcattgcataaactacagcttggtgaggagactcagtcagatgaaccaaacttagagagtctgcagtctgaaccaagagaattacctcaaagaagtcaggaggcaaatatgacagagagcaggaaggctgaagatgaaatgcagaagtcagcttgggatcaaccttcacttcctgaaggaaacaaaaataaaaccaacttggatgacctagtaaagggggaaaatagatcttcagttaaacacagattggcagccatgtctaaagccagcagaaaattcccagctaaagatgtaagccccagaagacatgtagctactatcttcccccaaagtggaagcagatctggctttgaccatttatctcttggcacagtggagtgcaacccactgttccctgagcctactccaaaatctgcagagtccattggcgaaagcaggttgagtgagaacagaaagcatgtgaagaaatccgagaaccttctccccattactgtactacccaacagagaaccttctacacacgtcagcaaccagaagtctaacagcatttcacaacgacatcagaatgagtttaaaaacgtctcagaatcaccatcaaagcatgagaattctaaagacgtcacagcagctcagaatttagtaagagaatcaggagccccatcacccatcacattcaccagcctcagggaagcagaattctctgacaatcagaggaggctgagccctccttttccactggagcctgcacagaaatctagagtaagcagtccactggccagttttctgcagcaacaaaggagtgcttcatctctggagtgggaacctgagccacacctctatcgttcaaagagtttaaaaagcattaatgttcatggcgatctactacgaaaaagccatcctccaaaagtcagggagcgccatttttctgaaagcacttctattgacaatgccctgagtcgactgacccttgggaatgaattctctgtcaacaatgggtacagtcgaagattcagatctttttctgaactcccctcctgtgatggaaatgaaagttgggcttatcgcagcgggacaaaaacaggtcccaggtctgcaatatctatatacagacctatcgactatgggatctttgggaaagaacaacagttagctttcttagaaaatgtaaagaggtcacttacacaaggaagattatggaaaccaagttttcttaagaaccctggcttcctaaaagatgatttgaggaaccctcccaacccctcagagtcattaagctcaaattctcccagtagtcaggtgccagaagatggcttatctccaagtgaaccgcttaatatctatgaggatgacccagtggactcagattgtgacacagacacaaccacagatgatgaatactacctggatgaaaatgacaaagagtcagaactgtgaggctttttcaataaaatgctttacttttttcaccaaaagcttataatggaactaaggtgtacatgtgcatgtgcatggaaggataaaagatctagtctgggcagtgtctgctctgaaatgtcccacatctccttttttttcctccacaccctatatagacacttcctgaatgctagaacaatgaattcttgttttgagagagtctctgctattttctatctctgtaaatgttcttagcctgcctttccaccactcccacttaatccctgattcactgtctgatttgggctttctgctttacttccctcctaacatttttcatctttaattgtgatttacaaccctaatatcccaggcacatacaaaacttatgaattacccagcacaactgtgaaactctgtattgcttcttccggtccacaccctatactcatgacattaaataaaaggtagggatgataacagtggggtaaatattatcatcctgtttgactcatgaacatttaggaagtttaaggtggtgatcttctctttcaaacaaagataaaggaatttattttttaacctgagaaactgattgcaaaaagg

SEQ ID NO: 1096 - DNA, 1452 bp, Homo sapien
gacagacctaatgctctattaagttcacctgcaacagaaacagttcatcattcccctgcatattcttttcctgctgctatccagagaaatcagcctcagcgccctgaaagcttccttttccgagcaggtgtcagggcagaaaccaacaaaggtcatgcttcaccccttcctccatctgctgcacctaccactgattctacagattccataacaggacagaattcaagacagagagaagaagagctggaattaatagaccaactgcgtaaacatattgagtaccggttgaaagtgtctctaccttgtgatctcggagcagctctaactgacggtgttgttctttgccatttggccaatcatgtgcgacctcgatctgtcccaagcattcatgttccctcaccagctgtacctaaattaacaatggcgaaatgcaggcgaaatgtggaaaatttcctagaagcttgcagaaaaattggtgtacctcaggagcaattatgtttgcctctccacattttagaagagaaaggtttgagccaggttgcagtgacggtccaggctctcctggaacttgccccacccaagcaacagcagcaccagttatctgctgtttgaggatccccaggacggtgggcactggcctggccaaaacaaggaacaggacaccgtgattgctgctgccagctgtctgcttaaacaaagctcttgtgtgttctcagaagggaccgttcccatgattcctaacaggaatattttgcttcatttctccattttaggggaggttatttccatttccattgaatttttttacgaagacaccattggttttctcagatgaaacttctcttactgaaaacccagcacctaacttggctgtgttttcctggagagcaggcgtgtttcacgtgccagaaagcacatcttctgtgttaggcacaagcatgctgtgccattgtttttacctggtctcaagacaactggtctgctggtttctaaacttggttgttcattagactctcctggagtatttgttaaaatacagattcacattcagtagagctggggtaaggcctaggaatctgcattttcaacaaccattgcacatgtttttgtttttgttggagaattgcttgaacccaggaggcggaggttgtggtgagccgagatcgtgccattgcaccccagcctgggcaacaaaagcgaaattccatctcaaaaaaagaaaacgcgccccatctcgctccaccacaagcgcctttatatactcaatgatgggtggaggaaaagggcccaagggctcacaccgcacaggagcctttactcaagtttcagctagttttccttcccctgcattttgaactccttttagttgttggtgatatcctttggtgttcactgcctttgtaaaacaagtaaataaagtaagcggaagataaaaaaaaaaaaaaaaaaaaa

SEQ ID NO: 1097 - DNA, 1471 bp, Homo sapien
ggcctcatgttgcgccgcctgcgcaagggcaacctgcccatccgctccatcatccccaaccacgccgacaaggagcgcttcgccacgcgctgcaaggcggccaccgtgctgctctacgacgaggccacggccgagtggcagcccgagcccggcgctcccgcctccgtgctcggcctgctcctacagaagctgcgcgacgacggctgccaggcctactacctccaaggtggtttcaacaagtttcaaacagagtactctgagcactgcgagaccaacgtggacagctcttcctcgccgagcagctcgccacccacctcagtgctgggcctggggggcctgcgcatcagctctgactgctccgacggcgagtcggaccgagagctgcccagcagtgccaccgagtcagacggcagccctgtgccatccagccaaccagccttccctgtccagatcctgccctacctctacctcggctgcgccaaggactccaccaacctggacgtgctcggcaagtatggcatcaagtatatcctcaatgtcacacccaacctacccaacgccttcgagcacggcggcgagttcacctacaagcagatccccatctctgaccactggagccagaacctctcccagttcttccctgaggccatcagcttcattgacgaagcccgctccaagaagtgtggtgtcctggtgcactgcctggcaggcatcagccgctcagtgacggtcactgtggcctatctgatgcagaagatgaacctgtcactcaacgacgcctacgactttgtcaagaggaaaaagtccaacatctcgcccaacttcaacttcatggggcagctgctggactttgagcggacgctggggctaagcagcccgtgcgacaaccacgcgtcgagtgagcagctctacttttccacgcccaccaaccacaacctgttcccactcaatacgctggagtccacgtgaggcctggtgcacggggggcatggcaccaggccctgctcggcgcgccacagggctaggtgggagagcccaagcccgccacctctggcctgaggaacccccagatgtcacctgtgcccagaggcccaggctgatcggtgtcggagacgcccctcaccatccttggggcagggcccagcaggcaaggtctcccactgcagggcttgctggagaggcctcggctcttggacacgtggctttgggcgtccaccagggcctcatcctgtccaggacgctcctttctgctgacagcccagccagtttggctgttttttaaagacacatccacggacctgagtttactttttacttttggcaggtaaatccaagctccctggagcacaaagagtgtttgagctcttcttgatttttctttttttttttttttttttaacaaaaagtgttattttcaggctacatgcaacagtggattgtataacccagtatttcatccctttcctgatcc

SEQ ID NO: 1098 - protein, 322 aa, Homo sapien
GLMLRRLRKGNLPIRSIIPNHADKERFATRCKAATVLLYDEATAEWQPEPGAPASVLGLLLQKLRDDGCQAYYLQGGFNKFQTEYSEHCETNVDSSSSPSSSPPTSVLGLGGLRISSDCSDGESDRELPSSATESDGSPVPSSQPAFPVQILPYLYLGCAKDSTNLDVLGKYGIKYILNVTPNLPNAFEHGGEFTYKQIPISDHWSQNLSQFFPEAISFIDEARSKKCGVLVHCLAGISRSVTVTVAYLMQKMNLSLNDAYDFVKRKKSNISPNFNFMGQLLDFERTLGLSSPCDNHASSEQLYFSTPTNHNLFPLNTLEST

SEQ ID NO: 1099 - DNA, 5440 bp, Homo sapien
gagggaacgagcaagggaaggaaagcggggaaaggaggaaggaaacgaacgagggggagggaggtccctgttttggaggagctaggagcgttgccggcccctgaagtggagcgagagggaggtgcttcgccgtttctcctgccaggggaggtcccggcttcccgtggaggctccggaccaagccccttcagcttctccctccggatcgatgtgctgctgttaacccgtgaggaggcggcggcggcggcagcggcagcggaagatggtgttgctgagagtgttaattctgctcctctcctgggcggcggggatgggaggtcagtatgggaatcctttaaataaatatatcagacattatgaaggattatcttacaatgtggattcattacaccaaaaacaccagcgtgccaaaagagcagtctcacatgaagaccaatttttacgtctagatttccatgcccatggaagacatttcaacctacgaatgaagagggacacttcccttttcagtgatgaatttaaagtagaaacatcaaataaagtacttgattatgatacctctcatatttacactggacatatttatggtgaagaaggaagttttagccatgggtctgttattgatggaagatttgaaggattcatccagactcgtggtggcacattttatgttgagccagcagagagatatattaaagaccgaactctgccatttcactctgtcatttatcatgaagatgatattaactatccccataaatacggtcctcaggggggctgtgcagatcattcagtatttgaaagaatgaggaaataccagatgactggtgtagaggaagtaacacagatacctcaagaagaacatgctgctaatggtccagaacttctgaggaaaaaacgtacaacttcagctgaaaaaaatacttgtcagctttatattcagactgatcatttgttctttaaatattacggaacacgagaagctgtgattgcccagatatccagtcatgttaaagcgattgatacaatttaccagaccacagacttctccggaatccgtaacatcagtttcatggtgaaacgcataagaatcaatacaactgctgatgagaaggaccctacaaatcctttccgtttcccaaatattggtgtggagaagtttctggaattgaattctgagcagaatcatgatgactactgtttggcctatgtcttcacagaccgagattttgatgatggcgtacttggtctggcttgggttggagcaccttcaggaagctctggaggaatatgtgaaaaaagtaaactctattcagatggtaagaagaagtccttaaacactggaattattactgttcagaactatgggtctcatgtacctcccaaagtctctcacattacttttgctcacgaagttggacataactttggatccccacatgattctggaacagagtgcacaccaggagaatctaagaatttgggtcaaaaagaaaatggcaattacatcatgtatgcaagagcaacatctggggacaaacttaacaacaataaattctcactctgtagtattagaaatataagccaagttcttgagaagaagagaaacaactgttttgttgaatctggccaacctatttgtggaaatggaatggtagaacaaggtgaagaatgtgattgtggctatagtgaccagtgtaaagatgaatgctgcttcgatgcaaatcaaccagagggaagaaaatgcaaactgaaacctgggaaacagtgcagtccaagtcaaggtccttgttgtacagcacagtgtgcattcaagtcaaagtctgagaagtgtcgggatgattcagactgtgcaagggaaggaatatgtaatggcttcacagctctctgcccagcatctgaccctaaaccaaacttcacagactgtaataggcatacacaagtgtgcattaatgggcaatgtgcaggttctatctgtgagaaatatggcttagaggagtgtacgtgtgccagttctgatggcaaagatgataaagaattatgccatgtatgctgtatgaagaaaatggacccatcaacttgtgccagtacagggtctgtgcagtggagtaggcacttcagtggtcgaaccatcaccctgcaacctggatccccttgcaacgattttagaggttactgtgatgttttcatgcggtgcagattagtagatgctgatggtcctctagctaggcttaaaaaagcaatttttagtccagagctctatgaaaacattgctgaatggattgtggctcattggtgggcagtattacttatgggaattgctctgatcatgctaatggctggatttattaagatatgcagtgttcatactccaagtagtaatccaaagttgcctcctcctaaaccacttccaggcactttaaagaggaggagacctccacagcccattcagcaaccccagcgtcagcggccccgagagagttatcaaatgggacacatgagacgctaactgcagcttttgccttggttcttcctagtgcctacaatgggaaaacttcactccaaagagaaacctattaagtcatcatctccaaactaaaccctcacaagtaacagttgaagaaaaaatggcaagagatcatatcctcagaccaggtggaattacttaaattttaaagcctgaaaattccaatttgggggtgggaggtggaaaaggaacccaattttcttatgaacagatatttttaacttaatggcacaaagtcttagaatattattatgtgccccgtgttccctgttcttcgttgctgcattttcttcacttgcaggcaaacttggctctcaataaacttttaccacaaattgaaataaatatatttttttcaactgccaatcaaggctaggaggctcgaccacctcaacattggagacatcacttgccaatgtacataccttgttatatgcagacatgtatttcttacgtacactgtacttctgtgtgcaattgtaaacagaaattgcaatatggatgtttctttgtattataaaatttttccgctcttaattaaaaattactgtttaattgacatactcaggataacagagaatggtggtattcagtggtccaggattctgtaatgctttacacaggcagttttgaaatgaaaatcaatttacctttctgttacgatggagttggttttgatactcattttttctttatcacatggctgctacgggcacaagtgactatactgaagaacacagttaagtgttgtgcaaactggacatagcagcacatactacttcagagttcatgatgtagatgtctggtttctgcttacgtcttttaaactttctaattcaattccatttttcaattaataggtgaaattttattcatgctttgatagaaattatgtcaatgaaatgattctttttatttgtagcctacttatttgtgtttttcatatatctgaaatatgctaattatgttttctgtctgatatggaaaagaaaagctgtgtctttatcaaaatatttaaacggttttttcagcatatcatcactgatcattggtaaccactaaagatgagtaatttgcttaagtagtagttaaaattgtagataggccttctgacattttttttcctaaaatttttaacagcattgaaggtgaaacagcacaatgtcccattccaaatttatttttgaaacagatgtaaataattggcattttaaagagaaagcaaaaacatttaatgtattaacaggcttattgctatgcaggaaatagaaggggcattacaaaaattgaagcttgtgacatatttattgcttctgttttccaactacatcacttcaactagaagtaaagctatgattttcctgacttcacataggaggcaaatttagagaaagttgtaaagatttctatgttttgggttttttttttcccttttgtagtttttaagagtataaggtttacacaatcattctcataatgtgacgcaagccagcaaggccaaaaatgctagagaaaataacgggatctcttccttgtaaacttgtacagtatgtggtgactttttcaaaatacagctttttgtacatgatttagagacaaattttgtacatgaaaccccagatagactataaataattctaaacaaacaagtaggtagatatgtatgtaattgcttttaaatcatttaaatgcctttgtttttggactgtgcaaaggttggaagtgggtttgcatttctaaaatggtgacttttattctgcaagagttcttagtaacttcttgagtgtggtagactttggaacatgtaaattttttgcttgtaatgttatcctgtggtaggattttggcaggtacacacactgccctattttattttgagtctaagttaaatgttttctgaaaagagatacatgcactgaactctttccactgcgaatcaagatgtggtaatataaaaggatcaagacaaatgagatctaatactactgtcagttttaatgtccactgtgttttatacagtatctttttttgttcactttggaaatttttactaaaaattgcaaaaaataaagtattgtgcaaagatgtaaggttttttgaaacttgaaatgcattaataaatagacgattaaatcaacttgaaggttctatactctttgaactctgagaactatcacaagaagcttcccacaaggcagtgttttcttacagttgtctcttcctacaaaagtatagattatctttattcttaatactttggaatccatgtagaaaatttccagttagatactctgcgtacacacaataaacctttttaaaacacccaactaatctcaactgcattacattgtttctaatcaatattcagtgcttgtcttggtggaagaggtgagtcattttgaaaacttatggtcttgtttttatgtgtttttcaaagttttgaatgctaagtacctcatttattttaaaaagcctagtttaatgataagtttgtttaaaattttgagccatcatttttctcttcatagcaaataaggagagaattgacatttcagtgttacctagaaaaggaattgtaagcccagaataattccctgcatgaggtaatctgcttcaaattctttttttagtcaaggttagctataagtaatccttgttaaatgagtaaatatgtaatactttgtgaattactttgttaatttaggagcatcaaatgtatattatgtttagttatttatgaaactctcaatattgattgatttgggtaattataaattagttatttttacttgtaattgaatgcttaaattctgtttacagtccgtcctctctccctccatccctccctccccagttttataaattcaggtaccaattcacaaacaaaatcagaaataaaataaatttattgac

SEQ ID NO: 1100 - protein, 748 aa, Homo sapien
MVLLRVLILLLSWAAGMGGQYGNPLNKYIRHYEGLSYNVDSLHQKHQRAKRAVSHEDQFLRLDFHAHGRHFNLRMKRDTSLFSDEFKVETSNKVLDYDTSHIYTGHIYGEEGSFSHGSVIDGRFEGFIQTRGGTFYVEPAERYIKDRTLPFHSVIYHEDDINYPHKYGPQGGCADHSVFERMRKYQMTGVEEVTQIPQEEHAANGPELLRKKRTTSAEKNTCQLYIQTDHLFFKYYGTREAVIAQISSHVKAIDTIYQTTDFSGIRNISFMVKRIRINTTADEKDPTNPFRFPNIGVEKFLELNSEQNHDDYCLAYVFTDRDFDDGVLGLAWVGAPSGSSGGICEKSKLYSDGKKKSLNTGIITVQNYGSHVPPKVSHITFAHEVGHNFGSPHDSGTECTPGESKNLGQKENGNYIMYARATSGDKLNNNKFSLCSIRNISQVLEKKRNNCFVESGQPICGNGMVEQGEECDCGYSDQCKDECCFDANQPEGRKCKLKPGKQCSPSQGPCCTAQCAFKSKSEKCRDDSDCAREGICNGFTALCPASDPKPNFTDCNRHTQVCINGQCAGSICEKYGLEECTCASSDGKDDKELCHVCCMKKMDPSTCASTGSVQWSRHFSGRTITLQPGSPCNDFRGYCDVFMRCRLVDADGPLARLKKAIFSPELYENIAEWIVAHWWAVLLMGIALIMLMAGFIKICSVHTPSSNPKLPPPKPLPGTLKRRRPPQPIQQPQRQRPRESYQMGHMRR

SEQ ID NO: 1101 - DNA, 1990 bp, Homo sapien
tttcatcacttaaaagaaccatgtctattaaagaatctagctcactggagtgcattgccattccaaaaaagaagatgaatttaaaagataaaagccatgaaggtgttgcttgtgtccagaaagaaaaatcagtagttaaaacctggttctgtgaatgcaatcagcgattcccaagtgaagatgcagtagaaaagcatgttttctcagcaaacacaatgggttataaatgtgtggtctgtggaaaggtatgtgatgattcaggggtcattcgtttacacatgagccggattcacggaggggcacatttaaataactttcttttctggtgtcggacatgcaaaaaggagttaacaaggaaagatactatcatggcacatgtgactgaatttcataatggacacagatatttttatgagatggatgaggtagaaggtgaaactttgccatcatcctctacaacattggataatttgactgctaacaagccttcatcagctattactgttattgatcattccccggcaaatagttctccgaggggtaaatggcaatgccggatttgtgaagatatgtttgattcccaggaatatgtaaaacagcactgcatgtctttggcaagccacaagtttcatagatacagctgtgctcactgcagaaagccttttcataagatagaaacattgtaccgacattgccaagatgagcatgacaatgagataaagattaaatacttctgtgggctttgtgatcttatctttaatgtggaagaagcatttctgagtcattatgaggagcaccacagcatagattatgtatttgtgtcagaaaaaactgaaacttcaattaaaaccgaagatgattttccagtaatagagaccagtaaccagttaacttgtggttgccgtgagagttacatctgtaaagtcaacagaaaagaagattatagcagatgtctccaaatcatgctggataaaggaaaactgtggtttcgctgcagtttatgttcggcaacagcacagaatttaaccgacatgaacactcatatccatcaagtgcacaaagaaaagagtgatgaggaggagcagcagtatgtaatcaagtgtggcacctgcaccaaagcatttcatgatcctgagagtgcacagcagcatttccatagaaaacattgcttcttacagaaacccagtgtggctcattttggatctgaaaaatcaaacctgtacaagtttactgctagtgcctcacatacagagagaaaactgaaacaggcaataaactattcaaaaagtttagacatggagaaaggagttgagaatgacctaagctatcagaatatagaggaagaaattgttgagcttccagatttggattacctgcgaaccatgactcatatagtctttgtagattttgataactggtcaaacttttttggtcatctaccagggcatctaaaccaaggaacatttatttggggctttcaaggtacggttaataagaaaaacaaaagaaaactttttcccacctcttagaatatagtcagtttaaaaggctcctcttaaaccttcctggatagaacataggaacataattggaatattgttcttttgtattatagttactctgctagaatcgttttctttacatgcctctgtggtaaatgttagctctatctggtgactcaaagtttatggatcttttggccgggcgcggtggctcacgtctgtaatcccagaactttggaaggctgaggcggacggatcacgaggtcagaagatcgagaccatcctggctaacatggtgaaaccccgtctctactaaaaagaaaaaaaaaatacaaaaaattagctgggcgtggtggcgggcccctgtagtcccagctccttgggaggctgaggcaggagaatggtgtgaacccaggaggcgaagcttgcagtgagctgagatcgcaccactgctctccagcctgggcaacagagtgagactctgtctt

SEQ ID NO: 1102 - DNA, 4175 bp, Homo sapien
  Unsure 3094-3448: Unknown base
gcttgtcttagccatgagtgacggtgcccagccattcgtgacgtgtttatacaaatataactttagcaaatatttagcataactatcaaaattacaaatcatattaaatttgtataaatgtatgcaatttttggaacacgcatatcaacaacatacccataaatataactgagatgagatctaatgtcacctcacttgacagtgccctcccatgcagtatcgccacatttgacaatgcctgcccatttaatctaccaaataaatcgaatcacttaatacctctacaagatgagagatacattctttagactccccaagggatgcagctgaaaaaaatcccaaagttagttttaagccaaaaagacttgatttaggattttgacactggagaaacccatcaaagatgtcaagtttgaaaacacttgatcaaaacagaatcacaggtcactattaaaagagtattaatttaaccagagacttccaaagcaatacagaaacttacatggatataaaaaccctaacccttttaaaggtcagatttgctaagtgatcaaaaggggtacttgaattgaatcgacacaggaagagtgtgtacagggttatgagtgtaggcaggtggttactttggtcatatctccatttgccacctgattacacatgagaatggcatctttactcaccagaaagccagtattataggaggtgtaggaggcattcttggacttgagacaagaacattgttgtgtagaaatttcattgactgtgttaaaattattctccatgggctggagaacacataacatggcctttagaatgagacgggcattgattggatgcaaggtctccacacttactagctgtgtgacattggacagagtgcttcatcattccgagactcagtttttaaaggaaaaacaactaactaccttgcaagcttgctagcaggtttaagtgtaataatgtgtgggaatgactgcaccgtgactaacatgcagtgacagcttaattaatgttaacccttatcattatcatataagaatgtgagttacataagagaggagtcctgtcagttcgttctctgctgtgtccccaagaccatgaatcatggctggcatgtagtaggcatttaataatatatgttcaacaagtatttggcagtcttggagggcagaaaaggaggtggggaagatttttaaataacattttttaaaaagtcacattgtcctacaataccgatttttcttgcatatttaggaaattgagggtttttttctaaaacatgcggacatatgggaaataggatgcaacatttgcactaatgtttcagacacagttagaggtttccaagagattttgcgctggggaggctgcttgctacaagctcccaaagctctgggaggacatagtattcattcctccctcagcagaagcggtgaggcaagaagctctggggagcacccagcgttggacttttagcatagtgtgtcaggtcttcatagtttgggcccagggcacagagaagtcacagctctccggcatcctgtgacctttaccctctttgccaagggaaaatgtggcccaccaaagcaagaaacttgagggcatgggtcaccccagccctggcatctgcccagagcccgagaaggaaggaacaatgatcctccagctacctcacggggctggcacaggtgaccactgccctggcatcacccagctgtgtccggcagcctgaaccccatctgtggggatgcgaggaggaaaatacaaaagtccttaggtgaacactgagaaggcagatgcagcagaaacctccaggccagaactacccagtcttggacctatggtggagatagagcatagctggcgatcatgtgtacttacactctaaggtcacctggttgcactatggcctcatctgtggctctgaaaatgaagatttggaaggagatcatcacagctaatgtttaacaagcccctcctgtgtgccaaatcattcacccctcaccacaaccgaatgagctaaggattctcattatatatagtttatggagagggaagtgcagacataaagaggtgaattatcttacccagatcacacagctgataagtggtggaggcagaatagaatctaaacagtgtggctccggagcccacatgcattgattcgacaagtgtttattgagcacctgccacggacaaggccttgtgtgattaaatagggttataattagtaatataaaaatgagaaatcactaatgctttttagacttaacattttgtttttttgtaggtttcaggcacagaactgtatatccaataatagtgaaatggatcccactaattatgacagaaatgatgatacatttaaatgacttggatgttttataggtatgatctcgtgaaatcttgagagaaactgaatgacgaatgaaactattgttcctgtttcacacagaagaaaactgaggttaaaaggggtaaagtaattttgcatggcatgaagtagaaattcaaagtacaggaatttgaacttggttctgtccttttctgaagcccttgaccactatagactcaaacatcaccttgtttttccactcattcaacacttttttttttaaattatctaataggttggcactcatcatgagcccctgttctcattctgcaaatggtgaagctctctattgtcctgaccccacagttcctgtcccatgaccagggccagctcaccaaggagctgcagcagcatgtaaagtcagtgacatgcccatgcgagtacctgaggaaggtgagtgagtgcagacagatggggcctggtgcccttgagcagttcccgggtctcagctgccacacatctcatagccggtgatgctgggggaagcttacgcagtcacagtactggcttcttcctctttttctttccatacaagtggcttagggatggggtagagtagttgacttatttggatgaaaaccactatcttctgtcagaaactcaaaaggaatcattgctggcatggtaacctaaagaaaaacaaccagacaagtgcccaacgacacttaaaaaggtgatttattagcttgccaagtttannnnnnnnnnnnnnnnnnnnnnnnnnnnnnnnnnnnnnnnnnnnnnnnnnnnnnnnnnnnnnnnnnnnnnnnnnnnnnnnnnnnnnnnnnnnnnnnnnnnnnnnnnnnnnnnnnnnnnnnnnnnnnnnnnnnnnnnnnnnnnnnnnnnnnnnnnnnnnnnnnnnnnnnnnnnnnnnnnnnnnnnnnnnnnnnnnnnnnnnnnnnnnnnnnnnnnnnnnnnnnnnnnnnnnnnnnnnnnnnnnnnnnnnnnnnnnnnnnnnnnnnnnnnnnnnnnnnnnnnnnnnnnnnnnnnnnnnnnnnnnnnnnnnnnnnnnnnnnnnnnnnnnnnnnnnnnnnnnnnnnnnnnnnnnnnnnncaagataaaattattttaacaatatactatgaagagaaaaacactggctatgaaagaatatgcatagttttaccctgtttaaaaataaagattgacagaatacatatgcaaataagtttacttttatttttggtaatactttactggattgtctgaatattgacaatcagtatgcatcatgaagctacatggctaacattgagtactcactgtgtgtgccaggccctgggttcaatgctctacatgcacttatatttcatttaattctctctgcaacctgagatggtatagccacttcattttacagagttgaaactgaggcccagagactgaaagttaagcctgaggttacagtcaataagaggcagagctggaactgaaacctacgtgtgtctgaccaccagttcatgttctgacggcaggctagtctgcatcacagagtgtggggtagatggtgcatgcctgctaggatgggctaggtatcactgtaggtaagaaacagccccaaacgatggaaatgtacaccactgaaggctcttttcttgcccatgctgcacatcctccatggctctcctgtgccctgtgccccacatgccctcatcctgccacgagaataaaggagcagcctccatatgggagctgtcagctgctctaagagatgaaggagagggtggccagtctcaatggctcccaactcttgcctcgaggtgacacacttcacttccac

SEQ ID NO: 1103 - protein, 26 aa, Homo sapien
  Unsure 3094-3448: Unknown amino acid
LVLAMSDGAQPFVTCLYKYNFSKYLA

SEQ ID NO: 1104 - DNA, 4855 bp, Homo sapien
tgagatcgtgtttcatttcaggaagatatatgcgtcaggaaaatttctatcttcttttgtattatcaaggagatatttggagcagagtcaaccctctcagttacataaaataaaaaatggcatattcttggcaaacggatccaaatcctaatgaatcacacgaaaagcagtatgaacaccaagaatttctctttgtaaatcaaccccattcttctagccaagtcagtctgggttttgatcagatagtagatgagatcagtggcaaaattccacactacgagagtgaaattgatgaaaacaccttttttgtgcccactgcaccaaaatgggactcaacagggcattcattaaatgaagcacaccaaatatccttgaatgaattcacttctaaaagccgtgaactctcctggcatcaagttagcaaagcaccagcaattggttttagtccttctgtgttaccaaaacctcaaaatacgaataaagaatgctcctggggaagccccataggaaaacatcatggtgctgatgattccagattcagtattttagctccatcattcacaagtttggataaaattaatctagagaaagaattagaaaatgaaaatcataactaccatataggatttgaaagtagcattcctccaacaaattcatccttctcaagtgacttcatgccgaaagaagagaataaaaggagtggacatgtgaacattgtggaaccatctttgatgcttttgaaaggctctcttcaacccggaatgtgggaaagtacatggcagaagaatatagagtcaataggttgttccattcagctagtggaagtacctcaaagcagcaatacgagtctggcctctttttgcaacaaagtaaaaaaaatcagagaaagatatcatgcagctgatgttaatttcaattctgggaagatctggagcactactacagcatttccgtatcagctcttttctaagaccaagtttaatatacatatttttattgataactcaacacaacctcttcattttatgccatgtgctaattatcttgtcaaagatctaattgcagaaattctgcatttttgcacaaatgaccagctactccccaaagatcatattctaagtgtatgtggctctgaagaatttttacaaaacgaccactgtttggggagccacaaaatgtttcaaaaagataaatctgttattcagctccacctgcagaaaagtagggaagctccaggaaagctatctcgaaagcatgaagaggaccacagtcagttttatctgaatcaacttctagaatttatgcatatttggaaagtatccagacaatgtctcttaacactcatcagaaaatatgacttccacctgaaatacctattgaaaacccaggaaaacgtgtataatattattgaagaagttaaaaaaatatgcagtgttctagggtgtgtggaaaccaaacaaattacagatgcagtaaatgaactaagtctaattcttcagagaaaaggagagaatttttatcaaagttcagagacttcagcaaaaggcttgatagagaaggtaacaactgaactatccacatccatctaccagctaatcaatgtctactgtaacagcttttatgcagattttcagcctgtaaatgtacctagatgcacttcctatctaaatcccgggcttccttcccacctcagcttcacagtgtatgcagcacacaacattccagaaacctgggtgcacaggatcaattttccccttgaaataaagtcacttccaagggaatccatgctcactgtaaaactgtttgggattgcctgtgcaaccaacaatgcaaatttactggcgtggacttgtcttccactgtttccaaaagaaaaatccattctcgggtctatgctgttcagcatgacattacagagtgagcctcccgtagaaatgataactccaggagtgtgggatgtaagtcagccatccccggtgaccctgcagattgattttccagctactgggtgggagtatatgaaacctgattctgaagagaatagaagtaatcttgaagagccactaaaggagtgtataaaacatattgccagactttcacagaaacagactcccctactactctctgaagaaaagaaaagatatttatggttttatcgcttctactgcaataatgaaaactgctcccttcctttagtcctgggtagtgcccctggatgggatgaaaggactgtttcagaaatgcataccattttgagaagatggacattttctcaacctttagaggctcttgggcttttgacttccagttttccagatcaagaaattcgtaaagtggcagttcaacaattagacaacctcttgaatgatgaactactggaatatctcccacagctagttcaggctgtcaagtttgaatggaaccttgagagtcctttagtgcaacttctactccaccgctccttgcagagcatccaggttgcccatcgtctttactggctgctaaaaaatgcagaaaatgaagcttattttaaaagctggtatcagaagctactagctgctctccaattctgtgcaggtaaagccttgaatgatgagttttccaaggagcagaaacttatcaaaattctgggagatattggggaaagagtcaagtctgccagtgaccatcaaagacaggaggtactgaagaaagaaattggcagactagaagagttctttcaagatgtaaatacttgtcatcttcctctgaaccctgccctatgtataaaagggattgatcacgatgcatgttcatattttacatctaatgctttgccattgaagattactttcatcaatgctaatctgatgggcaaaaacatcagcattatttttaaggctggagatgatcttcgtcaggatatgcttgttctgcagcttattcaagtgatggacaatatttggctgcaggaaggcttggatatgcaaatgatcatttatagatgtctatccacaggaaaagaccaacgattggtgcagatggtacctgatgctgtgaccctagcaaagattcatcgccattctggactgataggaccattgaaagaaaataccattaaaaagtggttcagtcagcacaaccacttaaaggcagattatgaaaaggccttgaggaactttttctactcctgtgctggctggtgtgtggtaacattcatcctgggagtatgtgaccgtcacaatgataatatcatgctgacaaagtcgggccacatgtttcatattgactttggaaaattcttaggtcatgcacaaacatttggagggataaaaagggaccgagctcctttcatttttacttcagagatggaatactttattacagagggtgggaaaaacccacagcattttcaagattttgtggaactttgctgtcgtgcttataatattatcagaaagcacagccaactgctcttgaacctgctggaaatgatgctgtatgcaggactgcctgagctaagtggaattcaagacctgaaatatgtgtataataatcttcgtccacaagacacagacctggaagcaacaagtcattttaccaagaaaataaaggaaagtctggagtgtttccctgttaaattgaataacttgatccacacacttgcacaaatgtcagccataagccctgccaaatctacttcacagacttttcctcaggaatcctgtttgctgagtacaactaggtcgattgaaagagcaattttagggttcagcaagaaatccagtaatctgtatctgatccaggtgacacacagcaacaacgaaacaagcctgacagaaaaatcatttgagcagttttcaaaacttcacagccaacttcagaagcagtttgcatcactgactctcccagagtttcctcattggtggcacctaccttttacaaattcagatcacagaagattcagagatctaaatcattacatggaacagatattaaatgtatcacatgaagttacaaacagtgattgtgtacttagctttttcctctctgaggctgtgcaacaaacagttgaatcatcacctgtgtacctaggtgagaagaagtttccagacaagaagcctaaggtgcagttagtcatatcctacgaggatgtgaagctgaccatactagtgaaacacatgaaaaacattcatctcccagatggctctgcgcccagtgcacatgttgaattttatcttttaccatatcccagtgaagttctgaggaggaaaacaaaatctgttccaaaatgtacggaccccacttacaatgaaattgtagtatatgatgaagtcacagagctccaaggacatgtcttaatgcttattgtgaagagtaaaactgtatttgtgggagcaattaacatccgactctgtagtgtcccactcgataaagaaaaatggtatccattaggaaacagtataatttcaccattgctatgaacatatgcattattcattaactacttgtattttttcacttccgggcctctgaatcacataagtaaggcatctttgttgtcaaagacagcacagggtattaaggacacagaaaaaaaatcagaattagtcttttgtgttgtttattttctacctgtgctttcattgttttttcataatcttttctccttcagtggagtactgattgcatgaaatttgatgtgtaaaataataaaagacctttaattaatcattttaatatattttaaattaaacataggtttacatttgttttaattgtgtgcctacagttaaaagcagtatttttaatgtattttataagaaagacaatcaaataaacctcatcaattaattcaaaaaaaaaaaaaaaaaaa

SEQ ID NO: 1105 - protein, 1448 aa, Homo sapien
MAYSWQTDPNPNESHEKQYEHQEFLFVNQPHSSSQVSLGFDQIVDEISGKIPHYESEIDENTFFVPTAPKWDSTGHSLNEAHQISLNEFTSKSRELSWHQVSKAPAIGFSPSVLPKPQNTNKECSWGSPIGKHHGADDSRFSILAPSFTSLDKINLEKELENENHNYHIGFESSIPPTNSSFSSDFMPKEENKRSGHVNIVEPSLMLLKGSLQPGMWESTWQKNIESIGCSIQLVEVPQSSNTSLASFCNKVKKIRERYHAADVNFNSGKIWSTTTAFPYQLFSKTKFNIHIFIDNSTQPLHFMPCANYLVKDLIAEILHFCTNDQLLPKDHILSVCGSEEFLQNDHCLGSHKMFQKDKSVIQLHLQKSREAPGKLSRKHEEDHSQFYLNQLLEFMHIWKVSRQCLLTLIRKYDFHLKYLLKTQENVYNIIEEVKKICSVLGCVETKQITDAVNELSLILQRKGENFYQSSETSAKGLIEKVTTELSTSIYQLINVYCNSFYADFQPVNVPRCTSYLNPGLPSHLSFTVYAAHNIPETWVHRINFPLEIKSLPRESMLTVKLFGIACATNNANLLAWTCLPLFPKEKSILGSMLFSMTLQSEPPVEMITPGVWDVSQPSPVTLQIDFPATGWEYMKPDSEENRSNLEEPLKECIKHIARLSQKQTPLLLSEEKKRYLWFYRFYCNNENCSLPLVLGSAPGWDERTVSEMHTILRRWTFSQPLEALGLLTSSFPDQEIRKVAVQQLDNLLNDELLEYLPQLVQAVKFEWNLESPLVQLLLHRSLQSIQVAHRLYWLLKNAENEAYFKSWYQKLLAALQFCAGKALNDEFSKEQKLIKILGDIGERVKSASDHQRQEVLKKEIGRLEEFFQDVNTCHLPLNPALCIKGIDHDACSYFTSNALPLKITFINANLMGKNISIIFKAGDDLRQDMLVLQLIQVMDNIWLQEGLDMQMIIYRCLSTGKDQRLVQMVPDAVTLAKIHRHSGLIGPLKENTIKKWFSQHNHLKADYEKALRNFFYSCAGWCVVTFILGVCDRHNDNIMLTKSGHMFHIDFGKFLGHAQTFGGIKRDRAPFIFTSEMEYFITEGGKNPQHFQDFVELCCRAYNIIRKHSQLLLNLLEMMLYAGLPELSGIQDLKYVYNNLRPQDTDLEATSHFTKKIKESLECFPVKLNNLIHTLAQMSAISPAKSTSQTFPQESCLLSTTRSIERAILGFSKKSSNLYLIQVTHSNNETSLTEKSFEQFSKLHSQLQKQFASLTLPEFPHWWHLPFTNSDHRRFRDLNHYMEQILNVSHEVTNSDCVLSFFLSEAVQQTVESSPVYLGEKKFPDKKPKVQLVISYEDVKLTILVKHMKNIHLPDGSAPSAHVEFYLLPYPSEVLRRKTKSVPKCTDPTYNEIVVYDEVTELQGHVLMLIVKSKTVFVGAINIRLCSVPLDKEKWYPLGNSIISPLL

SEQ ID NO: 1106 - DNA, 1026 bp, Homo sapien
cagcatgttgagccgggcagtgtgcggcaccagcaggcagctgcctccggttttggggtatctgggctccaggcagaagcacagcctccccgacctgccctacgactacggcgccctggaacctcacatcaacgcgcagatcatgcagctgcaccacagcaagcaccacgcggcctacgtgaacaacctgaacgtcaccgaggagaagtaccaggaggcgttggccaagggagatgttacagcccagatagctcttcagcctgcactgaagttcaatggtggtggtcatatcaatcatagcattttctggacaaacctcagccctaacggtggtggagaacccaaaggggagttgctggaagccatcaaactggactttggttcctttgacaagtttaaggagaagctgacggctgcatctgttggtgtccaaggctcaggttggggttggcttggtttcaataaggaacggggacacttacaaattgctgcttgtccaaatcaggatccactgcaaggaacaacaggccttattccactgctggggattgatgtgtgggagcacgcttactaccttcagtataaaaatgtcaggcctgattatctaaaagctatttggaatgtaatcaactgggagaatgtaactgaaagatacatggcttgcaaaaagtaaaccacgatcgttatgctgagtatgttaagctctttatgactgtttttgtagtggtatagagtactgcagaatacagtaagctgctctattgtagcatttcttgatgttgcttagtcacttatttcataaacaacttaatgttctgaataatttcttactaaacattttgttattgggcaagtgattgaaaatagtaaatgctttgtgtgattgaatctgattggacattttcttcagagagctaaattacaattgtcatttataaaaccatcaaaaatattccatccatatactttggggacttgtagggatgcctttctagtcctattctattgcagttatagaaaatctag

SEQ ID NO: 1107 - protein, 222 aa, Homo sapien
MLSRAVCGTSRQLPPVLGYLGSRQKHSLPDLPYDYGALEPHINAQIMQLHHSKHHAAYVNNLNVTEEKYQEALAKGDVTAQIALQPALKFNGGGHINHSIFWTNLSPNGGGEPKGELLEAIKLDFGSFDKFKEKLTAASVGVQGSGWGWLGFNKERGHLQIAACPNQDPLQGTTGLIPLLGIDVWEHAYYLQYKNVRPDYLKAIWNVINWENVTERYMACKK

SEQ ID NO: 1108 - DNA, 4734 bp, Homo sapien
gagatatccttaccttactcaacagcaccaacaaggattggtggaaggtggaagtgaacgatcgtcagggttttgtgccggctgcgtacgtgaagaaattggaccccgcccagtcagcctcccgggagaatctcctggaggagcaaggcagcatagcactgcggcaggagcagattgacaatcaatatcattctctgctggaactgggtgagaagcgtaaaggcatgttggagaagagttgcaagaagtttatgttgttccgtgaagcgaatgaactacagcaatggatcaatgagaaggaagccgctctgacaagtgaggaggtgggagcagacttggagcaggttgaggtgctccagaagaagtttgatgacttccagaaggacctgaaggccaatgagtcacggttgaaggacattaacaaggtagctgaagacctggagtctgaaggtcttatggcagaggaggtgcaggctgtgcaacaacaggaagtgtatggcatgatgcccagggatgaaactgattccaagacagcctccccgtggaagtctgctcgtctgatggttcacaccgtggccacctttaattccatcaaggagctgaatgagcgctggcggtccctacagcagctggccgaggaacggagccagctcttgggcagcgcccatgaagtacagaggttccacagagatgctgatgaaaccaaagaatggattgaagagaagaatcaagctctaaacacagacaattatggacatgatctcgccagtgtccaggccctgcaacgcaagcatgagggcttcgagagggaccttgcggctctcggtgacaaggtaaactcccttggtgaaacagcagagcgcctgatccagtcccatcccgagtcagcagaagacctgcaggaaaagtgcacagagttaaaccaggcctggagcagcctggggaaacgtgcagatcagcgcaaggcaaagttgggtgactcccacgacctgcagcgcttccttagcgatttccgggacctcatgtcttggatcaatggaatacgggggttggtgtcctcagatgagctagccaaggatgtcaccggagctgaggcattgctggagcgacaccagggacaccggacagaaatcgatgccagggctggcactttccaggcatttgagcagtttggacagcagctgttggctcacggacactatgccagccctgagatcaagcagaaacttgatattcttgaccaggagcgtgcagacctggagaaggcctgggttcagcgcaggatgatgctggatcagtgccttgaactgcagctgttccatcgggactgtgagcaagctgagaactggatggctgcccgggaggccttcttgaataccgaagacaaaggagactcactggacagcgtagaggctctgatcaaaaaacatgaagactttgacaaagcgattaacgtccaggaagagaagattgctgctctgcaggcctttgccgaccagctcatcgctgccggccattatgccaagggagacatttctagccggcgcaatgaggtcttggacaggtggcgacgtctgaaagcccagatgattgagaaaaggtcaaagctaggagaatctcaaaccctccaacagttcagccgggatgtggatgagattgaggcttggatcagtgaaaaattgcaaacagcgagtgatgagtcgtacaaggatcccaccaacatccagagcaagcaccagaagcaccaggcttttgaagcagagctgcatgccaacgctgaccggatccgtggggttatcgacatgggcaactccctcattgaacgtggagcctgtgccggcagtgaggatgctgtcaaggcccgcctggctgccttagctgaccagtggcagttcttggtgcaaaagtcagcggaaaagagccagaaactgaaagaagccaacaagcagcagaacttcaacacagggatcaaggactttgacttctggctgtctgaggtggaggccctgctggcatccgaagattatggcaaagacctggcttctgtgaacaacctgctgaaaaagcatcaactgctggaagcagatatatctgcccatgaggatcgcctgaaggacctgaacagccaggcagacagcctgatgaccagcagtgccttcgacacctcccaagtaaaggacaagagggacaccatcaacgggcgcttccagaagatcaagagcatggcggcctcccggcgagccaagctgaatgaatcccatcgcctgcaccagttcttccgggacatggatgacgaggagtcctggatcaaggagaagaagctgctggtgggctcagaggactacggccgggacctaactggcgtgcagaacctgaggaagaagcacaagcggctggaagcagaactggctgcgcatgagccggctattcagggtgtcctggacactggcaagaagctgtccgatgacaacaccatcgggaaagaggagatccagcagcggctggcgcagtttgtggagcactggaaagagctgaagcagctggcagctgcccggggtcagcggctggaagagtccttggaatatcagcagtttgtagccaatgtggaagaggaagaagcctggatcaatgagaaaatgaccctggtggccagcgaagattatggcgacactcttgccgccatccagggcttactgaagaaacatgaagcttttgagacagacttcaccgtccacaaggatcgcgtgaatgatgtctgcaccaatggacaagacctcattaagaagaacaatcaccatgaggagaacatctcttcaaagatgaagggcctgaacgggaaagtgtcagacctggagaaagctgcagcccagagaaaggcgaagctggatgagaactcggccttccttcagttcaactggaaggcggacgtggtggagtcctggatcggtgaaaaggagaacagcttgaagacagatgattatggccgagacctgtcttctgtgcagacgctcctcaccaaacaggaaacttttgacgctgggctgcaggccttccagcaggaaggcattgccaacatcactgccctcaaagatcagcttctcgccgccaaacacgttcagtccaaggccatcgaggcccggcacgcctccctcatgaagaggtggagccagcttctggccaactcagccgcccgcaagaagaagcttctggaggctcagagtcacttccgcaaggtggaggacctcttcctgaccttcgccaaaaaggcttctgccttcaacagctggtttgaaaatgcagaggaggacttaacagaccccgtgcgctgcaactccttggaagaaatcaaagctttgcgcgaggcccacgacgccttccgctcctccctcagctctgcccaggctgacttcaaccagctggccgagctggaccgccagatcaagagcttccgcgtagcctccaacccctacacctggtttaccatggaggccctggaggagacctggaggaacctacagaaaatcatcaaggagagggagctggagctgcagaaggagcagcggcggcaggaggagaacgacaagctgcgccaggagtttgcccagcacgccaacgccttccaccagtggatccaagagaccaggacatacctcctcgatgggtcctgtatggtggaagagtcggggaccctcgaatcccagcttgaagctaccaaacgcaagcaccaggaaatccgagccatgagaagtcagctcaaaaagatcgaggacctgggggccgccatggaggaggccctcatcctggacaacaagtacacggagcacagcaccgtgggcctcgcccagcagtgggaccagctggaccagctgggcatgcgcatgcagcacaacctggagcagcagatccaggccaggaacacaacaggtgtgactgaggaggccctcaaagaattcagcatgatgtttaaacactttgactaggacaagtctggcaggctgaaccatcaggagttcaaatcttgcctgcgctccctgggctatgacctgcccatggtggaggaaggggaacctgaccctgagttcgaggcaatcctggacacggtggatccgaacagagatggccatgtctccttgcaagaatacatggctttcatgatcagccgcgaaactgagaacgtcaagtccagcgaggagattgagagcgccttccgggccctctgctcagagggaaagccttacgtgaccaaggaggagctctaccagaacctgacccgggaacaagccgactactgcgtctcccacatgaagccctacgtggacggcaagggccgcgagctccccaccgcgttcgactacgtggagttcacccgctcgcttttcgtgaactgagccactccctgggtcacccacccctcgctgcttgccctgcgtcgccttgctgcatgtccgctcctctgtgtgctctcactttccactgtaaccttaagcctgcttagcttggaataagacttaggagaatatggtgcttcactaacccgcttccggtccagtcacaatcatcatgtcactgtggggacccagatctgtgtcttgaagcagctgccctcattccgacttcagaaaatcgaagcagctggctcctccccttgttctctctcccaccctcccccaaatctgttttcatgtaaaagacaaataaatgatgacttcccccaaaaaaaaaaaaaaaaaaaac

SEQ ID NO: 1109 - DNA, 2343 bp, Homo sapien
  Unsure 2239, 2284, 2322, 2339: Unknown base
gcgcggccccgaaccgccgccaggccggcacgggggaaggagccggtgggggtagggggtgcggtggggggtggggaccctccggctcttgggggtcccagtccccgccggctgctgagcgggtggggtggtggaggagctgcagagatgtccggccagagcctgacggaccgaatcactgccgcccagcacagtgtcaccggctctgccgtatccaagacagtatgcaaggccacgacccacgagatcatggggcccaagaaaaagcacctggactacttaattcagtgcacaaatgagatgaatgtgaacatcccacagttggcagacagtttatttgaaagaactactaatagtagttgggtggtggtcttcaaatctctcattacaactcatcatttgatggtgtatggaaatgagcgttttattcagtatttggcttcaagaaacacgttgtttaacttaagcaattttttggataaaagtggattgcaaggatatgacatgtctacatttattaggcggtatagtagatatttaaatgagaaagcagtttcatacagacaagttgcatttgatttcacaaaagtgaagagaggggctgatggagttatgagaacaatgaacacagaaaaactcctaaaaactgtaccaattattcagaatcaaatggatgcacttcttgattttaatgttaatagcaatgaacttacaaatggggtaataaatgctgccttcatgctcctgttcaaagatgccattagactgtttgcagcataccatgaaggaattattaatttgttggaaaaatattttgatatgaaaaagaaccaatgcaaagaaggtcttgacatctataagaagttcctaactaggatgacaagaatctcagagttcctcaaagttgcagagcaagttggaattgacagaggtgatataccagacctttcacaggcccctagcagtcttcttgatgctttggaacaacatttagcttccttggaaggaaagaaaatcaaagattctacagctgcaagcagggcaactacactttccaatgcagtgtcttccctggcaagcactggtctatctctgaccaaagtggatgaaagggaaaagcaggcagcattagaggaagaacaggcacgtttgaaagctttaaaggaacagcgcctaaaagaacttgcaaagaaacctcatacctctttaacaactgcagcctctcctgtatccacctcagcaggagggataatgactgcaccagccattgacatattttctacccctagttcttctaacagcacatcaaagctgcccaatgatctgcttgatttgcagcagccaacttttcacccatctgtacatcctatgtcaactgcttctcaggtagcaagtacatggggagatcctttctctgctactgtagatgctgttgatgatgccattccaagcttaaatcctttcctcacaaaaagtagtggtgatgttcacctttccatttcttcagatgtatctacttttactactaggacacctactcatgaaatgtttgttggattcactccttctccagttgcacagccacacccttcagctggccttaatgttgactttgaatctgtgtttggaaataaatctacaaatgttattgtagattctgggggctttgatgaactaggtggacttctcaaaccaacagtggcctctcagaaccagaaccttcctgttgccaaactcccacctagcaagttagtatctgatgacttggattcatctttagccaaccttgtgggcaatcttggcatcggaaatggaaccactaagaatgatgtaaattggagtcaaccaggtgaaaagaagttaactgggggatctaactgcgaaccaaaggttgcaccaacaaccgcttggaatgctgcaacaatggcaccccctgtaatggcctatcctgctactacaccaacaggcatgataggatatggaattcctccacaaatgggaagtgttcctgtaatgacgcaaccaaccttaatatacagccagcctgtcatgagacctccaaacccctttggccctgtatcaggagcacagatacagtttatgtaacttgatggaagaaaatggaattactccaaaaagacaagtgctcaagcagcaaaatccttacttccagcaaaatccaaactgctgtctcttaaatctcttaaactctcttcttccattaggatgctacaagtanctcagtgaaggcccatgaagggaattggggactagtttatagggngaacgtattcattacagtttataaaggccaggattggnttggattttaggattangttc

SEQ ID NO: 1110 - protein, 652 aa, Homo sapien
  Unsure 2239, 2284, 2322, 2339: Unknown amino acid
MSGQSLTDRITAAQHSVTGSAVSKTVCKATTHEIMGPKKKHLDYLIQCTNEMNVNIPQLADSLFERTTNSSWVVVFKSLITTHHLMVYGNERFIQYLASRNTLFNLSNFLDKSGLQGYDMSTFIRRYSRYLNEKAVSYRQVAFDFTKVKRGADGVMRTMNTEKLLKTVPIIQNQMDALLDFNVNSNELTNGVINAAFMLLFKDAIRLFAAYHEGIINLLEKYFDMKKNQCKEGLDIYKKFLTRMTRISEFLKVAEQVGIDRGDIPDLSQAPSSLLDALEQHLASLEGKKIKDSTAASRATTLSNAVSSLASTGLSLTKVDEREKQAALEEEQARLKALKEQRLKELAKKPHTSLTTAASPVSTSAGGIMTAPAIDIFSTPSSSNSTSKLPNDLLDLQQPTFHPSVHPMSTASQVASTWGDPFSATVDAVDDAIPSLNPFLTKSSGDVHLSISSDVSTFTTRTPTHEMFVGFTPSPVAQPHPSAGLNVDFESVFGNKSTNVIVDSGGFDELGGLLKPTVASQNQNLPVAKLPPSKLVSDDLDSSLANLVGNLGIGNGTTKNDVNWSQPGEKKLTGGSNCEPKVAPTTAWNAATMAPPVMAYPATTPTGMIGYGIPPQMGSVPVMTQPTLIYSQPVMRPPNPFGPVSGAQIQFM

SEQ ID NO: 1111 - DNA, 981 bp, Homo sapien
aagaatgtggcaaaggctttagtatattctcaacccttactaaacataagataattcatactggagagaaaccctacaaatgcaatgaatgtggtaaagcctttaactggtcctcaactcttactaaacataagagaattcatactggagagaaaccctacaaatgtgaagaatgtggcaaagcttttaaccagtcctcaacccttactagacataagatagttcatactggagagaaaccctacaaatgtgaagaatgtggtaaagcctttaaacggtccacaactctaaaacataagagaatttatactaaagagaaaccatacaaatgtgaagaatgtggaaaagcctttagtgtattctcaacccttactaaacataagataattcatactggagcaaaaccttacaaatgtgacgaatgtggcagtgcctttagggcattctcaacccttactgaacataagagagttcatactggagagaaaccttacaaatgcaatgaatgtggtaaagcctttaactggtcctcaactcttactaaacataagagaattcatactggagagaagccctacaaatgtgaagaatgtggcaaagcttttaaccggtcctcaaaccttactcgacataagaaaattcatactggagagaaaccatacaaacctaaaagatgtgacagtgcttttgacaacaccccaaacttttctagacataaaagaaatcatatgggtgagaaatcctagaaatgtgaagaatgtgacaaagcctttaagcggttgtcacacttgattgtatataagataattcatactggagaaaactcccagaagtgtgacaaatgtgacaaaacatttaattaattctcataccttattgcacaggaaagcatttatacttgagaaaaattgtataaagaatggaaaagtcattaatatctgctcatatcttaacatcagcgagttggtatttaataaaagc

SEQ ID NO: 1112 - protein, 247 aa, Homo sapien
ECGKGFSIFSTLTKHKIIHTGEKPYKCNECGKAFNWSSTLTKHKRIHTGEKPYKCEECGKAFNQSSTLTRHKIVHTGEKPYKCEECGKAFKRSTTLKHKRIYTKEKPYKCEECGKAFSVFSTLTKHKIIHTGAKPYKCDECGSAFRAFSTLTEHKRVHTGEKPYKCNECGKAFNWSSTLTKHKRIHTGEKPYKCEECGKAFNRSSNLTRHKKIHTGEKPYKPKRCDSAFDNTPNFSRHKRNHMGEKS

SEQ ID NO: 1113 - DNA, 1607 bp, Homo sapien
ttcgggtcatcttttgtcccaagtgcttagtcatattgagctaatgtcaagatcttgtgttgtttagtatctttaggagttcgaagcacaaaccccggagatttttgtattctttcagtgccttcgtgaggagtaggcaggtataaaatagaaaggtaggctcagaacaaaaaaaaagtatttggaatacagaattctgatacacatgactctgcctctctgggtgaataaagagaagagaaactggactcagttgtacagaccacctagtaactgaccatggtgtgatttttaaagcgaggaagcagatgccaggcagtgaagacttgcacaccgtcacactgttaactggtagagaggcagtgctgtatcttccgcttctcctaaacgttggtctagggttcatcctgccttatagcacatgtttagtatacatatccaaggaagtttttttggtcactgaggctgaaccttatggacagtactgctgatttagtgatctgaccttgaattaggggtttcacaagaatccaggtcctggtccatggaagaacagtgagcacttttgataattgaggtctagcttaacattctgtgaccaataatattttagttaacagagattctggttcttggatcgaggatattatgtttaacaggaaaaggctctgaaagatgtaatctctctttttttcaagttgcatagattgcacatgaggattttgcccacttagcaacttcattctacttttgcaggaatagaacccaagtcttctgactttcactgcattagcttattttttcctcatttttagttctttcaagaatcattaattccatgcttgaaaatgtctgaatggcactaatgaggataagttttttaatcttttgaattcttaatgtgaactaacaggaaaaaaatctcagagctaacaaattagagttggtaaagggccgatttataagtgtctcacaatttatgggtgtaaatcaaaatgttaactagtacagtcataagctgtttgtacaatccttaggctttaacttctttggaattggcaagctaggcatttgacatgtatttatataactgtacggttgtagttattaatgatcttgtcattattgttgataatgaaaaaagatcttcactataatttcttcgtataattcttataatgaaacaagtaaatactattaactagaaaaaatctagtctgcagttagcccacacacatccaaacttatctctgccagcagcaaaagaaagcttgaaaacctttgccaaaatcagaagtttcccatttagattacataagtttctgttgaattgaaatatatttagataacatttaaaccattgatcttttggtattaactctcagatgtttcataactttctgtctttttagtattcagggatattatgtaaagtttttcctgcactgaatctctgtgcttgagcctactgaaatgatccccctaagccatgctgcctgccttttgtgtttaatgtttttttacactgacttatctccttcgtgtgttcacctctcccccagaggaagacaacagaacagtataatttacagtttgtacaggttaaa

SEQ ID NO: 1114 - protein, 43 aa, Homo sapien
MIPLSHAACLLCLMFFYTDLSPSCVHLSPRGRQQNSIIYSLYR

SEQ ID NO: 1115 - DNA, 1195 bp, Homo sapien
ggcacgaggcgccagtcccctaaccctgaggctgccgcgcggcggtcactgcgccggggtagtgggccccagtgttgcgctctctggccgttccttacactttgcttcaggctccagtgcaggggcgtagtgggatatggccaactcgggctgcaaggacgtcacgggtccagatgaggagagttttctgtactttgcctacggcagcaacctgctgacagagaggatccacctccgaaacccctcggcggcgttcttctgtgtggcccgcctgcaggattttaagcttgactttggcaattcccaaggcaaaacaagtcaaacttggcatggagggatagccaccatttttcagagtcctggcgatgaagtgtggggagtagtatggaaaatgaacaaaagcaatttaaattctctggatgagcaagaaggggttaaaagtggaatgtatgttgtaatagaagttaaagttgcaactcaagaaggaaaagaaataacctgtcgaagttatctgatgacaaattacgaaagtgctcccccatccccacagtataaaaagattatttgcatgggtgcaaaagaaaatggtttgccgctggagtatcaagagaagttaaaagcaatagaaccaaatgactatacaggaaaggtctcagaagaaattgaagacatcatcaaaaagggggaaacacaaactctttagaacataacagaatatatctaagggtattctatgtgctaatataaaatatttttaacacttgagaacagggatctgggggatctccacgtttgatccgttttcagcagtgctctgaaggagtatcttacttgggtgattccttgtttttagactataaaaagaaactgggataggagttagacaatttaaaaggggtgtatgagggcctgaaatatgtgacaaatgaatgtgagtaccccttctgtgaacactgaaagctattctcttgaattgatcttaagtgtctccttgctctggtaaaagatagatttgtagctcacttgatgatggtgctggtgaattgctctgctctgtctgagatttttaaaaatcagcttaatgagagtaatctgcagacaattgataataacattttgaaaattggaaagatggtatactgtttttagaggaataaacgtatttgtggtttaaaaaaaaaaaaaaaaaaaaaaa

SEQ ID NO: 1116 - protein, 188 aa, Homo sapien
MANSGCKDVTGPDEESFLYFAYGSNLLTERIHLRNPSAAFFCVARLQDFKLDFGNSQGKTSQTWHGGIATIFQSPGDEVWGVVWKMNKSNLNSLDEQEGVKSGMYVVIEVKVATQEGKEITCRSYLMTNYESAPPSPQYKKIICMGAKENGLPLEYQEKLKAIEPNDYTGKVSEEIEDIIKKGETQTL

SEQ ID NO: 1117 - DNA, 1488 bp, Homo sapien
tgttgggggtataactggaagctaatttttaaaagaatcctgccatatctttgataaggaagttctatggcttaaagagtgtaaccactagttttagcagagatgtttcctttagttttgaaacattcttcaacatttcaggttcatgatgaaaaatggctgactggatttaagtcctttattttctatactcctgagcaaaattctgaaaaactggctggtctagtttagagaagaacgctgatgtgggagtattttcaccatgcattcctgctctaaatcctttgcttctactgatagactattctactttcgaaataagttcacattgctctaacacttcataagttcaatctttttctcattctgtttaaaataaccaccatgaccaccaaacgcctgaaattcactgtagttaaaattatgactgaaatagacagggaaaacctgagagtgaacgttacccagcaaatctgggttaaacaggttcgagtttttccagagcacactgtttaggatttcagcttcctgttcaaccatctcggaaacagggtgtttctctgctcctttgtgaggactaaccatgtgtccccgccactttgcaccaaagctgaatatcatcccaaactctggatccttctgacgggcatttgtgtggtacacaggaaggggtgcattatgaatatgcaattactggcatgtaatgctgtcttctgctaaaaatacaaaaagggtactctgatctcagagttgggagctgatttctgatttcagcctagacaggtctgcttaaaactataatcaagctgattgtattgccctggaattctaatttccaatttagggttttgctatataatctctagtagagtgtgtctaatctttatgaaacccagagtctttgtataaactctatggattttcttccatgcgtctaggctgagctgagctgtgtctttaggctgagctgtagagacattaaattactgagtaaatgaaggtaacgttgttatgtcactctgtttctgaaagaccaactcaaattctgtctgctgtagctttgatccttttcatttaattctaagtacacttgttattatagtaactgttgtttgtatgttattttagctttttacttaagtagctatttagcaatttaaatgaaaatgtaattaggttacatctgttttacatgcatgtaataccacgcagatgtaaacttctattaaagccatattttctttttggcaagaaaaggcagaaacaaaatcgtgccagtcgctggaatacgtcttgctctaaaaaaattaaaaaaaaggatatacagagcactgtgccattatttatatggtggttagagtacatcacttctattttttgaaaattaaaaaaaatattaacaagtgaaaaacaagcattctattccatgttccctcttacagtttatctggatacggtgtttaaaatgacaatacagccaggcgcggt

SEQ ID NO: 1118 - protein, 17 aa, Homo sapien
CWGYNWKLIFKRILPYL

SEQ ID NO: 1119 - DNA, 797 bp, Homo sapien
ccatgaatccactcctgatccttgcctttgtgggagctgctgttgctgtcccctttgatgatgatgacaagattgttgggggctacacctgtgaggagaattctgtcccctaccaggtgtccttgaattctggctcccacttctgtggtggctccctcatcagcgaacagtgggtggtgtcagcaggtcactgctacaagccccacatccaggtgagactgggagagcacaatatcgaagtcctggaggggaatgagcagttcatcaatgcagccaagatcatccgccaccccaaatacaacaggattactctgaacaatgacatcatgctgatcaagctctccacacctgccgtcatcaatgcccatgtgtccaccatctctctgcccactgcccctccagctgctggcaccgagtgccttatctccggctggggcaataccctgagctcaggggccgactacccagatgagctgcagtgcctggacgctcctgtgctgacccaggctaagtgtaaagcctcctaccctttaaagattaccagcaagatgttctgtgtgggcttccttgagggaggcaaggattcctgccagggtgactctggtggccctgtggtctgcaatggacagcttcaaggaattgtctcctggggctatggctgtgcccagaagagaaggcctggagtctacaccaaggtctacaactatgtggactggattaaggacaccatagctgccaacagctaaagcccctggtcactctgcagtctctataccaataaaataaccctgttctca

SEQ ID NO: 1120 - protein, 247 aa, Homo sapien
MNPLLILAFVGAAVAVPFDDDDKIVGGYTCEENSVPYQVSLNSGSHFCGGSLISEQWVVSAGHCYKPHIQVRLGEHNIEVLEGNEQFINAAKIIRHPKYNRITLNNDIMLIKLSTPAVINAHVSTISLPTAPPAAGTECLISGWGNTLSSGADYPDELQCLDAPVLTQAKCKASYPLKITSKMFCVGFLEGGKDSCQGDSGGPVVCNGQLQGIVSWGYGCAQKRRPGVYTKVYNYVDWIKDTIAANS

SEQ ID NO: 1121 - DNA, 7005 bp, Homo sapien
atttcctataaatatcacaaatatttccaacaaaagagcatagatgtcttttatacaattcttttgagaatgattctgcagatttctgcattttctcctcattaatttgacctgggatggttttcactgaggaaaaaaatctttaagcaaacatgttaaatgtttacctatataaaaattattacttcaggtgactccgataatataacgcatgtgtggaatgaggatgatggacagaccttatctccaagcagtctggctgcacagctcctaattctggaaaactttgaagatgccctcttaaatatatcagcaaatagtccttatattccttacttggcatgtgtgagaaatgtgactgacagtttggccagaggttcaccagaaaatctaagactcctgcagtccacaatacgatttaaaaaatcttttcttcgcaatggttcctatgaagattactttcctccagttcctgaagtcctaaaatcaaaactgtctcaacttcgaaacttgaccgaacttctttgtgaatctgaaactttcagtttgatagagaagtcatgccagctctctgatatgagctttgggagcctgtgtgaagaaagtgagtttgatctgcaactcctcgaagcggcagagctgggcaccgaaatagcagccagcttactgtaccatgacaatgtcatatctaaaaaagtgagagatttgctgactggagatccaagcaaaattaatttaaatatggatcagtttctagaacaggcactgcaaatgaattacttggaaaatatcactcagttaataccgatcatagaagccatgctgcatgtcaataacagtgcagatgcttctgaaaagccaggtcagttactagaaatgtttaaaaatgttgaagagctgaaagaagatttaaggagaacaacaggaatgtccaacaggactattgacaagttgctggccattcccatccctgataatagagctgagattatttctcaggtgttctggctgcattcctgtgatactaatatcaccactcccaaactagaagatgcaatgaaagaattctgcaacctgtctctttcagagagatcccggcagtcttacctcatcggactcacccttctgcactacttaaacatttacaacttcacatacaaggtgtttttcccgaggaaagatcaaaagccagtagaaaagatgatggagctcttcataagactaaaagagattctcaatcagatggcttctggcacacatccgctgctagacaaaatgagatccctgaagcaaatgcatctgcccagaagtgttccattaacacaggcaatgtacagaagcaaccgaatgaacacaccacaaggatcatttagcaccatctcccaagcattatgttctcaaggaattaccactgaatatttaactgccatgctgccctcttcccagaggccaaaaggcaaccacaccaaggattttttgacttataaattaactaaagagcaaattgcttcaaaatatggaattcccataaataccacaccattttgcttctccctttataaagacatcattaacatgcccgctggacctgtgatttgggctttcttgaaacctatgttgttgggaagaattttgtatgcaccatataacccagtcacaaaggcaataatggaaaagtccgatgtaactctgagacagctggcggaattaagagaaaaatctcaagagtggatggataagtcgccacttttcatgaattccttccatctgttaaaccaggcaattccaatgctccagaatactctaaggaacccttttgtgcaagtttttgtaaagttctccgtgggactcgatgctgttgaactattgaaacagatagatgaactcgatattctaagactgaaattagagaacaacattgacatcatcgatcagcttaacacactatcttccctgacagtaaatatttcctcttgtgtattatatgaccgtattcaggcagcaaaaaccatagatgaaatggagagagaggctaaaaggctctacaaaagcaacgaactctttggaagtgttatttttaagcttccttctaacagaagctggcacagaggctatgactctggaaatgtctttcttcctcctgtcataaaatataccatccggatgagtctcaagaccgcacagaccacaagaagcctaagaaccaagatttgggctccagggccacacaattctccatcacacaaccagatctatggcagggcttttatttatttacaggatagtattgaaagagcaatcattgaattgcaaactggaaggaactcccaggaaatagcagtccaggttcaagcaattccttatccctgcttcatgaaagacaacttcctaaccagtgtctcttattctcttccaattgtgcttatggttgcctgggttgtatttatagctgcctttgtaaaaaagcttgtctatgagaaagacctccggcttcatgagtacatgaagatgatgggtgtgaactcctgcagccatttctttgcctggcttatagagagtgttggatttttactggttaccatcgtgatcctcatcattatactcaagtttggcaatattcttcctaaaacaaatgggttcattttgttcctgtatttttcggactacagcttctcggttattgccatgagctatcttatcagtgtcttcttcaacaacaccaacattgcagctctgatcggaagcctcatctacatcattgccttctttccatttattgttctggttacagtggagaatgagttgagctatgtattgaaagtgttcatgagcctgctgtccccaacagcattcagctatgcaagccaatacattgcacgatacgaagaacagggcattggtcttcagtgggaaaatatgtacacctccccggttcaggatgacaccacctcatttggctggctgtgctgtctaatcctagctgactctttcatttatttccttattgcttggtatgtcaggaatgtcttcccagggacatacggtatggcagctccctggtattttccaattcttccttcctattggaaggagcgatttgggtgtgcagaggtgaagcctgagaagagcaatggcctcatgtttactaacatcatgatgcagaacaccaacccatctgccagtcctgaatacatgttttcctctaacatcgagcctgaacctaaagatctcacagtcggggttgccctgcatggggtcacaaagatctatggctcaaaagttgctgttgataacctcaatctgaacttttatgaagggcatattacttcattgctggggcccaatggagctgggaaaactactaccatttccatgttaactgggctgtttggggcctcagcaggcaccatttttgtatatggaaaagatatcaaaacagacctacacacggtacggaagaacatgggagtctgtatgcagcacgacgtcttgttcagttacctcactactaaggagcaccttctcctatatggttccatcaaagttcctcactggactaaaaagcagctccacgaggaagtaaaaaggactttaaaagatactggactatatagccatcgtcataagagagttggaacactgtcaggaggcatgaagaggaagttatctatatccatagctctcattggtggatcaagggtagtaattttggatgaaccatctactggagttgacccatgttctcgccgaagtatatgggatgttatatccaagaacaaaactgccagaacaatcattctgtcaacgcaccacttggacgaggctgaagtgctgagtgaccgcatcgccttcctggagcagggtgggcttaggtgctgtgggtccccattttacctcaaggaagcctttggcgatgggtatcacctcacgcttaccaagaagaagagtccaaatttaaatgcaaatgcagtatgtgacaccatggccgtgacagcaatgatccaatcacatctccccgaagcctacctcaaggaggatattgggggagagcttgtttatgtacttcctccattcagcaccaaagtctcaggggcctacctgtcactcctacgggcactcgacaatggcatgggtgacctcaacatcgggtgctacggcatttcagataccaccgtggaggaggtctttctgaacttgaccaaagagtcacaaaaaaatagtgctatgagtcttgagcacttaacacaaaagaaaattgggaattccaatgccaatggcatctcaactcctgacgatttatctgtgagcagcagcaatttcacagacagagatgacaaaatcctgacaagaggagagaggctggatggctttggactgttgctgaagaagatcatggctatactcatcaagaggttccaccacacccgcaggaactggaaaggtctcattgctcaggttatcctccccatcgtctttgttaccactgccatgggccttggcacactgagaaattccagcaacagttatccagagattcagatctccccctctctttatggtacctccgaacagacagccttctatgctaattatcacccgagcacggaagcacttgtctcagcaatgtgggacttccctggaattgacaacatgtgtctgaacaccagtgatctacagtgtttaaacaaagacagtctggaaaaatggaacaccagtggagaacccatcactaattttggtgtttgctcctgctcagaaaatgtccaggaatgtcctaaatttaactattccccaccgcacagaagaacttactcatcccaggtaatttataacctcactgggcaacgagtggaaaattatcttatatcaactgcaaatgagtttgtccaaaaaagatatggaggttggagttttgggctgcctttgacaaaagaccttcgttttgatataacaggagtccctgccaatagaacacttgccaaggtatggtatgatccagaaggctatcactcccttccagcttacctcaacagcctgaataatttccttctgcgagttaacatgtcaaaatacgatgctgcccgacatggcatcatcatgtatagccatccttatccaggagtgcaagaccaagaacaagccacaatcagcagtttaatcgatattttagtggcactgtctatcttgatgggctactctgtcacyaccgccagctttgtcacctatgttgtaagggaacatcaaaccaaagccaaacagttgcagcacatttcaggcaytggcgtgacatgctactgggtaacaaacttcatttatgacatggttttctacttggtgcctgtagcgttttcaattggtatcattgcgattttcaaattacctgcattctacagtgaaaacaacctaggcgctgtatctctcctacttctcctgtttgggtatgcaacattttcttggatgtacttgctggctgggctcttccatgaaacaggaatggccttcatcacttacgtctgtgtcaacttgttttttggcattaattccattgtttccctgtcagtggtatactttctttccaaggaaaagcctaatgatccgactttagaacttatttctgaaaccctcaagcgcattttcctgattttcccacaattctgttttggctacggtttgattgaactttctcaacaacagtcggtcctagacttcttaaaagcatatggagtggaatacccaaatgaaacctttgagatgaataaactaggtgcaatgtttgtggctttggtttctcagggcaccatgtttttttccttgcgactcttaatcaacgaatccctgataaagaaactcaggcttttcttcagaaaatttaattcttcacatgtaagggagacaatagatgaggatgaagatgtgcgggctgagagattaagagttgagagtggtgcagctgaatttgacttggtccaactttattgtctcacaaagacctaccaacttatccacaaaaagattatagctgtaaacaacatcagcattgggatacctgctggagagtgttttgggcttcttggagtgaatggagcaggaaagaccactatattcaagatgctgacaggagacatcattccttcaagtggaaacattctgatcagaaataagaccggatctctgggtcacgttgattctcacagctcattagttggctactgtcctcaggaagatgccttagatgacctggtaactgtggaagaacatttgtatttctatgccagggtacatggaattccagaaaaggatattaaagaaactgttcataaactccttaggagacttcacctgatgcccttcaaggacagagctacctctatgtgcagttatggcacaaaaagaaaattatccactgcactggccttgatagggaaaccttccattctactgctggatgagccgagctctggcatggatccgaagtcgaaacggcacctctggaagatcatttcagaagaagtacagaacaaatgttccgtcatcctcacatctcacagcatggaagaatgtgaagctctctgtaccaggttggccattatggtgaatggaaagtttcaatgtattggatctttgcagcacataaagagcaggtttggacgaggatttactgtcaaagttcacttgaagaataacaaagtgaccatggagaccctcacaaagttcatgcagctgcactttccaaaaacatacttaaaagatcagcacctcagcatgctagagtatcatgtaccagtcacagcaggaggagtcgcaaacatttttgatctgctggaaaccaacaagactgctttaaatattacaaatttcttagtgagtcagaccactctggaagaggttttcatcaactttgccaaagaccagaagtcctatgaaactgctgataccagcagccaaggttccactataagtgttgactcacaagatgaccagatggagtcttaacacttccagcaa

SEQ ID NO: 1122 - protein, 2000 aa, Homo sapien
  unsure 1707: unknown amino acid
MFTYIKIITSGDSDNITHVWNEDDGQTLSPSSLAAQLLILENFEDALLNISANSPYIPYLACVRNVTDSLARGSPENLRLLQSTIRFKKSFLRNGSYEDYFPPVPEVLKSKLSQLRNLTELLCESETFSLIEKSCQLSDMSFGSLCEESEFDLQLLEAAELGTEIAASLLYHDNVISKKVRDLLTGDPSKINLNMDQFLEQALQMNYLENITQLIPIIEAMLHVNNSADASEKPGQLLEMFKNVEELKEDLRRTTGMSNRTIDKLLAIPIPDNRAEIISQVFWLHSCDTNITTPKLEDAMKEFCNLSLSERSRQSYLIGLTLLHYLNIYNFTYKVFFPRKDQKPVEKMMELFIRLKEILNQMASGTHPLLDKMRSLKQMHLPRSVPLTQAMYRSNRMNTPQGSFSTISQALCSQGITTEYLTAMLPSSQRPKGNHTKDFLTYKLTKEQIASKYGIPINTTPFCFSLYKDIINMPAGPVIWAFLKPMLLGRILYAPYNPVTKAIMEKSDVTLRQLAELREKSQEWMDKSPLFMNSFHLLNQAIPMLQNTLRNPFVQVFVKFSVGLDAVELLKQIDELDILRLKLENNIDIIDQLNTLSSLTVNISSCVLYDRIQAAKTIDEMEREAKRLYKSNELFGSVIFKLPSNRSWHRGYDSGNVFLPPVIKYTIRMSLKTAQTTRSLRTKIWAPGPHNSPSHNQIYGRAFIYLQDSIERAIIELQTGRNSQEIAVQVQAIPYPCFMKDNFLTSVSYSLPIVLMVAWVVFIAAFVKKLVYEKDLRLHEYMKMMGVNSCSHFFAWLIESVGFLLVTIVILIIILKFGNILPKTNGFILFLYFSDYSFSVIAMSYLISVFFNNTNIAALIGSLIYIIAFFPFIVLVTVENELSYVLKVFMSLLSPTAFSYASQYIARYEEQGIGLQWENMYTSPVQDDTTSFGWLCCLILADSFIYFLIAWYVRNVFPGTYGMAAPWYFPILPSYWKERFGCAEVKPEKSNGLMFTNIMMQNTNPSASPEYMFSSNIEPEPKDLTVGVALHGVTKIYGSKVAVDNLNLNFYEGHITSLLGPNGAGKTTTISMLTGLFGASAGTIFVYGKDIKTDLHTVRKNMGVCMQHDVLFSYLTTKEHLLLYGSIKVPHWTKKQLHEEVKRTLKDTGLYSHRHKRVGTLSGGMKRKLSISIALIGGSRVVILDEPSTGVDPCSRRSIWDVISKNKTARTIILSTHHLDEAEVLSDRIAFLEQGGLRCCGSPFYLKEAFGDGYHLTLTKKKSPNLNANAVCDTMAVTAMIQSHLPEAYLKEDIGGELVYVLPPFSTKVSGAYLSLLRALDNGMGDLNIGCYGISDTTVEEVFLNLTKESQKNSAMSLEHLTQKKIGNSNANGISTPDDLSVSSSNFTDRDDKILTRGERLDGFGLLLKKIMAILIKRFHHTRRNWKGLIAQVILPIVFVTTAMGLGTLRNSSNSYPEIQISPSLYGTSEQTAFYANYHPSTEALVSAMWDFPGIDNMCLNTSDLQCLNKDSLEKWNTSGEPITNFGVCSCSENVQECPKFNYSPPHRRTYSSQVIYNLTGQRVENYLISTANEFVQKRYGGWSFGLPLTKDLRFDITGVPANRTLAKVWYDPEGYHSLPAYLNSLNNFLLRVNMSKYDAARHGIIMYSHPYPGVQDQEQATISSLIDILVALSILMGYSVTTASFVTYVVREHQTKAKQLQHISGXGVTCYWVTNFIYDMVFYLVPVAFSIGIIAIFKLPAFYSENNLGAVSLLLLLFGYATFSWMYLLAGLFHETGMAFITYVCVNLFFGINSIVSLSVVYFLSKEKPNDPTLELISETLKRIFLIFPQFCFGYGLIELSQQQSVLDFLKAYGVEYPNETFEMNKLGAMFVALVSQGTMFFSLRLLINESLIKKLRLFFRKFNSSHVRETIDEDEDVRAERLRVESGAAEFDLVQLYCLTKTYQLIHKKIIAVNNISIGIPAGECFGLLGVNGAGKTTIFKMLTGDIIPSSGNILIRN

SEQ ID NO: 1123 - DNA, 5426 bp, Homo sapien
  Unsure 5201, 5208, 5212, 5235, 5426: Unknown base
tggctcagttactcaaaagctcaagatgactgcaacaggggtgcctgtcatcccaccactggtgatctcctggtgggcaggaacacgcagcttatggcttcttctacctgtgggctgagcagagcccagaaatactgcatcctcagttacctggagggggaacaaaaatgcttcatctgtgactctagatttccatatgatccgtatgaccaacccaacagccacaccattgagaatgtcattgtaagttttgaaccagacagagaaaagaaatggtggcaatctgaaaatggtcttgatcatgtcagcatcagactggacttagaggcattatttcggttcagccaccttatcctgacctttaagacttttcggcctgctgcaatgttagttgaacgttccacagactatggacacaactggaaagtgttcaaatattttgcaaaagactgtgccacttcctttcctaacatcacatctggccaggcccagggagtgggagacattgtttgtgactccaaatactcggatattgaaccctcaacaggtggagaggttgttttaaaagttttggatcccagttttgaaattgaaaacccttatagcccctacatccaagaccttgtgacattgacaaacctgaggataaactttaccaagctccacacccttggggatgctttgcttggaaggaggcaaaatgattcccttgataaatactactatgctctgtacgagatgattgttcggggaagctgcttttgcaatggccatgctagcgaatgtcgccctatgcagaagatgcggggagatgttttcagccctcctggaatggttcacggtcagtgtgtgtgtcagcacaatacagatggtccgaactgtgagagatgcaaggacttcttccaggatgctccttggaggccagctgcagacctccaggacaacgcttgcagatcgtgcagctgtaacagccactccagccgctgtcactttgacatgactacgtacctggcaagcggtggcctcagcgggggcgtgtgtgaagactgccagcacaacactgaggggcagcactgcgaccgctgcagacccctcttctacagggacccgctcaagaccatctcagatccctacgcgtgcattcgtgagtccccggcttgtgaatgtgaccccgatgggaccatatctggtggcatttgtgtgagccactctgatcctgccttagggtctgtggccggccagtgcctttgtaaagagaacgtggaaggagccaaatgcgaccagtgcaaacccaaccactacggactaagcgccaccgaccccctgggctgccagccctgcgactgtaacccccttgggagtctgccattcttgacctgtgatgtggatacaggccaatgcttgtgcctgtcatatgtcaccggagcacactgcgaagaatgcactgttggatactggggcctgggaaatcatctccatgggtgttctccctgtgactgtgatattggaggtgcttattctaacgtgtgctcacccaagaatgggcagtgtgaatgccgcccacatgtcactggccgtagctgctctgaaccagcccctggctacttctttgctcctttgaatttctatctctacgaggcagaggaagccacaacactccaaggactggcgcctttgggctcggagacgtttggccagagtcctgctgttcacgttgttttaggagagccagttcctgggaaccctgttacatggactggacctggatttgccagggttctccctggggctggcttgagatttgctgtcaacaacattccctttcctgtggacttcaccattgccattcactatgaaacccaggtatcctttaactcaccagactgtccagattgtggtgaacccccctggagggagtgagcactgcatacccaagactctacagtcaaagcctcagtcttttgccttaccagcggctacgagaatcatgctgcttcccacacccatctgtttagaaccagatgtacaatattccatagatgtctatttttctcagcctttgcaaggagagtcccacgctcattcacatgtcctggtggactctcttggccttattccccaaatcaattcattggagaatttctgcagcaagcaggacttagatgagtatcagcttcacaactgtgttgaaattgcctcagcaatgggacctcaagtgctcccgggtgcctgtgaaaggctgatcatcagcatgtctgccaagctgcatgatggggctgtggcctgcaagtgtcacccccagggctcagtcggatccagctgcagccgacttggaggccagtgccagtgtaaacctcttgtggtcgggcgctgctgtgacaggtgctcaactggaagctatgatttggggcatcacggctgtcacccatgtcactgccatcctcaaggatcaaaggacactgtatgtgaccaagtaacaggacagtgcccctgccatggagaggtgtctggccgccgctgtgatcgctgcctggcaggctactttggatttcccagctgccacccttgcccttgtaataggtttgctgaactttgtgatcctgagacagggtcatgcttcaattgtggaggctttacaactggcagaaactgtgaaaggtgtattgatggttactatggaaatccttcttcaggacagccctgtcgtccttgcctgtgtccagatgatccctcaagcaatcagtattttgcccattcctgttatcagaatctgtggagctcagatgtaatctgcaattgtcttcaaggttatacgggtactcagtgtggagaatgctctactggtttctatggaaatccaagaatttcaggagcaccttgccaaccatgtgcctgcaacaacaacatagatgtaaccgatccagagtcctgcagccgggtaacaggggagtgccttcgatgtttgcacaacactcagggcgcaaactgccagctctgcaaaccaggtcactatggatcagccctcaatcagacctgcagaagatgctcctgccatgcttccggcgtgagtcccatggagtgtccccctggtgggggagcttgcctctgtgaccctgtcactggtgcatgtccttgtctgccgaatgtcacaggcctggcctgtgaccgttgtgctgatggatactggaatctggtccctggcagaggatcatgtgattgtaacagggcaggtacccagaagcccatctgtgatccagacacaggcatgtgccgctgccgggagggtgtcagcggccagagatgtgatcgctgtgcccggggacacagccaggaattccctacttgtcttcaatgtcacttgtgctttgatcagtgggaccacaccatttcttccctctccaaagcggtgcaagggttaatgagactggctgctaacatggaagataaaagagagaccctgcctgtctgtgaggcagacttcaaagacctcagagggaacgtgtctgaaatagaaaggattttgaaacatcctgttttcccatctgggaaattcttaaaagtcaaggattatcatgactctgttagaagacaaatcatgcagctaaatgaacaactgaaagcagtgtatgaatttcaagatctgaaagatacaatagaaagagcaaagaatgaagcagacctcttacttgaagaccttcaggaagaaattgatttgcaatccagtgtccttaatgcaagcattgcggactcctcagaaaacatcaagaaatattatcacatatcatcatctgctgaaaagaaaattaatgaaactagttccaccattaatacctctgcaaatacaaggaatgacttacttaccatcttagatacactaacctcaaaaggaaacttgtcattggaaagattaaagcagattaagataccagatatccaaatattgaatgaaaaggtgtgcggagatccaggaaatgtgccatgtgtgcccttgccctgtggcggtgctctctgcacgggccggaaggggcacaggaagtgtaggggtcccggctgtcacggctccctgaccctctcaacgaatgccctccaaaaagcccaggaagcaaaatccattattcgtaatttggacaaacaggttcgtgggttgaaaaatcagatcgaaagtataagtgaacaggcagaagtctccaaaaacaatgccttacagctgagggaaaaactgggaaatataagaaaccaaagtgactctgaagaagaaaacatcaatcttttcatcaaaaaagtgaaaaactttttgttagaggaaaacgtgcctccagaagacatcgagaaggttgcgaatggtgtgcttgacattcacctaccaattccatcccaaaatctaaccgatgaacttgtcaaaatacagaaacatatgcaactctgtgaggattacaggacagatgaaaacaggttaaatgaagaagcagatggagcccaaaagcttttggtgaaggccaaagcagctgagaaagcagcaaatattctattaaatcttgacaaaacattgaaccagttacaacaagctcaaatcactcaaggacgggcaaactctaccattacacagctgactgccaatataacaaaaataaaaaagaatgtgctgcaggaatttgttgagctgaaaaaacaatatgctattctccaacgtaagacaagcactacaggactaacaaaggagacattaggaaaagttaaacagctaaaagatgcggcagaaaaattggctggagatacagaggccaagataagaagaataacagatttagaaaggaaaatccaagatttgaatctaagtagacaagcaaaagctgatcaactgagaatattggaagatcaagttgttgccattaaaaatgaaattgttgaacaagaaaaaaaatatgctaggtgctatagctaggcagagttaaagagcaaaagcttgtgcctttgtttctggttcctgatgtacaagcccctggggctctgttgaacctgtgaaatactgacaatgtcttctaccttccttccccacaccctgtccttattagacacctgcacagtgtggctggaggttgaaatgccaccaggaaaatgccacttcataattgaaaggggaaagtaatgaaattgtctctggtttcagaaacttttcctcttaccttcctttctctttcctnacttttntatnacagtttccatattacaagtagntatttaagtaagtactctactaacttataatcatttcagtcagataaacctaaacattaaataaatatctccaatattaggatggaatacatatgtatggcatgtactagattgtcctatattttatgtttatttggatttgcttttatttgtaaaattattcttttctgaataaactgcatacaattcan

SEQ ID NO: 1124 - protein, 1029 aa, Homo sapien
  Unsure 5201, 5208, 5212, 5235, 5426: Unknown amino acid
MKPRYPLTHQTVQIVVNPPGGSEHCIPKTLQSKPQSFALPAATRIMLLPTPICLEPDVQYSIDVYFSQPLQGESHAHSHVLVDSLGLIPQINSLENFCSKQDLDEYQLHNCVEIASAMGPQVLPGACERLIISMSAKLHDGAVACKCHPQGSVGSSCSRLGGQCQCKPLVVGRCCDRCSTGSYDLGHHGCHPCHCHPQGSKDTVCDQVTGQCPCHGEVSGRRCDRCLAGYFGFPSCHPCPCNRFAELCDPETGSCFNCGGFTTGRNCERCIDGYYGNPSSGQPCRPCLCPDDPSSNQYFAHSCYQNLWSSDVICNCLQGYTGTQCGECSTGFYGNPRISGAPCQPCACNNNIDVTDPESCSRVTGECLRCLHNTQGANCQLCKPGHYGSALNQTCRRCSCHASGVSPMECPPGGGACLCDPVTGACPCLPNVTGLACDRCADGYWNLVPGRGSCDCNRAGTQKPICDPDTGMCRCREGVSGQRCDRCARGHSQEFPTCLQCHLCFDQWDHTISSLSKAVQGLMRLAANMEDKRETLPVCEADFKDLRGNVSEIERILKHPVFPSGKFLKVKDYHDSVRRQIMQLNEQLKAVYEFQDLKDTIERAKNEADLLLEDLQEEIDLQSSVLNASIADSSENIKKYYHISSSAEKKINETSSTINTSANTRNDLLTILDTLTSKGNLSLERLKQIKIPDIQILNEKVCGDPGNVPCVPLPCGGALCTGRKGHRKCRGPGCHGSLTLSTNALQKAQEAKSIIRNLDKQVRGLKNQIESISEQAEVSKNNALQLREKLGNIRNQSDSEEENINLFIKKVKNFLLEENVPPEDIEKVANGVLDIHLPIPSQNLTDELVKIQKHMQLCEDYRTDENRLNEEADGAQKLLVKAKAAEKAANILLNLDKTLNQLQQAQITQGRANSTITQLTANITKIKKNVLQEFVELKKQYAILQRKTSTTGLTKETLGKVKQLKDAAEKLAGDTEAKIRRITDLERKIQDLNLSRQAKADQLRILEDQVVAIKNEIVEQEKKYARCYS

SEQ ID NO: 1125 - DNA, 1447 bp, Homo sapien
  Unsure 1346, 1352, 1356, 1358: Unknown base
ggtacataagatccattaggtttgagctgtgttgactaccactgctttttccttggtctcacttacgtcttggaagatggctctgcagatccctggaggcttttgggcagcagctgtgaccgtgatgctggtgatgctgagcaccccagtggctgaggccagagactttcccaaggatttcttggtccagtttaagggcatgtgctacttcaccaacgggacagagcgcgtgcggggtgtggccagatacatctataaccgcgaggagtacgggcgcttcgacagcgacgttggggagttccaggcggtgaccgagctggggcggagcatcgaggactggaacaactataaggacttcttggagcaggagcgggccgcggtggacaaggtgtgcagacacaactacgaggcggagctacgcacgaccttgcagcggcaagtggagcccacagtgaccatctccccatccaggacagaggccctcaaccaccacaacctgctggtctgctcagtgacagatttctatccagcccagatcaaagtccagtggtttcggaatgaccaggaggagacagccggtgttgtgtccacctccttcattaggaatggtgactggaccttccagattctggtgatgctggaaataactccccagcgtggagacatctacacctgccaagtggagcaccccagcctccagagccccatcaccctggagtggcgacctcgagggcctccaccagcaggactcctgcactgactcctgaggacttttgtctgggattggtcatcactcttctgtaatgcccacctgcccctgcccagaattcctagctgcctgtgtcatcctgtcccactgaggtcagagtcctacagtggctcatgcagccacaggtcaccttctgtgatccccatcccaaggcactggcggtgactctgcttcctgcactgacccagagcctctgcctgtgcactgcaagctgtgtctactcaggccccaaggggcatctctgtttccattctccccccacagacctgtcaagagaagcatgacaaacaaaatcatttacctgactttagtgctttttcccataattaaacctgattctgagttaaaaaaagataaataatatagataaaaaggcgcctgtgagcctttccaccggggattattcggggcgggtactaggggggggttagagtttcgtaatagttgtgtgtcggtggctctggggggggctgaacaaatccccgaagtgggtgtattagggggcaacggggcgttttaaaactcggagtgggaaaactgggtgttaccaaataatgcctttggggttcctctttgncagccnatcntnggaggagatgactgtggatctttgtcgggtgtaaattaggtgttgagacatggatgttgagtgttgtagcgtgtgtttgtataatagtt

SEQ ID NO: 1126 - protein, 227 aa, Homo sapien
  Unsure 1346, 1352, 1356, 1358: Unknown amino acid
MALQIPGGFWAAAVTVMLVMLSTPVAEARDFPKDFLVQFKGMCYFTNGTERVRGVARYIYNREEYGRFDSDVGEFQAVTELGRSIEDWNNYKDFLEQERAAVDKVCRHNYEAELRTTLQRQVEPTVTISPSRTEALNHHNLLVCSVTDFYPAQIKVQWFRNDQEETAGVVSTSFIRNGDWTFQILVMLEITPQRGDIYTCQVEHPSLQSPITLEWRPRGPPPAGLLH

SEQ ID NO: 1127 - DNA, 1295 bp, Homo sapien
gtgaaagagcaggttctgcttctttggtgtagtcctgaagcttcctaagaaacttcacatcaggtgatggataggagcaaccctgtaaaaccagccttagactatttttcaaacaggctggtgaattaccagatctccgtcaagtgcagtaaccagttcaagttggaagtgtgtcttttgaatgcagaaaacaaagtcgtggacaaccaggctgggacccagggccagctgaaggtgctgggtgccaacctctggtggccgtacctgatgcacgaacaccccgcctacctgtactcgtgggaggatggtgattgctcacaccaaagccttggacccctcccagcctgtgacctttgtgaccaactccacctacgcagcagacaagggggctctgtatgtggatgtgatccgtgtgaacggctactactcttggtatcgcaactacgggcacctggagttgattcagctgcagctggccgcccagtttgagaattggtgtaagacatcacaatcccattattcagagcgcgtatggagtggaaacgcttgtagggtttcaccaggtaagcggtgttgaactttctgcttgtgtattctctctgggcagagatgccacttgcctcccccaccatgccatctctgaagaatattacagaccattttggagcatggtgaataagaaattttcaccttaggagttcagttgaatagtcatttttatatttgtgactgcaagtcactcttaggggctgtacttccttagtactggtagcattattatccaatggacttttatagctttcattaggttttcttttgtttttgttctttaaagaacgttttacttatcttagtatttcatttttcatctatattatgaggcagtaagagtcttctgtttttccaaagttgagactgctttatatttatttcgtattgtctacagctgtagtgttcaatacattagccactagccacatgtggttatttaaataagataaaataaaaattggccgggcgtggtgggtcacgccggtaatcccagcactttgggaggccgaggcgggcagatcattaggtcaggagatcgagaccatccttactaagacggtgaacccccatctctattaaaaatacaaaaaattagccgggcgtggtggcgggcgcctgcagtcccagctactcaggaggctgaggcaggagaatggcgtgaacctgggaggcagagtttgcagtgagccgagatggcgccactgcactccagcctggggacagagcgagactccatctcaaaa

SEQ ID NO: 1128 - protein, 140 aa, Homo sapien
MDRSNPVKPALDYFSNRLVNYQISVKCSNQFKLEVCLLNAENKVVDNQAGTQGQLKVLGANLWWPYLMHEHPAYLYSWEDGDCSHQSLGPLPACDLCDQLHLRSRQGGSVCGCDPCERLLLLVSQLRAPGVDSAAAGRPV

SEQ ID NO: 1129 - DNA, 4877 bp, Homo sapien
gcccgaaacccggaagtgagcggcggcagctgcgaggctcggagaaacaggcgccgcgggctccgcgcccggccggacccgggcccgagatcatgatgctgccgccaccgccgccaccacggagcgagaagcccagatagacgccccggcggccccgggtcctggagtcccgccgcctgctgcccggccgaggaccccaccccgcctgccgcccgatgcttgcagtggggcccgccatggacagggattacccgcagcatgaacccccgccggcgggcagcctcctgtacagcccgccgcccctgcagagcgccatgctgcactgcccctactggaacaccttctcgctgccgccataccctgccttctccagcgacagccgcccgttcatgagctccgcctccttcctcggcagccagccctgcccagacaccagctatgcccccgtggccaccgcctccagcttgccaccaaagacctgcgactttgctcaggactcctcctattttgaggacttctccaacatctccatcttctcctcgtccgtggactccctgtcggacatcgtggacacgcccgacttcctgccggctgacagcctcaaccaggtgtccaccatctgggacgataaccctgccccctccacccacgataagctgttccagctcagcaggccgtttgcaggcttcgaggactttctgccctcccacagcaccccgcttctcgtcagctaccaggagcagagtgtgcagagccagccagaggaggaggacgaggctgaggaggaggaggcggaggagctggggcacacagagacctacgccgactacgtgccgtccaagtccaagatcgggaagcagcacccagaccgcgtggtggagaccagcacactgtccagcgtcccacccccagacatcacctacaccctggccctgccctcggacagcggggccctgtctgccctgcagctagaggccatcacctacgcctgccagcaacacgaggtcctgctccccagcgggcagcgcgcgggctttctcatcggcgatggggccggcgtgggcaaaggccggacggtggccggagtcatcctggagaaccacctgcgcggccggaagaaagcattgtggttcagcgtctccaacgacctcaagtacgatgcggagcgcgacctgcgggacatcgaagccacgggcatcgcggtgcacgcgctcagcaagatcaagtacggtgacaccactacctcagagggcgtcctcttcgccacctactccgccctgattggggagagccaggccggtggccagcaccgcactcgcctccggcagatcctggactggtgtggggaggcctttgagggcgtcatcgtgttcgacgagtgtcacaaagccaagaatgccggctccaccaagatgggcaaggccgtgctagacctgcagaacaagctgcccctggcccgcgtggtctacgccagcgccacaggtgcctctgagcctcggaacatgatctacatgagccgcttgggtatctggggcgagggcacacccttccggaactttgaggagttcctgcacgccatcgagaagaggggcgttggcgccatggagatcgtggccatggacatgaaggtcagcggcatgtacatcgcacgccagctcagcttctccggcgtcaccttccgcatcgaggagatcccgctggccccagccttcgagtgcgtctacaaccgcgcagccctgctgtgggccgaggccctgaacgtgttccagcaggcggccgactggatcggcctggagtcgcgcaagtccctgtggggccagttctggtcggcacaccagcgcttcttcaagtatctgtgcatcgcagccaaggtgcgccggctggtggagctggcccgagaggagctggcgcgagacaagtgcgtggtcatcgggctgcagtccacgggcgaggcgcgcacgcgggaggtgctgggggagaacgatgggcacctcaactgcttcgtctcggccgctgaaggcgtgttcctgtcgctaattcagaagcactttccgtccaccaagagaaagcgggacagaggagcgggcagcaagcggaaacggcgacctcggggacgcggggccaaagccccccggctggcgtgcgagacagcgggcgtcatccgcatcagtgacgacagcagcacggagtcggaccctggcctggacagcgacttcaactcctcccccgagtccctggtggatgacgacgttgtcatcgttgatgcagtcgggctccccagtgacgaccggggatccctgtgcctcctgcagagagacccgcatggccccggggtcctggagcgggtggagcggctgaagcaggatctgctggacaaagtgcgccggctgggccgggaactgccagtcaacaccctggacgagctcatcgaccagctgggcggcccccagcgggtggcggagatgaccggcaggaaaggccgcgtggtgtccaggcccgacgggacggtggccttcgagtcgcgggcagagcagggtctgtccatcgaccacgtgaacctcagggagaagcagcgcttcatgagcggcgagaagctcgtggccatcatctcggaggcctccagctcgggtgtctccctccaagccgaccgccgtgtccagaaccagcggcgccgcgtgcacatgaccttggagctgccgtggagcgccgaccgcgccatccagcagttcggccgcacccaccggtccaaccaggtctccgcgccagagtatgtcttcctcatctcggagctggccggggagcgccggttcgcctccatcgtggccaagcgcctggagagtctgggggccctgacccacggagaccgccgcgccacggagtcccgtgacctcagcaagtacaactttgagaacaagtatggcacccgggccctgcactgtgtcctcaccaccatcctgagccagactgagaacaaagtgcctgtgccccagggataccctggaggggtccccaccttcttccgggacatgaagcagggcctgctgtctgtgggcattggtggccgggagtcccggaatggctgcctggacgtggagaaggactgttccatcaccaagttcctgaaccgcatcctggggctggaggtgcacaagcagaatgccctgttccagtacttctcagacaccttcgaccacctcatcgagatggacaagcgggagggcaaatacgacatgggcatcctggaccttgctcccggtatcgaggagatctacgaggagagccagcaggtgttcctggctcccgggcacccgcaggacgggcaggtggtcttctacaagatcagcgtggaccgcggcctgaagtgggaggacgcctttgccaagtcgctggcgctgacgggcccctatgacggcttctacctctcctacaaggtccgcggtaacaagcccagctgcctgctggcggagcagaaccgcggccagttcttcacggtgtacaagcccaacatcggccggcagagccagctggaggccctggacagcctccgccgcaagttccaccgggtcaccgcggaggaggccaaggagccctgggagagtggctacgctttgtcgctgacgcactgcagccacagcgcctggaaccggcactgccggctggcgcaggagggtaaggactgcctgcaggggctgcggctgcggcaccactacatgctgtgcggcgcgctgctgcgcgtgtggggccgcatcgccgccgtcatggccgacgtcagcagcagcagctacctgcagatcgtgcggctgaagaccaaggacaggaagaagcaagtgggcatcaagatccccgagggctgcgtgcgccgggtgctgcaggagctgcggctgatggatgcggacgtgaagcgcaggcaggcgcccgccctgggctgccccgccccgcccgccccgcgcccgctggcgctgccttgcggccccggagaggtgctggacctcacctacagccccccggccgaggccttcccgccgcccccgcacttctctttcccggcgccgctgtccctggacgccggccccggcgtcgtgccgctgggcacccccgacgcccaggccgaccctgcggccctcgcgcaccagggctgcgacatcaacttcaaggaggtgctggaggacatgctgcgctcgctgcacgcggggccgccctccgagggcgcgctgggggagggcgcgggggcggggggcgcggcgggcggtggtcccgagcggcagagcgtgatccagttcagcccacccttccccggcgcccaggctcctctctgacacgcctttaggcgaaacatgccccaagacacagggaccgtttctcccctaggagcagcggtggggagcagggccaaggtcccctgaccactgctcagaggagccctaggccctggccgcagtgccttcagcgcccgacccgggcccccacctggtcagccctggcggggcccactcaggacagctgggggccggggcgtggcagggccctctctgtgcctctcctcctaagtaggaaggggctccgggtggctgctctgggactgggcacccacaagggctcagtgggcccaaacccttgaaatccgtgaaaccgggtggtcccaagagctagaaactcaggaaaccccaggtgctcagggccccgcgtctcgggggctccgtggggcagacccctgctaatatatgcaattctccctcccccagcccttccctgacccctaagttattgcccgctcacctctcccaggccccaggccgcggagctggcagggtggcgcctgcggtttctatgtatttatagcaagttctgatgtacatatgtaaaggacttttttaaat

SEQ ID NO: 1130 - protein, 1366 aa, Homo sapien
MLAVGPAMDRDYPQHEPPPAGSLLYSPPPLQSAMLHCPYWNTFSLPPYPAFSSDSRPFMSSASFLGSQPCPDTSYAPVATASSLPPKTCDFAQDSSYFEDFSNISIFSSSVDSLSDIVDTPDFLPADSLNQVSTIWDDNPAPSTHDKLFQLSRPFAGFEDFLPSHSTPLLVSYQEQSVQSQPEEEDEAEEEEAEELGHTETYADYVPSKSKIGKQHPDRVVETSTLSSVPPPDITYTLALPSDSGALSALQLEAITYACQQHEVLLPSGQRAGFLIGDGAGVGKGRTVAGVILENHLRGRKKALWFSVSNDLKYDAERDLRDIEATGIAVHALSKIKYGDTTTSEGVLFATYSALIGESQAGGQHRTRLRQILDWCGEAFEGVIVFDECHKAKNAGSTKMGKAVLDLQNKLPLARVVYASATGASEPRNMIYMSRLGIWGEGTPFRNFEEFLHAIEKRGVGAMEIVAMDMKVSGMYIARQLSFSGVTFRIEEIPLAPAFECVYNRAALLWAEALNVFQQAADWIGLESRKSLWGQFWSAHQRFFKYLCIAAKVRRLVELAREELARDKCVVIGLQSTGEARTREVLGENDGHLNCFVSAAEGVFLSLIQKHFPSTKRKRDRGAGSKRKRRPRGRGAKAPRLACETAGVIRISDDSSTESDPGLDSDFNSSPESLVDDDVVIVDAVGLPSDDRGSLCLLQRDPHGPGVLERVERLKQDLLDKVRRLGRELPVNTLDELIDQLGGPQRVAEMTGRKGRVVSRPDGTVAFESRAEQGLSIDHVNLREKQRFMSGEKLVAIISEASSSGVSLQADRRVQNQRRRVHMTLELPWSADRAIQQFGRTHRSNQVSAPEYVFLISELAGERRFASIVAKRLESLGALTHGDRRATESRDLSKYNFENKYGTRALHCVLTTILSQTENKVPVPQGYPGGVPTFFRDMKQGLLSVGIGGRESRNGCLDVEKDCSITKFLNRILGLEVHKQNALFQYFSDTFDHLIEMDKREGKYDMGILDLAPGIEEIYEESQQVFLAPGHPQDGQVVFYKISVDRGLKWEDAFAKSLALTGPYDGFYLSYKVRGNKPSCLLAEQNRGQFFTVYKPNIGRQSQLEALDSLRRKFHRVTAEEAKEPWESGYALSLTHCSHSAWNRHCRLAQEGKDCLQGLRLRHHYMLCGALLRVWGRIAAVMADVSSSSYLQIVRLKTKDRKKQVGIKIPEGCVRRVLQELRLMDADVKRRQAPALGCPAPPAPRPLALPCGPGEVLDLTYSPPAEAFPPPPHFSFPAPLSLDAGPGVVPLGTPDAQADPAALAHQGCDINFKEVLEDMLRSLHAGPPSEGALGEGAGAGGAAGGGPERQSVIQFSPPFPGAQAPL

SEQ ID NO: 1131 - DNA, 570 bp, Homo sapien
  Unsure 148, 151-152: Unknown base
aagaaccaaatgttataaatatttgctgaagtttatacattttaatctgcattaaggtaatggttagttggtcaatgctgcctctgcctcagtctgcagcgagaacattgtgttttcatttggtaaatacagttgagcatccaccggngtnncaagtggctggtattaggtgctaaggatgcaggggtgaacaaaacaggcccctgcctccatgcaattctcattctctgggtggcacagttttatgcaagttatcacatgtgaaagaatttatagtttttattatgcaagttttcaaataaatccaattgctgttatcttttgtttttcatggaatatctcgcatctcagaacacagtttgggaatcatattttatttagtgttttcagatgctatctattatatctaagatatttcacatttagccattcgttttataaaaaactccaggcaaactcagctggacttttcttgctttaataacagctttattgaggatacaattcacatatctacgaaattctttttaaaaattttacacgttcaggccgggcgcggtggctcatgcc

SEQ ID NO: 1132 - protein, 119 aa, Homo sapien
  Unsure 148, 151-152: Unknown amino acid
MQFSFSGWHSFMQVITCERIYSFYYASFQINPIAVIFCFSWNISHLRTQFGNHILFSVFRCYLLYLRYFTFSHSFYKKLQANSAGLFLLNNSFIEDTIHISTKFFLKILHVQAGRGGSC

SEQ ID NO: 1133 - DNA, 1716 bp, Homo sapien
ggcacgaggggaagacctcctgtcctatcaggccctccccatggctttagagacgatctgccgaccctctgggagaaaatccagcaagatgcaagccttcagaatctgggatgttaaccagaagaccttctatctgaggaacaaccaactagttgccggatacttgcaaggaccaaatgtcaatttagaagaaaagatagatgtggtacccattgagcctcatgctctgttcttgggaatccatggagggaagatgtgcctgtcctgtgtcaagtctggtgatgagaccagactccagctggaggcagttaacatcactgacctgagcgagaacagaaagcaggacaagcgcttcgccttcatccgctcagacagtggccccaccaccagttttgagtctgccgcctgccccggttggttcctctgcacagcgatggaagctgaccagcccgtcagcctcaccaatatgcctgacgaaggcgtcatggtcaccaaattctacttccaggaggacgagtagtactgcccaggcctgcctgttcccattcttgcatggcaaggactgcagggactgccagtccccctgccccagggctcccggctatgggggcactgaggaccagccattgaggggtggaccctcagaaggcgtcacaacaacctggtcacaggactctgcctcctcttcaactgaccagcctccatgctgcctccagaatggtctttctaatgtgtgaatcagagcacagcagcccctgcacaaagcccttccatgtcgcctctgcattcaggatcaaaccccgaccacctgcccaacctgctctcctcttgccactgcctcttcctccctcattccaccttcccatgccctggatccatcaggccacttgatgacccccaaccaagtggctcccacaccctgttttacaaaaaagaaaagaccagtccatgagggaggtttttaagggtttgtggaaaatgaaaattaggatttcatgatttttttttttcagtccccgtgaaggagagcccttcatttggagattatgttctttcggggagaggctgaggacttaaaatattcctgcatttgtgaaatgatggtgaaagtaagtggtagcttttcccttctttttcttctttttttgtgatgtcccaacttgtaaaaattaaaagttatggtactatgttagccccataattttttttttccttttaaaacacttccataatctggactcctctgtccaggcactgctgcccagcctccaagctccatctccactccagattttttacagctgcctgcagtactttacctcctatcagaagtttctcagctcccaaggctctgagcaaatgtggctcctgggggttctttcttcctctgctgaaggaataaattgctccttgacattgtagagcttctggcacttggagacttgtatgaaagatggctgtgcctctgcctgtctcccccaccaggctgggagctctgcagagcaggaaacatgactcgtatatgtctcaggtccctgcagggccaagcacctagcctcgctcttggcaggtactcagcgaatgaatgctgtatatgttgggtgcaaagttccctacttcctgtgacttcagctctgttttacaataaaatcttgaaaatgcctaaaaaaaaaaaaaaaaaaaaaaaaaaaaaaaaaaaaaaaaaaaaaaaaaaaa

SEQ ID NO: 1134 - protein, 159 aa, Homo sapien
MALETICRPSGRKSSKMQAFRIWDVNQKTFYLRNNQLVAGYLQGPNVNLEEKIDVVPIEPHALFLGIHGGKMCLSCVKSGDETRLQLEAVNITDLSENRKQDKRFAFIRSDSGPTTSFESAACPGWFLCTAMEADQPVSLTNMPDEGVMVTKFYFQEDE

SEQ ID NO: 1135 - DNA, 3002 bp, Homo sapien
gccattctctcacatcccgtgcggtcaggaagcccttcctgaactctgacttcagttcttgctgcggtttctgcccatttttttcatatcctctgacagctgcgaggtcatctctgctctggcttttctccaagcagaacaagtgggggctctggaaaggttaagggacctcagtggccaccattatactttgcatctttcctgagaagtgagagttgaaagggaagcaggaaggcccatggtcagattgaaggaaggactttttagtttcttttttttttttttgaaatggagtctcgctctgtcattcaggctggagtgcagtggtgcgatctcagctcactgcagcctccacttcctgggttcacatgattctcctgcctcagcctcccaagtagctgagactacaggcacatgccactacacccagctaacttttgtatttttagtagagacggggtttcaccatgttggccaggctggtctcaaactgctaacatcaagtgatctgctcccctcagcctcccaaagtgctgggattaccggtatgaaccaccacaacctgccaggaatttttagtttttagcttttgcaggagacttcaaggaaaggagacattcctctgtccaggaaacgggtaaggggaccatttctgcattgctggtttcccctcttggcagggtgggcatgaggcatcactgttcctgctccctcactcctgctcctcatgctcagcctgccagctcggcctcaactttgtgtgtctaaagtggaactgaatagtagctgtgagaagataggaaagaggtagtgccaatctccttgcccagatcataaatccagactcagcagggtaaccacatgggcaagcacaaggtaggtgcttggggaaaggggaagtaattggcattctgtgtgataccaaggagaccatttggattttggcttctaccaaagagaatggagaattggttgacctaaatggaaccagtccctttaagtaaggggaggaaagggggtgctggaagatggccctcttcccaccacctagatcatagcttgaactgaagccaaggacagagtgctgcccccttcggcatttactgatgtgccctctttaaatcatgatgttatctaacccaaacccagacccaggacctagtcacagctccaacctacacttcctattaatcttaaaacaaagcgaaacaaacacaaaaagatatcagcattgtagcctccaatctgagcccatttcccttctctggctaccatacctccttctcctatatgataccattcactactttgttcaattatccagtctagacctgcatcttgaggccacacccagccttctcactccccacacccctctttcctctctcactgctccttcctggtctcttctcatctggccccacctctaaggagtcctcctgccttctgggttgccctggaaaacagactatcccccctcctagtgaagggagtgggtaggggtttcagccccaccctcaggaagatgcgtcttccctgtcctctgctctgtggtacttcctctctggctgatttagcaaacagcacctagacctggggccaggcctttggcagtgggacagatccagggataggctacaccaccctgccctgaccctgggattggcatcagcttccaaccagttcctgccaaagcttgtaagtcctcccgacggccatgaacactacatcttctgcagcacccccctcactaggtgtagagttcatctctctgctggctatcatcctgctgtcagtggcgctggctgtggggcttcccggcaacagctttgtggtgtggagtatcctgaaaaggatgcagaagcgctctgtcactgccctgatggtgctgaacctggccctggccgacctggccgtattgctcactgctccctttttccttcacttcctggcccaaggcacctggagttttggactggctggttgccgcctgtgtcactatgtctgcggagtcagcatgtacgccagcgtcctgcttatcacggccatgagtctagaccgctcactggcggtggcccgcccctttgtgtcccagaagctacgcaccaaggcgatggcccggcgggtgctggcaggcatctgggtgttgtcctttctgctggccacacccgtcctcgcgtaccgcacagtagtgccctggaaaacgaacatgagcctgtgcttcccgcggtaccccagcgaagggcaccgggccttccatctaatcttcgaggctgtcacgggcttcctgctgcccttcctggctgtggtggccagctactcggacatagggcgtcggctacaggcccggcgcttccgccgcagccgccgcaccggccgcctggtggtgctcatcatcctgaccttcgccgccttctggctgccctaccacgtggtgaacctggctgaggcgggccgcgcgctggccggccaggccgccgggttagggctcgtggggaagcggctgagcctggcccgcaacgtgctcatcgcactcgccttcctgagcagcagcgtgaaccccgtgctgtacgcgtgcgccggcggcggcctgctgcgctcggcgggcgtgggcttcgtcgccaagctgctggagggcacgggttccgaggcgtccagcacgcgccgcgggggcagcctgggccagaccgctaggagcggccccgccgctctggagcccggcccttccgagagcctcactgcctccagccctctcaagttaaacgaactgaactaggcctggtggaaggaggcgcactttcctcctggcagaatgctagctctgagccagttcagtacctggaggaggagcaggggcgtggagggcgtggagggcgtgggagcgtgggaggcgggagtggagtggaagaagagggagagatggagcaaagtgagggccgagtgagagcgtgctccagcctggctcccacaggcagctttaaccattaaaactgaagtctgaa

SEQ ID NO: 1136 - protein, 352 aa, Homo sapien
MNTTSSAAPPSLGVEFISLLAIILLSVALAVGLPGNSFVVWSILKRMQKRSVTALMVLNLALADLAVLLTAPFFLHFLAQGTWSFGLAGCRLCHYVCGVSMYASVLLITAMSLDRSLAVARPFVSQKLRTKAMARRVLAGIWVLSFLLATPVLAYRTVVPWKTNMSLCFPRYPSEGHRAFHLIFEAVTGFLLPFLAVVASYSDIGRRLQARRFRRSRRTGRLVVLIILTFAAFWLPYHVVNLAEAGRALAGQAAGLGLVGKRLSLARNVLIALAFLSSSVNPVLYACAGGGLLRSAGVGFVAKLLEGTGSEASSTRRGGSLGQTARSGPAALEPGPSESLTASSPLKLNELN

SEQ ID NO: 1137 - DNA, 2780 bp, Homo sapien
gtgggcggaccgcgcggctggaggtgtgaggatccgaacccaggggtggggggtggaggcggctcctgcgatcgaaggggacttgagactcaccggccgcacgccatgagggccctgtgggtgctgggcctctgctgcgtcctgctgaccttcgggtcggtcagagctgacgatgaagttgatgtggatggtacagtagaagaggatctgggtaaaagtagagaaggatcaaggacggatgatgaagtagtacagagagaggaagaagctattcagttggatggattaaatgcatcacaaataagagaacttagagagaagtcggaaaagtttgccttccaagccgaagttaacagaatgatgaaacttatcatcaattcattgtataaaaataaagagattttcctgagagaactgatttcaaatgcttctgatgctttagataagataaggctaatatcactgactgatgaaaatgctctttctggaaatgaggaactaacagtcaaaattaagtgtgataaggagaagaacctgctgcatgtcacagacaccggtgtaggaatgaccagagaagagttggttaaaaaccttggtaccatagccaaatctgggacaagcgagtttttaaacaaaatgactgaagcacaggaagatggccagtcaacttctgaattgattggccagtttggtgtcggtttctattccgccttccttgtagcagataaggttattgtcacttcaaaacacaacaacgatacccagcacatctgggagtctgactccaatgaattttctgtaattgctgacccaagaggaaacactctaggacggggaacgacaattacccttgtcttaaaagaagaagcatctgattaccttgaattggatacaattaaaaatctcgtcaaaaaatattcacagttcataaactttcctatttatgtatggagcagcaagactgaaactgttgaggagcccatggaggaagaagaagcagccaaagaagagaaagaagaatctgatgatgaagctgcagtagaggaagaagaagaagaaaagaaaccaaagactaaaaaagttgaaaaaactgtctgggactgggaacttatgaatgatatcaaaccaatatggcagagaccatcaaaagaagtagaagaagatgaatacaaagctttctacaaatcattttcaaaggaaagtgatgaccccatggcttatattcactttactgctgaaggggaagttaccttcaaatcaattttatttgtacccacatctgctccacgtggtctgtttgacgaatatggatctaaaaagagcgattacattaagctctatgtgcgccgtgtattcatcacagacgacttccatgatatgatgcctaaatacctcaattttgtcaagggtgtggtggactcagatgatctccccttgaatgtttcccgcgagactcttcagcaacataaactgcttaaggtgattaggaagaagcttgttcgtaaaacgctggacatgatcaagaagattgctgatgataaatacaatgatactttttggaaagaatttggtaccaacatcaagcttggtgtgattgaagaccactcgaatcgaacacgtcttgctaaacttcttaggttccagtcttctcatcatccaactgacattactagcctagaccagtatgtggaaagaatgaaggaaaaacaagacaaaatctacttcatggctgggtccagcagaaaagaggctgaatcttctccatttgttgagcgacttctgaaaaagggctatgaagttatttacctcacagaacctgtggatgaatactgtattcaggcccttcccgaatttgatgggaagaggttccagaatgttgccaaggaaggagtgaagttcgatgaaagtgagaaaactaaggagagtcgtgaagcagttgagaaagaatttgagcctctgctgaattggatgaaagataaagcccttaaggacaagattgaaaaggctgtggtgtctcagcgcctgacagaatctccgtgtgctttggtggccagccagtacggatggtctggcaacatggagagaatcatgaaagcacaagcgtaccaaacgggcaaggacatctctacaaattactatgcgagtcagaagaaaacatttgaaattaatcccagacacccgctgatcagagacatgcttcgacgaattaaggaagatgaagatgataaaacagttttggatcttgctgtggttttgtttgaaacagcaacgcttcggtcagggtatcttttaccagacactaaagcatatggagatagaatagaaagaatgcttcgcctcagtttgaacattgaccctgatgcaaaggtggaagaagagcccgaagaagaacctgaagagacagcagaagacacaacagaagacacagagcaagacgaagatgaagaaatggatgtgggaacagatgaagaagaagaaacagcaaaggaatctacagctgaaaaagatgaattgtaaattatactctcaccatttggatcctgtgtggagagggaatgtgaaatttacatcatttctttttgggagagacttgttttggatgccccctaatccccttctcccctgcactgtaaaatgtgggattatgggtcacaggaaaaagtgggttttttagttgaattttttttaacattcctcatgaatgtaaatttgtactatttaactgactattcttgatgtaaaatcttgtcatgtgtataaaaataaaaaagatcccaaat

SEQ ID NO: 1138 - protein, 803 aa, Homo sapien
MRALWVLGLCCVLLTFGSVRADDEVDVDGTVEEDLGKSREGSRTDDEVVQREEEAIQLDGLNASQIRELREKSEKFAFQAEVNRMMKLIINSLYKNKEIFLRELISNASDALDKIRLISLTDENALSGNEELTVKIKCDKEKNLLHVTDTGVGMTREELVKNLGTIAKSGTSEFLNKMTEAQEDGQSTSELIGQFGVGFYSAFLVADKVIVTSKHNNDTQHIWESDSNEFSVIADPRGNTLGRGTTITLVLKEEASDYLELDTIKNLVKKYSQFINFPIYVWSSKTETVEEPMEEEEAAKEEKEESDDEAAVEEEEEEKKPKTKKVEKTVWDWELMNDIKPIWQRPSKEVEEDEYKAFYKSFSKESDDPMAYIHFTAEGEVTFKSILFVPTSAPRGLFDEYGSKKSDYIKLYVRRVFITDDFHDMMPKYLNFVKGVVDSDDLPLNVSRETLQQHKLLKVIRKKLVRKTLDMIKKIADDKYNDTFWKEFGTNIKLGVIEDHSNRTRLAKLLRFQSSHHPTDITSLDQYVERMKEKQDKIYFMAGSSRKEAESSPFVERLLKKGYEVIYLTEPVDEYCIQALPEFDGKRFQNVAKEGVKFDESEKTKESREAVEKEFEPLLNWMKDKALKDKIEKAVVSQRLTESPCALVASQYGWSGNMERIMKAQAYQTGKDISTNYYASQKKTFEINPRHPLIRDMLRRIKEDEDDKTVLDLAVVLFETATLRSGYLLPDTKAYGDRIERMLRLSLNIDPDAKVEEEPEEEPEETAEDTTEDTEQDEDEEMDVGTDEEEETAKESTAEKDEL

SEQ ID NO: 1139 - DNA, 739 bp, Homo sapien
ctaacccagaaacatccaattctcaaactgaagctcgcactctcgcctccagcatgaaagtctctgccgcccttctgtgcctgctgctcatagcagccaccttcattccccaagggctcgctcagccagatgcaatcaatgccccagtcacctgctgttataacttcaccaataggaagatctcagtgcagaggctcgcgagctatagaagaatcaccagcagcaagtgtcccaaagaagctgtgatcttcaagaccattgtggccaaggagatctgtgctgaccccaagcagaagtgggttcaggattccatggaccacctggacaagcaaacccaaactccgaagacttgaacactcactccacaacccaagaatctgcagctaacttattttcccctagctttccccagacaccctgttttattttattataatgaattttgtttgttgatgtgaaacattatgccttaagtaatgttaattcttatttaagttattgatgttttaagtttatctttcatggtactagtgttttttagatacagagacttggggaaattgcttttcctcttgaaccacagttctacccctgggatgttttgagggtctttgcaagaatcattaatacaaagaattttttttaacattccaatgcattgctaaaatattattgtggaaatgaatattttgtaactattacaccaaataaatatatttttgtacaaaaaaaaaaaaaa

SEQ ID NO: 1140 - protein, 99 aa, Homo sapien
MKVSAALLCLLLIAATFIPQGLAQPDAINAPVTCCYNFTNRKISVQRLASYRRITSSKCPKEAVIFKTIVAKEICADPKQKWVQDSMDHLDKQTQTPKT

SEQ ID NO: 1141 - DNA, 887 bp, Homo sapien
acaaactacccattggaaacacatgcaaaatcactcagtagggatactctcctaaccctgggcaagtgaggtcttcttgcagtaaatagtttccactgaggatggacttagaatgaagctaccttgaggggacacgtaggctactagtattcaggaacaacctgccagagacaatgcaggaagtgtgtgtgaaatgacccaaaagataagagggtagagaaaccctaatggaaggacagatagtgtgaataaaggtagattctgaaaagaatgagctagcacattgtgtaaagatgaggagagaattagggctctggaggagagatctgaggaaaccacccagaatatagcacagagagatacaaagaagaagaatttggatgagtcatgaaaagcttggaggacaggctgagaaggtcccgcagtgtctaactgaattctagaaggaaaggctagggagactggaatagaggccatatgtggaggaatgtgggtgagaacttgctaaactgaggaaaaacactcttccccaggtggaagaggcacactgagttcagagtagtgatggtaaataacaaccacatccaccactagacactctttggtgaactatagggtattaaagacaaagagaaaaattctaaaagcagactgggacaacaaatctgtatttgtagcaggaaaaagcatgaggttcaggttttgactgtactgcttgctgcctgtgtcatcttaagtaggtcacctacctgcttcgagcctcagaggacatctgtcattggctaactgggagtagaagtggctaataacaagaacaatgactaccacacgaggttttgtgagccctgaaatatttccagagaataaatgtaaaagcattttaagtc

SEQ ID NO: 1142 - protein, 22 aa, Homo sapien
MTTTRGFVSPEIFPENKCKSIL

SEQ ID NO: 1143 - DNA, 2878 bp, Homo sapien
ggcacgaggggtccacccagtgcttgcggcctcgcggccgggccggcctgggctgcaatcaatgcggctttgtctgggacgcccacatcccagaggccattcccgggtcggcaaatcggagcgcggccggggcgcgcgggggtgagataagcggccatgtgatcccacctgggctggaaggggaggggcgccaggtgaggcggcggccggcggggcgcgggcggccacgcggggctcctgcagcatggctgtcagcaggaaggactggtccgcgctgtccagccttgcccggcagaggactctggaggatgaggaggaacaggagcgcgagcgcaggcggcggcaccgcaacctgagctccaccacggacgatgaggctcccaggctcagccagaatggagaccggcaggcctctgcttctgagagactaccgagcgtggaagaagcagaggtgcccaagccactgcccccagcctccaaagatgaggacgaggacatccagagcatcctcagaacacggcaggagcggaggcagaggcggcaggtggtggaggctgcacaggcccccatccaggagaggctggaggcagaggaggggaggaacagcttgagccctgtgcaggccacacagaaacccctagtctccaagaaggaactggaaatcccacctcgccggagactgagtcgggaacagcggggcccctgggccctggaggaggagagcttggtgggcagggagccagaagagaggaagaaaggggttccagaaaagtccccagtcttggagaagtcctccatgccaaagaagacggcacctgaaaagagcctggtctccgataaaacctccatctctgagaaggtgctggcctcagagaagacatctctatcagagaagatagcagtgtcagagaaaagaaacagctcagagaagaagtctgttctagaaaaaaccagtgtctctgagaagtcgctggccccagggatggcactgggctcaggaaggaggctggtgtctgagaaagcttccatctttgagaaggcactggcctcagagaagagcccaactgcagatgctaagccggccccaaagagggccacagcctcagagcagcccctggcgcaggagccgccagcctctgggggaagcccagccaccaccaaggagcagagaggaagggccctccctgggaagaacctgccctctttggcaaagcagggggcttcagaccctccgactgtggcctcccgcctcccacccgtcacactccaggtgaaaatccccagcaaggaggaagaggcagatatgtcctcacccacacagcgaacctacagcagctccctcaaacgctccagccccaggaccatctcctttcggatgaaacccaagaaagaaaactcggaaacaaccctaactcgcagtgccagcatgaagctcccagacaacacagtgaagttgggagagaagctggagagataccacacggccatacggagatcagaatctgtcaagtctcggggtctgccttgcactgagttattcgtggctcctgtgggtgtagccagcaagcgccacctctttgagaaggaactggcgggccagagccgagcagaaccagcctccagccggaaggagaacttgaggctctcaggggttgtgacatcaaggctcaacctgtggatcagcaggacccaggaatctggagatcaggacccccaggaggcacagaaagcatcatctgcaaccgagaggactcagtggggacagaaatctgactcctcgctggacgctgaggtgtgacaagccccgccaagacagacctgcaagtcttcgtctcaagggacctccctcatgccaggcccctgcctctcacagcagcaccctttcctctcattgtccctgttccttttttgcctgtggatctgtttggccagggtccctggggtcaggaatatttgcaagactcagccagctccttcccagcccagcctcttggggctgggactttctcaccctgcggcaggcacaacagatgctgggacccagtctctgcccaggtcacagcacaagtgcacatcagcactatggggcctatgtcctgcccagagacctctgctccttcctgctcacatccacagtcagggcacggcgcccctcaagaactccagagtcacctgtctcatcggctcccagcaagtgcctctttgtctatgatgtcccccttctctgaggcctggacccacccatctttgtccctggggcctgctcccagccactgaggcccgctctggccaggggagaaggagctgccgtgcgtcttccctgtgccccgtctccctgcttggttctcccctcccttccctggccggctgccatggccaggagctaagtgcctttttgtgtgcaaccacttaccctttctctgaaaaacctgttctcaggaaggatctgataaactcatttactctcaggtgtaagagactgatgagaccttagaagcgaattcctctctggaggccttgctttctagcagaggtcacctgaagtgtgtgaggaggatcatcattttcctcatcccccctcttctcacattaaggtggtggcttgccactcagcagtcctagcttggtgactgggaactgccacatacagggccaggcctaccctccttccccacaagccccctccaacccccacccccatgctctggacctcatggctcctatgagcttggagcatggtgaaccatcagagaatctagaaccaaccaagctaggaacatcagcctggtgccctgttaaccccttaaagctgtggtttacaacttttcaaaaatttaaatcattagaaaaaaaaaaaaaaaaaaaaaaaaaaaaaaaa

SEQ ID NO: 1144 - protein, 517 aa, Homo sapien
MAVSRKDWSALSSLARQRTLEDEEEQERERRRRHRNLSSTTDDEAPRLSQNGDRQASASERLPSVEEAEVPKPLPPASKDEDEDIQSILRTRQERRQRRQVVEAAQAPIQERLEAEEGRNSLSPVQATQKPLVSKKELEIPPRRRLSREQRGPWPLEEESLVGREPEERKKGVPEKSPVLEKSSMPKKTAPEKSLVSDKTSISEKVLASEKTSLSEKIAVSEKRNSSEKKSVLEKTSVSEKSLAPGMALGSGRRLVSEKASIFEKALASEKSPTADAKPAPKRATASEQPLAQEPPASGGSPATTKEQRGRALPGKNLPSLAKQGASDPPTVASRLPPVTLQVKIPSKEEEADMSSPTQRTYSSSLKRSSPRTISFRMKPKKENSETTLTRSASMKLPDNTVKLGEKLERYHTAIRRSESVKSRGLPCTELFVAPVGVASKRHLFEKELAGQSRAEPASSRKENLRLSGVVTSRLNLWISRTQESGDQDPQEAQKASSATERTQWGQKSDSSLDAEV

SEQ ID NO: 1145 - DNA, 1398 bp, Homo sapien
tagatggcaacctccctatctgcccgcaggtcatagaggcgacacgtagcgtcatctgaccctgaagcaaaggcatctccactccaaagttagacaaaatgccaggaatgttcttctctgctaacccaaaggaattgaaaggaaccactcattcacttctagacgacaaaatgcaaaaaaggaggccaaagacttttggaatggatatgaaagcatacctgagatctatgatcccacatctggaatctggaatgaaatcttccaagtccaaggatgtactttctgctgctgaagtaatgcaatggtctcaatctctggaaaaacttcttgccaaccaaactggtcaaaatgtctttggaagtttcctaaagtctgaattcagtgaggagaatattgagttctggctggcttgtgaagactataagaaaacagagtctgatcttttgccctgtaaagcagaagagatatataaagcatttgtgcattcagatgctgctaaacaaatcaatattgacttccgcactcgagaatctacagccaagaagattaaagcaccaacccccacgtgttttgatgaagcacaaaaagtcatatatactcttatggaaaaggactcttatcccaggttcctcaaatcagatatttacttaaatcttctaaatgacctgcaggctaatagcctaaagtgactggtccctggctgaagggaattaacagatagtatcaaggcacgaaggaatgtgccagtatggctccctgggtgaacagcttggccttttttgggtgtcttgacaggccaagaagaacaaatgactcagaatggattaacatgaaagttatccaggcgcagagttgaagaagcataagcaagacaaaaacagagagaccgcagaaggaggaagatactgtggtactgtcataaaaaacagtggagctctgtattagaaagcccctcagaactgggaaggccaggtaactctagttacacagaaactgtgactaaagtctatgaaactgattacaacaggctgtaagaatcaaagtcaactgacatctatgctacatattattatatagtttgtactgagctattgaagtcccattaacttaaagtatatgttttcaaattgccattgctactattgcttgtcggtgtattttattttattgtttttgactttggaagagatgaactgtgtatttaacttaagctattgctcttaaaaccagggatcagaatatatttgtaagttaaatcattggtgctaataataaatgtggattttgtattaaaatatatagaagcaatttctgtttacatgtccttgctacttttaaaaacttgcatttattcctcagattttaaaaataaataaataattcatttaaaaaaaaaaa

SEQ ID NO: 1146 - protein, 196 aa, Homo sapien
MPGMFFSANPKELKGTTHSLLDDKMQKRRPKTFGMDMKAYLRSMIPHLESGMKSSKSKDVLSAAEVMQWSQSLEKLLANQTGQNVFGSFLKSEFSEENIEFWLACEDYKKTESDLLPCKAEEIYKAFVHSDAAKQINIDFRTRESTAKKIKAPTPTCFDEAQKVIYTLMEKDSYPRFLKSDIYLNLLNDLQANSLK

SEQ ID NO: 1147 - DNA, 3269 bp, Homo sapien
cgcgccagggcgagggcaccgccgccggtcgggcgcgctgggcctgcccggaatcccgccgcctgcgccccgcgccccgcgccctgcgggccatgggagccggccgccggcagggacgacgcctgtgagacccgcgagcggcctcggggaccatggggagcgatcgggcccgcaagggcggagggggcccgaaggacttcggcgcgggactcaagtacaactcccggcacgagaaagtgaatggcttggaggaaggcgtggagttcctgccagtcaacaacgtcaagaaggtggaaaagcatggcccggggcgctgggtggtgctggcagccgtgctgatcggcctcctcttggtcttgctggggatcggcttcctggtgtggcatttgcagtaccgggacgtgcgtgtccagaaggtcttcaatggctacatgaggatcacaaatgagaattttgtggatgcctacgagaactccaactccactgagtttgtaagcctggccagcaaggtgaaggacgcgctgaagctgctgtacagcggagtcccattcctgggcccctaccacaaggagtcggctgtgacggccttcagcgagggcagcgtcatcgcctactactggtctgagttcagcatcccgcagcacctggtggaggaggccgagcgcgtcatggccgaggagcgcgtagtcatgctgcccccgcgggcgcgctccctgaagtcctttgtggtcacctcagtggtggctttccccacggactccaaaacagtacagaggacccaggacaacagctgcagctttggcctgcacgcccgcggtgtggagctgatgcgcttcaccacgcccggcttccctgacagcccctaccccgctcatgcccgctgccagtgggccctgcggggggacgccgactcagtgctgagcctcaccttccgcagctttgaccttgcgtcctgcgacgagcgcggcagcgacctggtgacggtgtacaacaccctgagccccatggagccccacgccctggtgcagttgtgtggcacctaccctccctcctacaacctgaccttccactcctcccagaacgtcctgctcatcacactgataaccaacactgagcggcggcatcccggctttgaggccaccttcttccagctgcctaggatgagcagctgtggaggccgcttacgtaaagcccaggggacattcaacagcccctactacccaggccactacccacccaacattgactgcacatggaacattgaggtgcccaacaaccagcatgtgaaggtgcgcttcaaattcttctacctgctggagcccggcgtgcctgcgggcacctgccccaaggactacgtggagatcaatggggagaaatactgcggagagaggtcccagttcgtcgtcaccagcaacagcaacaagatcacagttcgcttccactcagatcagtcctacaccgacaccggcttcttagctgaatacctctcctacgactccagtgacccatgcccggggcagttcacgtgccgcacggggcggtgtatccggaaggagctgcgctgtgatggctgggccgactgcaccgaccacagcgatgagctcaactgcagttgcgacgccggccaccagttcacgtgcaagaacaagttctgcaagcccctcttctgggtctgcgacagtgtgaacgactgcggagacaacagcgacgagcaggggtgcagttgtccggcccagaccttcaggtgttccaatgggaagtgcctctcgaaaagccagcagtgcaatgggaaggacgactgtggggacgggtccgacgaggcctcctgccccaaggtgaacgtcgtcacttgtaccaaacacacctaccgctgcctcaatgggctctgcttgagcaagggcaaccctgagtgtgacgggaaggaggactgtagcgacggctcagatgagaaggactgcgactgtgggctgcggtcattcacgagacaggctcgtgttgttgggggcacggatgcggatgagggcgagtggccctggcaggtaagcctgcatgctctgggccagggccacatctgcggtgcttccctcatctctcccaactggctggtctctgccgcacactgctacatcgatgacagaggattcaggtactcagaccccacgcagtggacggccttcctgggcttgcacgaccagagccagcgcagcgcccctggggtgcaggagcgcaggctcaagcgcatcatctcccaccccttcttcaatgacttcaccttcgactatgacatcgcgctgctggagctggagaaaccggcagagtacagctccatggtgcggcccatctgcctgccggacgcctcccatgtcttccctgccggcaaggccatctgggtcacgggctggggacacacccagtatggaggcactggcgcgctgatcctgcaaaagggtgagatccgcgtcatcaaccagaccacctgcgagaacctcctgccgcagcagatcacgccgcgcatgatgtgcgtgggcttcctcagcggcggcgtggactcctgccagggtgattccgggggacccctgtccagcgtggaggcggatgggcggatcttccaggccggtgtggtgagctggggagacggctgcgctcagaggaacaagccaggcgtgtacacaaggctccctctgtttcgggactggatcaaagagaacactggggtataggggccggggccacccaaatgtgtacacctgcggggccacccatcgtccaccccagtgtgcacgcctgcaggctggagactggaccgctgactgcaccagcgcccccagaacatacactgtgaactcaatctccagggctccaaatctgcctagaaaacctctcgcttcctcagcctccaaagtggagctgggaggtagaaggggaggacactggtggttctactgacccaactgggggcaaaggtttgaagacacagcctcccccgccagccccaagctgggccgaggcgcgtttgtgtatatctgcctcccctgtctgtaaggagcagcgggaacggagcttcggagcctcctcagtgaaggtggtggggctgccggatctgggctgtggggcccttgggccacgctcttgaggaagcccaggctcggaggaccctggaaaacagacgggtctgagactgaaattgttttaccagctcccagggtggacttcagtgtgtgtatttgtgtaaatgagtaaaacattttatttctttttaaaaaaaaaaa

SEQ ID NO: 1148 - protein, 855 aa, Homo sapien [sequence omitted]

SEQ ID NO: 1149 - DNA, 1679 bp, Homo sapien
gtttgttggctgcggcagcaggtagcaaagtgacgccgagggcctgagtgctccagtagccaccgcatctggagaaccagcggttaccatggaggggatcagtatatacacttcagataactacaccgaggaaatgggctcaggggactatgactccatgaaggaaccctgtttccgtgaagaaaatgctaatttcaataaaatcttcctgcccaccatctactccatcatcttcttaactggcattgtgggcaatggattggtcatcctggtcatgggttaccagaagaaactgagaagcatgacggacaagtacaggctgcacctgtcagtggccgacctcctctttgtcatcacgcttcccttctgggcagttgatgccgtggcaaactggtactttgggaacttcctatgcaaggcagtccatgtcatctacacagtcaacctctacagcagtgtcctcatcctggccttcatcagtctggaccgctacctggccatcgtccacgccaccaacagtcagaggccaaggaagctgttggctgaaaaggtggtctatgttggcgtctggatccctgccctcctgctgactattcccgacttcatctttgccaacgtcagtgaggcagatgacagatatatctgtgaccgcttctaccccaatgacttgtgggtggttgtgttccagtttcagcacatcatggttggccttatcctgcctggtattgtcatcctgtcctgctattgcattatcatctccaagctgtcacactccaagggccaccagaagcgcaaggccctcaagaccacagtcatcctcatcctggctttcttcgcctgttggctgccttactacattgggatcagcatcgactccttcatcctcctggaaatcatcaagcaagggtgtgagtttgagaacactgtgcacaagtggatttccatcaccgaggccctagctttcttccactgttgtctgaaccccatcctctatgctttccttggagccaaatttaaaacctctgcccagcacgcactcacctctgtgagcagagggtccagcctcaagatcctctccaaaggaaagcgaggtggacattcatctgtttccactgagtctgagtcttcaagttttcactccagctaacacagatgtaaaagacttttttttatacgataaataacttttttttaagttacacatttttcagatataaaagactgaccaatattgtacagtttttattgcttgttggatttttgtcttgtgtttctttagtttttgtgaagtttaattgacttatttatataaattttttttgtttcatattgatgtgtgtctaggcaggacctgtggccaagttcttagttgctgtatgtctcgtggtaggactgtagaaaagggaactgaacattccagagcgtgtagtgaatcacgtaaagctagaaatgatccccagctgtttatgcatagataatctctccattcccgtggaacgtttttcctgttcttaagacgtgattttgctgtagaagatggcacttataaccaaagcccaaagtggtatagaaatgctggtttttcagttttcaggagtgggttgatttcagcacctacagtgtacagtcttgtattaagttgttaataaaagtacatgttaaacttacttagtgttatg

SEQ ID NO: 1150 - protein, 352 aa, Homo sapien
MEGISIYTSDNYTEEMGSGDYDSMKEPCFREENANFNKIFLPTIYSIIFLTGIVGNGLVILVMGYQKKLRSMTDKYRLHLSVADLLFVITLPFWAVDAVANWYFGNFLCKAVHVIYTVNLYSSVLILAFISLDRYLAIVHATNSQRPRKLLAEKVVYVGVWIPALLLTIPDFIFANVSEADDRYICDRFYPNDLWVVVFQFQHIMVGLILPGIVILSCYCIIISKLSHSKGHQKRKALKTTVILILAFFACWLPYYIGISIDSFILLEIIKQGCEFENTVHKWISITEALAFFHCCLNPILYAFLGAKFKTSAQHALTSVSRGSSLKILSKGKRGGHSSVSTESESSSFHSS

SEQ ID NO: 1151 - DNA, 360 bp, Homo sapien
taaattgccatttgaaatctttattagttagcaaaaaaatctaacataatcatcagagttttaagtagtagtgacagaagataaaaatgcctccatatcccaaattaacatctccgtataccaagtagctaacttttattgttttacaactaaagtcagggtttttattttcagagacaattctgcaaacttgacattaaagcagtagtttggcatggtttaaaatacattcaaatgtatactaaatgttttagaaaatattccattgttgaatacatttcacatggaatttatgtgaattaattgaattgatagtgaaatattataagcaccatgtgaacatacacaaacatattcttg

SEQ ID NO: 1152 - DNA, 2615 bp, Homo sapien
gaattccgggaagccagacggttaacacagacaaagtgctgccgtgacactcggccctccagtgttgcggagaggcaagagcagcgaccgcgcacctgtccgcccggagctgggacgcgcgcccgggcggccggacgaagcgaggagggaccgccgaggctgcccccaagtgtaactccagcactgtgaggtttcagggattggcagaggggaccaaggggacatgaaaatggacatggaggatgcggatatgactctgtggacagaggctgagtttgaagagaagtgtacatacattgtgaacgaccacccctgggattctggtgctgatggcggtacttcggttcaggcggaggcatccttaccaaggaatctgcttttcaagtatgccaccaacagtgaagaggttattggagtgatgagtaaagaatacataccaaagggcacacgttttggacccctaataggtgaaatctacaccaatgacacagttcctaagaacgccaacaggaaatatttttggaggatctattccagaggggagcttcaccacttcattgacggctttaatgaagagaaaagcaactggatgcgctatgtgaatccagcacactctccccgggagcaaaacctggctgcgtgtcagaacgggatgaacatctacttctacaccattaagcccatccctgccaaccaggaacttcttgtgtggtattgtcgggactttgcagaaaggcttcactacccttatcccggagagctgacaatgatgaatctcacacaaacacagagcagtctaaagcaaccgagcactgagaaaaatgaactctgcccaaagaatgtcccaaagagagagtacagcgtgaaagaaatcctaaaattggactccaacccctccaaaggaaaggacctctaccgttctaacatttcacccctcacatcagaaaaggacctcgatgactttagaagacgtgggagccccgaaatgcccttctaccctcgggtcgtttaccccatccgggcccctctgccagaagactttttgaaagcttccctggcctacgggatcgagagacccacgtacatcactcgctcccccattccatcctccaccactccaagcccctctgcaagaagcagccccgaccaaagcctcaagagctccagccctcacagcagccctgggaatacggtgtcccctgtgggccccggctctcaagagcaccgggactcctacgcttacttgaacgcgtcctacggcacggaaggtttgggctcctaccctggctacgcacccctgccccacctcccgccagctttcatcccctcgtacaacgctcactaccccaagttcctcttgcccccctacggcatgaattgtaatggcctgagcgctgtgagcagcatgaatggcatcaacaactttggcctcttcccgaggctgtgccctgtctacagcaatctcctcggtgggggcagcctgccccaccccatgctcaaccccacttctctcccgagctcgctgccctcagatggagcccggaggttgctccagccggagcatcccagggaggtgcttgtcccggcgccccacagtgccttctcctttaccggggccgccgccagcatgaaggacaaggcctgtagccccacaagcgggtctcccacggcgggaacagccgccacggcagaacatgtggtgcagcccaaagctacctcagcagcgatggcagcccccagcagcgacgaagccatgaatctcattaaaaacaaaagaaacatgaccggctacaagacccttccctacccgctgaagaagcagaacggcaagatcaagtacgaatgcaacgtttgcgccaagactttcggccagctctccaatctgaaggtccacctgagagtgcacagtggagaacggcctttcaaatgtcagacttgcaacaagggctttactcagctcgcccacctgcagaaacactacctggtacacacgggagaaaagccacatgaatgccaggtctgccacaagagatttagcagcaccagcaatctcaagacccacctgcgactccattctggagagaaaccataccaatgcaaggtgtgccctgccaagttcacccagtttgtgcacctgaaactgcacaagcgtctgcacacccgggagcggccccacaagtgctcccagtgccacaagaactacatccatctctgtagcctcaaggttcacctgaaagggaactgcgctgcggccccggcgcctgggctgcccttggaagatctgacccgaatcaatgaagaaatcgagaagtttgacatcagtgacaatgctgaccggctcgaggacgtggaggatgacatcagtgtgatctctgtagtggagaaggaaattctggccgtggtcagaaaagagaaagaagaaactggcctgaaagtgtctttgcaaagaaacatggggaatggactcctctcctcagggtgcagcctttatgagtcatcagatctacccctcatgaagttgcctcccagcaacccactacctctggtacctgtaaaggtcaaacaagaaacagttgaaccaatggatccttaagattttcagaaaacacttattt

SEQ ID NO: 1153 - protein, 789 aa, Homo sapien
MKMDMEDADMTLWTEAEFEEKCTYIVNDHPWDSGADGGTSVQAEASLPRNLLFKYATNSEEVIGVMSKEYIPKGTRFGPLIGEIYTNDTVPKNANRKYFWRIYSRGELHHFIDGFNEEKSNWMRYVNPAHSPREQNLAACQNGMNIYFYTIKPIPANQELLVWYCRDFAERLHYPYPGELTMMNLTQTQSSLKQPSTEKNELCPKNVPKREYSVKEILKLDSNPSKGKDLYRSNISPLTSEKDLDDFRRRGSPEMPFYPRVVYPIRAPLPEDFLKASLAYGIERPTYITRSPIPSSTTPSPSARSSPDQSLKSSSPHSSPGNTVSPVGPGSQEHRDSYAYLNASYGTEGLGSYPGYAPLPHLPPAFIPSYNAHYPKFLLPPYGMNCNGLSAVSSMNGINNFGLFPRLCPVYSNLLGGGSLPHPMLNPTSLPSSLPSDGARRLLQPEHPREVLVPAPHSAFSFTGAAASMKDKACSPTSGSPTAGTAATAEHVVQPKATSAAMAAPSSDEAMNLIKNKRNMTGYKTLPYPLKKQNGKIKYECNVCAKTFGQLSNLKVHLRVHSGERPFKCQTCNKGFTQLAHLQKHYLVHTGEKPHECQVCHKRFSSTSNLKTHLRLHSGEKPYQCKVCPAKFTQFVHLKLHKRLHTRERPHKCSQCHKNYIHLCSLKVHLKGNCAAAPAPGLPLEDLTRINEEIEKFDISDNADRLEDVEDDISVISVVEKEILAVVRKEKEETGLKVSLQRNMGNGLLSSGCSLYESSDLPLMKLPPSNPLPLVPVKVKQETVEPMDP

SEQ ID NO: 1154 - DNA, 3166 bp, Homo sapien
ggcgcggcaggaggacgaggcagggcgggcgggcgctctaagggttctgctctgactccaggttgggacagcgtcttcgctgctgctggatagtcgtgttttcggggatcgaggatactcaccagaaaccgaaaatgccgaaaccaatcaatgtccgagttaccaccatggatgcagagctggagtttgcaatccagccaaatacaactggaaaacagctttttgatcaggtggtaaagactatcggcctccgggaagtgtggtactttggcctccactatgtggataataaaggatttcctacctggctgaagctggataagaaggtgtctgcccaggaggtcaggaaggagaatcccctccagttcaagttccgggccaagttctaccctgaagatgtggctgaggagctcatccaggacatcacccagaaacttttcttcctccaagtgaaggaaggaatccttagcgatgagatctactgcccccctgagactgccgtgctcttggggtcctacgctgtgcaggccaagtttggggactacaacaaagaagtgcacaagtctgggtacctcagctctgagcggctgatccctcaaagagtgatggaccagcacaaacttaccagggaccagtgggaggaccggatccaggtgtggcatgcggaacaccgtgggatgctcaaagataatgctatgttggaatacctgaagattgctcaggacctggaaatgtatggaatcaactatttcgagataaaaaacaagaaaggaacagacctttggcttggagttgatgcccttggactgaatatttatgagaaagatgataagttaaccccaaagattggctttccttggagtgaaatcaggaacatctctttcaatgacaaaaagtttgtcattaaacccatcgacaagaaggcacctgactttgtgttttatgccccacgtctgagaatcaacaagcggatcctgcagctctgcatgggcaaccatgagttgtatatgcgccgcaggaagcctgacaccatcgaggtgcagcagatgaaggcccaggcccgggaggagaagcatcagaagcagctggagcggcaacagctggaaacagagaagaaaaggagagaaaccgtggagagagagaaagagcagatgatgcgcgagaaggaggagttgatgctgcggctgcaggactatgaggagaagacaaagaaggcagagagagagctctcggagcagattcagagggccctgcagctggaggaggagaggaagcgggcacaggaggaggccgagcgcctagaggctgaccgtatggctgcactgcgggctaaggaggagctggagagacaggcggtggatcagataaagagccaggagcagctggctgcggagcttgcagaatacactgccaagattgccctcctggaagaggcgcggaggcgcaaggaggatgaagttgaagagtggcagcacagggccaaagaagcccaggatgacctggtgaagaccaaggaggagctgcacctggtgatgacagcacccccgcccccaccaccccccgtgtacgagccggtgagctaccatgtccaggagagcttgcaggatgagggcgcagagcccacgggctacagcgcggagctgtctagtgagggcatccgggatgaccgcaatgaggagaagcgcatcactgaggcagagaagaacgagcgtgtgcagcggcagctgctgacgctgagcagcgagctgtcccaggcccgagatgagaataagaggacccacaatgacatcatccacaacgagaacatgaggcaaggccgggacaagtacaagacgctgcggcagatccggcagggcaacaccaagcagcgcatcgacgagttcgaggccctgtaacagccaggccaggaccaagggcagaggggtgctcatagcgggcgctgccagccccgccacgcttgtgtctttagtgctccaagtctaggaactccctcagatcccagttcctttagaaagcagttacccaacagaaacattctgggctgggaaccagggaggcgccctggtttgttttccccagttgtaatagtgccaagcaggcctgattctcgcgattattctcgaatcacctcctgtgttgtgctgggagcaggactgattgaattacggaaaatgcctgtaaagtctgagtaagaaacttcatgctggcctgtgtgatacaagagtcagcatcattaaaggaaacgtggcaggacttccatctgtgccatacttgttctgtattcgaaatgagctcaaattgattttttaatttctatgaaggatccatctttgtatatttacatgcttagaggggtgaaaattattttggaaattgagtctgaagcactctcgcacacacagtgattccctcctcccgtcactccacgcagctggcagagagcacagtgatcaccagcgtgagtggtggaggaggacacttggatttttttttttgttttttttttttttgcttaacagttttagaatacattgtacttatacaccttattaatgatcagctatatactatttatatacaagtgataatacagatttgtaacattagttttaaaaagggaaagttttgttctgtatattttgttaccttttacagaataaaagaattacatatgaaaaaccctctaaaccatggcacttgatgtgatgtggcaggagggcagtggtggagctggacctgcctgctgcagtcacgtgtaaacaggattattattagtgttttatgcatgtaatggactatgcacacttttaattttgtcagattcacacatgccactatgagctttcagactccagctgtgaagagactctgtttgcttgtgtttgtttgtttgcagtctctctctgccatggccttggcaggctgctggaaggcagcttgtggaggccgttggttccgcccactcattccttctcgtgcactgctttctccttcacagctaagatgccatgtgcaggtggattccatgccgcagacatgaaataaaagctttgcaaaggcacgaaaaaaaaaaaaaaaaaaaaaaaaaaaaaaaaaaaaaaaaaaaaaaaaaaaaaaaaaaaaaaaaaaaaaaaaaaaaaaaaaaaaaaaaaaaaaaaaaaaaaaa

SEQ ID NO: 1155 - protein, 586 aa, Homo sapien
MPKPINVRVTTMDAELEFAIQPNTTGKQLFDQVVKTIGLREVWYFGLHYVDNKGFPTWLKLDKKVSAQEVRKENPLQFKFRAKFYPEDVAEELIQDITQKLFFLQVKEGILSDEIYCPPETAVLLGSYAVQAKFGDYNKEVHKSGYLSSERLIPQRVMDQHKLTRDQWEDRIQVWHAEHRGMLKDNAMLEYLKIAQDLEMYGINYFEIKNKKGTDLWLGVDALGLNIYEKDDKLTPKIGFPWSEIRNISFNDKKFVIKPIDKKAPDFVFYAPRLRINKRILQLCMGNHELYMRRRKPDTIEVQQMKAQAREEKHQKQLERQQLETEKKRRETVEREKEQMMREKEELMLRLQDYEEKTKKAERELSEQIQRALQLEEERKRAQEEAERLEADRMAALRAKEELERQAVDQIKSQEQLAAELAEYTAKIALLEEARRRKEDEVEEWQHRAKEAQDDLVKTKEELHLVMTAPPPPPPPVYEPVSYHVQESLQDEGAEPTGYSAELSSEGIRDDRNEEKRITEAEKNERVQRQLLTLSSELSQARDENKRTHNDIIHNENMRQGRDKYKTLRQIRQGNTKQRIDEFEAL

SEQ ID NO: 1156 - DNA, 3143 bp, Homo sapien; identical to SEQ ID NO: 912

SEQ ID NO: 1157 - protein, 391 aa, Homo sapien; identical to SEQ ID NO: 913

SEQ ID NO: 1158 - DNA, 1812 bp, Homo sapien
tagctaggcaggaagtcggcgcgggcggcgcggacagtatctgtgggtacccggagcacggagatctcgccggctttacgttcacctcggtgtctgcagcaccctccgcttcctctcctaggcgacgagacccagtggctagaagttcaccatgtctattctcaagatccatgccagggagatctttgactctcgcgggaatcccactgttgaggttgatctcttcacctcaaaaggtctcttcagagctgctgtgcccagtggtgcttcaactggtatctatgaggccctagagctccgggacaatgataagactcgctatatggggaagggtgtctcaaaggctgttgagcacatcaataaaactattgcgcctgccctggttagcaagaaactgaacgtcacagaacaagagaagattgacaaactgatgatcgagatggatggaacagaaaataaatctaagtttggtgcgaacgccattctgggggtgtcccttgccgtctgcaaagctggtgccgttgagaagggggtccccctgtaccgccacatcgctgacttggctggcaactctgaagtcatcctgccagtcccggcgttcaatgtcatcaatggcggttctcatgctggcaacaagctggccatgcaggagttcatgatcctcccagtcggtgcagcaaacttcagggaagccatgcgcattggagcagaggtttaccacaacctgaagaatgtcatcaaggagaaatatgggaaagatgccaccaatgtgggggatgaaggcgggtttgctcccaacatcctggagaataaagaaggcctggagctgctgaagactgctattgggaaagctggctacactgataaggtggtcatcggcatggacgtagcggcctccgagttcttcaggtctgggaagtatgacctggacttcaagtctcccgatgaccccagcaggtacatctcgcctgaccagctggctgacctgtacaagtccttcatcaaggactacccagtggtgtctatcgaagatccctttgaccaggatgactggggagcttggcagaagttcacagccagtgcaggaatccaggtagtgggggatgatctcacagtgaccaacccaaagaggatcgccaaggccgtgaacgagaagtcctgcaactgcctcctgctcaaagtcaaccagattggctccgtgaccgagtctcttcaggcgtgcaagctggcccaggccaatggttggggcgtcatggtgtctcatcgttcgggggagactgaagataccttcatcgctgacctggttgtggggctgtgcactgggcagatcaagactggtgccccttgccgatctgagcgcttggccaagtacaaccagctcctcagaattgaagaggagctgggcagcaaggctaagtttgccggcaggaacttcagaaaccccttggccaagtaagctgtgggcaggcaagcccttcggtcacctgttggctacacagacccctcccctcgtgtcagctcaggcagctcgaggcccccgaccaacacttgcaggggtccctgctagttagcgccccaccgccgtggagttcgtaccgcttccttagaacttctacagaagccaagctccctggagccctgttggcagctctagctttgcagtcgtgtaattggcccaagtcattgtttttctcgcctcactttccaccaagtgtctagagtcatgtgagcctcgtgtcatctccggggtggccacaggctagatccccggtggttttgtgctcaaaataaaaagcctcagtgacccatgag

SEQ ID NO: 1159 - protein, 434 aa, Homo sapien
MSILKIHAREIFDSRGNPTVEVDLFTSKGLFRAAVPSGASTGIYEALELRDNDKTRYMGKGVSKAVEHINKTIAPALVSKKLNVTEQEKIDKLMIEMDGTENKSKFGANAILGVSLAVCKAGAVEKGVPLYRHIADLAGNSEVILPVPAFNVINGGSHAGNKLAMQEFMILPVGAANFREAMRIGAEVYHNLKNVIKEKYGKDATNVGDEGGFAPNILENKEGLELLKTAIGKAGYTDKVVIGMDVAASEFFRSGKYDLDFKSPDDPSRYISPDQLADLYKSFIKDYPVVSIEDPFDQDDWGAWQKFTASAGIQVVGDDLTVTNPKRIAKAVNEKSCNCLLLKVNQIGSVTESLQACKLAQANGWGVMVSHRSGETEDTFIADLVVGLCTGQIKTGAPCRSERLAKYNQLLRIEEELGSKAKFAGRNFRNPLAK

SEQ ID NO: 1160 - DNA, 2338 bp, Homo sapien
agcgcacgtcggcagtcggctccctcgttgaccgaatcaccgacctctctccccagctgtatttccaaaatgtcgctttctaacaagctgacgctggacaagctggacgttaaagggaagcgggtcgttatgagagtcgacttcaatgttcctatgaagaacaaccagataacaaacaaccagaggattaaggctgctgtcccaagcatcaaattctgcttggacaatggagccaagtcggtagtccttatgagccacctaggccggcctgatggtgtgcccatgcctgacaagtactccttagagccagttgctgtagaactcaaatctctgctgggcaaggatgttctgttcttgaaggactgtgtaggcccagaagtggagaaagcctgtgccaacccagctgctgggtctgtcatcctgctggagaacctccgctttcatgtggaggaagaagggaagggaaaagatgcttctgggaacaaggttaaagccgagccagccaaaatagaagctttccgagcttcactttccaagctaggggatgtctatgtcaatgatgcttttggcactgctcacagagcccacagctccatggtaggagtcaatctgccacagaaggctggtgggtttttgatgaagaaggagctgaactactttgcaaaggccttggagagcccagagcgacccttcctggccatcctgggcggagctaaagttgcagacaagatccagctcatcaataatatgctggacaaagtcaatgagatgattattggtggtggaatggcttttaccttccttaaggtgctcaacaacatggagattggcacttctctgtttgatgaagagggagccaagattgtcaaagacctaatgtccaaagctgagaagaatggtgtgaagattaccttgcctgttgactttgtcactgctgacaagtttgatgagaatgccaagactggccaagccactgtggcttctggcatacctgctggctggatgggcttggactgtggtcctgaaagcagcaagaagtatgctgaggctgtcactcgggctaagcagattgtgtggaatggtcctgtgggggtatttgaatgggaagcttttgcccggggaaccaaagctctcatggatgaggtggtgaaagccacttctaggggctgcatcaccatcataggtggtggagacactgccacttgctgtgccaaatggaacacggaggataaagtcagccatgtgagcactgggggtggtgccagtttggagctcctggaaggtaaagtccttcctggggtggatgctctcagcaatatttagtactttcctgccttttagttcctgtgcacagcccctaagtcaacttagcattttctgcatctccacttggcattagctaaaaccttccatgtcaagattcagctagtggccaagagatgcagtgccaggaacccttaaacagttgcacagcatctcagctcatcttcactgcaccctggatttgcatacattcttcaagatcccatttgaattttttagtgactaaaccattgtgcattctagagtgcatatatttatattttgcctgttaaaaagaaagtgagcagtgttagcttagttctcttttgatgtaggttattatgattagctttgtcactgtttcactactcagcatggaaacaagatgaaattccatttgtaggtagtgagacaaaattgatgatccattaagtaaacaataaaagtgtccattgaaaccgtgatttttttttttttcctgtcatactttgttaggaagggtgagaatagaatcttgaggaacggatcagatgtctatattgctgaatgcaagaagtggggcagcagcagtggagagatgggacaattagataaatgtccattctttatcaagggcctactttatggcagacattgtgctagtgcttttattctaacttttatttttatcagttacacatgatcataatttaaaaagtcaaggcttataacaaaaaagccccagcccattcctcccattcaagattcccactccccagaggtgaccactttcaactcttgagtttttcaggtatatacctccatgtttctaagtaatatgcttatattgttcacttcctttttttttattttttaaagaaatctatttcataccatggaggaaggctctgttccacatatatttccacttcttcattctctcggtatagttttgtcacaattatagattagatcaaaagtctacataactaatacagctgagctatgtagtatgctatgattaaatttacttatgtaaaaaaaaaaaaaaaaaaaa

SEQ ID NO: 1161 - protein, 417 aa, Homo sapien
MSLSNKLTLDKLDVKGKRVVMRVDFNVPMKNNQITNNQRIKAAVPSIKFCLDNGAKSVVLMSHLGRPDGVPMPDKYSLEPVAVELKSLLGKDVLFLKDCVGPEVEKACANPAAGSVILLENLRFHVEEEGKGKDASGNKVKAEPAKIEAFRASLSKLGDVYVNDAFGTAHRAHSSMVGVNLPQKAGGFLMKKELNYFAKALESPERPFLAILGGAKVADKIQLINNMLDKVNEMIIGGGMAFTFLKVLNNMEIGTSLFDEEGAKIVKDLMSKAEKNGVKITLPVDFVTADKFDENAKTGQATVASGIPAGWMGLDCGPESSKKYAEAVTRAKQIVWNGPVGVFEWEAFARGTKALMDEVVKATSRGCITIIGGGDTATCCAKWNTEDKVSHVSTGGGASLELLEGKVLPGVDALSNI

SEQ ID NO: 1162 - DNA, 521 bp, Homo sapien
tttaaaaaggcaaatgattttattgttcgataatcttttaaaaaaataagaggaaggagtaaaattaaagatgaaagatgatttttatttccttgtgacctctatatcccccttcccctgcccttggtaagtaactcttgatggagaaaggattaaagactcttatttaaccaaaaaacagagccagctaatcatttccaaaggttagtatctccctgctgacctcttctttggtttaattgaataaaactatatgttcatatttgtatttaaaaccacctcagaataacatcttttcttccttagttaaggcattataagggctataactatcatccataataaccaaggcaataacttagaaagctgctttgatgggagtagaaacttacaaacaaataaattcaatagacctttgtcataaaaccggtatgaagagacaaaggtaatacccatattgttaaaggttacctcttacagtgaaaaaagatctctgagcattagcagtgagatttcatctg

SEQ ID NO: 1163 - DNA, 2266 bp, Homo sapien
gagtgcgcatgcgcagagcggccaacccgtgagggagcgtttctgacgctaggtcaagggcggtgttcctgtgttcttagggccccaggaggcgagtctgagtggaacctggctggggtaggctgaaaggtgacttcgacgctcttctgaggcctcagacgtgtgtgatgactgccctgtagaatcagtgctgtgaccccgagtaacaacgcgcgcttgagttggtataaactcctgaagtttcaggaattagtgacattcagggatgtggccatagacttctctcggcaggagtgggaatacctggaccctaatcagagggacttatacagggatgtgatgttggagaactatagaaacctggtatcactggatttggatttacagtgtgagataatcagctacatagaagtacccacttatgaaacagatatatcctctacacaacttcagagcatatatgagagagagaaactctatgaatgtaagaaatgtcagaagaaatttagtagtggttatcaacttattctacatcacaggtttcatgtcattgagagaccctatgaatgcaaagagtgtgggaagaactttcgtagtggctatcaacttactctacatcaaagatttcatactggtgagaaaccctatgaatgtacagaatgtgggaagaactttagaagtggttatcagctgactgtgcatcagagatttcatactggtgagaaaacctatgaatgtaggcagtgtgggaaggcctttatatatgcctcacacattgttcaacatgagagaattcacactggtgggaagccgtatgaatgtcaggagtgtgggagggcctttagtcaaggtggacatcttagaattcatcagagagttcatactggcgaaaaaccatataaatgtaaggaatgtgggaagacttttagtaggcgctcaaatcttgttgaacatgggcagtttcatactgatgagaagccatacatatgtgagaaatgtggaaaggcctttagaagaggtcaccagcttactgtacatcagagagttcacactggtaaaaagctatatgagtgtaaagaatgtgggaagggctataccactgcctcatactttcttctacatcagagaattcataaaggtggaaaaccctatgaatgtaaggagtgtaagaaaacctttactttgtatagaaatcttactcggcatcagaatattcatactggtgagaaactttttgaatgcaagcaatgtgggaagacctatactactggttcaaaactctttcaacatcagaaaactcatactggcgagaaaccctatgaatgcaaggaatgcggaaaggcctttagcttgtatggctaccttaaacaacatcagaaaattcatactggcatgaaacactttgaatgtaaggagtgtaaaaaaacctttactttgtatagaaatcttactcgacatcagaatattcacactggtaagaaactttttgaatgtcaggaatgtgggaaggcctatagtactggctcaaaccttattcaacatcggaaaactcatactggtgagaaaccctataaatgtaaggaatgtggcaagacctttagcttgcatggatatcttaatcaacatcagaaaattcatactggtatgaaaccctatgaatgtaaggtatgtagaaaaacctttactttctatagaaatcttactctacatcaaagtattcatactgatgagaaaccttttgaatgtaaggaatgtgggaagacctttagacgtagttcacaccttactgcacatcagagcattcatgctgataaaaaaccctatgaatgtaaagaatgtggaaaggcctttaaaatgtatggctaccttacccaacatcagaaaattcatactggtggaaaaccttatgaatgtaaagaatgtgggaaggccttcagtcgtgcttcaaaccttgttcaacatgagagaattcatactggtgagaaaccctatgtgtgtaagcagtgtgggaaaaccttcagatatggttcagcccttaaagcccatcagagaattcataggagcataaaagtgtaagaccgtaaagagtacgagcgcgccattcatcatcagacagcccacactggtgagaaatgatggaatgttagtcttataggtatggctttagcaattgagagagttcaaaatgcagatcttgccacattagaaagcattcaatgtcagtcctgttttaatggaatatctgactattcaatggtaaattaag

SEQ ID NO: 1164 - protein, 578 aa, Homo sapien
MLENYRNLVSLDLDLQCEIISYIEVPTYETDISSTQLQSIYEREKLYECKKCQKKFSSGYQLILHHRFHVIERPYECKECGKNFRSGYQLTLHQRFHTGEKPYECTECGKNFRSGYQLTVHQRFHTGEKTYECRQCGKAFIYASHIVQHERIHTGGKPYECQECGRAFSQGGHLRIHQRVHTGEKPYKCKECGKTFSRRSNLVEHGQFHTDEKPYICEKCGKAFRRGHQLTVHQRVHTGKKLYECKECGKGYTTASYFLLHQRIHKGGKPYECKECKKTFTLYRNLTRHQNIHTGEKLFECKQCGKTYTTGSKLFQHQKTHTGEKPYECKECGKAFSLYGYLKQHQKIHTGMKHFECKECKKTFTLYRNLTRHQNIHTGKKLFECQECGKAYSTGSNLIQHRKTHTGEKPYKCKECGKTFSLHGYLNQHQKIHTGMKPYECKVCRKTFTFYRNLTLHQSIHTDEKPFECKECGKTFRRSSHLTAHQSIHADKKPYECKECGKAFKMYGYLTQHQKIHTGGKPYECKECGKAFSRASNLVQHERIHTGEKPYVCKQCGKTFRYGSALKAHQRIHRSIKV

SEQ ID NO: 1165 - DNA, 4575 bp, Homo sapien
gcgccccgccctttctcggcccccggaggtgacggggtgaaggcgggggaaccgaggtggggagtccgccagagctcccagactgcgagcacgcgagccgccgcagccgtcacccgcgccgcgtcacggctcccgggcccgccctcctctgacccctcccctctctccgtttgcccctctccccctcctccgccgaccgagcagtgacttaagcaacggagcgcggtgaagctcatttttctccttcctcgcagccgcgccagggagctcgcggcgcgcggcccctgtcctccggcccgagatgaatcctgcggcagaagccgagttcaacatcctcctggccaccgactcctacaaggttactcactataaacaatatccacccaacacaagcaaagtttattcctactttgaatgccgtgaaaagaagacagaaaactccaaattaaggaaggtgaaatatgaggaaacagtattttatgggttgcagtacattcttaataagtacttaaaaggtaaagtagtaaccaaagagaaaatccaggaagccaaagatgtctacaaagaacatttccaagatgatgtctttaatgaaaagggatggaactacattcttgagaagtatgatgggcatcttccaatagaaataaaagctgttcctgagggctttgtcattcccagaggaaatgttctcttcacggtggaaaacacagatccagagtgttactggcttacaaattggattgagactattcttgttcagtcctggtatccaatcacagtggccacaaattctagagagcagaagaaaatattggccaaatatttgttagaaacttctggtaacttagatggtctggaatacaagttacatgattttggctacagaggagtctcttcccaagagactgctggcataggagcatctgctcacttggttaacttcaaaggaacagatacagtagcaggacttgctctaattaaaaaatattatggaacgaaagatcctgttccaggctattctgttccagcagcagaacacagtaccataacagcttgggggaaagaccatgaaaaagatgcttttgaacatattgtaacacagttttcatcagtgcctgtatctgtggtcagcgatagctatgacatttataatgcgtgtgagaaaatatggggtgaagatctaagacatttaatagtatcgagaagtacacaggcaccactaataatcagacctgattctggaaaccctcttgacactgtgttaaaggttttggagattttaggtaagaagtttcctgttactgagaactcaaagggttacaagttgctgccaccttatcttagagttattcaaggggatggagtagatattaataccttacaagagattgtagaaggcatgaaacaaaaaatgtggagtattgaaaatattgccttcggttctggtggaggtttgctacagaagttgacaagagatctcttgaattgttccttcaagtgtagctatgttgtaactaatggccttgggattaacgtcttcaaggacccagttgctgatcccaacaaaaggtccaaaaagggccgattatctttacataggacgccagcagggaattttgttacactggaggaaggaaaaggagaccttgaggaatatggtcaggatcttctccatactgtcttcaagaatggcaaggtgacaaaaagctattcatttgatgaaataagaaaaaatgcacagctgaatattgaactggaagcagcacatcattaggctttatgactgggtgtgtgttgtgtgtatgtaatacataatgtttattgtacagatgtgtggggtttgtgttttatgatacattacagccaaattatttgttggtttatggacatactgccctttcattttttttcttttccagtgtttaggtgatctcaaattaggaaatgcatttaaccatgtaaaagatgagtgctaaagtaagctttttagggccctttgccaataggtagtcattcaatctggtattgatcttttcacaaataacagaactgagaaacttttatatataactgatgatcacataaaacagatttgcataaaattaccatgattgctttatgtttatatttaacttgtatttttgtacaaacaagattgtgtaagatatatttgaagtttcagtgatttaacagtctttccaacttttcatgatttttatgagcacagactttcaagaaaatacttgaaaataaattacattgccttttgtccattaatcagcaaataaaacatggccttaacaaagttgtttgtgttattgtacaatttgaaaattatgtcgggacataccctatagaattactaaccttactgccccttgtagaatatgtattaatcattctacattaaagaaaataatggttcttactggaatgtctaggcactgtacagttattatatatcttggttgttgtattgtaccagtgaaatgccaaatttgaaaggcctgtactgcaattttatatgtcagagattgcctgtggctctaatatgcacctcaagattttaaggagataatgtttttagagagaatttctgcttccactatagaatatatacataaatgtaaaatacttacaaaagtggaagtagtgtattttaaagtaattacacttctgaatttatttttcatattctatagttggtatgacttaaatgaattactggagtgggtagtgagtgtacttaaatgtttcaattctgttatattttttattaagtttttaaaaaattaaattggatattaaattgtatggacatcatttattaattttaaactgaatgccctcaataagtaatactgaagcacattcttaaatgaagataaattatctccaatgaaaagcatgacatgtgtttcaatagaagaatcttaagttggctaaattcaaagtgcttgacatcaaaatgttctagagtgattagctactagattctgaatcatacatcacatctgactagagaccagtttctttcgaatgattcttttatgtatgtagatctgttcttctgaggcagcggttggccaactatagcccaaaggccaaatttggacttctttttataaatgcagattgtctatggctgctttcccactactccagcctaaggtaaacagctgcaatagaagccaaatgagaatcgcaaagcccaaaatgtttattaacctgccctttacacaaaatcacacaaaaagtttcctgatctctgttctaagaaaaggagtgtgccttgcatttaaaaggaaatgttggtttctagggaagggaggaggctaaataattgatacggaattttcctcttttgtcttcttttttctcacttaagaatccgatactggaagactgatttagaaaagtttttaacatgacattaaatgtgaaattttaaaaattgaaaagccataaatcatctgttttaaatagttacatgagaaaatgatcactagaataacctaattagaagtgttatcttcattaaatgttttttgtaagtggtattagaaagaatatgtttttcagatggttctttaaacatgtagtgagaacaataagcattattcacttttagtaagtcttctgtaatccatgatataaaataattttaaaatgattttttaatgtatttgagtaaagatgagtagtattaagaaaaacacacatttcttcacaaaatgtgctaaggggcgtgtaaagaatcaaaagaaactattaccaataatagttttgataatcacccataattttgtgtttaaacattgaaattatagtacagacagtattctctgtgttctgtgaatttcagcagcttcagaatagagtttaatttagaaatttgcagtgaaaaaagctatctctttgttcacaaccataaatcaggagatggagattaattctattggctcttagtcacttggaactgattaattctgactttctgtcactaagcacttggtatttggccatctccattctgagcaccaaacggttaacacgaatgtccactagaactctgctgtgtgtcacccttaaatcagtctaaatcttccagacaaaagcaaatggcatttatggatttaagtcattagattttcaactgacattaattaatccctcttgattgattatatcatcaagtatttatatcttaaataggaggtaggatttctgtgttaagactcttatttgtaccctataattaaagtaaaatgttttttatgagtatcccttgttttcccttcttaaattgttatcaaacaatttttataatgaaatctatcttggaaaattagaaagaaaaatggcaaggtatttattgttctgtttgccataatttagaactcacacttaagtattttgtagttttacattcctttttaacccattcagtggagaatgtcagcttttctcccaagttgtatgttaagtctattctaatatgtactcaacatcaagttataaacatgtaataaacatggaaataaagtttagctctattagtgaagtgttaaa

SEQ ID NO: 1166 - protein, 491 aa, Homo sapien [sequence omitted]

SEQ ID NO: 1167 - DNA, 2376 bp, Homo sapien
cgcgcggcccctgtcctccggcccgagatgaatcctgcggcagaagccgagttcaacatcctcctggccaccgactcctacaaggttactcactataaacaatatccacccaacacaagcaaagtttattcctactttgaatgccgtgaaaagaagacagaaaactccaaattaaggaaggtgaaatatgaggaaacagtattttatgggttgcagtacattcttaataagtacttaaaaggtaaagtagtaaccaaagagaaaatccaggaagccaaagatgtctacaaagaacatttccaagatgatgtctttaatgaaaagggatggaactacattcttgagaagtatgatgggcatcttccaatagaaataaaagctgttcctgagggctttgtcattcccagaggaaatgttctcttcacggtggaaaacacagatccagagtgttactggcttacaaattggattgagactattcttgttcagtcctggtatccaatcacagtggccacaaattctagagagcagaagaaaatattggccaaatatttgttagaaacttctggtaacttagatggtctggaatacaagttacatgattttggctacagaggagtctcttcccaagagactgctggcataggagcatctgctcacttggttaacttcaaaggaacagatacagtagcaggacttgctctaattaaaaaatattatggaacgaaagatcctgttccaggctattctgttccagcagcagaacacagtaccataacagcttgggggaaagaccatgaaaaagatgcttttgaacatattgtaacacagttttcatcagtgcctgtatctgtggtcagcgatagctatgacatttataatgcgtgtgagaaaatatggggtgaagatctaagacatttaatagtatcgagaagtacacaggcaccactaataatcagacctgattctggaaaccctcttgacactgtgttaaaggttttggagattttaggtaagaagtttcctgttactgagaactcaaagggttacaagttgctgccaccttatcttagagttattcaaggggatggagtagatattaataccttacaagagattgtagaaggcatgaaacaaaaaatgtggagtattgaaaatattgccttcggttctggtggaggtttgctacagaagttgacaagagatctcttgaattgttccttcaagtgtagctatgttgtaactaatggccttgggattaacgtcttcaaggacccagttgctgatcccaacaaaaggtccaaaaagggccgattatctttacataggacgccagcagggaattttgttacactggaggaaggaaaaggagaccttgaggaatatggtcaggatcttctccatactgtcttcaagaatggcaaggtgacaaaaagctattcatttgatgaaataagaaaaaatgcacagctgaatattgaactggaagcagcacatcattaggctttatgactgggtgtgtgttgtgtgtatgtaatacataatgtttattgtacagatgtgtggggtttgtgttttatgatacattacagccaaattatttgttggtttatggacatactgccctttcattttttttcttttccagtgtttaggtgatctcaaattaggaaatgcatttaaccatgtaaaagatgagtgctaaagtaagctttttagggccctttgccaataggtagtcattcaatctggtattgatcttttcacaaataacagaactgagaaacttttatatataactgatgatcacataaaacagatttgcataaaattaccatgattgctttatgtttatatttaacttgtatttttgtacaaacaagattgtgtaagatatatttgaagtttcagtgatttaacagtctttccaacttttcatgatttttatgagcacagactttcaagaaaatacttgaaaataaattacattgccttttgtccattaatcagcaaataaaacatggccttaacaaagttgtttgtgttattgtacaatttgaaaattatgtcgggacataccctatagaattactaaccttactgccccttgtagaatatgtattaatcattctacattaaagaaaataatggttcttactggaatgtctaggcactgtacagttattatatatcttggttgttgtattgtaccagtgaaatgccaaatttgaaaggcctgtactgcaattttatatgtcagagattgcctgtggctctaatatgcacctcaagattttaaggagataatgtttttagagagaatttctgcttccactatagaatatatacataaatgtaaaatacttacaaaagtgg

SEQ ID NO: 1168 - protein, 491 aa, Homo sapien [sequence omitted]

SEQ ID NO: 1169 - DNA, 2425 bp, Homo sapien
gcggccgccggtcctccctccacctcctcctcggccccccctcgcttccctcctcccacttcccgagctccggcgtcgtcccggccacgctcgacgctgctgcaggaacaaaggaagaccccgcggcggcggcggcgccacctccgcctgctgctccgacccgctcccggcccgcggcggcggcaccagggcgcccggctcagccttcccggaggcctcggcccggcctcatcgtgccggcttcgcgcgcgaacccggctttcgcatttgggaccctgcaggaaaaatatggctcaggagactaaccagaccccggggcccatgctgtgtagcacaggatgtggcttttatggaaatcctaggacaaatggaatgtgttcagtttgctacaaagaacatcttcagaggcagcaaaatagtggcagaatgagcccaatggggacagctagtggttccaacagtcctacctcagattctgcatctgtacagagagcagacactagcttaaacaactgtgaaggtgctgctggcagcacatctgaaaaatcaagaaatgtgcctgtggctgccttgcctgtaactcagcaaatgacagaaatgagcatttcaagagaggacaaaataactaccccgaaaacagaggtgtcagagccagttgtcactcagcccagtccatcagtttctcagcccagtacttctcagagtgaagaaaaagctcctgaattgcccaaaccaaagaaaaacagatgtttcatgtgcagaaagaaagttggtcttacagggtttgactgccgatgtggaaatttgttttgtggacttcaccgttactctgacaagcacaactgtccgtatgattacaaagcagaagctgcagcaaaaatcagaaaagagaatccagttgttgtggctgaaaaaattcagagaatataaattacttcttgtgaagagactgaaactttgtttttattttaatatatcgtaggaaaacattaaagagcagatgcatggccatttttctttgatgttctccagagttttacattacacttgtctgtcttataattgatattttaggatgtttgggtgtttgttacaggcagaattggatagatacagccctacaaatgtatatgccctcccctgaaaaaaattggatgaaaatctgcacagcaaagtgaaacacacagataataggaacaaaatgtagttcccatgtgccaaacaaaataaatgaaatctctgcatgtttgcagcatatctgccttttgggaatgtaatcaaggtataatctttggctagtgttatgtgcctgtatttttttaaaatggtacaccagaaaaggactggcagtctacttctaccatagttaaacttcaccctctttaatttcacaacatattctttggaagcaggaagaaatgctcataaagaggatcagaccttctttcccgtgaaaccagtatttggcgccatatataagcctggttaaattggtcatctaaagctgtcaaataagacattctgtgaaaggtaaacatcgaaactggttataagtaaaaccatcaagccaacaacagggtcttgagataacctttgaagcttattgtactggcctgcaccagaagatgtctgcattactcattgctaaaaatgtgtagcacagaactgcactaggattaatttgtttacaagaagaaatttaaactctacgtttggttttcacatacagcagctctattgaataacatgcatctgaattttaagttgcaaaggtatctgaataatttttcatgtgcatcttttgtcgaatgttttggttcaagaaagaatgtttaaagctttttaaaagacttcagttcttaatgtaactgtacccttctgcatggaaaatcataaccaacatggctgcagtagacttcttagtggtatccagcgccacttgcagagggctgctttatcatattgtacttgggtgtaggactctagtgttcttgggtgtattgcatgggctgcattatctacagcattgtacaataacaactagaaaaggcagtatacttcactgatgcttgtctggtaataatcacttctgtgttataatggaaggttttttgtgatgtatgaaacttgtgttttttatatataaatgagtatagttagtgttgtggtaatgcctgttttcatctgtaaatagttaagtatgtacacgaggcactacttctgatttattgcaatgttcagtcctagtttttacttttattcttaaagcattcagttttgctttcaattttatgtaccttagttctgagttagacctgcagatgtgtacagatagttcatatttatgtattgcacataatcatgctattcagcattgatgctatattgtattatgtaaataataaaagccatgtacagagggaaa

SEQ ID NO: 1170 - protein, 213 aa, Homo sapien
MAQETNQTPGPMLCSTGCGFYGNPRTNGMCSVCYKEHLQRQQNSGRMSPMGTASGSNSPTSDSASVQRADTSLNNCEGAAGSTSEKSRNVPVAALPVTQQMTEMSISREDKITTPKTEVSEPVVTQPSPSVSQPSTSQSEEKAPELPKPKKNRCFMCRKKVGLTGFDCRCGNLFCGLHRYSDKHNCPYDYKAEAAAKIRKENPVVVAEKIQRI

SEQ ID NO: 1171 - DNA, 704 bp, Homo sapien
tgcagcggtggtcggctgttgggtgtggagtttcccagcgcccctcgggtccgaccctttgagcgttctgctccggcgccagcctacctcgctcctcggcgccatgaccacaaccaccaccttcaagggagtcgaccccaacagcaggaatagctcccgagttttgcggcctccaggtggtggatccaatttttcattaggttttgatgaaccaacagaacaacctgtgaggaagaacaaaatggcctctaatatctttgggacacctgaagaaaatcaagcttcttgggccaagtcagcaggtgccaagtctagtggtggcagggaagacttggagtcatctggactgcagagaaggaactcctctgaagcaagctccggagacttcttagatctgaagggagaaggtgatattcatgaaaatgtggacacagacttgccaggcagcctggggcagagtgaagagaagcccgtgcctgctgcgcctgtgcccagcccggtggccccggccccagtgccatccagaagaaatccccctggcggcaagtccagcctcgtcttgggttagctctgactgtcctgaacgctgtcgttctgtctgtttcctccatgcttgagaactgcacaacttgagcctgactgtacatcttcttggatttgtttcattaaaaagaagcactttatgtaaaaaaaaaaaaaaaaaa

SEQ ID NO: 1172 - protein, 154 aa, Homo sapien
MTTTTTFKGVDPNSRNSSRVLRPPGGGSNFSLGFDEPTEQPVRKNKMASNIFGTPEENQASWAKSAGAKSSGGREDLESSGLQRRNSSEASSGDFLDLKGEGDIHENVDTDLPGSLGQSEEKPVPAAPVPSPVAPAPVPSRRNPPGGKSSLVLG

SEQ ID NO: 1173 - DNA, 5067 bp, Homo sapien
ctcctccccatcctctccctctgtccctctgtccctctgaccctgcactgtcccagcaccatgggacccacctcaggtcccagcctgctgctcctgctactaacccacctccccctggctctggggagtcccatgtactctatcatcacccccaacatcttgcggctggagagcgaggagaccatggtgctggaggcccacgacgcgcaaggggatgttccagtcactgttactgtccacgacttcccaggcaaaaaactagtgctgtccagtgagaagactgtgctgacccctgccaccaaccacatgggcaacgtcaccttcacgatcccagccaacagggagttcaagtcagaaaaggggcgcaacaagttcgtgaccgtgcaggccaccttcgggacccaagtggtggagaaggtggtgctggtcagcctgcagagcgggtacctcttcatccagacagacaagaccatctacacccctggctccacagttctctatcggatcttcaccgtcaaccacaagctgctacccgtgggccggacggtcatggtcaacattgagaacccggaaggcatcccggtcaagcaggactccttgtcttctcagaaccagcttggcgtcttgcccttgtcttgggacattccggaactcgtcaacatgggccagtggaagatccgagcctactatgaaaactcaccacagcaggtcttctccactgagtttgaggtgaaggagtacgtgctgcccagtttcgaggtcatagtggagcctacagagaaattctactacatctataacgagaagggcctggaggtcaccatcaccgccaggttcctctacgggaagaaagtggagggaactgcctttgtcatcttcgggatccaggatggcgaacagaggatttccctgcctgaatccctcaagcgcattccgattgaggatggctcgggggaggttgtgctgagccggaaggtactgctggacggggtgcagaacctccgagcagaagacctggtggggaagtctttgtacgtgtctgccaccgtcatcttgcactcaggcagtgacatggtgcaggcagagcgcagcgggatccccatcgtgacctctccctaccagatccacttcaccaagacacccaagtacttcaaaccaggaatgccctttgacctcatggtgttcgtgacgaaccctgatggctctccagcctaccgagtccccgtggcagtccagggcgaggacactgtgcagtctctaacccagggagatggcgtggccaaactcagcatcaacacacaccccagccagaagcccttgagcatcacggtgcgcacgaagaagcaggagctctcggaggcagagcaggctaccaggaccatgcaggctctgccctacagcaccgtgggcaactccaacaattacctgcatctctcagtgctacgtacagagctcagacccggggagaccctcaacgtcaacttcctcctgcgaatggaccgcgcccacgaggccaagatccgctactacacctacctgatcatgaacaagggcaggctgttgaaggcgggacgccaggtgcgagagcccggccaggacctggtggtgctgcccctgtccatcaccaccgacttcatcccttccttccgcctggtggcgtactacacgctgatcggtgccagcggccagagggaggtggtggccgactccgtgtgggtggacgtcaaggactcctgcgtgggctcgctggtggtaaaaagcggccagtcagaagaccggcagcctgtacctgggcagcagatgaccctgaagatagagggtgaccacggggcccgggtggtactggtggccgtggacaagggcgtgttcgtgctgaataagaagaacaaactgacgcagagtaagatctgggacgtggtggagaaggcagacatcggctgcaccccgggcagtgggaaggattacgccggtgtcttctccgacgcagggctgaccttcacgagcagcagtggccagcagaccgcccagagggcagaacttcagtgcccgcagccagccgcccgccgacgccgttccgtgcagctcacggagaagcgaatggacaaagtcggcaagtaccccaaggagctgcgcaagtgctgcgaggacggcatgcgggagaaccccatgaggttctcgtgccagcgccggacccgtttcatctccctgggcgaggcgtgcaagaaggtcttcctggactgctgcaactacatcacagagctgcggcggcagcacgcgcgggccagccacctgggcctggccaggagtaacctggatgaggacatcattgcagaagagaacatcgtttcccgaagtgagttcccagagagctggctgtggaacgttgaggacttgaaagagccaccgaaaaatggaatctctacgaagctcatgaatatatttttgaaagactccatcaccacgtgggagattctggctgtcagcatgtcggacaagaaagggatctgtgtggcagaccccttcgaggtcacagtaatgcaggacttcttcatcgacctgcggctaccctactctgttgttcgaaacgagcaggtggaaatccgagccgttctctacaattaccggcagaaccaagagctcaaggtgagggtggaactactccacaatccagccttctgcagcctggccaccaccaagaggcgtcaccagcagaccgtaaccatcccccccaagtcctcgttgtccgttccatatgtcatcgtgccgctaaagaccggcctgcaggaagtggaagtcaaggctgccgtctaccatcatttcatcagtgacggtgtcaggaagtccctgaaggtcgtgccggaaggaatcagaatgaacaaaactgtggctgttcgcaccctggatccagaacgcctgggccgtgaaggagtgcagaaagaggacatcccacctgcagacctcagtgaccaagtcccggacaccgagtctgagaccagaattctcctgcaagggaccccagtggcccagatgacagaggatgccgtcgacgcggaacggctgaagcacctcattgtgaccccctcgggctgcggggaacagaacatgatcggcatgacgcccacggtcatcgctgtgcattacctggatgaaacggagcagtgggagaagttcggcctagagaagcggcagggggccttggagctcatcaagaaggggtacacccagcagctggccttcagacaacccagctctgcctttgcggccttcgtgaaacgggcacccagcacctggctgaccgcctacgtggtcaaggtcttctctctggctgtcaacctcatcgccatcgactcccaagtcctctgcggggctgttaaatggctgatcctggagaagcagaagcccgacggggtcttccaggaggatgcgcccgtgatacaccaagaaatgattggtggattacggaacaacaacgagaaagacatggccctcacggcctttgttctcatctcgctgcaggaggctaaagatatttgcgaggagcaggtcaacagcctgccaggcagcatcactaaagcaggagacttccttgaagccaactacatgaacctacagagatcctacactgtggccattgctggctatgctctggcccagatgggcaggctgaaggggcctcttcttaacaaatttctgaccacagccaaagataagaaccgctgggaggaccctggtaagcagctctacaacgtggaggccacatcctatgccctcttggccctactgcagctaaaagactttgactttgtgcctcccgtcgtgcgttggctcaatgaacagagatactacggtggtggctatggctctacccaggccaccttcatggtgttccaagccttggctcaataccaaaaggacgcccctgaccaccaggaactgaaccttgatgtgtccctccaactgcccagccgcagctccaagatcacccaccgtatccactgggaatctgccagcctcctgcgatcagaagagaccaaggaaaatgagggtttcacagtcacagctgaaggaaaaggccaaggcaccttgtcggtggtgacaatgtaccatgctaaggccaaagatcaactcacctgtaataaattcgacctcaaggtcaccataaaaccagcaccggaaacagaaaagaggcctcaggatgccaagaacactatgatccttgagatctgtaccaggtaccggggagaccaggatgccactatgtctatattggacatatccatgatgactggctttgctccagacacagatgacctgaagcagctggccaatggtgttgacagatacatctccaagtatgagctggacaaagccttctccgataggaacaccctcatcatctacctggacaaggtctcacactctgaggatgactgtctagctttcaaagttcaccaatactttaatgtagagcttatccagcctggagcagtcaaggtctacgcctattacaacctggaggaaagctgtacccggttctaccatccggaaaaggaggatggaaagctgaacaagctctgccgtgatgaactgtgccgctgtgctgaggagaattgcttcatacaaaagtcggatgacaaggtcaccctggaagaacggctggacaaggcctgtgagccaggagtggactatgtgtacaagacccgactggtcaaggttcagctgtccaatgactttgacgagtacatcatggccattgagcagaccatcaagtcaggctcggatgaggtgcaggttggacagcagcgcacgttcatcagccccatcaagtgcagagaagccctgaagctggaggagaagaaacactacctcatgtggggtctctcctccgatttctggggagagaagcccaacctcagctacatcatcgggaaggacacttgggtggagcactggcctgaggaggacgaatgccaagacgaagagaaccagaaacaatgccaggacctcggcgccttcaccgagagcatggttgtctttgggtgccccaactgaccacacccccattcc

SEQ ID NO: 1174 - protein, 1663 aa, Homo sapien
MGPTSGPSLLLLLLTHLPLALGSPMYSIITPNILRLESEETMVLEAHDAQGDVPVTVTVHDFPGKKLVLSSEKTVLTPATNHMGNVTFTIPANREFKSEKGRNKFVTVQATFGTQVVEKVVLVSLQSGYLFIQTDKTIYTPGSTVLYRIFTVNHKLLPVGRTVMVNIENPEGIPVKQDSLSSQNQLGVLPLSWDIPELVNMGQWKIRAYYENSPQQVFSTEFEVKEYVLPSFEVIVEPTEKFYYIYNEKGLEVTITARFLYGKKVEGTAFVIFGIQDGEQRISLPESLKRIPIEDGSGEVVLSRKVLLDGVQNLRAEDLVGKSLYVSATVILHSGSDMVQAERSGIPIVTSPYQIHFTKTPKYFKPGMPFDLMVFVTNPDGSPAYRVPVAVQGEDTVQSLTQGDGVAKLSINTHPSQKPLSITVRTKKQELSEAEQATRTMQALPYSTVGNSNNYLHLSVLRTELRPGETLNVNFLLRMDRAHEAKIRYYTYLIMNKGRLLKAGRQVREPGQDLVVLPLSITTDFIPSFRLVAYYTLIGASGQREVVADSVWVDVKDSCVGSLVVKSGQSEDRQPVPGQQMTLKIEGDHGARVVLVAVDKGVFVLNKKNKLTQSKIWDVVEKADIGCTPGSGKDYAGVFSDAGLTFTSSSGQQTAQRAELQCPQPAARRRRSVQLTEKRMDKVGKYPKELRKCCEDGMRENPMRFSCQRRTRFISLGEACKKVFLDCCNYITELRRQHARASHLGLARSNLDEDIIAEENIVSRSEFPESWLWNVEDLKEPPKNGISTKLMNIFLKDSITTWEILAVSMSDKKGICVADPFEVTVMQDFFIDLRLPYSVVRNEQVEIRAVLYNYRQNQELKVRVELLHNPAFCSLATTKRRHQQTVTIPPKSSLSVPYVIVPLKTGLQEVEVKAAVYHHFISDGVRKSLKVVPEGIRMNKTVAVRTLDPERLGREGVQKEDIPPADLSDQVPDTESETRILLQGTPVAQMTEDAVDAERLKHLIVTPSGCGEQNMIGMTPTVIAVHYLDETEQWEKFGLEKRQGALELIKKGYTQQLAFRQPSSAFAAFVKRAPSTWLTAYVVKVFSLAVNLIAIDSQVLCGAVKWLILEKQKPDGVFQEDAPVIHQEMIGGLRNNNEKDMALTAFVLISLQEAKDICEEQVNSLPGSITKAGDFLEANYMNLQRSYTVAIAGYALAQMGRLKGPLLNKFLTTAKDKNRWEDPGKQLYNVEATSYALLALLQLKDFDFVPPVVRWLNEQRYYGGGYGSTQATFMVFQALAQYQKDAPDHQELNLDVSLQLPSRSSKITHRIHWESASLLRSEETKENEGFTVTAEGKGQGTLSVVTMYHAKAKDQLTCNKFDLKVTIKPAPETEKRPQDAKNTMILEICTRYRGDQDATMSILDISMMTGFAPDTDDLKQLANGVDRYISKYELDKAFSDRNTLIIYLDKVSHSEDDCLAFKVHQYFNVELIQPGAVKVYAYYNLEESCTRFYHPEKEDGKLNKLCRDELCRCAEENCFIQKSDDKVTLEERLDKACEPGVDYVYKTRLVKVQLSNDFDEYIMAIEQTIKSGSDEVQVGQQRTFISPIKCREALKLEEKKHYLMWGLSSDFWGEKPNLSYIIGKDTWVEHWPEEDECQDEENQKQCQDLGAFTESMVVFGCPN

SEQ ID NO: 1175 - DNA, 2714 bp, Homo sapien
ggcggcggtcccgaggggcggcggccgcgctgctccctgagaacgggtcccgcagctgggcaggcgggcggcctgagggcgcggagccatgaagctgtacagcctcagcgtcctctacaaaggcgaggccaaggtggtgctgctcaaagccgcatacgatgtgtcttccttcagctttttccagagatccagcgttcaggaattcatgaccttcacgagtcaactgattgtggagcgctcatcgaaaggcactagagcttctgtcaaagaacaagactatctgtgccacgtctacgtccggaatgatagtcttgcaggtgtggtcattgctgacaatgaatacccatcccgggtggcctttaccttgctggagaaggtactagatgaattctccaagcaagtcgacaggatagactggccagtaggatcccctgctacaatccattacccagccctggatggtcacctcagtagataccagaacccacgagaagctgatcccatgactaaagtgcaggccgaactagatgagaccaaaatcattctgcacaacaccatggagtctctgttagagcgaggtgagaagctagatgacttggtgtccaaatccgaggtgctgggaacacagtctaaagccttctataaaactgcccggaaacaaaactcatgctgtgccatcatgtgatgcagcctgccagaggcccaatgctggaatggcaccatcattcacatcagaactgcagcccctggaaaagaagagacagccatagacgaggagccagagtgggggcagactggccatttttattttgaagttcctgcgagaaatggatggtggaagggtggcgaatgttcaaattcatatgtgtggtagtgattcttggaaagaatttgaggtccccaaaggtgtatttttgggcaaatgaaaccataaactccgactggcttctgtagatgccaaagggctctttttcagctaaccctgggaaggctctgtgggagggaggtcggagccagctgtttctcgatctttggtatatctttggatcttatttgtacattaatgatattaacactccagtggggggtggggagtccctgatgctagggctggggtgggtggagtttgaagactcttgggaaagcctctcctggggccactgttgggggtgggagtgagcccaccacagaggccacaggcaggcccccacttcaggcccaaggcctggggcggggggaacagtcactgggtctcagattctgagactgttgtttagcttacctttctgctaggattggcttcccgcagagggcagggcccatcctaagcagcttccaagtcccacaaaggtggcttgtgggaggatttggaaggagctgcattgtgggcggggagtgtgtgggttgggttcgtaccagcaagtagactaggaactgagcccaggaaagggggatgttttcctggtgtttggatggtcagctgggagtgtccatcatcaggggaagatcaaacacaggtgcactcagctgcccagggcctctgggacacttgccttgacttgcaacttgccttgaacatcacgatcaaagcagcaggtgctgtggtctctcaaaattgatttttatttgactctgtggctctaagactgccttgaaccgcctgaggcctatgcatctgaacaagtgggtctctcccttgagcaccaggagtgggtgccagccggccccgaggattcccagcaccccacctatggtcttgccagcataggcttgctagttccttcttggtcagaggtagctgcagaggggggaggccaagggtttggtctaagctgtgccctgccacctggcaggaggcccactcactgcccaagtcatggcaacaggctggagcagcccaggagatgggcctaaaatgttctggatcccttgggtcctagtgttatgttccagtctgcccacctgtgctcaggatgcagccctgggatccagcacccatggaagcttctgctgggatggtgtcacctatgggttttgaaccagtgtggtatggtccttgggagctctgctctgagcttgccacactgctgagagcacccactgtcctgaccagagtctcagtggtcctgacccccaatgtgggcaggggctgggcaggagggtggggtctgctgtgggttcagaggactccacctcctggctggtttacctgctgctgcccattttctctgggtactgctggccagaggactttagcctacccctgaagagcctgtccatgtcattttcctactgccatagataccctaagcccagggccccttgaggcccagactcagcctgcccactggtgccggagacggagtggagtgggcctggatccgagggatgctacctctccctttcccacttgaggaccctggggagagatgggggcggggaaaatggaggtatgaatttggggtaagaggaagtgagatctccgcttgcaggtcagcccctgccttgcagggcgggctggcttgactcaggccctgtgagatagagggcccagcccagccccacccacagatcccctgctcctgttgtgttctgttgtaaatcatttggcgagactgtattttagtaactgctgcctaacttccctgtgttctatttgagaggcgcctgtctggataaagttgtcttgaaatttcaaaaaaaaaaaaaaaaaa

SEQ ID NO: 1176 - protein, 198 aa, Homo sapien
MKLYSLSVLYKGEAKVVLLKAAYDVSSFSFFQRSSVQEFMTFTSQLIVERSSKGTRASVKEQDYLCHVYVRNDSLAGVVIADNEYPSRVAFTLLEKVLDEFSKQVDRIDWPVGSPATIHYPALDGHLSRYQNPREADPMTKVQAELDETKIILHNTMESLLERGEKLDDLVSKSEVLGTQSKAFYKTARKQNSCCAIM

SEQ ID NO: 1177 - DNA, 2943 bp, Homo sapien
ccctaatcaagtaccccctcctcctccaccacctcctgccccacccctccctgcatctggattctttttggcatccatgtcagaagacaatcgccctttaactggacttgcagctgcaattgccggagcaaaacttaggaaagtgtcacggatggaggatacctctttcccaagtggagggaatgctattggtgtgaactccgcctcatctaaaacagatacaggccgtggaaatggaccccttcctttagggggtagtggtttaatggaagaaatgagtgccctgctggccaggaggagaagaattgctgaaaagggatcaacaatagaaacagaacaaaaagaggacaaaggtgaagattcagagcctgtaacttctaaggcctcttcaacaagtacacctgaaccaacaagaaaaccttgggaaagaacaaatacaatgaatggcagcaagtcacctgttatctccagaccaaaatccacacccttatcacagcccagtgccaatggagtccagacggaaggacttgactatgacaggctgaagcaggacattttagatgaaatgagaaaagaattaacaaagctaaaagaagagctcattgatgcaatcaggcaggaactgagcaagtcaaatactgcatagaggaacagactaaggagagataggactttaatctggaggaaaaatatcctacaaacaacaactgttcacaacagcaaacccctacatttatgagctgtaagaagaaaatggagacaaacagaaggagggaaaaaccaacctactctgaaagccttcagacattatgactctggtgataagctctttccctctccgtttgctgcttttttctggcctttacaacagaatggaagagaatcatttaagagttcctgtaacagttatgcagaaaatactaaaacccatcaggcaagatcaccacgcattgaaatattttcatatcaagataaagtcgcacattttccacaatacattgctaaaataaagaggagaaaggcttaggaagtttttctgcagagagtgctggtaaagaattgagcaagtttgctattgtattgtaatgtttctctcaggtttgttcttcctatcatgtttgatattccatgaataattgagatcagccctatgtaagttaagatcataatatgtggaacaaatggaattgtaagtgctttcaaagggtaatatttataagaaagtgtccgaaaaatgtttcttcagcttgagaaattttagaatgataggaagtttctcgagttagccttcatgcaattttgtagattaaaacataaaatttgtccagaacttaaagatttagatgccttcctaaattgttacaatgctttaccaaatctatgacttctacataacacaaaccagtggtcaaatgtaaacactatattgtagatttactgtaggttttcaaccttttttagatttatgcatgtggacatttttataatgtaattacaatcaccacaaggttagcttttttaattgcagacagtaatgcatgtcacactaatatgtagtggccttttcaaggcctagtcccagggaaaacattttgtagagtataggggagtgggaggaaggggaggaataattttttatttaaagttgatttctgcactatctttttctcagttacctgcatgaataaataatgagaaatattttgtgactttaattggtaaatatgttacaaaaccaagtacttaatcttttacatcatgtcttcagctatttgtattttaaccagtaatttcaatggtctgaaacatgattctgagcttcacataatatcttaactgtggaactcaaaagtttgatcactgaatttggcagttattattacctaggtacccccgctgttacacaggtgtttagatacgtgttcctgaatgaagctgcttttgaattttgttatgttgaaatgcaagaaataacaatgatggcagcaattaaggtcacagaaatcattaggtaaaggaaaaccaatgaggagttctgcagttttcttttaataagtaaagtgagacttgggtggtgggaagaaggaaggtgggaagaaggaattagacactctgcctgccactctgcgtgtgtgtgctctcgcgcacgtgctgtctatatggaagccactcccttttctttcctttgaaactggtaaggttaaaataggggagaaatcctacatgttggaatgatagctttttggaaaatttaagaaactctccaggctctccatcttgatttatgcttgagttgttatgtgccatatttgctttgaactctgattatcagaagttttactaaaactttgaaataattcactttcatctgctttctagattttgtacatctcagtccataaagcaaagcttgttgatagtgtagttttctaaacgctgcaaatttgcagcctttaccactacaaagaagtttggatgagggattttttttttctttgtcaaaatagttcctgtttctgtagaaatttcatttttagattaaactgtgatggatgggctatcataattcaagtatacatttcttttttctatcagatattcattgtcatgcagtagtagtaaaaacatcaaagatgcagcaagcttattaagtattattttctaaaagaaataggaggcattttcatctttattattgtacttttggttatgcaaacactttgataatataaacagttatgtcccctataaatctggtcagcaacctcttttgattttgttgggtaagttaaatagtctgtagtaggtagagtactgggtacaagtggtccaaactaagataagagactaaaataaaatgctaaatcttaaaagaaactgggtttatgcactaaacgttttgtgccttggtctaatattaacatgatgtatgtgtaaactgac

SEQ ID NO: 1178 - protein, 189 aa, Homo sapien
MSEDNRPLTGLAAAIAGAKLRKVSRMEDTSFPSGGNAIGVNSASSKTDTGRGNGPLPLGGSGLMEEMSALLARRRRIAEKGSTIETEQKEDKGEDSEPVTSKASSTSTPEPTRKPWERTNTMNGSKSPVISRPKSTPLSQPSANGVQTEGLDYDRLKQDILDEMRKELTKLKEELIDAIRQELSKSNTA

SEQ ID NO: 1179 - DNA, 3038 bp, Homo sapien
gtggggctgggcccagccggacgcgacctcagcctgcggcggctaactgccggtaggcgtctgtgtgcgccgccaagtcggtggggcggggacgcgaggtgtggatggggggtcgccttgacctctgcctcagccagtagcgcagtctcggcctcgccgttacggagatggtgccctgggtgcggacgatggggcagaagctgaagcagcggctgcgactggacgtgggacgcgagatctgccgccagtacccgctgttctgcttcctgctgctctgtctcagcgccgcctccctgcttcttaacaggtatattcatattttaatgatcttctggtcatttgttgctggagttgtcacattctactgctcactaggacctgattctctcttaccaaatatattcttcacaataaaatacaaacccaagcagttaggacttcaggaattatttcctcaaggtcatagctgtgctgtttgtggtaaagtgaaatgtaaacgacataggccttctttgctacttgaaaactaccagccatggctagacctgaaaatttcttccaaggttgatgcatctctctcagaggtggatattccatctattataaccaagaaactattaaaagcagcaatgaagcatatagaagtgatagttaaagccagacagaaagtaaaaaatacagagtttttacagcaagctgctttagaagaatatggtccagagcttcatgttgctttgagaagtcgaagagatgaattgcactatttaaggaaacttactgaactgctttttccttatattttgcctcctaaagcaacagactgcagatctctgaccttacttataagagagattctgtctggctctgtgttccttccttctttggatttcctagctgatccagatactgtgaatcatttgcttatcatcttcatagatgacagtccacctgaaaaagcaactgaaccggcttctcctttggttccattcttgcagaaatttgcagaacctagaaataaaaagccatctgtgctgaagttagaattgaagcaaatcagagagcaacaagatcttttatttcgttttatgaactttctgaaacaagaaggcgcagtgcacgtgttgcagttttgtttgactgtggaggaatttaatgatagaattttacgaccagaattatcaaatgatgaaatgctgtctcttcatgaagaattgcagaagatttataaaacatactgtttggatgaaagtattgacaaaattagatttgatcccttcattgtagaagagattcaaagaattgctgaaggcccatacatagatgttgtgaaacttcaaactatgagatgtctttttgaagcatatgaacatgttctttcccttttggagaatgtatttactcctatgttctgccatagtgatgagtatttcagacaacttttaagaggtgcagaatcaccaacacgcaattcaaaattgaacaggaacacacagaaaaggggagaatcatttggaatcagcagaataggtagcaaaattaaaggagtattcaaaagtaccacaatggagggagctatgttgcctaattatggtgtagctgaaggtgaagatgattttattgaagaaggtattgttgtaatggaagatgattctccagtggaggctgtgagcacacctaatactccccgaaaccttgctgcatggaaaattagcattccatatgtagacttttttgaggatccctcctctgaaaggaaggagaaaaaagaaagaattcctgtgttttgtattgatgttgaaagaaatgatagaagagcagttggacacgagcctgaacattggtctgtctatagaagatatcttgaattctatgtacttgaatcaaaactaacagaatttcatggtgcatttcctgatgcccagcttccttctaagaggatcattggccccaaaaattatgaattcttaaagtcaaagagggaagagttccaagaatatctacagaaacttctgcagcatccagaactgagtaatagtcaacttctggcagactttctttcccctaatggtggggaaacacaatttcttgataagatactaccagatgtaaatcttgggaaaattataaaatctgttcctggaaaactaatgaaagagaaaggtcagcatttggaaccttttatcatgaatttcattaattcttgtgagtctccaaagcctaaaccaagtagaccagaactgaccattctcagccctacttcagaaaacaacaagaagcttttcaatgatctgtttaaaaataatgcaaaccgtgctgaaaatacagagagaaagcaaaatcagaattattttatggaggtgatgactgtagaaggagtctatgattacctgatgtatgtaggacgggtagttttccaggttcctgactggcttcatcatctcttaatgggaactcgaatcctctttaaaaacaccctggaaatgtatactgattactatcttcagtgtaaactagaacagctatttcaggagcaccgtttggtctcactcataacacttctcagagatgctatattctgtgaaaacactgaacctcgctctctccaagataagcaaaaaggagcaaaacagacttttgaagaaatgatgaattacattccagatctgttagtcaagtgtattggtgaagaaaccaagtatgaaagcatcagacttctgtttgatggcttacagcaaccagtactcaacaagcagctgacttatgttttattggacattgtgatacaggaactgtttccagagctcaataaggtacaaaaggaagttacctctgtgacatcttggatgtaaacacttggatttggtatagaataacccattgaaatttctgctgtgcgagggtggtagaaatttacttttttgggtatattcttatatatattatgtacatcgctgtctgaaattttagttattttttgtttttaataaagactaacacaaacttaatgattaaaagtgaaaaaaaaaaaaaaaaaaaaa

SEQ ID NO: 1180 - protein, 886 aa, Homo sapien
MGQKLKQRLRLDVGREICRQYPLFCFLLLCLSAASLLLNRYIHILMIFWSFVAGVVTFYCSLGPDSLLPNIFFTIKYKPKQLGLQELFPQGHSCAVCGKVKCKRHRPSLLLENYQPWLDLKISSKVDASLSEVDIPSIITKKLLKAAMKHIEVIVKARQKVKNTEFLQQAALEEYGPELHVALRSRRDELHYLRKLTELLFPYILPPKATDCRSLTLLIREILSGSVFLPSLDFLADPDTVNHLLIIFIDDSPPEKATEPASPLVPFLQKFAEPRNKKPSVLKLELKQIREQQDLLFRFMNFLKQEGAVHVLQFCLTVEEFNDRILRPELSNDEMLSLHEELQKIYKTYCLDESIDKIRFDPFIVEEIQRIAEGPYIDVVKLQTMRCLFEAYEHVLSLLENVFTPMFCHSDEYFRQLLRGAESPTRNSKLNRNTQKRGESFGISRIGSKIKGVFKSTTMEGAMLPNYGVAEGEDDFIEEGIVVMEDDSPVEAVSTPNTPRNLAAWKISIPYVDFFEDPSSERKEKKERIPVFCIDVERNDRRAVGHEPEHWSVYRRYLEFYVLESKLTEFHGAFPDAQLPSKRIIGPKNYEFLKSKREEFQEYLQKLLQHPELSNSQLLADFLSPNGGETQFLDKILPDVNLGKIIKSVPGKLMKEKGQHLEPFIMNFINSCESPKPKPSRPELTILSPTSENNKKLFNDLFKNNANRAENTERKQNQNYFMEVMTVEGVYDYLMYVGRVVFQVPDWLHHLLMGTRILFKNTLEMYTDYYLQCKLEQLFQEHRLVSLITLLRDAIFCENTEPRSLQDKQKGAKQTFEEMMNYIPDLLVKCIGEETKYESIRLLFDGLQQPVLNKQLTYVLLDIVIQELFPELNKVQKEVTSVTSWM

SEQ ID NO: 1181 - DNA, 1104 bp, Homo sapien
cctgctctgtagagccggcggcaaccgggtagcttggccaggttgtgaggaaccgcagcgcccgcaggaccgggccgctgagcctgcagccgccccgcgccgtgacctgcgaccctagaccccgactaccctttggctcagcccgcgcgccccaggcccggcccgggcggcgcgacgggaggatgagcggcgggcggcggaaggaggagccgcctcagccgcagctggccaacggggccctcaaagtctccgtctggagtaaggtgctgcggagcgacgcggcctgggaggataaggatgaatttttagatgtgatctactggttccgacagatcattgctgtggtcctgggtgtcatttggggagttttgccattacgagggttcttgggaatagcaggattctgcctgatcaatgcaggagtcctgtacctctacttcagcaattacctacagattgatgaggaagaatatggtggcacgtgggagctcacgaaggaagggtttatgacctcttttgccttgttcatggtcatttggatcatcttttacactgccatccattatgactgatggtgtacagctcccaagtgctccctatccagtccaaaggaccctcttgattacagcacaggaacttgatcgttggggaaccccagccccttggaacttggaagacccgtgtttcctggaccgcgaatcagtgtgttgggcatcagtgttttctgcaagggttgtgacctgaaactttttaaaaaccacccacctttggggaagcatttctgaatttatccatcaccaaccatttcttcttggataccatcaagtaacagctattatttgccaagtggagctgtcatttaatttgatgcacctctggattcagatgaaacattaaattgtcttcctcgattctccatcgggtgtagagtttttaaactatcaatggcatttcaagtcttctgaaacagcatggctgtatgtgcgtggtccatagcacagtacatgcagcatctaataagagtttccattgtagaatgttttcacatacttgaataaatcaaatctttaattgagaaaaaaaaaaaaaaaaaaaaaaaaaaaa

SEQ ID NO: 1182 - protein, 129 aa, Homo sapien
MSGGRRKEEPPQPQLANGALKVSVWSKVLRSDAAWEDKDEFLDVIYWFRQIIAVVLGVIWGVLPLRGFLGIAGFCLINAGVLYLYFSNYLQIDEEEYGGTWELTKEGFMTSFALFMVIWIIFYTAIHYD

SEQ ID NO: 1183 - DNA, 1362 bp, Homo sapien
gggggggaggactgggtgcgcctgcagggatcggaagccggttggggtgtgagaggttttctcgctctagggagattcttcaagcaatcactatgtcaacagacacaggtgtttcccttccttcatatgaggaagatcagggatcaaaactcattcgaaaagctaaagaggcaccattcgtacccgttggaatagcgggttttgcagcaattgttgcatatggattatataaactgaagagcaggggaaatactaaaatgtccattcatctgatccacatgcgtgtggcagcccaaggctttgttgtaggagcaatgactgttggtatgggctattccatgtatcgggaattctgggcaaaacctgagccttagaagaagagatgctgtcttggtcttgttggaggagcttgctttagttagatgtcttattattaaagttacctattattgttggaaataaactaatttgtatgggtttagatggtaacatggcattttgaatattggcttcctttcttgcaggcttgatttgcttggtgaccgaattactagtgactagtttactaactaggtcattcaaggaagtcaagttaacttaaacatgtcacctaaatgcacttgatggtgttgaaatgtccaccttcttaaatttttaagatgaacttagttctaaagaagataacaggccaatcctgaaggtactccctgtttgctgcagaatgtcagatattttggatgttgcataagagtcctatttgccccagttaattcaactttcgtctgcctgttttgtggactggctggctctgttagaactctgtccaaaaagtgcatggaatataacttgtaaagcttcccacaattgacaatatatatgcatgtgtttaaaccaaatccagaaagcttaaacaatagagctgcataatagtatttattaaagaatcaccaactgtaaacatgagaataacttaaggttctagtttagttttttgtaattgcaaattatatttttgctgctgatatattagaataattttaaaatgtcatcttgaaatagaaatatgtattttaagcactcacgcaaaggtaaatgaacacgttttaaatgtgtgtgttgctaattttttccataagaattgtaaacattgaactgaacaaattacctataatggatttggttaatgacttatgagcaagctggtttggccagacagtatacccaaacttttatataatatacagaaggctatcacacttgtgaaattctcttgtctaatctgaatttgcattccatggtgttaacatggtatatgtattgttattaaagtaagtgacccatgaaaaaaaaaaaaaaaaaaaa

SEQ ID NO: 1184 - protein, 93 aa, Homo sapien
MSTDTGVSLPSYEEDQGSKLIRKAKEAPFVPVGIAGFAAIVAYGLYKLKSRGNTKMSIHLIHMRVAAQGFVVGAMTVGMGYSMYREFWAKPEP

SEQ ID NO: 1185 - DNA, 6702 bp, Homo sapien
ccccgactagcccgacagtccccgactagcccgacagccccagcaggatctgcatcgtcatcgagccggcccagcttctgaagggagatgtcatggtgaaatgctaccacaagaaataccgctcggccacccgtgacgtcattttccgcctgcagtttcacactggggctgtgcagggctacgggctggtgtttgggaaggaggatctggacaatgccagcaaagatgaccgttttcctgactatgggaaggttgaattagtcttctctgccacgcctgagaagattcaagggtccgaacacttgtacaacgaccacggtgtgattgtggactacaacacaacagacccactgatacgctgggactcgtacgagaacctcagtgcagatggagaagtgctacacacgcagggccctgtcgatggcagcctttacgcgaaggtgaggaagaaaagctcctcggatcctggcatcccaggtggcccccaggcaatcccggccaccaacagcccagaccacagtgaccacaccttgtctgtcagcagtgactccggccactctacagcctctgccaggacggataagacggaagagcgcctggccccaggaaccaggaggggcctgagtgcccaggagaaggcagagttggaccagctgctcagtggctttggcctggaagatcctggaagctccctcaaggaaatgactgatgctcgaagcaagtacagtgggacccgccacgtggtgccagcccaggttcacgtgaatggagacgctgctctgaaggatcgggagacagacattctggatgacgagatgccccaccacgacctgcacagtgtggacagccttgggaccctgtcctcctcggaagggcctcagtcggcccacctgggtcccttcacctgccacaagagcagccagaactcactcctatctgacggttttggcagcaacgttggtgaagatccgcagggcaccctcgttccggacctgggccttggcatggacggcccctatgagcgggagcggacttttgggagtcgagagcccaagcagccccagcccctgctgagaaagccctcagtgtccgcccagatgcaggcctatgggcagagcagctactccacacagacctgggtgcgccagcagcagatggttgtagctcaccagtatagcttcgccccagatggggaggcccggctggtgagccgctgccctgcagacaatcctggcctcgtccaggcccagcccagagtgccactcacccccacccgagggaccagcagtagggtggctgtccagaggggtgtaggcagtgggccacatccccctgacacacagcagccctctcccagcaaagcgttcaaacccaggtttccaggagaccaggttgtgaatggagccggcccagagctgagcacaggcccctccccaggctcgcccaccctggacatcgaccagtccatcgagcagctcaacaggctgatcctggagctggatcccaccttcgagcccatccctacccacatgaacgccctcggtagccaggccaatggctctgtgtctccagacagcgtgggaggtgggctccgggcaagcagcaggctgcctgacacaggagagggccccagcagggccaccgggcggcaaggctcctctgctgaacagcccctgggcgggagactcaggaagctgagcctggggcagtacgacaacgatgctggggggcagctgcccttctccaaatgtgcatggggaaaggctggtgtggactatgccccaaacctgccgccattcccctcaccagcggacgtcaaagagacgatgacccctggctatccccaggacctcgatattatcgatggcagaattttaagtagcaaggagtccatgtgttcaactccagcatttcctgtgtctccagagacaccgtatgtgaaaacagcgctgcgccatcctccgttcagcccacctgagcccccgctgagcagcccagccagtcagcacaaaggaggacgtgaaccacgaagctgccctgagacgctcactcacgctgtggggatgtcagagagccccatcggacccaaatccacgatgctccgggctgatgcgtcctcgacgccctcctttcagcaggcttttgcttcttcctgcaccatttccagcaacggccctgggcagaggagagagagctcctcttctgcagaacgccagtgggtggagagcagccccaagcccatggtttccctgctggggagcggccggcccaccggaagtcccctcagcgctgagttctccggtaccaggaaggactccccagtgctgtcctgcttcccgccgtcagagctccaggctcctttccacagccatgagctgtccctagcagagccaccggactccctggcgcctcccagcagccaggccttcctgggcttcggcaccgccccagtgggaagtggccttccgcccgaggaggacctgggggccttgctggccaattctcatggagcgtcaccgacccccagcatcccgctgacagcgacaggggctgccgacaatggcttcctgtcccacaactttctcacggtggcgcctggacacagcagccaccacagtccaggcctgcagggccagggtgtgaccctgcccgggcagccacccctccctgagaagaagcgggcctcggagggggatcgttctttgggctcagtctctccctcctccagtggcttctccagcccgcacagcgggagcaccatcagtatccccttcccaaatgtccttcccgacttttccaaggcttcagaagcggcctcacctctgccagatagtccaggtgataaacttgtgatcgtgaaatttgttcaagacacttccaagttctggtacaaggcggatatttcaagagaacaagccatcgccatgttgaaggacaaggagccgggctcattcattgttcgagacagccattccttccgaggggcctatggcctggccatgaaggtggccacgcccccaccttcagtcctgcagctgaacaagaaagctggagatttggccaatgaactcgtccggcactttttgatcgagtgtaccccgaagggagtgcggttgaaagggtgctcgaatgaaccatatttcgggagcctgacggccttggtgtgccagcattccatcacgcccttggccttgccgtgcaagctgcttatcccagagagagatccattggaggaaatagcagaaagttctccccagacggcagccaattcagcagctgagctgttgaagcagggggcagcctgcaacgtgtggtacttgaactctgtggagatggagtccctcaccggccaccaggcgatccagaaggccctgagcatcaccctggtccaggagcctccacctgtgtccacagttgtgcacttcaaggtgtcagcccagggcatcaccctgacagacaatcagaggaagctcttcttccggaggcattaccccgtgaacagtgtgattttctgtgccttggacccacaagacaggaagtggatcaaagatggcccttcctcaaaagtctttggatttgtggcccggaagcagggcagtgccacggataatgtgtgccacctgtttgcagagcatgaccctgagcagcctgccagtgccattgtcaacttcgtatcaaaggtcatgattggttccccaaagaaggtctgagaactcccctccctccctggacccaccgatgcctctcgaagccctggagacagccgttgggtgagggtggggcccccactttttaccaaactagtaaacctgacattccaggcccatgaggggaaagaggatcttccagctctgcaaaaacaagaacaaacaacatcaccgtgaattggcctttcctgaaagtgacttatctgacacatctctgtagccacatgctttttgggtagaagaagctgggcatgggtgcaccccaccccctagggtccccatgggaaagggacatgcaaggaaacagcacagaacacgaggtggtccccatgtccctggcacactagcattccgggggatgaggaatccccagcccttgaggcagaggtgccgagtgactgccatgcttcgcccgtccgcatgggcgcttctgtccagctgcacccgaggccgggggtttccctcacctcggtcttcccaagatggagatgctaacgaaactgagaagggggcgtatgtttgacgaaggtttgtgcaagtcaggcccttctggaacacagcagggcctacaacgaggggcctttgcgatgggctgtgaggatgggggtggtgggaagaattggccacgttagagaccccatgccaccccaccatggtgagtgctctgtgcctcctgctcacctgtggtgagctgggcgagctgggcgagctgggcgagctgggctggggagagcctgtgaggaccgagaggagaaatgagaagaaggaacaaaaatattatttctatgtaatttatattttacttatgccaaattatttatgataatttgccattgctatactgtaccagtgtcaaatgctgcagcctgccaagctgtgattttgtgaggcttgtccctatgtaggatgcaccgcaggcccctggccactgaaagagtgtgcagtggactgtgggtctcccatatgcggtgccgcccaaaggtggctttgcctcaagcaacctaccctgatgttttactcattggaatgtttttccccgattgtggatgacttcttttctgatggagagagtccaggagggatggaaaactcctggatttaagctcagcatcccccacatgggcttttcgatcatcttcaggcctgaagctgcacgacctgaagttcgcctgcatttatcagccctctttgtgctgctccttgccaccttggggttcctgctggggaccatgtgtggttgtggcatgtgtgagcagaagggaggatgaggaaaaagagaagaaaccccggtactgacaagctgtttttgagtgccactgtttgccatcatctaagccactgaatcaagtgtatttcaggcttatttcaacattccaatgccctggttttcctgcttgaatctgttcgtggtcaaaggtttgggggaatttgtgaccctggaacatccccagagtgaaagatggagctgggccacatcagaataaggccttggccccatcctctcacagcctaggtgctctgcaggcatgctgactgtcctgattgcgatccagcccgaaattccctcctctgctttcaaaagtcaaatcccccattcttaggccacactggtgtcacaagctcctgtcagggagctggggtttgggaatgtgctttgtgaactctgctttaaagtgaggggccgaggaaaacttagaaacaggcagagttggaagcagccaaatcacagtgggtgttgtgtgtgtgtgcgtgtgtgcatgcgtgcgtgtatgcgtgtgtgaaagcaggtggaccattccactttttagctcctattgatgcaccaaaccaagtgcctcatttctgtgccaaatgtttgccttggtcgttgtggacctccttctctaacttgcggtggcatgactgtcaggaggtgctggcattttcagcagatcctcatgtgttgaccctgatgtctttagcagaggcctctagcatctcggtttttcatccactgcaggaatgtggccacagggagcagaggtttgtactttccccaagaggtcctcatcctgagacggtctctacccatgtttaacccaaagagtgcaggccaggttccttatccttctgatgaaggatgagagagctcatttagaagtcagagcaaactagggtctcagtattgagaaacgcagcctgccagggaatcacagagacatcggggtgcccgcgatggccctcatgaagccatgcctcgacggcattcaggaagccctgcaaacgtgctttttgaactcattggccaggtgtgatttttacacaaggtaaacgtggtcaagggcatcggggaatttgctccaagcagatagctccctctgaggaaccaaaggaagcaagtttccacgatttctgaagagctggtataggaagtttctttcttccttttgtgttacatgtgcattaaacagaacaagctgtgtgtcatcacagattgtactgtgggctcagaaaccgtgagagagcccccaccgtggacaccggctctagggccacaggaaaaggaacgtttccaggcattttgtctccagggctcccgctggacaggcacgtactgccctggggagtaaatgcggagagttcacgaactgtgcccaacgcatgttatagccagggtcctactaactactcagtaaaagaacgtattgttgtattcctccagtgttaagctatagccatgttaaaagtcactgtgcatttattctcagcatcaaataccttgtaacgtcttctctgccttgttagtgcatatttttacttttctgatactgtaaagaatatatccagtatgtaaatgaatgttctataaatcttttgtatagtcattttctctgctccttaaatatcatctctattcagagtataataaaattatgaacttggtaaaaaaaaaaaaaaaaaaaaaaaaaaaaaaaaaaaaaaaaaaaaaaaaaaaaaaaaaaaaaaaaaaaaaaaa

SEQ ID NO: 1186 - protein, 1205 aa, Homo sapien
MVKCYHKKYRSATRDVIFRLQFHTGAVQGYGLVFGKEDLDNASKDDRFPDYGKVELVFSATPEKIQGSEHLYNDHGVIVDYNTTDPLIRWDSYENLSADGEVLHTQGPVDGSLYAKVRKKSSSDPGIPGGPQAIPATNSPDHSDHTLSVSSDSGHSTASARTDKTEERLAPGTRRGLSAQEKAELDQLLSGFGLEDPGSSLKEMTDARSKYSGTRHVVPAQVHVNGDAALKDRETDILDDEMPHHDLHSVDSLGTLSSSEGPQSAHLGPFTCHKSSQNSLLSDGFGSNVGEDPQGTLVPDLGLGMDGPYERERTFGSREPKQPQPLLRKPSVSAQMQAYGQSSYSTQTWVRQQQMVVAHQYSFAPDGEARLVSRCPADNPGLVQAQPRVPLTPTRGTSSRVAVQRGVGSGPHPPDTQQPSPSKAFKPRFPGDQVVNGAGPELSTGPSPGSPTLDIDQSIEQLNRLILELDPTFEPIPTHMNALGSQANGSVSPDSVGGGLRASSRLPDTGEGPSRATGRQGSSAEQPLGGRLRKLSLGQYDNDAGGQLPFSKCAWGKAGVDYAPNLPPFPSPADVKETMTPGYPQDLDIIDGRILSSKESMCSTPAFPVSPETPYVKTALRHPPFSPPEPPLSSPASQHKGGREPRSCPETLTHAVGMSESPIGPKSTMLRADASSTPSFQQAFASSCTISSNGPGQRRESSSSAERQWVESSPKPMVSLLGSGRPTGSPLSAEFSGTRKDSPVLSCFPPSELQAPFHSHELSLAEPPDSLAPPSSQAFLGFGTAPVGSGLPPEEDLGALLANSHGASPTPSIPLTATGAADNGFLSHNFLTVAPGHSSHHSPGLQGQGVTLPGQPPLPEKKRASEGDRSLGSVSPSSSGFSSPHSGSTISIPFPNVLPDFSKASEAASPLPDSPGDKLVIVKFVQDTSKFWYKADISREQAIAMLKDKEPGSFIVRDSHSFRGAYGLAMKVATPPPSVLQLNKKAGDLANELVRHFLIECTPKGVRLKGCSNEPYFGSLTALVCQHSITPLALPCKLLIPERDPLEEIAESSPQTAANSAAELLKQGAACNVWYLNSVEMESLTGHQAIQKALSITLVQEPPPVSTVVHFKVSAQGITLTDNQRKLFFRRHYPVNSVIFCALDPQDRKWIKDGPSSKVFGFVARKQGSATDNVCHLFAEHDPEQPASAIVNFVSKVMIGSPKKV

SEQ ID NO: 1187 - DNA, 1183 bp, Homo sapien
ggaaaaggaaaaaaaattagctttatacctcttcctggtctcaaccggccaggaaatttctggaacactccaaattcagtggaattaaatccaaaacaaaattttataaggtttaaaatacttttcacttcttatagtaatagtatactttaaaaagcctcaggggtatattatcttctaaacagcttacaattccagtgcagctacattaaccaactatgttctctagttgagaacaactaggcctatttcactgctgtgtagcctcagtgcctaacatgggtgccaaataaatattcgtagaattacactgaattgtaaaaaccattcgtttttgtttacaattgccaaaaatctcaaaaggccctgtatttatgtaattctttgaaattattattttattttaatttctcagttattgactggctgggtgtgacttagtacataagtactcaatattataaaaacctcaaataattgacttgattttacacaacatccttcccttttctacaagttaatttttttacaaatcatttgggttatctcctaaataggttatattttattgcttctagaaacaatgtttcaaaatatatgtgcattatcagtaataatttgtataaatatttcccacaacaattttcataattttcaaagactaatttcttgactgaagatattttgctagggaagtgaaactttaaaattttgtagattttaaaaaatattgttgaatggtgtcatgcaaaggatttatatagtgtgctcccactaactgtgtacagatcaggacacatatttttagacatctaagtctgtagcttaaatggaggttactcttccatcatctagaattgtttacttagtaattgttgtttcttttattattatagacttactatcagttttattttgccaagtatgcaacaggcatatcactagtatatgaaaatgtaaatatcacttgtgtactcaaacaaaagttggtcttaagcttccaccttgagcagccttggaaacctaacctgcctcttttagcataatcacattttctaaatgattttctttgttcctgaaaaagtgatttgtattagttttacatttgttttttggaagattatatttgtatatgtatcatcataaaatatttaaataaaaagtatctttagagtgaaaaaaa

SEQ ID NO: 1188 - protein, 50 aa, Homo sapien
GKGKKISFIPLPGLNRPGNFWNTPNSVELNPKQNFIRFKILFTSYSNSIL

SEQ ID NO: 1189 - DNA, 1167 bp, Homo sapien
agccggattgaaacaagatggcgggttcgtggtgagaagccgtcaaggagtagaaattggtatgcttagaagcagattctaaaagcagtttctcttcagaacatcttttttcataccacttgataagcatcttgaaacaccatggctgtagctgcagtaaaatgggtgatgtcaaagagaactatcttgaaacatttatttccagtccaaaatggagctttatattgtgtttgtcataaatctacgtattctcctctaccagatgactataattgcaacgtagagcttgctctgacttctgatggcaggacaatagtatgctaccacccttctgtggacattccatatgaacacacaaaacctatccctcggccagatcctgtgcataataatgaagaaacacatgatcaagtgctgaaaaccagattggaagaaaaagttgaacaccttgaggaaggacctatgatagaacaacttagcaaaatgttctttactactaagcaccgttggtatcctcatggacggtatcacagatgtcgtaagaatctgaatcctccaaaagacagatgatgcggaggttcctgggggaatcaaagagaaatgtgcctcatttgccatttgagaaaatgcagtctggtgtattcagtaatatatagtaaagtaataatgataaaatatcttttcatatattagaatgtgtacttttatataaagtaattctggatttgacattctcatttagagaaacctattttcttttttctttttctattttagtgtttcatttatgtgcggtctccaatttaggacttttccatagtgccaaagccatacatattcagtagaacatcaataaattcatcagaaattcaaacactttattataaaacgggcttcgtgttagataattttgctaaacagtaggctactgtaagtgttctgagcatatttaagcaggctagcattttcaatttacaatattttcaactgatagtaggtttattgggatgtaaccctatgataagttgagaaacatctctttttgtgtgtctactgtgatttaagtatttttaatcatcagccaagcattgttagtagtataaatatgattaataaaaatgtgcatggctttcctacaaaaaaaaaaaaaaaaaaaaaaaaaaaaaa

SEQ ID NO: 1190 - protein, 142 aa, Homo sapien
MAVAAVKWVMSKRTILKHLFPVQNGALYCVCHKSTYSPLPDDYNCNVELALTSDGRTIVCYHPSVDIPYEHTKPIPRPDPVHNNEETHDQVLKTRLEEKVEHLEEGPMIEQLSKMFFTTKHRWYPHGRYHRCRKNLNPPKDR

SEQ ID NO: 1191 - DNA, 3615 bp, Homo sapien
gcggcggcctcgaggtgacaactgtctccgtcgcaggctccggcgggggcgcaggaggtcgcccggcgcgtcactgtcgggtcggcgagccacgggggccgccgcagcaccatggcgaccaccgtcagcactcagcgcgggccggtgtacatcggtgagctcccgcaggacttcctccgcatcacgcccacacagcagcagcggcaggtccagctggacgcccaggcggcccagcagctgcagtacggaggcgcagtgggcaccgtgggccgactgaacatcacggtggtacaggcaaagttggccaagaattacggcatgacccgcatggacccctactgccgactgcgcctgggctacgcggtgtacgagacgcccacggcacacaatggcgccaagaatccccgctggaataaggtcatccactgcacggtgcccccaggcgtggactctttctatctcgagatcttcgatgagagagccttctccatggacgaccgcattgcctggacccacatcaccatcccggagtccctgaggcagggcaaggtggaggacaagtggtacagcctgagcgggaggcagggggacgacaaggagggcatgatcaacctcgtcatgtcctacgcgctgcttccagctgccatggtgatgccaccccagcccgtggtcctgatgccaacagtgtaccagcagggcgttggctatgtgcccatcacagggatgcccgctgtctgtagccccggcatggtgcccgtggccctgcccccggccgccgtgaacgcccagccccgctgtagcgaggaggacctgaaagccatccaggacatgttccccaacatggaccaggaggtgatccgctccgtgctggaagcccagcgagggaacaaggatgccgccatcaactccctgctgcagatgggggaggagccatagagcctctgcctcgatgccgttttgcccccgctctttggacacgccgacccggcgctccccaaggaatgctgtcccaacaagattcccgtgaaagagcacccgtgtcgccccctcccgtggacttctgtgccgccccgtccacacctgttcttgggtgcatgtgggttttcggttcctggcggtccaggacggggcgggggctcccctcccatctcgtgctgggaggtctcagcgcgctctcctgtccctgggacgtgcgtctctccttctcatgccgttctggaaaatgctcttgctgtagagagcagctgcttctgccagggtgttggaggtggtggagcgccttccgattccattcatggcattttgtgatgtgatgtaattggaatagagctgttgatttaaggcacacacaatccctcacactgtgggttttttttagaacttcccagacgaaaactcacgcccttgccctaacgcgctttgctgtgagcctggcccctgcccagggcttgggtctggtgagctgagcagcttcctgtggatggtgtggggccggcctctggcctggctcacctggccactgtccagccagccttgtgacagactccggcctgaaggcagaatgaacccacacctggagtgaggaagggggcctggcacggttggccaggctctgcctgattgccagccagcgggcatctgaagccgggtccttcgcccgccggaggctgccgtccgtctctcctgctgcgctcgtgccagctccgtgggtgtcctcccagggagcttctcttctcaacaggccttgcgaggctggggtgagaggtgatagaggcagcactgtgcatgattccgagagggtgtggtggcactgccagccgactgctgacagcttgggagctgctgtgcccaggacgtgggttcagcgtgggcgaggaaagcctggcgagcgtggccctgtaaaagctttctgaggcgggaggcgctcacttacctctgactgcctgggcgctgcgtgtagcatcttggcctacaggacagattttaggtgacacctggttatgacagtcagaaatttgagaagcttctcacaagtgatgcactttaaataatctgcatgccattgagacacctgcatgtctggtgtttgtggttcaagtgtcttgccgccggccttcggatgtaaacccactgataacggacagaaagagaatgcccacaagtgggtcttctgtggaagatgcagaaggaggaagttagtgcttacattttagtctttttctccctcaaaaaaataggttaagtttcagtgccagctagaaaatactgctttctgccatcgattgggggtggtttttgtcaaatatactgttgataaatatttatttttgtaaacttgaagtgtgtggtggccgtgggggagggacatgctggcagcaggcgccttcttcagctgtgggtcctaaaggcctttgatcctttgaagaagaaagacatggtatttgttcagcagacgccgaccactcagacggaggggcccctgggattccctgtctcagatggcctggtcttacgcctgtgtagatttcttctccattgggaatgaaggtgtcaggcgggactggaacgttctagatggtatgttccgtgatattaacaactctaacccaggacagaccacaagccacactcagaggcctcactgtgctgggggcttcggtgtccaggcgcccaggtgtggccaccagcaccggtttctgccttcgcgttgctggggtgcagtgagactgccacacgcgtgcacatgtggctctgtgggtgtctcctagagaggacgtggcccctgctgccagcccttgagcagcccgtgtgggggcccgagggacccacacagtgggggccagcctcgctggagggagagcaaccctttgccgatgaccacgcttgccgccatctcttagttttctttttcacaagcgctttatttttttaatagacaaatcacattttgcaaggcctttaattaaataagattcttctttccttcattttatgctttatttcctgtttgaaggcttactgtagaagtggcttactgtagaagcagcttgctgagcccctccgagcggtccccagaattagctggttcacaacccccaccctcccccgcccccgcctgtgtcaggtgtggatgaggtcgtcacactcagaaggacaggcttgtctgccagctcacaaggggaggctgcagtgggtttgggagctgggtttaggcccctggtgtctgagggcccaggccttgccagcctctgctgctcctgctcctgggtttgaagatgcaggccgatcgccagctccgtggcagcggtcactaaggacagcctgactgtgccatcttggagcctcaggcggggctccggagatagaagacaggtcgccggaggctccccctcctctcctctcccctctgcagatgctccctgggcgctaccctgcagggtgccaggcaggagtggtctcagaacgtgcgcttctgattattttactggggtccattgtccagatttttctttgattgtaaaatatatttttactttttagtcttctaatttaataaatgatccatataaaaatagagaaataaagtcctttaagggaaggtttaaaaaaaaaaaa

SEQ ID NO: 1192 - protein, 274 aa, Homo sapien
MATTVSTQRGPVYIGELPQDFLRITPTQQQRQVQLDAQAAQQLQYGGAVGTVGRLNITVVQAKLAKNYGMTRMDPYCRLRLGYAVYETPTAHNGAKNPRWNKVIHCTVPPGVDSFYLEIFDERAFSMDDRIAWTHITIPESLRQGKVEDKWYSLSGRQGDDKEGMINLVMSYALLPAAMVMPPQPVVLMPTVYQQGVGYVPITGMPAVCSPGMVPVALPPAAVNAQPRCSEEDLKAIQDMFPNMDQEVIRSVLEAQRGNKDAAINSLLQMGEEP

SEQ ID NO: 1193 - DNA, 1038 bp, Homo sapien
gaagtcctggtaatctggtccttgttcccgtctggataccagcttccttcagcagcgcaggcggtcggtccctgaggcccgtggaaggagtcaaacttgcgggaattttgcagtttatctgcagggctgttgtttccagcaagacccaaagctagaaaaggaggaggaagaaactgacccgatcagtgccagaagtcattgtattcaaagaagaataagcaagaaagaaaagaaggaaggaagagaggtagacagatacaagatgaaatcctgtcaaaaaatggaaggaaaaccagaaaatgagagtgaaccaaagcatgaggaagagccaaagcctgaggaaaagccagaagaggaggagaagctagaggaggaggccaaagcaaaaggaacttttagagaaaggctgattcaatctctccaggagtttaaagaagatatacacaacaggcatttaagcaatgaagatatgtttagagaagtggatgaaatagatgagataaggagagtcagaaacaaacttatagtgatgcgttggaaggttaatcgaaaccatccttacccctatttaatgtagtttaccttgatttttatctgatattaacaataccatatagcttgctttttattagcatttcctgatattcctttgtccatatttctacttataacctgttgctattaatggttttagatgtatctcttgttatctgcatctcattgtttattgtattttgaaccaatctacaagtctctgtcttttaataaaagaactttacacatttgtaaaaaagaggttcttggtaagatataaaatggaaaaaggctaagtaatatgtgaatatcatatttttgaaaggtaaaaagtacatttgtatattacatatatggacataacttgtgaaggatgaaagaaagtcagcctctcggtggtgggattatgaatgatttttctccttttgcttgttagtattttctatattctaaaattaacacacattattatagctagaatataaaagttttataaaaaaaaaa

SEQ ID NO: 1194 - protein, 104 aa, Homo sapien
MKSCQKMEGKPENESEPKHEEEPKPEEKPEEEEKLEEEAKAKGTFRERLIQSLQEFKEDIHNRHLSNEDMFREVDEIDEIRRVRNKLIVMRWKVNRNHPYPYLM

SEQ ID NO: 1195 - DNA, 3044 bp, Homo sapien
gtttgcgggtggttgttgctctcggggccgtgtggagtaggtctggacctggactcacggctgcttggagcgtccgccatgaggagaagtgaggtgctggcggaggagtccatagtatgtctgcagaaagccctaaatcaccttcgggaaatatgggagctaattgggattccagaggaccagcggttacaaagaactgaggtggtaaagaagcatatcaaggaactcctggatatgatgattgctgaagaggaaagcctgaaggaaagactcatcaaaagcatatccgtctgtcagaaagagctgaacactctgtgcagcgagttacatgttgagccatttcaggaagaaggagagacgaccatcttgcaactagaaaaagatttgcgcacccaagtggaattgatgcgaaaacagaaaaaggagagaaaacaggaactgaagctacttcaagagcaagatcaagaactgtgcgaaattctttgtatgccccactatgatattgacagtgcctcagtgcccagcttagaagagctgaaccagttcaggcaacatgtgacaactttgagggaaacaaaggcttctaggcgtgaggagtttgtcagtataaagagacagatcatactgtgtatggaagaattagaccacaccccagacacaagctttgaaagagatgtggtgtgtgaagacgaagatgccttttgtttgtctttggagaatattgcaacactacaaaagttgctacggcagctggaaatgcagaaatcacaaaatgaagcagtgtgtgaggggctgcgtactcaaatccgagagctctgggacaggttgcaaatacctgaagaagaaagagaagctgtggccaccattatgtctgggtcaaaggccaaggtccggaaagcgctgcaattagaagtggatcggttggaagaactgaaaatgcaaaacatgaagaaagtgattgaggcaattcgagtggagctggttcagtactgggaccagtgcttttatagccaggagcagagacaagcttttgcccctttctgtgctgaggactacacagaaagtctgctccagctccacgatgctgagattgtgcggttaaaaaactactatgaagttcacaaggaactctttgaaggtgtccagaagtgggaagaaacctggaggcttttcttagagtttgagagaaaagcttcagatccaaatcgatttacaaaccgaggaggaaatcttctaaaagaagaaaaacaacgagccaagctccagaaaatgctgcccaagctggaagaagagttgaaggcacgaattgaattgtgggaacaggaacattcaaaggcatttatggtgaatgggcagaaattcatggagtatgtggcagaacaatgggagatgcatcgattggagaaagagagagccaagcaggaaagacaactgaagaacaaaaaacagacagagacagagatgctgtatggcagcgctcctcgaacacctagcaagcggcgaggactggctcccaatacaccgggcaaagcacgtaagctgaacactaccaccatgtccaatgctacggccaatagtagcattcggcctatctttggagggacagtctaccactcccccgtgtctcgacttcctccttctggcagcaagccagtcgctgcttccacctgttcagggaagaaaacaccccgtactggcaggcatggagccaacaaggagaacctggagctcaacggcagcatcctgagtggtgggtaccctggctcggcccccctccagcgcaacttcagcattaattctgttgccagcacctattctgagtttgcgaaggatccgtccctctctgacagttccactgttgggcttcagcgagaactttcaaaggcttccaaatctgatgctacttctggaatcctcaattcaaccaacatccagtcctgagaagccctgatcagtcaaccagctgtggcttcctgtgcctagactggacctaattatatgggggtgactttagtttttcttcagcttaggagtgcttgaaaccttggccaggttccatgaccatgggcctaacttaaagatgtgaatgagtgttacagttgaaagcccatcataggtttagtggtcctaggagacttggttttgacttatatacatgaaaagtttatggcaagaagtgcaaattttagcatatggggcctgacttctctaccacataattctacttgctgaagcatgatcaaagcttgttttatttcaccactgtaggaaaatgattgactatgcccatccctgggggtaattttggcatgtatacctgtaactagtaattaacatcttttttgtttaggcatgttcaattaatgctgtagctatcatagctttgctcttacctgaagccttgtccccaccacacaggacagccttcctcctgaagagaatgtctttgtgtgtccgaagttgagatggcctgccctactggcaaagaggtgacaggaaggctgggagcagctttgttaaattgtgttcagttctgttacacagtgcattgccctttgttgggggtatgcatgtatgaacacacatgcttgtcggaacgctttctcggcgtttgtcccttggctctcatctcccccattcctgtgcctactttgcctgagttcttctacccccgcagttgccagccagattgggagtctgtttgttccaatgggttgagctgtctttgtcgtggagatctggaactttgcacatgtcactactggggaggtgttcctgctctagcttccacgatgaggcgccctctttacctatcctctcaatcactactcttcttgaagcactattatttattcttccgctgtctgcctgcagcagtactactgtcaacatagtgtaaatggttctcaaaagcttaccagtgtggacttggtgttagccacgctgtttacctcatacagtacgtgtcctgtttttaaaatatacaattattcttaaaaataaattaaaatcgtatacttacatttcaaaaaaaaaaaaaaaaa

SEQ ID NO: 1196 - protein, 620 aa, Homo sapien
MRRSEVLAEESIVCLQKALNHLREIWELIGIPEDQRLQRTEVVKKHIKELLDMMIAEEESLKERLIKSISVCQKELNTLCSELHVEPFQEEGETTILQLEKDLRTQVELMRKQKKERKQELKLLQEQDQELCEILCMPHYDIDSASVPSLEELNQFRQHVTTLRETKASRREEFVSIKRQIILCMEELDHTPDTSFERDVVCEDEDAFCLSLENIATLQKLLRQLEMQKSQNEAVCEGLRTQIRELWDRLQIPEEEREAVATIMSGSKAKVRKALQLEVDRLEELKMQNMKKVIEAIRVELVQYWDQCFYSQEQRQAFAPFCAEDYTESLLQLHDAEIVRLKNYYEVHKELFEGVQKWEETWRLFLEFERKASDPNRFTNRGGNLLKEEKQRAKLQKMLPKLEEELKARIELWEQEHSKAFMVNGQKFMEYVAEQWEMHRLEKERAKQERQLKNKKQTETEMLYGSAPRTPSKRRGLAPNTPGKARKLNTTTMSNATANSSIRPIFGGTVYHSPVSRLPPSGSKPVAASTCSGKKTPRTGRHGANKENLELNGSILSGGYPGSAPLQRNFSINSVASTYSEFAKDPSLSDSSTVGLQRELSKASKSDATSGILNSTNIQS

SEQ ID NO: 1197 - DNA, 5943 bp, Homo sapien
gcagcgtgtagtgcgagtggggcggacgcgcgcagcccgcccgcccggcgaccagcaaggagttggcatcctttggaagagttcgtgaaagctttctgcccagagctcctggaccaatgcatcttcccaccaccttaaaccactgagcagttcagagccccagttgcagacgacttgtcctgccaccaccatgagttctgaatgtgatggtggttccaaagctgtgatgaatggcttggcacctggcagcaatgggcaagacaaagacatggatcctacaaaaatctgcactgggaagggagcggtgactctccgggcctcgtcttcctacagggaaaccccaagcagtagccctgcgagccctcaggaaacccggcaacacgaaagcaaaccaggtctggagccagagccttcttcagcagatgagtggaggctttcttccagtgctgatgccaatggaaatgcccagccctcttcactcgctgccaagggctacagaagtgtgcatcccaaccttccttctgacaagtcccaggatgccacttcctccagtgcagcccagccggaggtaatagttgtccctctctacctggttaatactgacagagggcaagaaggcactgccagacctccaacacctctggggcctcttggctgcgtccccacaatcccagcgactgcctctgccgcctcacctctgaccttcccgactctagatgatttcattccccctcatctgcagaggtggccccaccacagccagccagcccgcgcctctggctcctttgcccccattagccagacgccaccatccttctcaccaccacctccgctggtccctcctgccccggaggacctccgcagagtctcggagcctgacctcacgggagctgtttcgagtaccgattccagtcctctactaaatgaagtttcttcttcccttattggaactgattcccaagcctttccatcagttagcaagccttcatccgcctatccctccacaacgattgtcaatcctactattgtgctcttgcaacacaatcgagaacagcaaaaacgactcagtagcctttcagatcctgtctcagaaagaagagtgggagagcaggactcagcaccaacccaggaaaaacccacctcacctggcaaggctattgaaaaaagagcaaaggatgacagtaggcgggtggtgaagagcactcaggacttaagcgatgtttccatggatgaagtgggcatcccactccggaacactgagagatcaaaagactggtacaagactatgtttaaacagatccacaaactgaacagagatgatgattcagatctgtactctcccagatactcattttctgaagacacaaaatctcccctttctgtgcctcgctcaaaaagtgagatgagctacattgatggtgagaaggtagtcaagaggtcggccacactacccctcccagcccgctcttcctcactgaagtcaagctcagaaagaaatgactgggaacccccagataagaaagtagatacaagaaaatatcgtgcagagcccaagagcatttacgaatatcagcctggcaagtcttccgttctgaccaacgaaaagatgagctcagccatcagccctactccggaaatttcttcagagactcctggatatatatattcttccaacttccatgcagtgaagagggaatcagacggggctcctggggatctcactagcttggagaatgagagacaaatttataaaagtgtcttggaaggtggtgacatccctcttcagggcctgagtgggctcaagcgaccatccagctctgcttccactaaagattcagaatcgccaagacattttataccagctgattacttggaatccacggaagaatttattcgaagacgtcatgatgataaagagatgagacctgccagagccaaatttgactttaaagctcagacactaaaggagcttcctctgcagaagggagatattgtttacatttataagcaaattgatcagaactggtatgaaggagaacaccacggccgggtgggaatcttcccacgcacctacatcgagcttcttcctcctgctgagaaggcacagcccaaaaagttgacaccagtgcaggttttggaatatggagaagctattgctaagtttaactttaatggtgatacacaagtagaaatgtccttcagaaagggtgagaggatcacactgctccggcaggtagatgagaactggtacgaagggaggatcccggggacatcccgacaaggcatcttccccatcacctacgtggatgtgatcaagcgaccactggtgaaaaaccctgtggattacatggacctgcctttctcctcctccccaagtcgcagtgccactgcaagcccacagcaacctcaagcccagcagcgaagagtcacccccgacaggagtcaaacctcacaagatttatttagctatcaagcattatatagctatataccacagaatgatgatgagttggaactccgcgatggagatatcgttgatgtcatggaaaaatgtgacgatggatggtttgttggtacttcaagaaggacaaagcagtttggtacttttccaggcaactatgtaaaacctttgtatctataagaagactgaaaaccatggagattatttttattggaggaggaagcatcattcatgaaccgatctttttagttgagtcagtaggaaaattaatacagtggataaagtaagaagcaaaagacagggacagagaagtgttgtgtttaaaacccaagcctgtctaaggttactgtgtattagacagggccgaactagtgtgctgagcaaaaagaattgaagcaaattgtatttacttagccgcttctgggagccacttcagcctttcccctcccctccacttcttgggtaatctgacctgaagcatagtccaggagcagagttagccagaaatgcctcctgctgccccagccttagagagctcccatctcaatcattgagcctgaaggcttcaagcccaagaatgcaacaagacccccagcctacatttctcagctcccctggagccagctgatcctgtaacgctgctggaggtcagtctgagctaccaagactgtccctagacaaaggtggagtcccccacactgcccaagaccaaatccctcactcaacctgctgaggtgtggatggggaaacagaggcaaaactgaggcacctgatgcattcagcctgctgtgcagcagtgccattgactgccctgatgttcagagagaaacgcacacaaggtttgcccatgagaattggggagcagatggccaagcagataggttatgtctgttttctgagtgatgaagtcaggaagccctgtggctctggaggccacttgtggttcattcttttcccatatccttggcttttagaaatggttaccttcaggacagtgcagctgcatttatcagagcactattgctaagttttcttttctggcttgtgtttttctgggacagtttagaattgggaggcctattctcatagaacaccaaaaatgatgttcagtgattcatttaacatacaccaatgtactctggctgctggggggacaaccataagcaagacatgcccagggtttgccgtggctccagatctactccctgtaggagttcaaggatcacacaaacggtagtaaccagggttgtgaatctgagtacaccctggcaaggcttctcttcagactgaagcagcaattctgccactaccagcagcaaccaggacgtctgttctttgtgggggccagatcagaagagagaggcccctgtgacgcccgggctgcttggtcacaactctgtccaattcaaggatgtttatcggcctctcttagatcctgagtgagacaaatacagaaatgacccattccctgcccaccagaaactcagaggtgattggggagactgacacaggaaaatgaacttaatcaagagagactgtgatatgtgctaagaagggtgtgagggagggagagatgaattttccctggagggatcctagaaagcattgtcatattgccatctccattagctcacttttaaacaactagggtgctggaagaacctttgtctgagggtagttcatagctggaaatacttggaatattttccagagtctctaaactctcatcttcccccacagatacacatccaagctcacaaataggagtagcaattctaggtggtagggttgtgtacggaacccctggctgtctgcatatatctcagaattaccccaggaccattgtcccaaagtctagagtctttacaggtaggcaaaatttgttttcaatgcctgtgcctcagctgctgtcacaaatacccatcttaggatcccatcagcttcccatcccccaccagacagccacagtaccctcactttctccctattgttctttcaaatcctgttctcaggaaagaaactgccactaattcattcacactaaggtgtaaatgattgataataggaatgagttacctcttcccacagacatttgtttttaagtatgacagagcagggccttaatcccaagggaaaaggttatggaactggagggggtgagctttctgggtagaaggagacttcctgaatttccttaaaacccagtaagagtaagacctgttgttttggaaggtctgctccaccatctaagagcactgtttttttttttttgttgttgttgttgttttacggtctctgagggaatatagtaaaaatgcatatgcacgtgcaatttgcacggcagcatttcaccgattgtggactgtattggctaatgtgtttcctggtctttagatgcaaaccattaataacactatcttatctcatagttttttcaggggtgcttcttgattagtagggaattttgaacacctctttaaatacagctagaaaataaaaccaatttgtaaagccacatttgcatatgatgccagcctcacgcatttgtatatctccagaaattcaggtatgcctcaccaatttgcccgtctttaataaaatcttgtgttaaaatttgcatcacgtcgccttcctatgtatgacgaaacaagaaacagagatttccaattgctcttttgtcttcagacatttagtaatataaagtacctatttttatgctgaaatgtttatacaggtttattaatagcaagtgcaactaactggcggcatgccttgcaacacattttgatatattagccatgcttccgggtaaaggcaagccccaaactccttatcttttgcagtctctctgggatcagtaaaagaaaaaaaaaataatgtgcttaagaagtgggactgtaaatatgtatatttaactttgtatagcccatgtacctaccttgtatagaaaaataattttaaaaatttgaatggaagggggtaaaggaagtcatgaagtttttttgcatttttatttaaatgaaggaattccaaataactcacctacagatttttagcacaaaaatagccattgtaaagtgttaaaatttacgataagtattctattggggaggaaaggtaactctgatctcagttacagtttttttttcctttttaatttcattattttgggtttttggtttttgcagtcctatttatctgcagtcgtattaagtcctattgctagaataggttactacaaaaaaggttatattctgaaagaaaaataactgacattatatataaccaattaatttaaagtattgccatttaaattacacactgagagcatgtcctatgcagacatagatttttctgttcatttatttttcttcattgcagtggattgatttgataaatagatgtgttgaattactacatttgctgtacatattatttaataaactttattcagaattgcgtggcaaaaaaaaaaaaaaaaa

SEQ ID NO: 1198 - protein, 816 aa, Homo sapien
MSSECDGGSKAVMNGLAPGSNGQDKDMDPTKICTGKGAVTLRASSSYRETPSSSPASPQETRQHESKPGLEPEPSSADEWRLSSSADANGNAQPSSLAAKGYRSVHPNLPSDKSQDATSSSAAQPEVIVVPLYLVNTDRGQEGTARPPTPLGPLGCVPTIPATASAASPLTFPTLDDFIPPHLQRWPHHSQPARASGSFAPISQTPPSFSPPPPLVPPAPEDLRRVSEPDLTGAVSSTDSSPLLNEVSSSLIGTDSQAFPSVSKPSSAYPSTTIVNPTIVLLQHNREQQKRLSSLSDPVSERRVGEQDSAPTQEKPTSPGKAIEKRAKDDSRRVVKSTQDLSDVSMDEVGIPLRNTERSKDWYKTMFKQIHKLNRDDDSDLYSPRYSFSEDTKSPLSVPRSKSEMSYIDGEKVVKRSATLPLPARSSSLKSSSERNDWEPPDKKVDTRKYRAEPKSIYEYQPGKSSVLTNEKMSSAISPTPEISSETPGYIYSSNFHAVKRESDGAPGDLTSLENERQIYKSVLEGGDIPLQGLSGLKRPSSSASTKDSESPRHFIPADYLESTEEFIRRRHDDKEMRPARAKFDFKAQTLKELPLQKGDIVYIYKQIDQNWYEGEHHGRVGIFPRTYIELLPPAEKAQPKKLTPVQVLEYGEAIAKFNFNGDTQVEMSFRKGERITLLRQVDENWYEGRIPGTSRQGIFPITYVDVIKRPLVKNPVDYMDLPFSSSPSRSATASPQQPQAQQRRVTPDRSQTSQDLFSYQALYSYIPQNDDELELRDGDIVDVMEKCDDGWFVGTSRRTKQFGTFPGNYVKPLYL

SEQ ID NO: 1199 - DNA, 1913 bp, Homo sapien
gcacgaggcaggccgaagtccgcagccccggctcggcgcccgctgcttgcacctcccggatggtgctgactgctccctaagcggcggcggcggcgagtcgtgaggacgcgccgcggaggctgttcggggtcgaggcttcccgtcgccggcacttcctcttgcggcgcccgtgcgcggccggcccggcaggcgggatgagcggccgcggctccgggaacggccgcgcatcggcgccccggctgcttctgctctttctggttccgctgctgtgggccccggctgcggtccgggccggcccagatgaagaccttagccaccggaacaaagaaccgccggcgccggcccagcagctgcagccgcagcctgtggctgtgcagggccccgagccggcccgggtcgagaaaatatttacaccagcagctccagttcataccaataaagaagatcctgctacccaaactaatttgggatttatccatgcatttgtcgctgccatatcagttattattgtatctgaattgggtgataagacattttttatagcagccatcatggcaatgcgctataaccgcctgaccgtgctggctggtgcaatgcttgccttgggactaatgacatgcttgtcagttttgtttggctatgccaccacagtcatccccagggtctatacatactatgtttcaactgtattatttgccatttttggcattagaatgcttcgggaaggcttaaagatgagccctgatgagggtcaagaggaactggaagaagttcaagctgaattaaagaagaaagatgaagaatttcaacgaaccaaacttttaaatggaccgggagatgttgaaacgggtacaagcataacagtacctcagaaaaagtggttgcattttatttcacccatttttgttcaagctcttacattaacattcttagcagaatggggtgatcgctctcaactaactacaattgtattggcagctagagaggacccctatggtgtagccgtgggtggaactgtggggcactgcctgtgcacgggattggcagtaattggaggaagaatgatagcacagaaaatctctgtcagaactgtgacaatcataggaggcatcgtttttttggcgtttgcattttctgcactatttataagccctgattctggtttttaacgctgtttgttcatctatatttagtttaaaataggtagtattatctttctgtacatagtgtacattacaactaaaagtgatgggaaaaatactgtattttgtaggcactggattttgtgagtttgaccccttattatgtctggaggatataatcattggattcctatcttgtgccaagggagtttttaaaaggaaaccctgactttttaagtgtgggggttttttcttctcttcccaaccttaattatggtttaatatggtcctcatttttcttttggtgcagaaccgttgtgcagtggggtctaccatgcaattttctttcagcactgacccctttttaaggaatacaaattttctccttcatcacttaggtgttttaagatgtttaccttaaagttttcttggggaaagaatgaattaatttctatttcttaaaacatttccctgagccagtaaacagtagtttaatcattggtcttttcaaaactaggtgtttaaaaaaagagacatatatgatattgctgttatatcaataacatggcacaacaagaactgtctgccaggtcattcttcctcttttttttttaattgggtaggacaccccatataaaaaccatccatatttggccatgtgggattacccaaataaaagaggaatccatggatggattcagaatttttttaaatttaataaaccaaccaacccttggttcccatatttaattaaaaggagggttgcccagt

SEQ ID NO: 1200 - protein, 324 aa, Homo sapien
MSGRGSGNGRASAPRLLLLFLVPLLWAPAAVRAGPDEDLSHRNKEPPAPAQQLQPQPVAVQGPEPARVEKIFTPAAPVHTNKEDPATQTNLGFIHAFVAAISVIIVSELGDKTFFIAAIMAMRYNRLTVLAGAMLALGLMTCLSVLFGYATTVIPRVYTYYVSTVLFAIFGIRMLREGLKMSPDEGQEELEEVQAELKKKDEEFQRTKLLNGPGDVETGTSITVPQKKWLHFISPIFVQALTLTFLAEWGDRSQLTTIVLAAREDPYGVAVGGTVGHCLCTGLAVIGGRMIAQKISVRTVTIIGGIVFLAFAFSALFISPDSGF

SEQ ID NO: 1201 - DNA, 1636 bp, Homo sapien
gggctgactggaggctggcggacaggcgacagacctgcggcaggaccagaggagcgagacgagcaagaaccacacccagcagcaatgtcagcggaagtggaaacctcagagggggtagacgagtcagaaaaaaagaactctggggccctagaaaaggagaaccaaatgagaatggctgacctctcggagctcctgaaggaagggaccaaggaagcacacgaccgggcagaaaacacccagtttgtcaaggacttcttgaaaggcaacattaagaaggagctgtttaagctggccaccacggcactttacttcacatactcagccctcgaggaggaaatggagcgcaacaaggaccatccagcctttgcccctttgtacttccccatggagctgcaccggaaggaggcgctgaccaaggacatggagtatttctttggtgaaaactgggaggagcaggtgcagtgccccaaggctgcccagaagtacgtggagcggatccactacatagggcagaacgagccggagctactggtggcccatgcatacacccgctacatgggggatctctcggggggccaggtgctgaagaaggtggcccagcgagcactgaaactccccagcacaggggaagggacccagttctacctgtttgagaatgtggacaatgcccagcagttcaagcagctctaccgggccaggatgaacgccctggacctgaacatgaagaccaaagagaggatcgtggaggaggccaacaaggcttttgagtataacatgcagatattcaatgaactggaccaggccggctccacactggccagagagaccttggaggatgggttccctgtacacgatgggaaaggagacatgcgtaaatgccctttctacgctgctgaacaagacaaaggtgccctggagggcagcagctgtcccttccgaacagctatggctgtgctgaggaagcccagcctccagttcatcctggccgctggtgtggccctagctgctggactcttggcctggtactacatgtgaagcacccatcatgccacaccggtaccctcctcccgactgaccactggcctacccctttctccagccctgactaaactaccacctcaggtgactttttaaaaaatgctgggtttaagaaaggcaaccaataaaagagatgctagagcctcgtctgacagcatcctctctatgggccatattccgcactgggcacaggccgtcaccctgggagcagtcggcacagtgcagcaagcctggcccccgacccagctctactccaggcttccacacttctgggccctaggctgcttccggtagtccctgtttttgcagtacatgggtgactatctcccctgttggaggtgagtggcctgtaagtccaagctgtgcgagggggccttgctggatgctgctgtacaacttctgggcctctcttggaccctgggagtgagggtgggtgtgggtggaagcctcagaggccttgggagctcatccctctcacccagaatccctctaacccttgggtgcggtttgctcagccccagcttatctcctcctccgcctgtgtaaatgctccagcactcaataaagtgggctttgcaagctaaaaaaaaaaaaaaaa

SEQ ID NO: 1202 - protein, 316 aa, Homo sapien
MSAEVETSEGVDESEKKNSGALEKENQMRMADLSELLKEGTKEAHDRAENTQFVKDFLKGNIKKELFKLATTALYFTYSALEEEMERNKDHPAFAPLYFPMELHRKEALTKDMEYFFGENWEEQVQCPKAAQKYVERIHYIGQNEPELLVAHAYTRYMGDLSGGQVLKKVAQRALKLPSTGEGTQFYLFENVDNAQQFKQLYRARMNALDLNMKTKERIVEEANKAFEYNMQIFNELDQAGSTLARETLEDGFPVHDGKGDMRKCPFYAAEQDKGALEGSSCPFRTAMAVLRKPSLQFILAAGVALAAGLLAWYYM

SEQ ID NO: 1203 - DNA, 1668 bp, Homo sapien
ggcgaaggagatcagcaggacgctgcgcacaacatgggcaaccacctgccgctcctgcctgcagagagtgaggaagaagatgaaatggaagttgaagaccaggatagtaaagaagccaaaaaaccaaacatcataaattttgacaccagtctgccgacatcacatacatacctaggtgctgatatggaagaatttcatggcaggactttgcacgatgacgacagctgtcaggtgattccagttcttccacaagtgatgatgatcctgattcccggacagacattacctcttcagctttttcaccctcaagaagtcagtatggtgcggaatttaattcagaaagatagaacctttgctgttcttgcatacagcaatgtacaggaaagggaagcacagtttggaacaacagcagagatatatgcctatcgagaagaacaggattttggaattgagatagtgaaagtgaaagcaattggaagacaaaggttcaaagtccttgagctaagaacacagtcagatggaatccagcaagctaaagtgcaaattcttcccgaatgtgtgttgccttcaaccatgtctgcagttcaattagaatccctcaataagtgccagatatttccttcaaaacctgtctcaagagaagaccaatgttcatataaatggtggcagaaataccagaagagaaagtttcattgtgcaaatctaacttcatggcctcgctggctgtattccttatatgatgctgagaccttaatggacagaatcaagaaacagctacgtgaatgggatgaaaatctaaaagatgattctcttccttcaaatccaatagatttttcttacagagtagctgcttgtcttcctattgatgatgtattgagaattcagctccttaaaattggcagtgctatccagcgacttcgctgtgaattagacattatgaataaatgtacttccctttgctgtaaacaatgtcaagaaacagaaataacaaccaaaaatgaaatattcagtttatccttatgtgggccgatggagcttatgtgaatcctcatggatatgtgcatgagacacttactgtgtataaggcttgcaacttgaatctgataggccggccttctacagaacacagctggtttcctgggtatgcctggactgttgcccagtgtaagatctgtgcaagcccatattggatgggaagtttacggccaccaaaaaagacatgtcacctcaaaaattttggggcttaacgcgatctgctctgttgcccacgatcccagacactgaagatgaaataagtccagacaaagtaatactttgcttgtaaacagatgtgatagagataaagttatctaacaaattggttatattctaagatctgctttggaaattattgcctctgatacatacctaagtaaacataacattaatacctaagtaaacataacattacttggagggttgcagtttctaagtgaaactgtatttgaaacttttaagtatactttaggaaacaagcatgaacggcagtctagaataccagaaacatctacttgggtagcttggtgccattatcctgtggaatctgatatgtctggtagcatgtcattgatgggacatgaagacatctttggaaatgatgagattatttcctgtgttaaaaaaaaaaaa

SEQ ID NO: 1204 - protein, 336 aa, Homo sapien
MGNHLPLLPAESEEEDEMEVEDQDSKEAKKPNIINFDTSLPTSHTYLGADMEEFHGRTLHDDDSCQVIPVLPQVMMILIPGQTLPLQLFHPQEVSMVRNLIQKDRTFAVLAYSNVQEREAQFGTTAEIYAYREEQDFGIEIVKVKAIGRQRFKVLELRTQSDGIQQAKVQILPECVLPSTMSAVQLESLNKCQIFPSKPVSREDQCSYKWWQKYQKRKFHCANLTSWPRWLYSLYDAETLMDRIKKQLREWDENLKDDSLPSNPIDFSYRVAACLPIDDVLRIQLLKIGSAIQRLRCELDIMNKCTSLCCKQCQETEITTKNEIFSLSLCGPMELM

SEQ ID NO: 1205 - DNA, 2477 bp, Homo sapien
gcagaggtgcggccggggaggcgcgcggaggctggagctggaggcgcggcgccggtgagctgagaaccatgtgtgctcagtattgcatctcctttgctgatgttgaaaaagctcatatcaacattcgagattctatccacctcacaccagtgctaacaagctccattttgaatcaactaacagggcgcaatcttttcttcaaatgtgaactcttccagaaaacaggatcttttaagattcgtggtgctctcaatgccgtcagaagcttggttcctgatgctttagaaaggaagccgaaagctgttgttactcacagcagtggaaaccatggccaggctctcacctatgctgccaaattggaaggaattcctgcttatattgtggtgccccagacagctccagactgtaaaaaacttgcaatacaagcctacggagcgtcaattgtatactgtgaacctagtgatgagtccagagaaaatgttgcaaaaagagttacagaagaaacagaaggcatcatggtacatcccaaccaggagcctgcagtgatagctggacaagggacaattgccctggaagtgctgaaccaggttcctttggtggatgcactggtggtacctgtaggtggaggaggaatgcttgctggaatagcaattacagttaaggctctgaaacctagtgtgaaggtatatgctgctgaaccctcaaatgcagatgactgctaccagtccaagctgaaggggaaactgatgcccaatctttatcctccagaaaccatagcagatggtgtcaaatccagcattggcttgaacacctggcctattatcagggaccttgtggatgatatcttcactgtcacagaggatgaaattaagtgtgcaacccagctggtgtgggagaggatgaaactactcattgaacctacagctggtgttggagtggctgctgtgctgtctcaacattttcaaactgtttccccagaagtaaagaacatttgtattgtgctcagtggtggaaatgtagacttaacctcctccataacttgggtgaagcaggctgaaaggccagcttcttatcagtctgtttctgtttaatttacagaaaaggaaatggtgggaattcagtgtctttagatactgaagacattttgtttcctagtattgtcaactcttagttatcagattcttaatggagagtggctatttcattaagatttaatagttttttttggactaagtagtggaaaaacttttatacttaactgagacattttgtcaaggctaaaaaaaagtcttgcaaaatggggcagtggactgacaggctgacatagaaaataaactttgcccaatcacaacttgtgcctcccatccctggagtactgactggcaccggtaagacagaatctctctgaatccattactccatgcccccttgaggcactgttgaagaaatctcacttttcagccagggtactggttctggtacatatggatcataagtccatttggggaagactcgtttatacaggttcatcagtactgtgtcttgagattttagcttcccatcaaagctgcatttcatgtggccatgggtacctagaaagacatcagaacaagtcggtcaaattaaaagtagaaaattttaaagcaatgacttccaacccaacagtcatttagcaacactgcagaaatgcagacatggtctcaaatcccgtgtttccttacctaaaggttccttgatatgtcctctccggccccacttcgttctcagttccactggtttaaaccacagcacatcctcttagaatcaaacacattaaagaccaagatgaaacatttacccacaaaatgtaaacccaacctttataccacaaaggcaatcagatcccatcctcctccttcatacccacctctgttgaagaacatgtaacgtactactgccatcttagtaaaaattttgaaaggatgaccactcagaacaactctcttgatgaccattctgtctggatctactgacataagatggcctgtagcaatgaggctgtgcattcctaaaggacaaaagcaaagaagctatttaggaatttacaggccaaagtcttcatttattgcccagtccatttaaagacccatgcaagagcctggtttgtcatccctgccctagcccaatctgaggctaagattggtaaactgtaagcccacacttaaccttgtcaataggttcttgaaaacttgtacttcaagagaaatgatgtataacaaaaccatactttttctcatcagttgttacaaggaaaggatgttgaacaaaaggcagttatttgaggactggctatacactgtttcacgtaaaagttggagttttcattgttctattaacaatgttaaatgaagacttactgtattttgaaaaccatcattaccttctccataccatttggctcccaaatttaaataaacaagagaaaacggtgttcatct

SEQ ID NO: 1206 - protein, 340 aa, Homo sapien
MCAQYCISFADVEKAHINIRDSIHLTPVLTSSILNQLTGRNLFFKCELFQKTGSFKIRGALNAVRSLVPDALERKPKAVVTHSSGNHGQALTYAAKLEGIPAYIVVPQTAPDCKKLAIQAYGASIVYCEPSDESRENVAKRVTEETEGIMVHPNQEPAVIAGQGTIALEVLNQVPLVDALVVPVGGGGMLAGIAITVKALKPSVKVYAAEPSNADDCYQSKLKGKLMPNLYPPETIADGVKSSIGLNTWPIIRDLVDDIFTVTEDEIKCATQLVWERMKLLIEPTAGVGVAAVLSQHFQTVSPEVKNICIVLSGGNVDLTSSITWVKQAERPASYQSVSV

SEQ ID NO: 1207 - DNA, 2414 bp, Homo sapien
cccgcgtgcatacggttgccggcatggcacattacaacttcaagaaaattacggtggtgccgtccgccaaggacttcatagacctcacgttgtcgaagactcaacgaaagactccaaccgttattcataaacattaccaaatacatcgcattagacatttttacatgagaaaagtcaaatttactcaacagaattaccatgatagactttcacaaattctaacagatttccccaaattggatgatattcatccgttctatgctgatttgatgaatattctctacgacaaggatcattacaagttggctctggggcaaataaatattgccaaaaatttagtggacaatgttgctaaagattatgtgcgactgatgaagtatggcgactctctctaccgctgcaaacagctgaagcgtgcggccctgggacggatgtgcacagtgatcaagaggcagaagcagagtttggagtatttggagcaagtgcgtcagcatttatcccgtttgccaaccattgatccgaataccaggaccctgcttttgtgtgggtacccaaatgttgggaagtccagcttcatcaacaaggtgacgagagcagacgtggatgtccagccctatgcgttcacaaccaagtctctgtttgttgggcacatggattataagtatctacgttggcaggttgtagacactcctgggatcctggaccaccctctggaggataggaacaccatcgagatgcaggccatcactgccctggcccacctccgtgctgcggtcctgtatgtgatggatttgtctgagcagtgtgggcatgggctgagggagcagctagaactcttccagaacatcagacctctcttcatcaacaagcctctcatagttgtagccaacaaatgtgatgtgaagagaatagctgaactttctgaagatgatcagaaaatatttacagatttgcagtctgaaggattccctgtaatagagaccagcaccctgactgaggaaggtgttattaaagttaaaacagaggcttgcgataggcttttggctcatcgagtggaaaccaaaatgaagggaaataaagtgaatgaggtgctgaatagactgcacctggctatcccaaccaggagggacgataaggagaggccccctttcatccctgaaggagtggtggctcgcaggaagaggatggaaactgaggagtccaggaagaagagggaacgagatcttgagctggaaatgggagatgattatattttggatcttcagaagtactgggatttaatgaatttgtctgaaaaacatgataagataccagaaatctgggaaggccataatatagctgattatattgatccagccatcatgaagaaattggaagaattagaaaaagaagaagagctgagaacagctgctggagagtatgacagtgtatctgagagtgaagacgaagagatgctggaaatccgacagctggcaaagcaaattcgagagaaaaagaagttgaaaattctggagtccaaagaaaagaatacacagggacccaggatgccgcgaactgctaagaaggttcagaggacagttttggagaaggagatgcgtagtcttggtgttgacatggacgataaagacgatgcccattacgcagtccaggcaagaagatcccggagcatcactaggaaaagaaagcgggaagactctgctcccccgtcctctgtggcccggagtgggagttgctctcgaactccacgtgacgtttctggtcttagggatgtcaagatggtgaagaaagccaagactatgaagaatgctcagaagaagatgaatcggttggggaagaaaggggaggcggatagacacgtgtttgatatgaagcccaagcacttgctgtctgggaagaggaaagctggtaaaaaggacaggagatagtatccgtttggttggcgtggcttcgctagagtgttgctgtttatttcctggtttggtacagtatggtttcatgaaattggagctctgtacaaactgaaaaagacaaaataagtaaagcacttgttgctttgctgaaaactatggttaaccctatataggtgtgggaaatttttgtcactgcataatattacaaatattttgagtagacagtgtttccacatttaatggagtatcagttgcttcagattttcagaactgggaagatttactggtgtaactgggttgtttttgatggagaaaaaccttattttcttttgtaagagctgggagcaaacacgtttatgagtgtgtcggaatcccgtgcttaaaatacgctcttaaattattttctagtcttattttacaatgtctcattgtagtctgtcttcaactattttatccaaaataaacctccagaagaaactaaaaaaaaaaaaaaaaaaaaaaaaa

SEQ ID NO: 1208 - protein, 633 aa, Homo sapien
MAHYNFKKITVVPSAKDFIDLTLSKTQRKTPTVIHKHYQIHRIRHFYMRKVKFTQQNYHDRLSQILTDFPKLDDIHPFYADLMNILYDKDHYKLALGQINIAKNLVDNVAKDYVRLMKYGDSLYRCKQLKRAALGRMCTVIKRQKQSLEYLEQVRQHLSRLPTIDPNTRTLLLCGYPNVGKSSFINKVTRADVDVQPYAFTTKSLFVGHMDYKYLRWQVVDTPGILDHPLEDRNTIEMQAITALAHLRAAVLYVMDLSEQCGHGLREQLELFQNIRPLFINKPLIVVANKCDVKRIAELSEDDQKIFTDLQSEGFPVIETSTLTEEGVIKVKTEACDRLLAHRVETKMKGNKVNEVLNRLHLAIPTRRDDKERPPFIPEGVVARRKRMETEESRKKRERDLELEMGDDYILDLQKYWDLMNLSEKHDKIPEIWEGHNIADYIDPAIMKKLEELEKEEELRTAAGEYDSVSESEDEEMLEIRQLAKQIREKKKLKILESKEKNTQGPRMPRTAKKVQRTVLEKEMRSLGVDMDDKDDAHYAVQARRSRSITRKRKREDSAPPSSVARSGSCSRTPRDVSGLRDVKMVKKAKTMKNAQKKMNRLGKKGEADRHVFDMKPKHLLSGKRKAGKKDRR

SEQ ID NO: 1209 - DNA, 1757 bp, Homo sapien
cgagcactaagtcctctgagttccgcagcgcagcaccggaagcggccgagcgcgctcagcccggcgacccctgcgggctccagacccctgcgccgctgcgccccgggtttcgccgcaaccaagacccagcgagtgcagcggcggccgctgaggaggttcgaaaacatggccaaaagaaatgccgagaaggaactgacagataggaattgggatcaagaagatgaagctgaagaggtgggaacattctccatggccagtgaggaagtcttgaagaatagagccataaagaaagcaaagcgcagaaatgttggatttgaatctgacactggaggagcctttaaaggttttaaaggtttggtggtaccttctggaggaggacgcttttctggatttggtagtggcgctggagggaagcctttggaaggactgtcgaatggaaacaacataaccagtgcccctcccttcgccagtgcaaaggcagcggcagatcccaaggtagcctttggttctcttgctgcaaatggccctaccaccttggttgataaagtttcaaatcccaaaactaatggggacagtcagcagccctcctcctctggccttgcttccagtaaagcttgtgtcggaaatgcctatcacaagcagttggccgccttgaactgctccgtgcgggattggatagtgaagcacgtgaatacaaaccccctctgtgatctgacacctatctttaaagactatgagaaatatttagcaaacattgaacagcaacacgggaacagtggcaggaattctgaaagtgaatctaacaaagtggcagctgaaacacagtctccttccctttttggctcaacaaaattacagcaagagtcaagctttttgtttcatggcaacaaaactgaagatacacctgacaagaagatggaggtggcatctgaaaagaaaacggacccatcatcactaggagcgacaagtgcctcatttaatttcggcaagaaagttgatagctctgttttgggctcattaagctctgtccccctgactggattttctttctcccctggaaactccagtttatttggcaaagatactacccagagtaaaccagtctcttcaccatttcccactaaaccattggagggccaagcagaaggtgacagtggtgaatgcaaaggtggagatgaagaagagaatgatgagccacccaaagtagtagttaccgaagtaaaagaagaagatgctttttactccaaaaagtgtaaactgttttacaagaaggacaatgagtttaaagagaaaggcataggtactctgcatttaaaacctacagcaaatcagaagacacagcttttggtgcgggcagacaccaatttaggcaacatattgctgaacgttctgattccacccaatatgccatgtacgcgaacagggaagaataacgttcttatcgtctgtgttccaaatccaccaattgacgagaagaatgccaccatgccagtcaccatgttgattcgggtaaaaaccagcgaggatgcagacgagttgcacaaaattttactggagaaaaaggatgcctgaacacgcaaagtcggctgcagaattattgccaagttgctgctgcttccaccgccccttaaagttagtcagtttttcttctcttctttgacattctaagaacttatagataacttaaaacttttgtgaggaagattaatgtggccaataaaacctttaaatgttaagtgtcaaaaaaaaaaaaaaaa

SEQ ID NO: 1210 - protein, 468 aa, Homo sapien [sequence omitted]

SEQ ID NO: 1211 - DNA, 1321 bp, Homo sapien
gtgtgctggttcaaggtgcaacatacagaatattgaattaagaaaagagggaacggggaagggaagggaaacctcttgaggtccaaagttgcaaacaaaaaatggtaaaagatttcctcacgcaagaggcatttttgcaaataccatgcaaaacaggcagctggtgtgccttaagagaatccctataaataacagaaaagacactccaagcattcctgtacgtggactcagagcacagagaaaagaaactaaaatgccttttggcatttcaagatatttggcactcttgtgattacatttttttacagtccattaaagagaataaactgacataatattagagaaataaacaggctgctcacacaacagactgcaaggggaagttagaaaaagctcaagcatttttttctttgtttttcgtgtgtgtgtgtgtgtgtgtgtgtgtgtgtgtgtgtgtgtgtttttctgacataaaaaatgtgtccatttgcattaacttgggcagatagcttgcagcaacaaagaaacacacgctttacaactcattttaaaataaaatcttttctatgtatcattccttagaaaagttctcttcttgttttaaacacattcctgataacttctaaagatgaccaaaataaaacagaatatctacagagatcattttctgaattttttgtacatccaaggataacaacataaaaaaaataaaactggacagcatttcacatccaagtgcacagaaccatttttgcaagattaaataatgtaaacattgggaacagccaaatcagcgaagaatgccaacacctcaaaacacctggtgttgccgcttcattaagtggttcaaaatccagatctataattgcgcaatattcaccgtatataaaaagaaatggatattaattttgacaaatagctgcaactgagacttctttttatttctttatatgtgtatatagtgaatttttattatttttaaaattttatttatttttttatttttatttttgcagaggagcccagagccttctcctcctcctcctcctcctctcgcctcatctgtctcccggcctgataccagatacaggttgttgatttcatcgtgggtagcaagctagtaataaatttcaaagtgctttctcttttcatgctttttgccaataactgttaccgccgttcttattctctcccttaactcattgtctttgggggagttagacaccaggaggtgccttgtcggtcatatttttcagcacgtcatcaatcctatcatcttcaataacaacccgcttgctccggccgatctggcccagcttgg

SEQ ID NO: 1212 - protein, 53 aa, Homo sapien
MKRESTLKFITSLLPTMKSTTCIWYQAGRQMRREEEEEEEKALGSSAKIKIKK

SEQ ID NO: 1213 - DNA, 2804 bp, Homo sapien
ggcacgagggggcggctgggaccggcctggggtagctgcgcagcaggtgggtcggtcccggggatgcagcgcgggggtcagagagcgaccccaacagggtagacggtgaggacgcctcagtgggcagcgttagggaaaggggccagggtgttcccggggttggggtgcgagcccccgctgtgcgtccaggaggccgagggtctggcatcccttcgcgtggagtgcggggcaggggccgggtccccccggaggtggctgagatccagatcggtgaggggccctgcaggcaggtctgtgggttctggcaccacctgagcccactgggcatctggtcatccctggcacctctcctttggagccaccttgtccctggctagacagtcacattttccagtgccgttttggaaagatgttgcctttggagaaggcgtttgcctcccccaggagctccccagccccgccggatctgcccacgccggggtcagcagccggagtccagcaggaagaacccgagaccatccctgagaggacccctgctgacctggagttctcccgcctgcgtttccgggaatttgtctaccaggaggctgccgggccccaccagaccctggcccggctgcatgagctgtgccgccagtggctgatgcctgaggcgcgctccaaggagcagatgctggagctgctggtgctggagcagttcctgggcatcctgcctgataaggtccggccctgggtggtggcacagtaccctgagagctgcaagaaggcagcctccctggtggagggcctcgctgatgtcctggaagagccagggatgctgctgggctcccctgcgggctcatcctcaattcttagcgatggagtgtacgagaggcacatggaccctctgctgctaccaggcgagctcgcgagccccagccaggcccttggagctggggagatcccggcaccttctgagacaccctggctttctccggaccccctgtttctggaacagaggagggtcagagaagcaaagaccgaagaggacggccctgccaacaccgagcagaagctgaagtcctttccagaggaccctcagcacctgggggagtggggccacctggaccctgccgaggagaacctgaagagctaccggaagctgctcctgtgggggtatcagctttcccagcctgacgctgcctccaggctggacactgaggaactccggttggtggaaagagatccacaaggaagcagcctcccagaaggcgggaggcggcaggagagcgctgggtgcgcctgcgaggaggccgcccccgcgggggtgctgcctgagctgcctacggaggcgccccctggggacgcccttgccgatcccccgtcgggcaccactgaggaggaggaagagcagcctgggaaggccccggacccgcaggacccccaggacgcggagtccgactctgccaccggatcgcagaggcagtccgtcatccagcagcctgccccggacaggggcacggcgaaactgggaaccaagaggccgcaccccgaggatggggacgagcagagcctcgagggcgtctctagctccggcgacagcgcagggctggaggccgggcagggccctggggctgacgagccgggcttgtcccgcgggaagccctatgcctgcggcgagtgcggggaggccttcgcgtggctctcgcacctgatggagcaccacagcagccatggcggccggaagcgctacgcctgtcagggctgctggaagaccttccacttcagcctggccctagccgagcaccagaagacccacgagaaggagaaaagctacgcgctggggggcgcccggggcccccaaccgtccacccgcgaagcccaggcgggggctagggcgggcggtcccccagagagcgtggagggcgaggctccccccgcacccccagaggcgcagaggtgagccgctgtgctgtcccgttccggaggggccgctttgccggccgtgaatcccagacgaggcattgggcctttccacgcccctgggtggcggcttcctgtggtgtttgtggacgtcctctgcctgtgccctgaatccgctcctgaggctaagcgctcccaacgagaagggtccacgggaagccctcacctctgtaaacacaccctgggccagcgctcgcatccgaggggagccgccggatgtggaagaagactcggctttcctgcagccatttagtgccgccccatgctaggttatttgacattgtgcagtgtagagttgccttaaagtgcgtgatctgccagtgctttcttcaagtcacccttgccccgattcctcctgtttgcgctccccagggttgctcaagtggaaattttgtcagctgtttagccttttcgtacttggcgtgatgtcaacttcacttctaatctgcaaaagcagaagctgtttcctagtttacctcgcgtgtgtttacctatatggagtagctcgcagagatcacagaaatgcttgcagcctaaggcagggttttcagaccgtgggtcccagcccatttagtaaaatgggaaatcaattagcaagtggtcaccagcattacacagcaatgaagcagaataaagtaggccagaatgcatcatgtagtaaaggcaaatactgttttgtgaaacttttcacccatacatctaaatgtgagaactggttgcaatgtaagacatttcttgctgggaagttgtgagcaaaataagttgaaaacactaataaagatctgtctgtctgagcaaaggagactaaactccttgggctacataaaaaaaaaaaaaaaaaa

SEQ ID NO: 1214 - protein, 510 aa, Homo sapien
MLPLEKAFASPRSSPAPPDLPTPGSAAGVQQEEPETIPERTPADLEFSRLRFREFVYQEAAGPHQTLARLHELCRQWLMPEARSKEQMLELLVLEQFLGILPDKVRPWVVAQYPESCKKAASLVEGLADVLEEPGMLLGSPAGSSSILSDGVYERHMDPLLLPGELASPSQALGAGEIPAPSETPWLSPDPLFLEQRRVREAKTEEDGPANTEQKLKSFPEDPQHLGEWGHLDPAEENLKSYRKLLLWGYQLSQPDAASRLDTEELRLVERDPQGSSLPEGGRRQESAGCACEEAAPAGVLPELPTEAPPGDALADPPSGTTEEEEEQPGKAPDPQDPQDAESDSATGSQRQSVIQQPAPDRGTAKLGTKRPHPEDGDEQSLEGVSSSGDSAGLEAGQGPGADEPGLSRGKPYACGECGEAFAWLSHLMEHHSSHGGRKRYACQGCWKTFHFSLALAEHQKTHEKEKSYALGGARGPQPSTREAQAGARAGGPPESVEGEAPPAPPEAQR

SEQ ID NO: 1215 - DNA, 2996 bp, Homo sapien
aaaactcttctcagacccgggagcgtccgggacgcggagcccggagctggggcgacgaggcgattgcgggggcctgggctagctgctggctaccaatattctactttctgtctctatgtatgtgactaccctggttacctcatataatctccctggaaaaggagacatgaatgtctgcaatgatacttcctgacaagaagttgatacaagaaaaggaaaggagattaacagctagtgagcagaatttcgaacagcaggatttcgtattttttgcttccaactgcacacttccgtttcccacttttaaatcagagatacctacactcaaaacccagacaaggcaaaaggatacctttcttgtatattttttgagatcgaagaaacgacaatgtccaggaaacagaaccagaaggattcatcaggattcatttttgatttgcagtccaataccgtactggcccagggaggagcttttgagaacatgaaagagaagataaatgcggtacgtgcaatagttcctaataagagcaacaatgaaattatcctggttttgcagcactttgataactgtgtggacaaaacagtacaagcattcatggaaggtagtgccagtgaagtactcaaagaatggacagtaacaggcaagaaaaagaacaaaaagaagaaaaacaaaccgaaacctgccgcagaaccaagtaacggcatcccagattccagtaaatcagtttccattcaagaggaacagtctgcgccttcctcagagaaaggtggtatgaatggctaccatgtcaatggtgccatcaatgacactgagtctgtggactcactcagtgaaggtttggagacactttcaatagatgccagagaattggaggatcccgagtctgccatgctagatacgctggacagaacaggatccatgctgcagaatggtgtctctgattttgagaccaagtctttgactatgcactctattcacaattctcaacaacccaggaatgctgccaaatctctctcaagacctaccacagaaactcagttttcaaatatggggatggaagatgttcccctcgccaccagtaaaaagctaagttccaatattgaaaaatctgtaaaagacctccagcgctgcacagtgtctcttgcacggtatcgagttgtagttaaagaagagatggatgcctccattaagaaaatgaaacaagcctttgctgaattggagagctgtttaatggatcgagaagtggcgttgcttgctgaaatggacaaagtgaaagctgaagcaatggaaattttgctcagccgacaaaagaaggctgaacttctaaagaagatgactcatgtggctgttcaaatgtcagagcagcaattggttgagctcagagctgatatcaagcactttgttagtgaacgtaaatatgatgaggatctgggacgagtagcccggttcacctgtgatgtagagaccctaaagaagagcattgattcatttggacaagtgtctcatccaaagaacagctattcgaccagatcccgatgtagctcagttacatctgtgtccttgagtagcccaagtgatgcctctgctgcttcctcttccacctgtgcctctcctcccagccttacaagtgctaacaagaaaaactttgcaccgggagagactcctgcagccatagcaaactccagtggccagccctaccagccacttcgggaggtattgccagggaacagacgaggaggacagggctataggccacaaggccaaaagtccaatgaccccatgaaccaagggcggcatgacagtatgggtcgttacagaaacagctcgtggtattcatctggttccaggtatcagagtgctccatctcaggcaccaggaaacaccattgaaagaggccagactcactctgcagggaccaatggaactagagtcagcatggagcccagccctcccacgccttcattcaaaaaggggctcccccagcgcaaacccaggacctctcagactgaagccgtgaactcttgagagaaaatccagttggcctctctcctctatccacacaattcaacttgataactggactttaggaaacttacagttagatgtaataacaaaaagaagtttatgcgtatcactttttgtgccattctaagtatttttggttcttgtctccttatttcctctttaccatttttggaggggaagctattttttttccttgatctttcccagtgatatggattgaatctggttggtcatttccaccaggaatcagaggcagctgttaccaggtttcggccttccagttgatccctccactgtccaggctgtctcaggaggaggtgaatcagagctagtctgtcacctttccaatctaagccgaagccacaggtgcctgacaggttcccttctaacaactatttgaccaagagaggcaatcagggggttgtatactgcactggattcgccagagaagggaaaatttaattagtgaagaggaaagaacactaggaaacatttgagaacctgcctctatcccagaacgtgctggagatttgacactcaaatcagtgtttagtcttctgcttggcaccatagcttaacctgcagtttcttcaaaatgcccaatgccttgtttcctattaccttagattgcaaaccagtctagggaagtctatgagaaagtagcatttaattaaagtttaaaaaaaaaaaggttgggcgttgtggctcatgcctgtaatcccagcactttgggaggctgaggcgggtggatcactaggtcaggagttcaagaccagcctggccaacatggtgaaaccctgtctgtactaaaaatacaaaagttagctgagcatggtggcgtgtgcctgtaatctcagctactcaggaggctgaggcaggagaatcgcttgaacccaggaggcggaggctgcagtgagctgagattgtgccactgcactccagcctgggagacagagcaagactcagtctc

SEQ ID NO: 1216 - protein, 545 aa, Homo sapien
MSRKQNQKDSSGFIFDLQSNTVLAQGGAFENMKEKINAVRAIVPNKSNNEIILVLQHFDNCVDKTVQAFMEGSASEVLKEWTVTGKKKNKKKKNKPKPAAEPSNGIPDSSKSVSIQEEQSAPSSEKGGMNGYHVNGAINDTESVDSLSEGLETLSIDARELEDPESAMLDTLDRTGSMLQNGVSDFETKSLTMHSIHNSQQPRNAAKSLSRPTTETQFSNMGMEDVPLATSKKLSSNIEKSVKDLQRCTVSLARYRVVVKEEMDASIKKMKQAFAELESCLMDREVALLAEMDKVKAEAMEILLSRQKKAELLKKMTHVAVQMSEQQLVELRADIKHFVSERKYDEDLGRVARFTCDVETLKKSIDSFGQVSHPKNSYSTRSRCSSVTSVSLSSPSDASAASSSTCASPPSLTSANKKNFAPGETPAAIANSSGQPYQPLREVLPGNRRGGQGYRPQGQKSNDPMNQGRHDSMGRYRNSSWYSSGSRYQSAPSQAPGNTIERGQTHSAGTNGTRVSMEPSPPTPSFKKGLPQRKPRTSQTEAVNS

SEQ ID NO: 1217 - DNA, 1670 bp, Homo sapien
gggcaaaccctttgaaaaatattctaaatgaaaatgacatagtattcatagtggaaaaagtgcctttagaaaaggaagaaacaagtcatattgaagaacttcaatctgaagaaactgccatatctgatttctctactggcgaaaatgttggaccacttgctttaccagttgggaaggcaaggcagttaattggactttacaccatggctcacaatcctaatatgacccatttgaagattaatctgcctgttactgcccttccccccctttgggtaagatgtgacagttcagatcctgaaggtacttgttggctaggagctgagcttatcacaacaaacaacagcattacaggaattgtcttatatgtggtcagttgtaaagctgataaaaattattctgtaaatcttgaaaacctaaaaaatttacacaagaaaagacatcacttgtctactgtaacatccaaaggctttgcccagtatgagctctttaagtcctctgccttggatgatacaatcacagcatcacaaactgcgatcgctttggatatttcctggagtcctgtggatgagattcttcaaatccctccactctcttcaactgcaatctgaatattaaagtggaatcaggagagcccagaggtcctttgaatcatctctacagagaactgaaatttcttcttgttttggctgatggtttgaggactggtgtcactgaatggctcgagcccctggaagcaaaatctgctgttgaacttgttcaggaatttctgaatgacttaaataagctggatggatttggtgattctacaaaaaaagacactgaggttgagaccttgaagcatgacactgctgcagtcgatcgttccgtcaagcgtcttttcaaagttcggagtgatcttgattttgctgagcaactgtggtgcaaaatgagcagtagtgtgatttcataccaagactaggtgaagtgtttcacattgatcatccagagtctacaacgtggtgatatacagccatggctccatagtggaagtaacagtttactaagtaagctcattcatcagtcttatcatggaaccatggacacagtttctctcagtgggactattccagttcaaatgcttttggaaattggtttggacaaactaaagaaagattatatcagttttttcataggtcaggaacttgcatctttgaatcatttggaatacttcattgctccatcagtagatatacaagaacaggtttatcgtgtccaaaaactccaccatattctagaaatattagtcagttgcatgcctttcattaaatctcaacatgaactcctcttttctttaacacagatctgcataaagtattacaaacaaaatcctcttgatgagcaacacatttttcagctgccagtcagaccaactgctgtaaagaacttatatcaaagtgagaagccacagaaatggagagtggaaatatatagtggtcaaaagaagattaagacagtttggcaactgagtgacagctcacccataggccatctgaattttcacaaacctgatttttcggaattaacactaagcggtagcctggaagaaaggatattctttactaacatggttacctgcagccaggtgcatttcaagtgaagtgtgctgatgaagtcctctataagcacaagcc

SEQ ID NO: 1218 - protein, 134 aa, Homo sapien
MAHNPNMTHLKINLPVTALPPLWVRCDSSDPEGTCWLGAELITTNNSITGIVLYVVSCKADKNYSVNLENLKNLHKKRHHLSTVTSKGFAQYELFKSSALDDTITASQTAIALDISWSPVDEILQIPPLSSTAI

SEQ ID NO: 1219 - DNA, 722 bp, Homo sapien
cagggtcagccatgtcatctgagcctcccccaccaccacagccccccacccatcaagcttcagtcgggctgctggacacccctcggagccgtgagcgctcaccatcccctctgcggggcaacgtggtcccaagcccactgcccactcgccggacgaggaccttctcggcgacggtgcgggcttcacaggtccccgtctacaaaggagtctgcaaatgcttctgccggtccaagggccatggcttcattaccccagctgatggcggccccgacatcttcctgcacatctctgatgtggaaggggagtatgtcccagtggaaggcgacgaggtcacctataaaatgtgctccatcccacccaagaatgagaagctgcaggccgtggaggtcgtcatcactcacctggcaccaggcaccaagcatgagacctggtctggacatgtcatcagctcctaggagatggtggaagcaccccttgtcctgtgcttgaggagactttgcggggaggaggcagcagacactggagatgacattcttccacacgagacggggcttcagccggggatggtccctctcaagtatctcctggaggaaggggtatggggggcaggtgtggggtgtggggtgttcccggccatcagcacagcctatgaccattgcaacaacctctcaccatctgaagagcattaaaagcatttaaaaaggaaaaaaaaaaaaaaaaaa

SEQ ID NO: 1220 - protein, 147 aa, Homo sapien
MSSEPPPPPQPPTHQASVGLLDTPRSRERSPSPLRGNVVPSPLPTRRTRTFSATVRASQVPVYKGVCKCFCRSKGHGFITPADGGPDIFLHISDVEGEYVPVEGDEVTYKMCSIPPKNEKLQAVEVVITHLAPGTKHETWSGHVISS

SEQ ID NO: 1221 - DNA, 3443 bp, Homo sapien
ttgatgctctaaatgcagaattaatggagacttcaatgactgatatgtcaattcttagtttctttgaacatttccatatttctcctgtgaagttgcatttgagtttgtctttgggttccggaggtgaagaatcagacaaagaaaaacaggaaatgtttgcagttcattctgtcaacttgctgttgaagagcataggtgctactctgactgatgtggatgaccttatattcaaacttgcttattatgaaattcgatatcagttctacaagagagatcagcttatatggagtgttgttaggcattacagtgaacagttcttgaaacagatgtatgtccttgtattggggttagatgtacttggaaacccatttggattaattagaggtctgtctgaaggagttgaagctttattctatgaacccttccagggtgctgttcaaggccctgaagaatttgcagaggggttagtgattggagtgagaagcctctttggacacacagtaggtggtgcagcaggagttgtatctcgaatcaccggttctgttgggaaaggtttggcagcaattacaatggacaaggaatatcagcaaaaaagaagagaagagttgagtcgacagcccagagattttggagacagcctggccagaggaggaaagggctttctgcgaggagttgttggtggagtgactggaataataacaaaacctgtggaaggtgccaaaaaggaaggagctgctggattctttaaaggaattggaaaagggcttgtgggtgctgtggcccgtccaactggtggaatcgtagatatggccagtagtaccttccaaggcattcagagggcagcagaatcaactgaggaagtatctagcctccgtccccctcgcctgatccatgaagatggcatcattcgtccttatgacagacaggaatctgagggctctgacttacttgagaatcatatcaaaaagttggaaggagagacttaccgataccactgtgctattcctggaagcaagaagacaatccttatggttacaaataggcgagtgttgtgtataaaggaagttgaaatcctgggccttatgtgtgtagactggcaatgtccatttgaagattttgtatttcctcctagtgtcagtgaaaatgtgctaaaaatttcagttaaggaacagggtctgttccacaaaaaagacagtgccaatcaaggctgtgttcgaaaagtttacctgaaggacaccgccacagcagagagagcatgtaatgccattgaggatgcacagtcaacgagacagcagcaaaaattgatgaagcagtcatcagtgagacttctcagaccccaattgccatcttaatcacagacctcaggggctccaacagggagaaaaaacaatcactggtcttgtctataagtcactctgctttatcttgctaaagacaatttttcaagcaatcctttagttttagttttctggaatagctagtattgggttttctagttttttcaccttttagtttttactctaattttgtaaccatgtatatgctagcagtccacttctacgccaccacccaaatgggtcagacccttgaagaaacgtcacttcaaactcagaatgaaattttcattaatattaaaattgtgaagcaaaggtcaataggcttatatttaattaaagccttactgaagaataagaaatgagcttagaatgactagtgttctttgaaaggtttttttatttttgtttttttggggtttttttttttttttttgagaccgagtcttgctctgtcgcccaggctggaatgcagtggtgcgatcttggctcactgcaatctctgcctctcgggttcaagcggttctactgcctcagcctcctgagtagctaggattacaggtgtgtgccaccacgcctgggtaattttttttttttttgtatttttagtagagatgagtttcaccatgttggtcagtctagtctcgaactcctgaccttgtgatccgcatgcctcagcctcccaaagtgctgggattacaggcatgagccaccacggcccgccaaaaggctttaacccatgaacaaatgttggatcctgacattttgtttaagagtgatttgttcaataattgaactgagttaacattcttggtaaaccaggtaattgaatgaagaaaggtcactaaagggagaaatgacatgttttctattttcttttcatgaaaacactgtttttccccctaataaagcatattttactttggtgcttatttttcctccttgcagtctaataaaaaaatctggacaatcaaaccttaaaatagctacactctgccctctgtaatgtagcattcataaaaatttggaagtatttacatcctctttcaagatgagcttatatgacacaattattatttgctgatacatgaaaatactgcactttaagtttctcaagactctgaaatatgtaaaattcaatatttttatattcccagaaattgtttcttacaggttgaaagtcttttaagggcatcacaaattaacatttactcctaatgcacgcctagaatgtattttaaatacttactaagaagaatgaaaattctttggttgttttatatataaataaggcatatataatgacactgtgttctgtgagggagcaggccctgtgagaatcaattcaggacagtatttttttttgtcctttctccatccttgatcagagataaactattaaaactttaaaaaatactcaaaaatatgtaagttttttggttgaacctttagatttgctcataatgtttaacataacaacatttatttcaaatcactgaattcatggagatgtggacacgcttggtttgctctatttttgtttatgtgtgatagtggttctgtcatcatcattcatgttttttaaggcctggtcataaaactttaaattttactagtgttacttaatgtatattctaaaaagagaatgcagtaactaatgccctaaatgtttgatctctgtttgtcattactttttcaaaattatttttttctgtaaagtataatatataaaacttcttgcttaaattgaatttctatattagtggttaattgcagtttattaaagggatcattatcagtaatttcatagcaactgttctagtgttttgtgtttttaaaacagaattaggaatttgagatatctgattatatttttcatatgaatcacagctgttgacaatgtcccatatatttaagaaattatatcatactgatactatttgtaacattttgatttgatttaatctccagggacagaaataattcattggtaaagtgtaataatgcgttttttaaaaatgctttgagaggtaattacttgcatatgagagaaataaaacatttggcacattgtttacaggtgtgaaaaaaaaaaaaaaaaaaaaaaaa

SEQ ID NO: 1222 - protein, 442 aa, Homo sapien
METSMTDMSILSFFEHFHISPVKLHLSLSLGSGGEESDKEKQEMFAVHSVNLLLKSIGATLTDVDDLIFKLAYYEIRYQFYKRDQLIWSVVRHYSEQFLKQMYVLVLGLDVLGNPFGLIRGLSEGVEALFYEPFQGAVQGPEEFAEGLVIGVRSLFGHTVGGAAGVVSRITGSVGKGLAAITMDKEYQQKRREELSRQPRDFGDSLARGGKGFLRGVVGGVTGIITKPVEGAKKEGAAGFFKGIGKGLVGAVARPTGGIVDMASSTFQGIQRAAESTEEVSSLRPPRLIHEDGIIRPYDRQESEGSDLLENHIKKLEGETYRYHCAIPGSKKTILMVTNRRVLCIKEVEILGLMCVDWQCPFEDFVFPPSVSENVLKISVKEQGLFHKKDSANQGCVRKVYLKDTATAERACNAIEDAQSTRQQQKLMKQSSVRLLRPQLPS

SEQ ID NO: 1223 - DNA, 6270 bp, Homo sapien
gccctgcttccccttgcacctgcgccgggcggccatggacttgtacagcaccccggccgctgcgctggacaggttcgtggccagaaggctgcagccgcggaaggagttcgtagagaaggcgcggcgcgctctgggcgccctggccgctgccctgagggagcgcgggggccgcctcggtgctgctgccccgcgggtgctgaaaactgtcaagggaggctcctcgggccggggcacagctctcaagggtggctgtgattctgaacttgtcatcttcctcgactgcttcaagagctatgtggaccagagggcccgccgtgcagagatcctcagtgagatgcgggcatcgctggaatcctggtggcagaacccagtccctggtctgagactcacgtttcctgagcagagcgtgcctggggccctgcagttccgcctgacatccgtagatcttgaggactggatggatgttagcctggtgcctgccttcaatgtcctgggtcaggccggctccgcggtcaaacccaagccacaagtctactctaccctcctcaacagtggctgccaagggggcgagcatgcggcctgcttcacagagctgcggaggaactttgtgaacattcgcccagccaagttgaagaacctaatcttgctggtgaagcactggtaccaccaggtgtgcctacaggggttgtggaaggagacgctgcccccggtctatgccctggaattgctgaccatcttcgcctgggagcagggctgtaagaaggatgctttcagcctaggcgaaggcctccgaactgtcctgggcctgatccaacagcatcagcacctgtgtgttttctggactgtcaactatggcttcgaggaccctgcagttgggcagttcttgcagcggcacgttaagagacccaggcctgtgatcctggacccagctgaccccacatgggacctggggaatggggcagcctggcactgggatttgcatgcccaggaggcagcatcctgctatgaccacccatgctttctgagggggatgggggacccagtgcagtcttggaaggggccgggccttccacgtgctggatgctcaggtttgggccaccccatccagctagaccctaaccagaagacccctgaaaacagcaagagcctcaatgctgtgtacccaagagcagggagcaaacctccctcatgcccagctcctggccccactgcggagccagcatcgtacccctctgtgccgggaatggccttggacctgtctcagatccccaccaaggagctggaccgcttcatccaggaccacctgaagccgagcccccagttccaggagcaggtgaaaaaggccatcgacatcatcttgcgctgcctccatgagaactgtgttcacaaggcctcaagagtcagtaaagggggctcatttggccggggcacagacctaagggatggctgtgatgttgaactcatcatcttcctcaactgcttcacggactacaaggaccaggggccccgccgcgcagagatccttgatgagatgcgagcgcacgtagaatcctggtggcaggaccaggtgcccagcctgagccttcagtttcctgagcagaatgtgcctgaggctctgcagttccagctggtgtccacagccctgaagagctggacggatgttagcctgctgcctgccttcgatgctgtggggcagctcagttctggcaccaaaccaaatccccaggtctactcgaggctcctcaccagtggctgccaggagggcgagcataaggcctgcttcgcagagctgcggaggaacttcatgaacattcgccctgtcaagctgaagaacctgattctgctggtgaagcactggtaccgccaggttgcggctcagaacaaaggaaaaggaccagcccctgcctctctgcccccagcctatgccctggagctcctcaccatctttgcctgggagcagggctgcaggcaggattgtttcaacatggcccaaggcttccggacggtgctggggctcgtgcaacagcatcagcagctctgtgtctactggacggtcaactatagcactgaggacccagccatgagaatgcaccttcttggccagcttcgaaaacccagacccctggtcctggaccccgctgatcccacctggaacgtgggccacggtagctgggagctgttggcccaggaagcagcagcgctggggatgcaggcctgctttctgagtagagacgggacatctgtgcagccctgggatgtgatgccagccctcctttaccaaaccccagctggggaccttgacaagttcatcagtgaatttctccagcccaaccgccagttcctggcccaggtgaacaaggccgttgataccatctgttcatttttgaaggaaaactgcttccggaattctcccatcaaagtgatcaaggtggtcaagggtggctcttcagccaaaggcacagctctgcgaggccgctcagatgccgacctcgtggtgttcctcagctgcttcagccagttcactgagcagggcaacaagcgggccgagatcatctccgagatccgagcccagctggaggcatgtcaacaggagcggcagttcgaggtcaagtttgaagtctccaaatgggagaatccccgcgtgctgagcttctcactgacatcccagacgatgctggaccagagtgtggactttgatgtgctgccagcctttgacgccctaggccagctggtctctggctccaggcccagctctcaagtctacgtcgacctcatccacagctacagcaatgcgggcgagtactccacctgcttcacagagctacaacgggacttcatcatctctcgccctaccaagctgaagagcctgatccggctggtgaagcactggtaccagcagtgtaccaagatctccaaggggagaggctccctacccccacagcacgggctggaactcctgactgtgtatgcctgggagcagggcgggaaggactcccagttcaacatggctgagggcttccgcacggtcctggagctggtcacccagtaccgccagctctgtatctactggaccatcaactacaacgccaaggacaagactgttggagacttcctgaaacagcagcttcagaagcccaggcctatcatcctggatccggctgacccgacaggcaacctgggccacaatgcccgctgggacctgctggccaaggaagctgcagcctgcacatctgccctgtgctgcatgggacggaatggcatccccatccagccatggccagtgaaggctgctgtgtgaagttgagaaaatcagcggtcctactggatgaagagaagatggacaccagccctcagcatgaggaaattcagggtcccctaccagatgagagagattgtgtacatgtgtgtgtgagcacatgtgtgcatgtgtgtgcacacgtgtgcatgtgtgtgttttagtgaatctgctctcccagctcacacactcccctgcctcccatggcttacacactaggatccagactccatggtttgacaccagcctgcgtttgcagcttctctgtcacttccatgactctatcctcataccaccactgctgcttcccacccagctgagaatgccccctcctccctgactcctctctgcccatgcaaattagctcacatctttcctcctgctgcaatccatcccttcctcccattggcctctccttgccaaatctaaatactttatatagggatggcagagagttcccatctcatctgtcagccacagtcatttggtactggctacctggagccttatcttctgaagggttttaaagaatggccaattagctgagaagaattatctaatcaattagtgatgtctgccatggatgcagtagaggaaagtggtggtacaagtgccatgattgattagcaatgtctgcactggatatggaaaaaagaaggtgcttgcaggtttacagtgtatatgtgggctattgaagagccctctgagctcggttgctagcaggagagcatgcccatattggcttactttgtctgccacagacacagacagagggagttgggacatgcatgctatggggaccctcttgttggacacctaattggatgcctcttcatgagaggcctccttttcttcaccttttatgctgcactcctcccctagtttacacatcttgatgctgtggctcagtttgccttcctgaatttttattgggtccctgttttctctcctaacatgctgagattctgcatccccacagcctaaactgagccagtggccaaacaaccgtgctcagcctgtttctctctgccctctagagcaaggcccaccaggtccatccaggaggctctcctgacctcaagtccaacaacagtgtccacactagtcaaggttcagcccagaaaacagaaagcactctaggaatcttaggcagaaagggattttatctaaatcactggaaaggctggaggagcagaaggcagaggccaccactggactattggtttcaatattagaccactgtagccgaatcagaggccagagagcagccactgctactgctaatgccaccactacccctgccatcactgccccacatggacaaaactggagtcgagacctaggttagattcctgcaaccacaaacatccatcagggatggccagctgccagagctgcgggaagacggatcccacctccctttcttagcagaatctaaattacagccagacctctggctgcagaggagtctgagacatgtatgattgaatgggtgccaagtgccagggggcggagtccccagcagatgcatcctggccatctgttgcgtggatgagggagtgggtctatctcagaggaaggaacaggaaacaaagaaaggaagccactgaacatcccttctctgctccacaggagtgtcttagacagcctgactctccacaaaccactgttaaaacttacctgctaggaatgctagattgaatgggatgggaagagccttccctcattattgtcattcttggagagaggtgagcaaccaagggaagctcctctgattcacctagaacctgttctctgccgtctttggctcagcctacagagactagagtaggtgaagggacagaggacagggcttctaatacctgtgccatattgacagcctccatccctgtcccccatcttggtgctgaaccaacgctaagggcaccttcttagactcacctcatcgatactgcctggtaatccaaagctagaactctcaggaccccaaactccacctcttggattggccctggctgctgccacacacatatccaagagctcagggccagttctggtgggcagcagagacctgctctgccaagttgtccagcagcagagtggccctggcctgggcatcacaagccagtgatgctcctgggaagaccaggtggcaggtcgcagttgggtaccttccattcccaccacacagactctgggcctccccgcaaaatggctccagaattagagtaattatgagatggtgggaaccagagcaactcaggtgcatgatacaaggagaggttgtcatctgggtagggcagagaggagggcttgctcatctgaacaggggtgtatttcattccaggccctcagtctttggcaatggccaccctggtgttggcatattggccccactgtaacttttgggggcttcccggtctagccacaccctcggatggaaagacttgactgcataaagatgtcagttctccctgagttgattgataggcttaatggtcaccctaaaaacacccacatatgcttttcgatggaaccagataagttgacgctaaagttcttatggaaaaatacacacgcaatagctaggaaaacacagggaaagaagagttctgagcagggcctagtcttagccaatattaaaacatactatgaagcctctgatacttaaacagcatggcgctggtacgtaaatagaccaatgcagttaggtggctctttccaagactctggggaaaaaagtagtaaaaagctaaatgcaatcaatcagcaattgaaagctaagtgagagagccagagggcctccttggtggtaaaagagggttgcatttcttgcagccagaaggcagagaaagtgaagaccaagtccagaactgaatcctaagaaatgcaggactgcaaagaaattggtgtgtgtgtgtgtgtgtgtgtgtgtgtgtgtttaatttttaaaaagtttttattcggaatccgcg

SEQ ID NO: 1224 - protein, 1087 aa, Homo sapien
MDLYSTPAAALDRFVARRLQPRKEFVEKARRALGALAAALRERGGRLGAAAPRVLKTVKGGSSGRGTALKGGCDSELVIFLDCFKSYVDQRARRAEILSEMRASLESWWQNPVPGLRLTFPEQSVPGALQFRLTSVDLEDWMDVSLVPAFNVLGQAGSAVKPKPQVYSTLLNSGCQGGEHAACFTELRRNFVNIRPAKLKNLILLVKHWYHQVCLQGLWKETLPPVYALELLTIFAWEQGCKKDAFSLGEGLRTVLGLIQQHQHLCVFWTVNYGFEDPAVGQFLQRHVKRPRPVILDPADPTWDLGNGAAWHWDLHAQEAASCYDHPCFLRGMGDPVQSWKGPGLPRAGCSGLGHPIQLDPNQKTPENSKSLNAVYPRAGSKPPSCPAPGPTAEPASYPSVPGMALDLSQIPTKELDRFIQDHLKPSPQFQEQVKKAIDIILRCLHENCVHKASRVSKGGSFGRGTDLRDGCDVELIIFLNCFTDYKDQGPRRAEILDEMRAHVESWWQDQVPSLSLQFPEQNVPEALQFQLVSTALKSWTDVSLLPAFDAVGQLSSGTKPNPQVYSRLLTSGCQEGEHKACFAELRRNFMNIRPVKLKNLILLVKHWYRQVAAQNKGKGPAPASLPPAYALELLTIFAWEQGCRQDCFNMAQGFRTVLGLVQQHQQLCVYWTVNYSTEDPAMRMHLLGQLRKPRPLVLDPADPTWNVGHGSWELLAQEAAALGMQACFLSRDGTSVQPWDVMPALLYQTPAGDLDKFISEFLQPNRQFLAQVNKAVDTICSFLKENCFRNSPIKVIKVVKGGSSAKGTALRGRSDADLVVFLSCFSQFTEQGNKRAEIISEIRAQLEACQQERQFEVKFEVSKWENPRVLSFSLTSQTMLDQSVDFDVLPAFDALGQLVSGSRPSSQVYVDLIHSYSNAGEYSTCFTELQRDFIISRPTKLKSLIRLVKHWYQQCTKISKGRGSLPPQHGLELLTVYAWEQGGKDSQFNMAEGFRTVLELVTQYRQLCIYWTINYNAKDKTVGDFLKQQLQKPRPIILDPADPTGNLGHNARWDLLAKEAAACTSALCCMGRNGIPIQPWPVKAAV

SEQ ID NO: 1225 - DNA, 3253 bp, Homo sapien
cttgttgttccccgccgccgccgtcgctgacccagcccgccaggcgctcctgaccgtcgcttcctccggtcccaggtccccggccctcgcctcagccccggcccctggtccccagccctcgtcgcagccccggccgcccgccgccgccatgtccaaggaggagcgccccggtcgggaggagatcctggagtgccaggtgatgtgggagcctgacagtaagaagaacacgcagatggaccgcttccgggcggctgtgggcgccgcctgcggcctggcgctggagagttatgatgacttgtaccattggtccgttgagtcatattcagacttctgggcagagttctggaaattcagtggaattgtcttctcacgtgtgtatgatgaggttgtggacacatcgaaaggaatcgcagatgtccccgagtggttcaaaggcagtcggctcaactatgcagaaaacctcctgcggcacaaagagaatgacagagttgccctttacattgtaagggaaggcaaagaggaaattgtgaaggtgacttttgaagagctgaggcaaggagtggctttgtttgcagcagcaatgaggaaaatgggtgcgaagaaaggagatcgggttgttggttatttacccaacagtgagcacgctgtcgaggcgatgctggctgcggcaagcattggtgccatctggagctccacgtccccggacttcggtgtgaatggtgtgctggaccggttttctcaaattcagccaaagctcatcttctctgtggaggctgttgtctataatggcaaagagcacaaccacatggaaaagctgcagcaggtggttaaaggcctaccagacttgaagaaagtggtggtgattccttatgtgtcctccagagagaacatagacctttcaaagattccaaacagtgtgtttctggatgactttcttgccaccggcaccagtgagcaggccccgcagctggagttcgagcagctgcccttcagccacccactgttcatcatgttctcatcgggcaccacgggcgcacccaagtgcatggtgcattccgctgggggcaccctcatccagcatctgaaggagcacctgctgcacggcaacatgaccagcagtgacatcctcctgtgctacaccacggtcggctggatgatgtggaactggatggtgtcccttctggccacaggagcggccatggtcttgtacgatggctcccccctggtgcccacgcccaatgtgctctgggacctggttgacaggataggcatcactgtcctggtaactggggccaagtggctgtcagtgctggaagagaaggccatgaagccggtggaaacccacagtctccagatgctccacacgatcctgtccactggctccccactgaaagcccagagctacgagtatgtctacaggtgcatcaagagcagcatcctcctgggctccatctcaggaggcaccgacattatctcctgcttcatgggccacaatttttctcttcctgtgtataaaggggagattcaggcccggaacctgggcatggccgtggaagcgtggaacgaggaaggaaaggcggtctggggagagagcggcgagctggtgtgtactaagccgatcccttgccagcccacacacttctggaacgatgagaacggcaacaagtacaggaaggcgtatttctccaaattcccaggtatctgggctcatggcgactactgcagaatcaaccccaagaccgggggcatcgtcatgcttggccggagtgacggcaccctcaaccccaacggggtgcggttcggcagctcggaaatctataacattgtggaatccttcgaggaggtggaggacagcctgtgtgtcccccagtataacaagtacagggaggagagggtgatcctcttcctgaagatggcctccgggcacgccttccagcctgacttggttaagaggatccgtgacgccatccgcatgggcttgtctgcgcgacacgtgcccagcctcatcctggaaaccaagggcatcccgtatacgctcaacggcaagaaagtggaagttgccgtcaaacagatcatcgctggaaaagccgtggagcaaggaggtgctttctcgaaccccgagaccctggatctgtaccgggacatccctgagctgcagggcttctgagtcagactggctggcgtgtcactcagccgcacccgtgtgcactgtaacttttgtgtgctcaagaaattatacagaaacctacagctgttgtaaaaggatgctcgcaccaagtgttctgtaggcttggggagggatcgtttctctgttttgttaaatctggtgggtacctggatcttccacacgagtgggattctggccttcagagaccaggagggagtgtctgggccgcaggtgtggcactgtggtgagagtgtgtgtctttgcacacacagtgcagtgggaacggtggggctggctggtgctgaagacagacacactcctgagccaaggtcttgtcttcaacctccccgtcccgttgtcccattttgctctgtgaaggtgcaaatccctttcttcccttcccatctcaggctctcctgttttccctcagggtccagtatgcctttgagctttagctgttagaaaggaacccccgtgacttgacacagctttcacagctggctgctaggaccggcgggctgggtgttcacgtgtgtctgtgtcatggatgcaatgcaggccctggaggactgtgcgtcacccgtcaaccagagcgtgcctccgggccagcttccctccaaggaatgagtggatttcatacaggatctctttattgcacagactgaatggctttacatgtttctaatgtgaattaggcatgtgaagcagtgggtgtccacccgtgtccctcatgggtgagccctccagctgtgagcccaggcagtgtggtcaccgagtgaggaccctcctcaccaggaaccgcatccctgtgctgcctccacctgagagttgctagggggttcttgtcgagatcatgtcatcagcacccctaagtcaagtcacgggtttccatagccaggcagttggtatgtacaattcagttcagcgtatgaacttgtatctctaatctgatgtccatttttatattttttgaaactgagcacaatgaaatcctttcttgaatcattttccttttggattataaaaatatgggggaaagtgctatgatgaattttatgcaataaatgtatacatgtgtgcacatgc

SEQ ID NO: 1226 - protein, 672 aa, Homo sapien
MSKEERPGREEILECQVMWEPDSKKNTQMDRFRAAVGAACGLALESYDDLYHWSVESYSDFWAEFWKFSGIVFSRVYDEVVDTSKGIADVPEWFKGSRLNYAENLLRHKENDRVALYIVREGKEEIVKVTFEELRQGVALFAAAMRKMGAKKGDRVVGYLPNSEHAVEAMLAAASIGAIWSSTSPDFGVNGVLDRFSQIQPKLIFSVEAVVYNGKEHNHMEKLQQVVKGLPDLKKVVVIPYVSSRENIDLSKIPNSVFLDDFLATGTSEQAPQLEFEQLPFSHPLFIMFSSGTTGAPKCMVHSAGGTLIQHLKEHLLHGNMTSSDILLCYTTVGWMMWNWMVSLLATGAAMVLYDGSPLVPTPNVLWDLVDRIGITVLVTGAKWLSVLEEKAMKPVETHSLQMLHTILSTGSPLKAQSYEYVYRCIKSSILLGSISGGTDIISCFMGHNFSLPVYKGEIQARNLGMAVEAWNEEGKAVWGESGELVCTKPIPCQPTHFWNDENGNKYRKAYFSKFPGIWAHGDYCRINPKTGGIVMLGRSDGTLNPNGVRFGSSEIYNIVESFEEVEDSLCVPQYNKYREERVILFLKMASGHAFQPDLVKRIRDAIRMGLSARHVPSLILETKGIPYTLNGKKVEVAVKQIIAGKAVEQGGAFSNPETLDLYRDIPELQGF

SEQ ID NO: 1227 - DNA, 1707 bp, Homo sapien
cgctgttgttagtcaccgcggagccgccgaaacctgcaggagtctactatgcaactgcatactggatgcctgctgaaaagacagtacaagtcaaaaatgtaatggacaagaatggggacgcctatggcttttacaataactctgtgaaaaccacaggctggggcatcctggagatcagagctggctatggctctcaaaccctgagcaatgagatcatcatgtttgtggctggctttttggagggttacctcactgccccacacatgaatgaccactacacaaacctctacccacagctgatcacgaaaccttccatcatggataaagtgcaggattttatggagaagcaagataagtggacccggaaaaatatcaaagaatacaagactgattcattttggagacatacaggctatgtgatggcacaaatagatggcctctatgtaggagcaaagaagagggctatattagaagggacaaagccaatgaccctgttccagattcagttcctgaatagtgttggagatctattggatctgattccctcactctctcccacaaaaaacggcagcctaaaggtttttaagagatgggacatgggacattgctccgctcttatcaaggttcttcctggatttgagaacgtcctttttgctcactcaagctggtacacgtatgcagccatgctcaggatatataaacactgggacttcaacatcatagataaagataccagcagtagtcgcctctctttcagcagttacccagggtttttggagtctctggatgatttttacattcttagcagtggattgatattgctgcagaccacaaacagtgtgtttaataaaaccctgctaaagcaggtaatacccgagactctcctgtcctggcaaagagtccgtgtggccaatatgatggcagatagtggcaagaggtgggcagacatcttttcaaaatacaactctggcacctataacaatcaatacatggttctggacctgaagaaagtaaagctgaaccacagtcttgacaaaggcactctgtacattgtggagcaaattcctacatatgtagaatattctgaacaaactgatgttctacggaaaggatattggccctcctacaatgttcctttccatgaaaaaatctacaactggagtggctatccactgttagttcagaagctgggcttggactactcttatgatttagctccacgagccaaaattttccggcgtgaccaagggaaagtgactgatacggcatccatgaaatatatcatgcgatacaacaattataagaaggatccttacagtagaggtgacccctgtaataccatctgctgccgtgaggacctgaactcacctaacccaagtcctggaggttgttatgacacaaaggtggcagatatctacctagcatctcagtacacatcctatgccataagtggtcccacagtacaaggtggcctccctgtttttcgctgggaccgtttcaacaaaactctacatcagggcatgccagaggtctacaactttgattttattaccatgaaaccaattttgaaacttgatataaaatgaaggagggagatgacggactagaagactgtaaataagataccaaaggcactattttagctatgtttttcccatcagaattatgcaataaaatatattaatttgtcaaaaaaaaaaaaaaaaa

SEQ ID NO: 1228 - protein, 506 aa, Homo sapien
MPAEKTVQVKNVMDKNGDAYGFYNNSVKTTGWGILEIRAGYGSQTLSNEIIMFVAGFLEGYLTAPHMNDHYTNLYPQLITKPSIMDKVQDFMEKQDKWTRKNIKEYKTDSFWRHTGYVMAQIDGLYVGAKKRAILEGTKPMTLFQIQFLNSVGDLLDLIPSLSPTKNGSLKVFKRWDMGHCSALIKVLPGFENVLFAHSSWYTYAAMLRIYKHWDFNIIDKDTSSSRLSFSSYPGFLESLDDFYILSSGLILLQTTNSVFNKTLLKQVIPETLLSWQRVRVANMMADSGKRWADIFSKYNSGTYNNQYMVLDLKKVKLNHSLDKGTLYIVEQIPTYVEYSEQTDVLRKGYWPSYNVPFHEKIYNWSGYPLLVQKLGLDYSYDLAPRAKIFRRDQGKVTDTASMKYIMRYNNYKKDPYSRGDPCNTICCREDLNSPNPSPGGCYDTKVADIYLASQYTSYAISGPTVQGGLPVFRWDRFNKTLHQGMPEVYNFDFITMKPILKLDIK

SEQ ID NO: 1229 - DNA, 3558 bp, Homo sapien
cataacaagccaaacgccagaccgagagtgcctccgtgcgcgagtgcccggtgtgtgcgcgccggcgagagcaggggcccgcccggctccccgcccgccgcggcccgaactcatgcagctccgagcgagcgagcggcgcccagcccagcgcctcggccgaacccctccgcagcaggctgcctgctgtttcccggggagatcatgaaacgaggtcgccttcccagcagcagtgaggattctgacgacaatggcagcctgtcaactacttggtcccagaattcccgatcccagcataggagaagctcctgctccagacatgaagatcgaaagccttcagaggtgtttaggacagacctgatcactgccatgaagttgcatgactcctaccagctgaatccggatgagtactatgtgttggcagatccctggagacaggaatgggagaaaggggtccaggtgcctgtgagcccggggaccatccctcagcctgtggccagggttgtgtctgaagagaaatccctcatgttcatcaggcccaagaagtacatcgtgtcatcaggctctgagcctcccgagttgggctatgtggacatccggacgctggctgacagcgtgtgtcgctatgacctcaatgacatggatgctgcatggctggaactgaccaatgaagaatttaaggagatgggaatgcctgaactagatgaatacaccatggagagggtcctagaggaatttgagcagcgatgctacgacaatatgaatcatgccatagagactgaggaaggcctggggatcgaatatgatgaagatgttgtctgtgatgtctgccagtctcctgatggtgaggacggcaatgagatggtgttctgtgacaaatgcaacatctgtgtgcaccaggcctgttatggaatcctcaaggtaccagagggcagctggctgtgccggacatgtgccctgggggttcagccaaaatgtctgctgtgtccgaagaagggtggagctatgaagcccacccgtagcggaaccaagtgggtccacgttagctgtgctctgtggatccctgaggtgagcattggcagcccagagaagatggagcccatcaccaaggtgtcacacattcccagcagccggtgggcgctagtgtgcagcctctgcaatgagaagtttggggcctctatacagtgctctgtgaagaactgccgcacagccttccatgtgacctgtgcttttgaccggggcctggagatgaagaccatcttagcagagaatgatgaagtcaagttcaagtcctattgcccaaagcacagctcacataggaaacccgaggagagtcttggcaagggggctgcacaggagaatggggcccctgagtgttccccccggaatccgctggagccctttgccagccttgagcagaaccgggaggaggcccaccgggtgagtgtccgtaagcagaagctgcagcagttggaggatgagttctacaccttcgtcaacctgctggatgttgccagggctctgcggctgcctgaggaagtagtggatttcctgtaccagtactggaagttgaagaggaaggtcaacttcaacaagcccctgatcaccccaaagaaagatgaagaggacaatctagccaagcgggagcaggatgtcttatttaggaggctgcagctgttcacgcacctgcggcaggacctggagagggtaatgattgacactgacaccttatagtgacttagagaagaagatgcaaagaggcgaacgctcgcccagagcaagaaatgatagccagtcatatactctcagacccttgtacacaccacagcatgaggttgtgttggttaaaaatatttatgggctggtaaactcattgtacatatgtgcaaaactgctactgagtggggagcttctttgtggttttttttttttaaaaacactttcccattaatctttactgttttgtaagatcaaatggggtgtgtcttccccacccccattccttcattctagagctagagtgaatgagccccaagaaaatgacccaaggagttgactcaggatggtttacagactgatttagaaaaccagaacggatttcatttctaatggagggggccagagatgggaaaatttcttgttcagtccggggaaacacacctaggtgctggtgatgggcttatgaaggaagctaagcacggctgctcactggcccccactttgtttcttgggtaattcacaggggaattcccagtactgtcatggagcagagcaggcagtgggtgctgatgtgtgtgcatgagctgtatgtacacatgcatatatctgttacagaagatactcctggcagtgaggtgctaagtcatcactgaggctgtgtgtgtgtgtgtgtgtgcgcgtgcccgtgtccatccatgtctctgttgtgtgtctgtgtgcgggtatgggtgggattcctggtggacaggggtgtcagatctgtctgaggagccccagtcatgctcagcacgctacagatgtgttgtttgtcacactgagattgctgaatgtcgtggctgttggctgccgagcctcagctgctggcatttccttctgctgtttgctgcttttgtgcctcccccactttccatcacctctggagtcccgtctggacgtcccttcctgctacaggaataatgaggcgtgggctgcctcccgctagggcctcctgctccctgtaggtagtttctggctgaggcttgctaattggggatgcttcttagagcatcttccacatcaactcccctggctgctggctaccgattaaattcattagtgtgaaagaggtgggagtgaggttttctggcctgaagcagtctgcactgaaaggtacccaagtggcctgaaacagtgtagggaaagacctgggaaacactggaccaaaaaagcctgatctcatggagacctgcatggccctgttagagatggcgtagaagtgaaagtcttaaagggagcattagagatccttttaatacacgactgagtgccagcttatttgtgatgccccttcccagaccaggttaggattcctgggaaggccgcggattccggccctggaagaggcaggatcctggagcagttttgtgaggcttttgtgctcccatacgccccctggtggtgagtgtaaagaagactttgcctctcacaactacatgtatgtgtggcatttttgttagagatgagaaaaggattgagaaggataaactggaatcctggtaagaagcctttatgccagcccgacacctgctgtaattggggtgcatgagctatggagtcagatagttgttgggagggggaggacaagaagtctattgtttggactgtgtttgtctcacaatcaccacaaaataaaagtgtagaaaatgcttgtggtgtactaactcttttctgtacttaagttactcagattaacatgcacttctaattctaaacattttttttggagtcatcactgtcgctgtttaagtagaacaatgccaacgatgtatgagaaacagggaataaatcaggatttgtgtgtgt

SEQ ID NO: 1230 - protein, 509 aa, Homo sapien
MKRGRLPSSSEDSDDNGSLSTTWSQNSRSQHRRSSCSRHEDRKPSEVFRTDLITAMKLHDSYQLNPDEYYVLADPWRQEWEKGVQVPVSPGTIPQPVARVVSEEKSLMFIRPKKYIVSSGSEPPELGYVDIRTLADSVCRYDLNDMDAAWLELTNEEFKEMGMPELDEYTMERVLEEFEQRCYDNMNHAIETEEGLGIEYDEDVVCDVCQSPDGEDGNEMVFCDKCNICVHQACYGILKVPEGSWLCRTCALGVQPKCLLCPKKGGAMKPTRSGTKWVHVSCALWIPEVSIGSPEKMEPITKVSHIPSSRWALVCSLCNEKFGASIQCSVKNCRTAFHVTCAFDRGLEMKTILAENDEVKFKSYCPKHSSHRKPEESLGKGAAQENGAPECSPRNPLEPFASLEQNREEAHRVSVRKQKLQQLEDEFYTFVNLLDVARALRLPEEVVDFLYQYWKLKRKVNFNKPLITPKKDEEDNLAKREQDVLFRRLQLFTHLRQDLERVMIDTDTL

SEQ ID NO: 1231 - DNA, 2989 bp, Homo sapien
attcaagggaggcaggcgctttggaagtttgtaaacaccaactttctgagtaagggaggagcactttttttccaaaaaggaaagaacgtctctactgggtttttttcctcctgatattcagcattagagtagaaaagaaactattgtttggccacattagccgtggttagcaggtgctgcagcctttgccactgttattatttttaaagggcagaaatgcctgaaggtgaagactttggaccaggcaaaagctgggaagttatcaattccaaaccagatgaaagacccaggctcagccactgtattgcagaatcatggatgaatttcagcatatttcttcaagaaatgtctctttttaaacagcagagccctggcaagttttgtctcctggtctgtagtgtgtgcacattttttacgatcttgggaagttacattcctggggttatactcagctatctactgttactgtgtgcatttttgtgtccattgtttaaatgtaatgatattggacaaaaaatttacagcaaaattaagtcagttctgctgaaactggattttggaattggagaatatattaatcagaagaaacgtgagagatctgaagcagacaaagaaaaaagtcacaaagatgacagtgaattagacttttcagctctttgtcctaagattagcctcacggttgctgccaaagagttatctgtgtctgacacagacgtctcagaggtatcctggactgataatgggaccttcaacctttcagaaggatacactccacagacagacacttctgatgatcttgaccgacccagtgaggaagttttctctagagatctttcagattttccatctctagaaaatggcatgggaacaaatgatgaagatgaattaagccttggtttgcccactgagctcaagagaaagaaggaacagttggacagtggtcacagaccaagcaaagagacgcaatcagcagctggtctcacccttcctctgaacagtgaccaaacctttcacctgatgagcaacctggctggggatgttatcacagctgcagtgactgcagctatcaaagaccagttagagggtgtgcagcaagcactttctcaggctgcccccatcccagaagaggacacagacactgaagaaggtgatgactttgaactacttgaccagtcagagctggatcaaattgagagtgaattgggacttacacaagaccaggaagcagaagcacagcaaaataagaagtcttcaggtttcctttcaaatctgctgggaggccattaatctaggaatcagcttgcaacagagcacaaaaaacaccaaaaaaatttcaaacaagaaaaaaaaaaaaaaaaaggaaaagaaaaaaattgaactgtaagctttaatgattactttagatttgttttattttccctcctgcagtgaattaattggatatatatcagctgacactgatagattgatatttctgatcgttatttttgtgtcataagcatggaaatgaactttatacacaccactgtgttgtcagagataaatattaggggttgtttttaaagcaaaaagaaaaaaacaaaaaccaaactattaaaatcctcctataaatattctttttctttacagtttttcaagcatgcaaaacagtttattgtaacttactgaaaaatattaacaattaattgtgaatacatgctgttaccagcttccttattcctaatacctggaaaatttttttttcaacggatagattttgatgtaaaaaagaccgaaattatcaaggtatcttagttgaaggacttgggaaatactatcaaaattaatttcttaggaaaaaatttaaaagtatatttaagtactctggatagactgaaacgtttccatgttatttctgcagttgtagacttaggcttatttgtaaagaagcatgctccattgactgccatctctagtcttgcagtgggtggtattaacccatagaaagcaagcagttgtgtatcacatagacaatggttatgatgtaaacagattcagttgttttgttgttcattcgtcatatgtttgtgatagggatgttgggagcacagctctattctgcctgctcagacttaagttagacccttatcttttatattatgtcatgaaaaaagtctcctaaaattgtgaaactagttcttgatgagtgatgtgatcatcagcaataaagatataataactctgttttcttagcctgtatagaggagaggaacttgcttggctttaaaatatatttatttgccatttaagtataaatatggaatctgtttcttattgggaagatagaatatatatattttcctttaaactttttaaggtcacttttaaataaccaaatttgatttatggtttttaacaaaggactaaagagctgaaaccaacctagttttgtttttgtgatataaactttaagtgtcgagggaccatgccagcaactaccaaaaatctcttaaatcttcaggtacagctggcattttggcagatgcatagagacatctgagaccctcagaaaggaaggataatccaagaatataggaaatctgtgttctcttcctttcattttatcccttatatttctaaagactaattataagtaatctgacattttaatgtagctactcttatttattttttctttctgaggtattaaaatatctggactgagttttgccaaatgttaaagggagaagagttactgaagactttgaacacttgctttttgtgattgcttatgtcattagtgcctcatgactgtgtttgatgtcctttattgatacaaagtgagcctgtgccttcattatcttgcccattttaatacaaatggaaacctggtgtttgaaaatctctgaactgtgtgggttttggaggaatatacctgaattttattcaataacagtttctggacaggaagaaaaatacagttacatatttataaaaaaaaaaaaaaaaa

SEQ ID NO: 1232 - protein, 356 aa, Homo sapien
MPEGEDFGPGKSWEVINSKPDERPRLSHCIAESWMNFSIFLQEMSLFKQQSPGKFCLLVCSVCTFFTILGSYIPGVILSYLLLLCAFLCPLFKCNDIGQKIYSKIKSVLLKLDFGIGEYINQKKRERSEADKEKSHKDDSELDFSALCPKISLTVAAKELSVSDTDVSEVSWTDNGTFNLSEGYTPQTDTSDDLDRPSEEVFSRDLSDFPSLENGMGTNDEDELSLGLPTELKRKKEQLDSGHRPSKETQSAAGLTLPLNSDQTFHLMSNLAGDVITAAVTAAIKDQLEGVQQALSQAAPIPEEDTDTEEGDDFELLDQSELDQIESELGLTQDQEAEAQQNKKSSGFLSNLLGGH

SEQ ID NO: 1233 - DNA, 2644 bp, Homo sapien
ggcacgaggggccgacgcgagcgccgcgcttcgcttcagctgctagctggcccaagggaggcgaccgcggagggtggcgaggggcggccaggacccgcagccccggggccgggccggtccggaccgccagggagggcaggtcagtgggcagatcgcgtccgcgggattcaatctctgcccgctctgataacagtccttttccctggcgctcacttcgtgcctggcacccggctgggcgcctcaagaccgttgtctcttcgatcgcttctttggacttggcgaccatttcagagatgtcttccagaagtaccaaagatttaattaaaagtaagtggggatcgaagcctagtaactccaaatccgaaactacattagaaaaattaaagggagaaattgcacacttaaagacatcagtggatgaaatcacaagtgggaaaggaaagctgactgataaagagagacacagacttttggagaaaattcgagtccttgaggctgagaaggagaagaatgcttatcaactcacagagaaggacaaagaaatacagcgactgagagaccaactgaaggccagatatagtactaccgcattgcttgaacagctggaagagacaacgagagaaggagaaaggagggagcaggtgttgaaagccttatctgaagagaaagacgtattgaaacaacagttgtctgctgcaacctcacgaattgctgaacttgaaagcaaaaccaatacactccgtttatcacagactgtggctccaaactgcttcaactcatcaataaataatattcatgaaatggaaatacagctgaaagatgctctggagaaaaatcagcagtggctcgtgtatgatcagcagcgggaagtctatgtaaaaggacttttagcaaagatctttgagttggaaaagaaaacggaaacagctgctcattcactcccacagcagacaaaaaagcctgaatcagaaggttatcttcaagaagagaagcagaaatgttacaacgatctcttggcaagtgcaaaaaaagatcttgaggttgaacgacaaaccataactcagctgagttttgaactgagtgaatttcgaagaaaatatgaagaaacccaaaaagaagttcacaatttaaatcagctgttgtattcacaaagaagggcagatgtgcaacatctggaagatgataggcataaaacagagaagatacaaaaactcagggaagagaatgatattgctaggggaaaacttgaagaagagaagaagagatccgaagagctcttatctcaggtccagtttctttacacatctctgctaaagcagcaagaagaacaaacaagggtagctctgttggaacaacagatgcaggcatgtactttagactttgaaaatgaaaaactcgaccgtcaacatgtgcagcatcaattgcttgtaattcttaaggagctccgaaaagcaagaaatcaaataacacagttggaatccttgaaacagcttcatgagtttgccatcacagagccattagtcactttccaaggagagactgaaaacagagaaaaagttgccgcctcaccaaaaagtcccactgctgcactcaatgaaagcctggtggaatgtcccaagtgcaatatacagtatccagccactgagcatcgcgatctgcttgtccatgtggaatactgttcaaagtagcaaaataagtatttgttttgatattaaaagattcaatactgtattttctgttagcttgtgggcattttgaattatatatttcacattttgcataaaactgcctatctacctttgacactccagcatgctagtgaatcatgtatcttttaggctgctgtgcatttctcttggcagtgatacctccctgacatggttcatcatcaggctgcaatgacagaatgtggtgagcagcgtctactgagactactaacattttgcactgtcaaaatacttggtgaggaaaagatagctcaggttattgctaatgggttaatgcaccagcaagcaaaatattttatgttttgggggtttgaaaaatcaaagataattaaccaaggatcttaactgtgttcgcattttttatccaagcacttagaaaacctacaatcctaattttgatgtccattgttaagaggtggtgatagatactattttttttttcatattgtatagcggttattagaaaagttggggattttcttgatctttattgctgcttaccattgaaacttaacccagctgtgttccccaactctgttctgcgcacgaaacagtatctgtttgaggcataatcttaagtggccacacacaatgttttctcttatgttatctggcagtaactgtaacttgaattacattagcacattctgcttagctaaaattgttaaaataaactttaataaacccatgtagccctctcatttgattgacagtattttagttatttttggcattcttaaagctgggcaatgtaatgatcagatctttgtttgtctgaacaggtatttttatacatgctttttgtaaaccaaaaacttttaaatttcttcaggttttctaacatgcttaccactgggctactgtaaatgagaaaagaataaaattatttaatgttttaaaaaaaaaaaaaaaaaaaa

SEQ ID NO: 1234 - protein, 464 aa, Homo sapien
MSSRSTKDLIKSKWGSKPSNSKSETTLEKLKGEIAHLKTSVDEITSGKGKLTDKERHRLLEKIRVLEAEKEKNAYQLTEKDKEIQRLRDQLKARYSTTALLEQLEETTREGERREQVLKALSEEKDVLKQQLSAATSRIAELESKTNTLRLSQTVAPNCFNSSINNIHEMEIQLKDALEKNQQWLVYDQQREVYVKGLLAKIFELEKKTETAAHSLPQQTKKPESEGYLQEEKQKCYNDLLASAKKDLEVERQTITQLSFELSEFRRKYEETQKEVHNLNQLLYSQRRADVQHLEDDRHKTEKIQKLREENDIARGKLEEEKKRSEELLSQVQFLYTSLLKQQEEQTRVALLEQQMQACTLDFENEKLDRQHVQHQLLVILKELRKARNQITQLESLKQLHEFAITEPLVTFQGETENREKVAASPKSPTAALNESLVECPKCNIQYPATEHRDLLVHVEYCSK

SEQ ID NO: 1235 - DNA, 1589 bp, Homo sapien
gtctcttcctcgctccctctctttctctcctccctctgccttcccagtgcataaagtctctgtcgctcccggaacttgttggcaatgcctattttttggctttcccccgcgttctctaaactaactatttaaaggtctgcggtcgcaaatggtttgactaaacgtaggatgggacttaagttgaacggcagatatatttcactgatcctcgcggtgcaaatagcgtatctggtgcaggccgtgagagcagcgggcaagtgcgatgcggtcttcaagggcttttcggactgtttgctcaagctgggcgacagcatggccaactacccgcagggcctggacgacaagacgaacatcaagaccgtgtgcacatactgggaggatttccacagctgcacggtcacagcccttacggattgccaggaaggggcgaaagatatgtgggataaactgagaaaagaatccaaaaacctcaacatccaaggcagcttattcgaactctgcggcagcggcaacggggcggcggggtccctgctcccggcgttcccggtgctcctggtgtctctctcggcagctttagcgacctggctttccttctgagcgtggggccagctccccccgcgcgcccacccacactcactccatgctcccggaaatcgagaggaagatccattagttctttggggacgttgtgattctctgtgatgctgaaaacactcatataggattgtgggaaatcctgattctcttttttatttcgtttgatttcttgtgttttatttgccaaatgttaccaatcagtgagcaagcaagcacagccaaaatcggacctcagctttagtccgtcttcacacacaaataagaaaacggcaaacccaccccattttttaattttattattattaattttttttgttggcaaaagaatctcaggaacggccctgggccacctactatattaatcatgctagtaacatgaaaaatgatgggctcctcctaataggaaggcgaggagaggagaaggccaggggaatgaattcaagagagatgtccacggccgaaacatacggtgaataattcacgctcacgtcgttcttccacagtatcttgttttgatcatttccactgcacatttctcctcaagaaaagcgaaaggacagactgttggctttgtgtttggaggataggagggagagagggaaggggctgaggaaatctctggggtaagagtaaaggcttccagaagacatgctgctatggtcactgaggggttagctttatctgctgttgttgatgcatccgtccaagttcactgcctttattttccctcctccctcttgttttagctgttacacacacagtaatacctgaatatccaacggtatagatcacaagggggggatgttaaatgttaatctaaaatatagctaaaaaaagattttgacataaaagagccttgattttaaaaaaaaaagagagagagatgtaatttaaaaagtttattataaattaaattcagcaaaaaaagatttgctacaaagtatagagaagtataaaataaaagttattgtttgaaaaaaaaaaaaaaaaaa

SEQ ID NO: 1236 - protein, 142 aa, Homo sapien
MGLKLNGRYISLILAVQIAYLVQAVRAAGKCDAVFKGFSDCLLKLGDSMANYPQGLDDKTNIKTVCTYWEDFHSCTVTALTDCQEGAKDMWDKLRKESKNLNIQGSLFELCGSGNGAAGSLLPAFPVLLVSLSAALATWLSF

SEQ ID NO: 1237 - DNA, 1057 bp, Homo sapien
gtctcagcggctgccaacagatcatgagccatcagctcctctggggccagctataggacaacagaactctcaccaaaggaccagacacagtgagcaccatgggacagtgtcggtcagccaacgcagaggatgctcaggaattcagtgatgtggagagggccattgagaccctcatcaagaactttcaccagtactccgtggagggtgggaaggagacgctgaccccttctgagctacgggacctggtcacccagcagctgccccatctcatgccgagcaactgtggcctggaagagaaaattgccaacctgggcagctgcaatgactctaaactggagttcaggagtttctgggagctgattggagaagcggccaagagtgtgaagctggagaggcctgtccgggggcactgagaactccctctggaattcttggggggtgttggggagagactgtgggcctggagataaaacttgtctcctctaccaccaccctgtaccctagcctgcacctgtcctcatctctgcaaagttcagcttccttccccaggtctctgtgcactctgtcttggatgctctggggagctcatgggtggaggagtctccaccagagggaggctcaggggactggttgggccagggatgaatatttgagggataaaaattgtgtaagagccaaagaattggtagtagggggagaacagagaggagctgggctatgggaaatgatttgaataatggagctgggaatatggctggatatctggtactaaaaaagggtctttaagaacctacttcctaatctcttccccaatccaaaccatagctgtctgtccagtgctctcttcctgcctccagctctgccccaggctcctcctagactctgtccctgggctagggcaggggaggagggagagcagggttgggggagaggctgaggagagtgtgacatgtggggagaggaccagctgggtgcttgggcattgacagaatgatggttgttttgtatcatttgattaataaaaaaaaatgaaaaaagtgaaaaaaaaaaaaaaaaa

SEQ ID NO: 1238 - protein, 104 aa, Homo sapien
MGQCRSANAEDAQEFSDVERAIETLIKNFHQYSVEGGKETLTPSELRDLVTQQLPHLMPSNCGLEEKIANLGSCNDSKLEFRSFWELIGEAAKSVKLERPVRGH

SEQ ID NO: 1239 - DNA, 2343 bp, Homo sapien
attccggagcgtttgcggcttcgcttcatggccgctctcccgcccctcctgggatctgtggggagctggggagcccgcagcggcccggagccggagctggcgagccgagcggagacctgtgcgccgcgcctctgaggcgcagcatgtgaagcggagacggcatccagtggggggcgagcctctcagccggccgggatggctaccacggccgagctcttcgaggagccttttgtggcagatgaatatattgaacgtcttgtatggagaaccccaggaggaggctctagaggtggacctgaagcttttgatcctaaaagattattagaagaatttgtaaatcatattcaggaactccagataatggatgaaaggattcagaggaaagtagagaaactagagcaacaatgtcagaaagaagccaaggaatttgccaagaaggtacaagagctgcagaaaagcaatcaggttgccttccaacatttccaagaactagatgagcacattagctatgtagcaactaaagtctgtcaccttggagaccagttagagggggtaaacacacccagacaacgggcagtggaggctcagaaattgatgaaatactttaatgagtttctagatggagaattgaaatctgatgtttttacaaattctgaaaagataaaggaagcagcagacatcattcagaagttgcacctaattgcccaagagttaccttttgatagattttcagaagttaaatccaaaattgcaagtaaataccatgatttagaatgccagctgattcaggagtttaccagtgctcaaagaagaggtgaaatctccagaatgagagaagtagcagcagttttacttcattttaagggttattcccattgtgttgatgtttatataaagcagtgccaggagggtgcttatttgagaaatgatatatttgaagacgctggaatactctgtcaaagagtgaacaaacaagttggagatatcttcagtaatccagaaacagtcctggctaaacttattcaaaatgtatttgaaatcaaactacagagttttgtgaaagagcagttagaagaatgtaggaagtccgatgcagagcaatatctcaaaaatctctatgatctgtatacaagaaccaccaatctttccagcaagctgatggagtttaatttaggtactgataaacagactttcttgtctaagcttatcaaatccattttcatttcctatttggagaactatattgaggtggagactggatatttgaaaagcagaagtgctatgatcctacagcgctattatgattcgaaaaaccatcaaaagagatccattggcacaggaggtattcaagatttgaaggaaagaattagacagcgtaccaacttaccacttgggccaagtatcgatactcatggggagacttttctatcccaagaagtggtggttaatcttttacaagaaaccaaacaagcctttgaaagatgtcataggctctctgatccttctgacttaccaaggaatgccttcagaatttttaccattcttgtggaatttttatgtattgagcatattgattatgctttggaaacaggacttgctggaattccctcttcagattctaggaatgcaaatctttattttttggacgttgtgcaacaggccaatactatttttcatctttttgacaaacagtttaatgatcaccttatgccactaataagctcttctcctaagttatctgaatgccttcagaagaaaaaagaaataattgaacaaatggagatgaaattggatactggcattgataggacattaaattgtatgattggacagatgaagcatattttggctgcagaacagaagaaaacagattttaagccagaagatgaaaacaatgttttgattcaatatactaatgcctgtgtaaaagtctgtgcttacgtaagaaaacaagtggagaagattaaaaattccatggatgggaagaatgtggatacagttttgatggaacttggagtacgttttcatcgacttatctatgagcatcttcaacaatattcctacagttgtatgggtggcatgttggccatttgtgatgtagccgaatataggaagtgtgccaaagacttcaagattccaatggtattacatctttttgatactctgcatgctctttgcaatcttctggtagttgccccagataatttaaagcaagtctgctcaggagaacaacttgctaatctggacaagaatatacttcactccttcgtacaacttcgtgctgattatagatctgcccgccttgctcgacacttcagctgagattgaatttacaaaggaatt

SEQ ID NO: 1240 - protein, 708 aa, Homo sapien
MATTAELFEEPFVADEYIERLVWRTPGGGSRGGPEAFDPKRLLEEFVNHIQELQIMDERIQRKVEKLEQQCQKEAKEFAKKVQELQKSNQVAFQHFQELDEHISYVATKVCHLGDQLEGVNTPRQRAVEAQKLMKYFNEFLDGELKSDVFTNSEKIKEAADIIQKLHLIAQELPFDRFSEVKSKIASKYHDLECQLIQEFTSAQRRGEISRMREVAAVLLHFKGYSHCVDVYIKQCQEGAYLRNDIFEDAGILCQRVNKQVGDIFSNPETVLAKLIQNVFEIKLQSFVKEQLEECRKSDAEQYLKNLYDLYTRTTNLSSKLMEFNLGTDKQTFLSKLIKSIFISYLENYIEVETGYLKSRSAMILQRYYDSKNHQKRSIGTGGIQDLKERIRQRTNLPLGPSIDTHGETFLSQEVVVNLLQETKQAFERCHRLSDPSDLPRNAFRIFTILVEFLCIEHIDYALETGLAGIPSSDSRNANLYFLDVVQQANTIFHLFDKQFNDHLMPLISSSPKLSECLQKKKEIIEQMEMKLDTGIDRTLNCMIGQMKHILAAEQKKTDFKPEDENNVLIQYTNACVKVCAYVRKQVEKIKNSMDGKNVDTVLMELGVRFHRLIYEHLQQYSYSCMGGMLAICDVAEYRKCAKDFKIPMVLHLFDTLHALCNLLVVAPDNLKQVCSGEQLANLDKNILHSFVQLRADYRSARLARHFS

SEQ ID NO: 1241 - DNA, 3052 bp, Homo sapien
ggatgaaaacatccccagcatggagatgtgtgaccagagacacaatatcaccatgtgcccgctttgcgacaagacctgcagctactggaagatgagctcagcctgcgccacggcccgcgccagccacctcttcgacaaccccgccacggtcttcttctctgtcttcatggccctctgggctgccaccttcatggagcactggaagcggaaacagatgcgactcaactaccgctgggacctcacgggctttgaagaggaagaggaggctgtcaaggatcatcctagagctgaatacgaagccagagtcttggagaagtctctgaagaaagagtccagaaacaaagagactgacaaagtgaagctgacatggagagatcggttcccagcctacctcactaacttggtctccatcatcttcatgattgcagtgacgtttgccatcgtcctcggcgtcatcatctacaggatctccatggccgccgccttggccatgaactcctccccctccgtgcggtccaacatccgggtcacagtcacagccaccgcggtcatcatcaacctagtggtcatcatcctcctggacgaggtgtatggctgcatagcccgatggctcaccaagatcgaggtcccaaagacggagaaaagctttgaggagaggctgatcttcaaggctttcctgctgaagtttgtgaattcctacacccccatcttttacgtggcgttcttcaaaggccggtttgttggacgcccgggcgactacgtgtacattttccgttccttccgaatggaagagtgtgcgccagggggctgcctgatggagctatgcatccagctcagcatcatcatgctggggaaacagctgatccagaacaacctgttcgagatcggcatcccgaagatgaagaagctcatccgctacctgaagctgaagcagcagagcccccctgaccacgaggagtgtgtgaagaggaaacagcggtacgaggtggattacaacctggagcccttcgcgggcctcaccccagagtacatggaaatgatcatccagtttggcttcgtcaccctgtttgtcgcctccttccccctggccccactgtttgcgctgctgaacaacatcatcgagatccgcctggacgccaaaaagtttgtcactgagctccgaaggccggtagctgtcagagccaaagacatcggaatctggtacaatatcctcagaggcattgggaagcttgctgtcatcatcaatgccttcgtgatctccttcacgtctgacttcatcccgcgcctggtgtacctctacatgtacagtaagaacgggaccatgcacggcttcgtcaaccacaccctctcctccttcaacgtcagtgacttccagaacggcacggcccccaatgaccccctggacctgggctacgaggtgcagatctgcaggtataaagactaccgagagccgccgtggtcggaaaacaagtacgacatctccaaggacttctgggccgtcctggcagcccggctggcgtttgtcatcgtcttccagaacctggtcatgttcatgagcgactttgtggactgggtcatcccggacatccccaaggacatcagccagcagatccacaaggagaaggtgctcatggtggagctgttcatgcgggaggagcaagacaagcagcagctgctggaaacctggatggagaaggagcggcagaaggacgagccgccgtgcaaccaccacaacaccaaagcctgcccagacagcctcggcagcccagcccccagccatgcctaccacgggggcgtcctgtagctatgccagcggggctgggcaggccagccgggcatcctgaccgatgggcaccctctcccagggcaggcggcttcccgctcccaccagggcccggtgggtcctgggttttctgcaaacatggaggaccactttctgataggacattttcctttcttctttctgttttctttcccttgtttttgcacaaagccattatgcagggaatattttttaatctgtagtattcaagatgaatcaaaatgatggctggtaatacggcaataaggtagcaaaggcaggtgctttgcagaaagaatgcttggaaacttgagtctccctagaggtgaaaagtgagcagaggcccctagaaaccctcctctgaatcctcctaattccttaagatagatgcaaaatggtaagccgaggcatcgcgcaaaagctggtgcgatgcttcagggaaaatggaaaacccacgcaagaataatgattgattccggttccaaaaggtgtcacctacctgtttcagaaaagttagactttccatcgccttttccttccatcagttgagtggctgagagagaagtgcctcatccctgagccacacagggggcgtgggagcatcccagttatccctggaaagctagaaggggacagaggtgtccctgattaagcaggaaacagcacccttggcgtccccagcaggctccccactgtcagccacacacctgcccccatcacaccaagccgacctcagagttgttcatcttccttatgggacaaaaccggttgaccagaaaatgggcagagagagatgacctcggaagcatttccacagatggtgtcagggtttcaagaagtcttagggcttccaggggtcccctggaagctttagaatatttatgggtttttttttcaaatatcaattatatggtagattgaggattttttttctgtagctcaaaggtggagggagtttattagttaaccaaatatcgttgagaggaatttaaaatactgttactaccaaagatttttattaataaaggcttatattttggtaacacttctctatatttttactcacaggaatgtcactgttggacaattattttaaaagtgtataaaaccaagtctcataaatgatatgagtgatctaaatttgcagcaatgatactaaacaactctctgaaatttctcaagcaccaagagaaacatcattttagcaaaggccaggaggaaaaatagaaataaatttgtcttgaagatctc

SEQ ID NO: 1242 - protein, 594 aa, Homo sapien
MEMCDQRHNITMCPLCDKTCSYWKMSSACATARASHLFDNPATVFFSVFMALWAATFMEHWKRKQMRLNYRWDLTGFEEEEEAVKDHPRAEYEARVLEKSLKKESRNKETDKVKLTWRDRFPAYLTNLVSIIFMIAVTFAIVLGVIIYRISMAAALAMNSSPSVRSNIRVTVTATAVIINLVVIILLDEVYGCIARWLTKIEVPKTEKSFEERLIFKAFLLKFVNSYTPIFYVAFFKGRFVGRPGDYVYIFRSFRMEECAPGGCLMELCIQLSIIMLGKQLIQNNLFEIGIPKMKKLIRYLKLKQQSPPDHEECVKRKQRYEVDYNLEPFAGLTPEYMEMIIQFGFVTLFVASFPLAPLFALLNNIIEIRLDAKKFVTELRRPVAVRAKDIGIWYNILRGIGKLAVIINAFVISFTSDFIPRLVYLYMYSKNGTMHGFVNHTLSSFNVSDFQNGTAPNDPLDLGYEVQICRYKDYREPPWSENKYDISKDFWAVLAARLAFVIVFQNLVMFMSDFVDWVIPDIPKDISQQIHKEKVLMVELFMREEQDKQQLLETWMEKERQKDEPPCNHHNTKACPDSLGSPAPSHAYHGGVL

SEQ ID NO: 1243 - DNA, 2697 bp, Homo sapien
atataaaggcgccgccgtccttgcccccaggactcggccccatggggacgccgccggccgccgctggcgcatggcgggtaggagctgtggcgcggggccttccaggagtctgagctatgagtggcccctgtggagagaagcctgtcctggaagccagccccaccatgagtctgtgggaatttgaggacagccacagccgtcagggcaccccaaggccgggtcaagagctggccgctgaggaggcctcggccctggaactgcagatgaaggtggacttcttccggaagctgggctattcatccacggagatccacagcgtcctgcagaagctgggcgtccaggcagacaccaacacggtgctgggtgagctggtgaaacacgggacagccaccgagcgggagcgccagacctcaccggacccctgccctcagctccctctagtcccgcggggtggtggcacccctaaggctcccaacctggagcctccactcccagaagaggaaaaggagggcagcgacctgagaccagtggtcatcgatgggagcaacgtggccatgagccatgggaacaaggaggtcttctcctgccggggcatcctgctggcagtgaactggtttctggagcggggccacacagacatcacagtgtttgtgccatcctggaggaaggagcagcctcggcccgacgtgcccatcacagaccagcacatcctgcgggaactggagaagaagaagatcctggtgttcacaccatcacgacgcgtgggtggcaagcgggtggtgtgctatgacgacagattcattgtgaagctggcctacgagtctgacgggatcgtggtttccaacgacacataccgtgacctccaaggcgagcggcaggagtggaagcgcttcatcgaggagcggctgctcatgtactccttcgtcaatgacaagtttatgccccctgatgacccactgggccggcacgggcccagcctggacaacttcctgcgtaagaagccactcactttggagcacaggaagcagccgtgtccctatggaaggaaatgcacctatgggatcaagtgccgattcttccacccagagcggccaagctgcccccagcgctctgtggcagatgagctccgtgccaatgctctcctctcaccccccagagccccaagcaaggacaaaaatggccggcggccttcaccttcatcccagtccagctctctgctaacagagagtgagcagtgcagcctggatgggaagaagctgggggcccaggcatccccagggtcccgccaagagggtctaacacagacctatgccccatcaggcaggagcctcgcacctagcgggggcagtggcagcagctttgggcccacagactggctcccacagacgctggactcactcccgtacgtctcccaggattgcctggactcgggcattggctccctggagagccagatgtcggaactttggggggttcgaggaggaggccctggtgagccgggcccaccccgagccccttacacgggctacagtccctatggatctgagctcccagccaccgcagccttctctgcctttggccgggccatgggtgctggccacttcagtgtccctgccgactacccacccgcgccccctgcctttccacctcgagagtactggtctgaaccatacccactgcccccacccacatcagtccttcaggagcccccagtgcagagcccaggggctggcaggagcccgtggggcagggcagacagcctggccaaggagcaggccagcgtgtatactaagctgtgtggtgtgtttcccccgcacctggtggaggctgtgatggggcgcttcccacagctcctggacccccagcagctggctgccgagatcctctcctacaagtcccagcaccccagtgagtaagctgcctgtggctggcaagggcagcacccccagcctccaagggccgtcaggctgggctttgggccattgagcagcccattcccagccctgaggcccaccccagaggctggacagagggaggattcaagtcgggaaggaaacccacaaaccaaagatactgtaggattggttctggcccatgcagcacctctagctgtctgcctcagtgggtcagaagcgatcaccctgttgatacacattgtatctctgtagtttaaggagacgctgccggtaacggcgtcggtccgtggctgaggcccaaaccgtcttttctctcagagggtggggagggaggtgggggcagcagaggcctgggctgggtgccctgtgcacgccaccccacttccgccctacccctgggacgttggccttggctggctagttgggcaccgtgtgcctgccctccaagggcctcctctacgccaatgaggcctcatctgtgctctcgctgggcacgtggcttcatgtcagtaagcaagatgcttcttaataacccaccttctgccccactctattccttatcctgctgcccctgtaggggtcaagggccctccgtctacaccctcttcttctcctccatcctttattcagagtcatctcgcccttccccatgggtgggggaacctgtgtttgtttgtgtgcacatgtaaattttaaatattttaagcagaaagtccttacctcctgtaacacatcaataaagtacaatcattgtgagccctttcaaaaaaaaaaaaaaaaa

SEQ ID NO: 1244 - protein, 599 aa, Homo sapien
MSGPCGEKPVLEASPTMSLWEFEDSHSRQGTPRPGQELAAEEASALELQMKVDFFRKLGYSSTEIHSVLQKLGVQADTNTVLGELVKHGTATERERQTSPDPCPQLPLVPRGGGTPKAPNLEPPLPEEEKEGSDLRPVVIDGSNVAMSHGNKEVFSCRGILLAVNWFLERGHTDITVFVPSWRKEQPRPDVPITDQHILRELEKKKILVFTPSRRVGGKRVVCYDDRFIVKLAYESDGIVVSNDTYRDLQGERQEWKRFIEERLLMYSFVNDKFMPPDDPLGRHGPSLDNFLRKKPLTLEHRKQPCPYGRKCTYGIKCRFFHPERPSCPQRSVADELRANALLSPPRAPSKDKNGRRPSPSSQSSSLLTESEQCSLDGKKLGAQASPGSRQEGLTQTYAPSGRSLAPSGGSGSSFGPTDWLPQTLDSLPYVSQDCLDSGIGSLESQMSELWGVRGGGPGEPGPPRAPYTGYSPYGSELPATAAFSAFGRAMGAGHFSVPADYPPAPPAFPPREYWSEPYPLPPPTSVLQEPPVQSPGAGRSPWGRADSLAKEQASVYTKLCGVFPPHLVEAVMGRFPQLLDPQQLAAEILSYKSQHPSE

SEQ ID NO: 1245 - DNA, 3477 bp, Homo sapien
cttactgctttgtgaggttgtgagtggccaccactgaaggtctttgagaagaggccagacgctgctgtagccaggcctgtcttaagaggacttgtgcttccagggacccaggcaggatgatggcgcagctcttcctactccaagccaacgctgtccttcccctttcccatgaaatcaaggtcaagaggcaaataagactccctgctccactctaccccccagagagaaatgattctcgctcctttcagatcccccaggatctgagggagaaaggatgggaggaggggcagcagcatttcgctggaaaggcagcagatgcttttccagccccggttcagctggaaggcttggaggccggccagaccactctggcgtctcctgaagtgggtccctggagaccgaagaggctcagtggagtctgtctgttgtcagcactgctgcctgatccctgcaagacaaatggcactttccttcttcagaagcatcatctgccttcattattagcagtaatattattcccagttattattcttaccggtgccagttttgcacatctttttgttgctctatttgtgtctcatttacttctcaaattgcccctgggggcaggaatgaggatgcagagagatgcacgttaattactgtcgcatttttctgtggagaaaactgaggccagggctgaacgctcacagctaaggagctgtgattcagacccagttctgtcagctctagaggcaccctgcatcatgcccaccagggtgatccccctgggatggaccatctcgggatatgaggcctcggaggctggggttgagatttggtcctgaagagcttatagccagattgccacattcaagtgtaagtccaggaaaggggcaggcggcagtgcacagggatttatcagttccagaacctcacagtgataagaggctttagagagcatctaatcgagacctttaatttttcggggagagcagctgaggccgtgtggaaaattagtggagagctgacaagtgtctgggctcctggcccaggggtccgtggtccagcacgttgtgcgttcagtgggaagcaaagggcttgcccgggattacctgccccagccccgaggtgggttgtgctccctgcagctgccatcggcccgctttgcttcgtcctggcagatgcccagtgattgtccccgagcaagtgccagggttgggctgagctgctatgacagggaggcccagggagttctgctcagggagccaaagggaacagccagatcctgaatgttctatgttcacctgccccagccccacccaccctggcccactccacaggcccctgaccatggtcactcacggagagggatggaggagaaggtggttgaactgagtactgagaacccagaggacagagcccacagcttccaagcaggaaaagggacctctctgaaaaatctggataaccagaattatcacagcaccttctcattcccagcgcgtccttctgagctcagaccttgagcatttactgggtttctttttgaggaagagggaaagtgacaaaggacaaaacaatgcaaatcttcatgactgaagacgatcaaagactccctggagcgagaaaacagttactgccagaagcagaatggaagagccaaaaagtacacaaaatggacgccataaattctgaaataaaagtgtatgatgtgttctgagtcactgtagaagtcatgcatttattatcaagatagaaaagagcagagaatgacgtggacattggtcctcggagaggctgcataggtggtgcggtccccggggattctggatgctggtcttttgaccgtggcggcagcctcgcgcctgcccggatggctccatccagacatttggcaaggctgtcatctgctcttgggtccctttttcaagctgatttcctgcctccccaagaggaggtttgagccccattctgccttggaaataaatcctgacagatgtgcacagcatatttgcagggaatttgcaggcctcgattattgggggaatcagagcccattccacaccgagccccatccacgtggctgagcaacacccctgtgtcccctgtatctgtctcactggctgtctttctgccagtttcttaaagaaccacaccattactgcgtttgccgttcgaagcgttgtcccaacaatgcagatggttctgacaagggctctatatgctggcagaagggagcttccaaccttttaacttgaggaaaatgaatctctgagaggcttgagagtgttgccaggtggagcttttcaggagacaggggtcttgagcccaggacaactaactatcgagttttcactaggagacttagtggtggctttcatgaggccagtcgttctcaaggaagggctgggggccatcagcaatgtctggagacatttttgattctcacagcttggtggggactgctattggtatctcatgggtggaggccagggatgccaccgaacatcctacaatgcacagggcagccccccacaaataagaattatccagccccaaaatgccaatagtgccgaggtcaggggaccctgtgctggccatcctatctctgattctgaaactatgcatgctttccacttttccccatttgtgagtcattgagtaaattaaagctcttctgagcagcagcagtgatcatggtcactgccctgagttcaaataatgcgagctgaggacagtgatctgcaactcccagcatgtcatgtggtctcttagaaatccatgtgactgtttccaccatcttgggcatttgtggggacccccagactggagggagaaagccctacaaagtggatgggagtgtggggctgaacttttccctacccttaactttgtgtctctgggacctccagggacctggcccctcaccaatgcatatgaagagtatgcttggggaagagcttaggaatggggtgggcatgggactgctgggtagcagcctttgagcaaatctgcatcttctcttatttctgacctttttccacgtgcccagtcctatttctgccagttgaaggcatactaatattctttatactatttaatcttttgcagaaaccttactattataacttgctactctccagataccaattcttcatgccgagagcatcggaaatgtttttgtgtcttactgatgttttcatgatcaacttgtaaatgtaagcagttgacttcataaaaggtattttaactattcttggagtcctttgctacccaagcacctggtttcaccatgcgatcactgacttctctacagtgaagactctttcttaatataggatttcgctgtgctcttttgattaaaaatatctaaccttaaaagacgtaaaaatgtatctgtgaaatctcactttgttagcgttgctgctgttgtcattttctattatgataactgaaaagagaaaagaagaaaacatgaaaaaaaaaaaaaaaaaa

SEQ ID NO: 1246 - protein, 173 aa, Homo sapien
MMAQLFLLQANAVLPLSHEIKVKRQIRLPAPLYPPERNDSRSFQIPQDLREKGWEEGQQHFAGKAADAFPAPVQLEGLEAGQTTLASPEVGPWRPKRLSGVCLLSALLPDPCKTNGTFLLQKHHLPSLLAVILFPVIILTGASFAHLFVALFVSHLLLKLPLGAGMRMQRDAR

SEQ ID NO: 1247 - DNA, 885 bp, Homo sapien
gacttttcccacacactggattgtgaggctcttcttaaaagtataatggcatcttgtgaatcctataagcagtctttatgtctcttaacattcacacctactttttaaaaacaaatattattactatttttattattgtttgtcctttataaattttcttaaagattaagaaaatttaagaccccattgagttactgtaatgcaattcaactttgagttatcttttaaatatgtcttgtatagttcatattcatggctgaaacttgaccacactattgctgattgtatggttttcacctggacaccgtgtagaatgcttgattacttgtactcttcttatgctaatatgctctgggctggagaaatgaaatcctcaagccatcaggatttgctatttaagtggcttgacaactgggccaccaaagaacttgaacttcaccttttaggatttgagctgttctggaacacattgctgcactttggaaagtcaaaatcaagtgccagtggcgccctttccatagagaatttgcccagctttgctttaaaagatgtcttgttttttatatacacataatcaataggtccaatctgctctcaaggccttggtcctggtgggattccttcaccaattactttaattaaaaatggctgcaactgtaagaacccttgtctgatatatttgcaactatgctcccatttacaaatgtaccttctaatgctcagttgccaggttccaatgcaaaggtggcgtggactccctttgtgtgggtggggtttgtgggtagtggtgaaggaccgatatcagaaaaatgccttcaagtgtactaatttattaataaacattaggtgtttgttaaaaaaaaaaaaaaaaaaaaaaaaaaaaaa

SEQ ID NO: 1248 - protein, 124 aa, Homo sapien
MQFNFELSFKYVLYSSYSWLKLDHTIADCMVFTWTPCRMLDYLYSSYANMLWAGEMKSSSHQDLLFKWLDNWATKELELHLLGFELFWNTLLHFGKSKSSASGALSIENLPSFALKDVLFFIYT

SEQ ID NO: 1249 - DNA, 979 bp, Homo sapien
ctggtctcccgcgtccatcggtccattcctgcgtcgttctgtccttccgaacgcacacttcaggagcagccgcgagggtggcatggcagcgagcacagacatggctgggctggaggagagcttccgcaagtttgccatccatggtgaccccaaggccagtgggcaagagatgaatggcaagaactgggccaagctgtgcaaggactgcaaggtggctgacggaaagtccgtgacagggaccgatgtggacatcgtcttctccaaagtcaaggggaagtctgctcgggtcatcaactatgaggagttcaagaaggccctggaagagctggcgaccaagagattccagggcaagagcaaggaggaggccttcgatgccatctgccagctggtggcaggcaaagagccagccaatgtgggcgtcactaaagcaaaaacagggggtgctgtagaccggctgacggacaccagcagatacacgggctcccacaaggagcgcttcgatgagagcggcaagggcaagggcattgcgggacggcaggacatcctggacgacagtggctacgtgagcgcctacaagaatgcaggcacctacgatgccaaggtgaagaagtgaggcttgggaagaccgccctgccaagtgcggctgcccctgccagaggctcaggcctgggtctaaggggcacgtggagcaagagatcctggtcccctccctgctggacctgccacccagagcttcctgcctagtcccactgggctggcccaccaggcctctgacccaggctgctctgcggccccttcctcctcctcttcctgctccaacttctgtccacctggggacagtctgtgcctgtagcctcatgaccccaacccagcccaggcatggctaacccctgactgcttgcctcatatttaagctgctgctctggccaagtgcctaattttaacccagacctcaataaagacaccttttgtaccaaaa

SEQ ID NO: 1250 - protein, 176 aa, Homo sapien
MAASTDMAGLEESFRKFAIHGDPKASGQEMNGKNWAKLCKDCKVADGKSVTGTDVDIVFSKVKGKSARVINYEEFKKALEELATKRFQGKSKEEAFDAICQLVAGKEPANVGVTKAKTGGAVDRLTDTSRYTGSHKERFDESGKGKGIAGRQDILDDSGYVSAYKNAGTYDAKVKK

SEQ ID NO: 1251 - DNA, 1780 bp, Homo sapien
ggcgctcgcagagccggaaagaagtgctgtaagggacgctcgggggacgctgttcctgaggtgtcgccgcctccctgtcctcgccctccgcggtgggggagaaacccaggagcgaagcccagagcccgcggcgcggccggcggacgaacgagcgcgcagcagccggtgcgcggccgcggcgagggcgggggaagaaaaacaccctgtttcctctccggcccccaccgcggatcatgtaccaggattatcccgggaactttgacacctcgtcccggggcagcagcggctctcctgcgcacgccgagtcctactccagcggcggcggcggccagcagaaattccgggtagatatgcctggctcaggcagtgcattcatccccaccatcaacgccatcacgaccagccaggacctgcagtggatggtgcagcccacagtgatcacctccatgtccaacccataccctcgctcgcacccctacagccccctgccgggcctggcctctgtccctggacacatggccctcccaagacctggcgtgatcaagaccattggcaccaccgtgggccgcaggaggagagatgagcagctgtctcctgaagaggaggagaagcgtcgcatccggcgggagaggaacaagctggctgcagccaagtgccggaaccgacgccgggagctgacagagaagctgcaggcggagacagaggagctggaggaggagaagtcaggcctgcagaaggagattgctgagctgcagaaggagaaggagaagctggagttcatgttggtggctcacggcccagtgtgcaagattagccccgaggagcgccgatcgcccccagcccctgggctgcagcccatgcgcagtgggggtggctcggtgggcgctgtagtggtgaaacaggagcccctggaagaggacagcccctcgtcctcgtcggcggggctggacaaggcccagcgctctgtcatcaagcccatcagcattgctgggggcttctacggtgaggagcccctgcacacccccatcgtggtgacctccacacctgctgtcactccgggcacctcgaacctcgtcttcacctatcctagcgtcctggagcaggagtcacccgcatctccctccgaatcctgctccaaggctcaccgcagaagcagtagcagcggggaccaatcatcagactccttgaactcccccactctgctggctctgtaacccagtgcacctccctccccagctccggagggggtcctcctcgctcctccttcccagggaccagcaccttcaagcgctccagggccgtgagggcaagagggggacctgccaccagggagcttcctggctctgggggacccaggtgggacttagcagtgagtattggaagacttgggttgatctcttagaagccatgggacctcctccctcattcatcttgcaagcaaatcccatttcttgaaaagccttggagaactcggtttggtagacttggacatctctctggcttctgaagagcctgaagctggcctggaccattcctgtccctttgttaccatactgtctctggagtgatggtgtccttccctgccccaccacgcatgctcagtgccttttggtttcaccttccctcgacttgaccctttcctcccccagcgtcagtttcactccctcttggtttttatcaaatttgccatgacatttcatctgggtggtctgaatattaaagctcttcatttctggaaaaaaaaaaaaaaaaaaaaaaaaaaaaaaaaaaaaaaaaaaaa

SEQ ID NO: 1252 - protein, 326 aa, Homo sapien
MYQDYPGNFDTSSRGSSGSPAHAESYSSGGGGQQKFRVDMPGSGSAFIPTINAITTSQDLQWMVQPTVITSMSNPYPRSHPYSPLPGLASVPGHMALPRPGVIKTIGTTVGRRRRDEQLSPEEEEKRRIRRERNKLAAAKCRNRRRELTEKLQAETEELEEEKSGLQKEIAELQKEKEKLEFMLVAHGPVCKISPEERRSPPAPGLQPMRSGGGSVGAVVVKQEPLEEDSPSSSSAGLDKAQRSVIKPISIAGGFYGEEPLHTPIVVTSTPAVTPGTSNLVFTYPSVLEQESPASPSESCSKAHRRSSSSGDQSSDSLNSPTLLAL

SEQ ID NO: 1253 - DNA, 3065 bp, Homo sapien
tagttattaaagttcctatgcagctccgcctccgtccggcctcatttcctcaaaaaatccctgctttccccgctcgccacgccctcctgctacccggctttaaagctagtgaggcacagcctgcggggaacgtagctagctgcaagcagaggccggcatgaccaccgagcagcgacgcagcctgcaagccttccaggattatatccggaagaccctggaccctacctacatcctgagctacatggccccctggtttagggaggaagaggtgcagtatattcaggctgagaaaaacaacaagggcccaatggaggctgccacactttttctcaagttcctgttggagctccaggaggaaggctggttccgtggctttttggatgccctagaccatgcaggttattctggactttatgaagccattgaaagttgggatttcaaaaaaattgaaaagttggaggagtatagattacttttaaaacgtttacaaccagaatttaaaaccagaattatcccaaccgatatcatttctgatctgtctgaatgtttaattaatcaggaatgtgaagaaattctacagatttgctctactaaggggatgatggcaggtgcagagaaattggtggaatgccttctcagatcagacaaggaaaactggcccaaaactttgaaacttgctttggagaaagaaaggaacaagttcagtgaactgtggattgtagagaaaggtataaaagatgttgaaacagaagatcttgaggataagatggaaacttctgacatacagattttctaccaagaagatccagaatgccagaatcttagtgagaattcatgtccaccttcagaagtgtctgatacaaacttgtacagcccatttaaaccaagaaattaccaattagagcttgctttgcctgctatgaaaggaaaaaacacaataatatgtgctcctacaggttgtggaaaaacctttgtttcactgcttatatgtgaacatcatcttaaaaaattcccacaaggacaaaaggggaaagttgtcttttttgcgaatcagatcccagtgtatgaacagcagaaatctgtattctcaaaatactttgaaagacatgggtatagagttacaggcatttctggagcaacagctgagaatgtcccagtggaacagattgttgagaacaatgacatcatcattttaactccacagattcttgtgaacaaccttaaaaagggaacgattccatcactatccatctttactttgatgatatttgatgaatgccacaacactagtaaacaacacccgtacaatatgatcatgtttaattatctagatcagaaacttggaggatcttcaggcccactgccccaggtcattgggctgactgcctcggttggtgttggggatgccaaaaacacagatgaagccttggattatatctgcaagctgtgtgcttctcttgatgcgtcagtgatagcaacagtcaaacacaatctggaggaactggagcaagttgtttataagccccagaagtttttcaggaaagtggaatcacggattagcgacaaatttaaatacatcatagctcagctgatgagggacacagagagtctggcaaagagaatctgcaaagacctcgaaaacttatctcaaattcaaaatagggaatttggaacacagaaatatgaacaatggattgttacagttcagaaagcatgcatggtgttccagatgccagacaaagatgaagagagcaggatttgtaaagccctgtttttatacacttcacatttgcggaaatataatgatgccctcattatcagtgagcatgcacgaatgaaagatgctctggattacttgaaagacttcttcagcaatgtccgagcagcaggattcgaagagattgagcaagatcttactcagagatttgaagaaaagctgcaggaactagaaagtgtttccagggatcccagcaatgagaatcctaaacttgaagacctctgcttcatcttacaagaagagtaccacttaaacccagagacaataacaattctctttgtgaaaaccagagcacttgtggacgctttaaaaaattggattgaaggaaatcctaaactcagttttctaaaacctggcatattgactggacgtggcaaaacaaatcagaacacaggaatgaccctcccggcacagaagtgtatattggatgcattcaaagccagtggagatcacaatattctgattgccacctcagttgctgatgaaggcattgacattgcacagtgcaatcttgtcatcctttatgagtatgtgggcaatgtcatcaaaatgatccaaaccagaggcagaggaagagcaagaggtagcaagtgcttccttctgactagtaatgctggtgtaattgaaaaagaacaaataaacatgtacaaagaaaaaatgatgaatgactctattttacgccttcagacatgggacgaagcagtatttagggaaaagattctgcatatacagactcatgaaaaattcatcagagatagtcaagaaaaaccaaaacctgtccctgataaggaaaataaaaaactgctctgcagaaagtgcaaagccttggcatgttacacagctgacgtaagagtgatagaggaatgccattacactgtgcttggagatgcttttaaggaatgctttgtgagtagaccacatcccaagccaaagcagttttcaagttttgaaaaaagagcaaagatattctgtgcccgacagaactgcagccatgactggggaatccatgtgaagtacaagacatttgagattccagttataaaaattgaaagttttgtggtggaggatattgcaactggagttcagacactgtactcgaagtggaaggactttcattttgagaagataccatttgatccagcagaaatgtccaaatgatatcaggtcctcaatcttcagctacagggaatgagtaactttgagtggagaagaaacaaacatagtgggtataatcatggatcgcttgtacccctgtgaaaatatattttttaaaaataaaaaaaaaaaa

SEQ ID NO: 1254 - protein, 925 aa, Homo sapien [sequence omitted]

SEQ ID NO: 1255 - DNA, 2087 bp, Homo sapien
gttttttaggaagagtgtcccgcagagacccggcgggagctgccaggagctctgggattccagcggctggaagccacctgggaagcctggcctcagtgtggaagagaaggcagcaggattattacagaaccttgtgaagccaacgcgggcagccgccaggagctgcagaccgagaggatctcgtcctttcttgcggcccagggagaccaggcctttcattctgggctcgagaccaacaattcgaattccgaactccccctgcgtgtgggactcaaggttgcccagggctcacctctgatgggtgggcaggtgagcgcttccaacagcttctcgaggctgcactgcagaaatgccaacgaggactggatgtcggcactgtgtccccggctctgggatgtgcccctccaccacctctccatcccagggagccacgacacgatgacgtactgcctgaacaagaagtcccccatttctcacgaggagtcccggctgctgcagctgctgaacaaggccttgccctgcatcacgcgccctgtcgtgctgaaatggtccgtcacccaggcactggacgtcacagagcagctggatgccggggtgcggtacctggacctgcggatagcccacatgctggagggctcggagaagaacctgcactttgtccatatggtgtacacaacggcgctggtggaggacacactcacggaaatctcggagtggctggagcggcatccacgcgaggtggtcatcctggcctgcagaaacttcgaggggctgagcgaggacctgcacgagtacctggtcgcctgtatcaagaacatcttcggggacatgctgtgtcctcgtggggaggtgccgacactgcggcagctgtggtcccggggccaacaggtcatcgtctcctatgaagacgagagctccttgcgccggcaccacgagctgtggccaggagtcccctactggtggggaaacagggtgaagaccgaggccctcatccgatacctggagaccatgaagagctgcggccgcccaggagggttgttcgtggccggcatcaacctcacggagaacctgcagtacgttctggcgcacccgtccgagtccctggagaagatgacgctgcccaaccttccgcggctgagcgcgtgggtccgagagcagtgcccggggccgggttcacggtgcaccaacatcatcgcgggggacttcatcggcgcagacggcttcgtcagtgacgtcatcgcgctcaatcagaagctgctgtggtgctgacgggacccttctgaagttcgggacgcggcggctgcagtttcacccccgaatttccaaatggagtttcgctctcgttgccgaggctggagtgtagtagtgtgatcctggctcactgcaacctccacctcccgggttccagcaaattctcctgcctcagcctcccaagtagctgggattgcaggcgcccgccaccacgcccggataatttttgtgtgtttagcagagacggggtttcaccatgttggccaggctggtctcgatctcctgacctcaggtgatccacccgcctcggcctcccaaagtgctgggatgacaggcgtgagccaccgcgcccggcctatacctcattttctacatgtcgcttgttggagctgctggttcaagttcccagccagccaatggatgccagcaccatttttactcccctttcccaagcaaatcgtgcatttttgtctaacgagagacatcagtttctcaggatgatcctcaagaacgttatggagtccatgttgcaataggttctctttgggacctaatgactcattttccaaaaatccgcttctacttttggtacccggttgctacggtgaaatgaaggtgccccgcatccagaaagacgcactcctggaccacaaccggcggctacctcagccccacggctctgcaggatcagggctcgggcaggccccgcggagatgaagaatttgcagggagcctccctgacttccgtcggctgtgaatccttgtctgtcaggggcgtatccacaaaatcaccaaattcatacagatcgtttaaataaatgaacatcattaaagtc

SEQ ID NO: 1256 - protein, 323 aa, Homo sapien
MGGQVSASNSFSRLHCRNANEDWMSALCPRLWDVPLHHLSIPGSHDTMTYCLNKKSPISHEESRLLQLLNKALPCITRPVVLKWSVTQALDVTEQLDAGVRYLDLRIAHMLEGSEKNLHFVHMVYTTALVEDTLTEISEWLERHPREVVILACRNFEGLSEDLHEYLVACIKNIFGDMLCPRGEVPTLRQLWSRGQQVIVSYEDESSLRRHHELWPGVPYWWGNRVKTEALIRYLETMKSCGRPGGLFVAGINLTENLQYVLAHPSESLEKMTLPNLPRLSAWVREQCPGPGSRCTNIIAGDFIGADGFVSDVIALNQKLLWC

SEQ ID NO: 1257 - DNA, 2104 bp, Homo sapien
cccaatcactcctggaatacacagagagaggcagcagcttgctcagcggacaaggatgctgggcgtgagggaccaaggcctgccctgcactcgggcctcctccagccagtgctgaccagggacttctgacctgctggccagccaggacctgtgtggggaggccctcctgctgccttggggtgacaatctcagctccaggctacagggagaccgggaggatcacagagccagcatgttacaggatcctgacagtgatcaacctctgaacagcctcgatgtcaaacccctgcgcaaaccccgtatccccatggagaccttcagaaaggtggggatccccatcatcatagcactactgagcctggcgagtatcatcattgtggttgtcctcatcaaggtgattctggataaatactacttcctctgcgggcagcctctccacttcatcccgaggaagcagctgtgtgacggagagctggactgtcccttgggggaggacgaggagcactgtgtcaagagcttccccgaagggcctgcagtggcagtccgcctctccaaggaccgatccacactgcaggtgctggactcggccacagggaactggttctctgcctgtttcgacaacttcacagaagctctcgctgagacagcctgtaggcagatgggctacagcagcaaacccactttcagagctgtggagattggcccagaccaggatctggatgttgttgaaatcacagaaaacagccaggagcttcgcatgcggaactcaagtgggccctgtctctcaggctccctggtctccctgcactgtcttgcctgtgggaagagcctgaagaccccccgtgtggtgggtggggaggaggcctctgtggattcttggccttggcaggtcagcatccagtacgacaaacagcacgtctgtggagggagcatcctggacccccactgggtcctcacggcagcccactgcttcaggaaacataccgatgtgttcaactggaaggtgcgggcaggctcagacaaactgggcagcttcccatccctggctgtggccaagatcatcatcattgaattcaaccccatgtaccccaaagacaatgacatcgccctcatgaagctgcagttcccactcactttctcaggcacagtcaggcccatctgtctgcccttctttgatgaggagctcactccagccaccccactctggatcattggatggggctttacgaagcagaatggagggaagatgtctgacatactgctgcaggcgtcagtccaggtcattgacagcacacggtgcaatgcagacgatgcgtaccagggggaagtcaccgagaagatgatgtgtgcaggcatcccggaagggggtgtggacacctgccagggtgacagtggtgggcccctgatgtaccaatctgaccagtggcatgtggtgggcatcgttagctggggctatggctgcgggggcccgagcaccccaggagtatacaccaaggtctcagcctatctcaactggatctacaatgtctggaaggctgagctgtaatgctgctgcccctttgcagtgctgggagccgcttccttcctgccctgcccacctggggatcccccaaagtcagacacagagcaagagtccccttgggtacacccctctgcccacagcctcagcatttcttggagcagcaaagggcctcaattcctgtaagagaccctcgcagcccagaggcgcccagaggaagtcagcagccctagctcggccacacttggtgctcccagcatcccagggagagacacagcccactgaacaaggtctcaggggtattgctaagccaagaaggaactttcccacactactgaatggaagcaggctgtcttgtaaaagcccagatcactgtgggctggagaggagaaggaaagggtctgcgccagccctgtccgtcttcacccatccccaagcctactagagcaagaaaccagttgtaatataaaatgcactgccctactgttggtatgactaccgttacctactgttgtcattgttattacagctatggccactattattaaagagctgtgtaacatcaaaaaaaaaaaaaaaaaaaaa

SEQ ID NO: 1258 - protein, 437 aa, Homo sapien
MLQDPDSDQPLNSLDVKPLRKPRIPMETFRKVGIPIIIALLSLASIIIVVVLIKVILDKYYFLCGQPLHFIPRKQLCDGELDCPLGEDEEHCVKSFPEGPAVAVRLSKDRSTLQVLDSATGNWFSACFDNFTEALAETACRQMGYSSKPTFRAVEIGPDQDLDVVEITENSQELRMRNSSGPCLSGSLVSLHCLACGKSLKTPRVVGGEEASVDSWPWQVSIQYDKQHVCGGSILDPHWVLTAAHCFRKHTDVFNWKVRAGSDKLGSFPSLAVAKIIIIEFNPMYPKDNDIALMKLQFPLTFSGTVRPICLPFFDEELTPATPLWIIGWGFTKQNGGKMSDILLQASVQVIDSTRCNADDAYQGEVTEKMMCAGIPEGGVDTCQGDSGGPLMYQSDQWHVVGIVSWGYGCGGPSTPGVYTKVSAYLNWIYNVWKAEL

SEQ ID NO: 1259 - DNA, 1906 bp, Homo sapien
aatctgtggtttttgctcaaaactcagtctatctggatgcgttgaattatagacagatgtctggccgtgctggaagaagaggtcaagacctgatgggagatgtatatttctttgatattccattccccaaaataggaaaactcataaaatccaatgttcctgagctgagaggacacttccctctcagcataaccctggtcctgcgactcatgctgctggcttccaagggagatgacccagaggatgccaaggcaaaggtgctatcagtgctaaagcattcattgctgtccttcaagcaacccagagtcatggacatgttaaaactttacttcctgttttctttgcagttcctggtgaaagagggctatttagatcaagaaggtaatcctatggggtttgctggacttgtgtcacatttgcattatcatgaaccttctaatcttgtttttgtgagttttcttgtaaatggcctcttccatgatctctgtcagccaaccaggaaaggctcaaaacatttttctcaagacgttatggaaaagctagtattagtattggcacatctctttggaagaagatattttccaccaaagttccaggatgcacacttcgagttttatcaatcaaaggtgttccttgatgatctccctgaggattttagtgatgctttagatgaatataacatgaaaattatggaggactttaccactttcctacgaattgtttccaaactggctgatatgaatcaggaatatcaactcccattgtcaaaaatcaaattcacaggtaaagaatgtgaagactctcaactcgtatctcatttgatgagctgcaaggaaggaagagtagcaatttcaccatttgtttgtctgtctgggaactttgatgatgatttgcttcgactagaaactccaaaccatgttactctaggcacaatcggtgtcaatcgctctcaggctccagtgctgttgtcacagaaatttgataaccgaggaaggaaaatgtcgcttaatgcctatgcactggatttctacaaacatggttccttgataggattagtccaggataacaggatgaatgaaggagatgcttattatttgttgaaggattttgcactcaccattaaatctatcagtgtttccttgcgtgagctatgtgaaaatgaagacgacaacgttgtcttagcctttgaacaactgagtacaactttttgggaaaagttaaacaaagtctaaaaacaaagtctatgcaaaccactcaaaaataattccatagtagtttttcaggtcacgtttttgattcttatgcttcttgccagaaatacattatgataaagtggaaatacattacgatgaagtggaaagagcaaacactttggaatcaaacagagttgcaatcaaacctgccatgttctgtcatgaatactcacaaattatttagtatacctgaatcttggtttctttttataactgagtaataatggttacatctcaggtagtttgaggattgactaaaaaaatgcgagaatgttgtatgtgactgaataacaatttttactctgcgaagccaaagtaaatataatattatcagtaactttatccccagtgtcagtatttataaaatgtttattaaggctagaaaaaatgaatacaatatcctgaaggtgaaatatattctcttcaattagcataaatatgatttacataagttagctatacagctattgagatagtactttctagtaaacttaaactactttttaaacatacattttgtgttgatttaacaaaaatatagagaatgatttgctttattgtaattgtatataagtgactggaaaagcacaaagaaataaagtgggttcgatctgtttaccaaaaaaaaaaaaaaaaaaaaaaaaaaaaaaaaa

SEQ ID NO: 1260 - protein, 391 aa, Homo sapien
MSGRAGRRGQDLMGDVYFFDIPFPKIGKLIKSNVPELRGHFPLSITLVLRLMLLASKGDDPEDAKAKVLSVLKHSLLSFKQPRVMDMLKLYFLFSLQFLVKEGYLDQEGNPMGFAGLVSHLHYHEPSNLVFVSFLVNGLFHDLCQPTRKGSKHFSQDVMEKLVLVLAHLFGRRYFPPKFQDAHFEFYQSKVFLDDLPEDFSDALDEYNMKIMEDFTTFLRIVSKLADMNQEYQLPLSKIKFTGKECEDSQLVSHLMSCKEGRVAISPFVCLSGNFDDDLLRLETPNHVTLGTIGVNRSQAPVLLSQKFDNRGRKMSLNAYALDFYKHGSLIGLVQDNRMNEGDAYYLLKDFALTIKSISVSLRELCENEDDNVVLAFEQLSTTFWEKLNKV

SEQ ID NO: 1261 - DNA, 2466 bp, Homo sapien
atctgtgggagcagtttattccagtatcacccagggtgcagccacaccaggactgtgttgaagggtgttttttttcttttaaatgtaatacctcctcatcttttcttcttacacagtgtctgagaacatttacattatagataagtagtacatggtggataacttctacttttaggaggactactctcttctgacagtcctagactggtcttctacactaagacaccatgaaggagtatgtgctcctattattcctggctttgtgctctgccaaacccttctttagcccttcacacatcgcactgaagaatatgatgctgaaggatatggaagacacagatgatgatgatgatgatgatgatgatgatgatgatgatgatgatgaggacaactctctttttccaacaagagagccaagaagccatttttttccatttgatctgtttccaatgtgtccatttggatgtcagtgctattcacgagttgtacattgctcagatttaggtttgacctcagtcccaaccaacattccatttgatactcgaatgcttgatcttcaaaacaataaaattaaggaaatcaaagaaaatgattttaaaggactcacttcactttatggtctgatcctgaacaacaacaagctaacgaagattcacccaaaagcctttctaaccacaaagaagttgcgaaggctgtatctgtcccacaatcaactaagtgaaataccacttaatcttcccaaatcattagcagaactcagaattcatgaaaataaagttaagaaaatacaaaaggacacattcaaaggaatgaatgctttacacgttttggaaatgagtgcaaaccctcttgataataatgggatagagccaggggcatttgaaggggtgacggtgttccatatcagaattgcagaagcaaaactgacctcagttcctaaaggcttaccaccaactttattggagcttcacttagattataataaaatttcaacagtggaacttgaggattttaaacgatacaaagaactacaaaggctgggcctaggaaacaacaaaatcacagatatcgaaaatgggagtcttgctaacataccacgtgtgagagaaatacatttggaaaacaataaactaaaaaaaatcccttcaggattaccagagttgaaatacctccagataatcttccttcattctaattcaattgcaagagtgggagtaaatgacttctgtccaacagtgccaaagatgaagaaatctttatacagtgcaataagtttattcaacaacccggtgaaatactgggaaatgcaacctgcaacatttcgttgtgttttgagcagaatgagtgttcagcttgggaactttggaatgtaataattagtaattggtaatgtccatttaatataagattcaaaaatccctacatttggaatacttgaactctattaataatggtagtattatatatacaagcaaatatctattctcaagtggtaagtccactgacttattttatgacaagaaatttcaacggaattttgccaaactattgatacataagggttgagagaaacaagcatctattgcagtttctttttgcgtacaaatgatcttacataaatctcatgcttgaccattcctttcttcataacaaaaaagtaagatattcggtatttaacactttgttatcaagcacattttaaaaagagctgtactgtaaatggaatgcttgacttagcaaaatttgtgctctttcatttgctgttagaaaaacagaattaacaaagacagtaatgtgaagagtgcattacactattcttattctttagtagcttgggtagtactgtaatatttttaatcatcttaaagtatgatttgatataatcttattgaaattaccttatcatgtcttagagcccgtctttatgtttaaaactaatttcttaaaataaagccttcagtaaatgttcattaccaacttgataaatgctactcataagagctggtttggggctatagcatatgcttttttttttttaattattacctgatttaaaaatctctgtaaaaacgtgtagtgtttcataaaatctgtaactcgcattttaatgatccgctattataagcttttaatagcatgaaaattgttaggctatataacattgccacttcaactctaaggaatatttttgagatatccctttggaagaccttgcttggaagagcctggacactaacaattctacaccaaattgtctcttcaaatacgtatggactggataactctgagaaacacatctagtataactgaataagcagagcatcaaattaaacagacagaaaccgaaagctctatataaatgctcagagttctttatgtatttcttattggcattcaacatatgtaaaatcagaaaacagggaaattttcattaaaaatattggtttgaaaaaaaaaaaaaaaaaa

SEQ ID NO: 1262 - protein, 381 aa, Homo sapien
MKEYVLLLFLALCSAKPFFSPSHIALKNMMLKDMEDTDDDDDDDDDDDDDDDEDNSLFPTREPRSHFFPFDLFPMCPFGCQCYSRVVHCSDLGLTSVPTNIPFDTRMLDLQNNKIKEIKENDFKGLTSLYGLILNNNKLTKIHPKAFLTTKKLRRLYLSHNQLSEIPLNLPKSLAELRIHENKVKKIQKDTFKGMNALHVLEMSANPLDNNGIEPGAFEGVTVFHIRIAEAKLTSVPKGLPPTLLELHLDYNKISTVELEDFKRYKELQRLGLGNNKITDIENGSLANIPRVREIHLENNKLKKIPSGLPELKYLQIIFLHSNSIARVGVNDFCPTVPKMKKSLYSAISLFNNPVKYWEMQPATFRCVLSRMSVQLGNFGM

SEQ ID NO: 1263 - DNA, 3352 bp, Homo sapien
acgagggacgcagccatggcggaggcggctttggaagccgtgcggagcgagttacgagaattcccggccgctgcaagggagctctgcgtgcctcttgctgtgccctacctggacaaacccccaactccgctccacttctaccgggactgggtctgccccaacaggccgtgcattatccgcaacgctctgcagcactggccggccctccagaagtggtccctcccctatttcagagccacagtgggctccacagaggtgagtgtggccgtgaccccagatggttacgcggatgccgtgagaggggatcgcttcatgatgccagctgagcgccgcctgcccctgagcttcgtgctggatgtgctggagggccgggcccagcaccctggagtcctctatgtgcagaagcagtgctccaacctgcccagcgagctgccccagctgctgcctgatctggaatcccatgtgccctgggcctccgaagccctgggaaagatgcccgatgctgtgaacttctggctgggggaggcggctgcagtgacttctttgcacaaggaccactatgagaacctctactgcgtggtctcaggagagaagcatttcctgttccatccgcccagcgaccggcccttcatcccctatgagctgtacacgccggcaacctaccagctaactgaagagggcacctttaaggtggtggatgaagaggccatggagaaggcagaggtgtccaggacctgcctgctcacggttcgtgtcctgcaggcccatcgcctaccctctaaggacctagtgaccccctctgactgctacgtgactctctggctgcccacggcctgcagccacaggctccagacacgcacggtcaagaacagcagtagccctgtctggaaccagagctttcacttcaggatccacaggcagctcaagaatgtcatggaactgaaagtctttgaccaggacctggtgaccggagatgaccctgtgttgtcagtactgtttgatgcggggactctgcgggctggggagttccggcgcgagagcttctcactgagccctcagggtgaggggcgcctggaagttgaatttcgcctgcagagtctggctgaccgtggcgagtggctcgtcagcaatggcgttctggtggcccgggagctctcctgcttgcacgttcaactggaggagacaggagaccagaagtcctcagagcacagagttcagcttgtggttcctgggtcctgtgagggtccgcaggaggcctctgtgggcactggcaccttccgcttccactgcccagcctgctgggagcaggagctgagtattcgcctgcaggatgcccccgaggagcaactaaaggcgccactgagtgccctgccctctggtcaagtggtgaggcttgtcttccccacgtcccaggagcccctgatgagagtggagctgaaaaaagaagcaggactgagggagctggccgtgcgactgggcttcgggccctgtgcagaggagcaggccttcctgagcaggaggaagcaggtggtggccgcggccttgaggcaggccctgcagctggatggagacctgcaggaggatgagatcccagtggtagctattatggccactggtggtgggatccgggcaatgacttccctgtatgggcagctggctggcctgaaggagctgggcctcttggattgcgtctcctacatcaccggggcctcgggctccacctgggccttggccaacctttatgaggacccagagtggtctcagaaggacctggcagggcccactgagttgctgaagacccaggtgaccaagaacaagctgggtgtgctggcccccagccagctgcagcggtaccggcaggagctggccgagcgtgcccgcttgggctacccaagctgcttcaccaacctgtgggccctcatcaacgaggcgctgctgcatgatgagccccatgatcacaagctctcagatcaacgggaggccctgagtcatggccagaaccctctgcccatctactgtgccctcaacaccaaagggcagagcctgaccacttttgaatttggggagtggtgcgagttctctccctacgaggtcggcttccccaagtacggggccttcatcccctctgagctctttggctccgagttctttatggggcagctgatgaagaggcttcctgagtcccgcatctgcttcttagaaggtatctggagcaacctgtatgcagccaacctccaggacagcttatactgggcctcagagcccagccagttctgggaccgctgggtcaggaaccaggccaacctggacaaggagcaggtcccccttctgaagatagaagaaccaccctcaacagccggcagratagctgagtttttcaccgatcttctgacgtggcgtccactggcccaggccacacataatttcctgcgtggcctccatttccacaaagactactttcagcatcctcacttctccacatggaaagctaccactctggatgggctccccaaccagctgacaccctcggagccccacctgtgcctgctggatgttggctacctcatcaataccagctgcctgcccctcctgcagcccactcgggacgtggacctcatcctgtcattggactacaacctccacggagccttccagcagttgcagctcctgggccggttctgccaggagcaggggatcccgttcccacccatctcgcccagccccgaagagcagctccagcctcgggagtgccacaccttctccgaccccacctgccccggagcccctgcggtgctgcactttcctctggtcagcgactccttccgggagtactcggcccctggggtccggcggacacccgaggaggcggcagctggggaggtgaacctgtcttcatcggactctccctaccactacacgaaggtgacctacagccaggaggacgtggacaagctgctgcacctgacacattacaatgtctgcaacaaccaggagcagctgctggaggctctgcgccaggcagtgcagcggaggcggcagcgcaggccccactgatggccggggcccctgccacccctaactctcattcattccctggctgctgagttgcaggtgggaactgtcatcacgcagtgcttcagagcctcgggctcaggtggcackgtcccagggtccaggctgagggctgggagctcccttgcgcctcagcagtttgcagtggggtaaggaggccaagcccatttgtgtaatcacccaaaaccccccggcctgtgcctgttttcccttctgcgctaccttgagtagttggagcacttgatacatcacagactcatacaaaaaaaaaaaaaaaaaa

SEQ ID NO: 1264 - protein, 1012 aa, Homo sapien
MAEAALEAVRSELREFPAAARELCVPLAVPYLDKPPTPLHFYRDWVCPNRPCIIRNALQHWPALQKWSLPYFRATVGSTEVSVAVTPDGYADAVRGDRFMMPAERRLPLSFVLDVLEGRAQHPGVLYVQKQCSNLPSELPQLLPDLESHVPWASEALGKMPDAVNFWLGEAAAVTSLHKDHYENLYCVVSGEKHFLFHPPSDRPFIPYELYTPATYQLTEEGTFKVVDEEAMEKAEVSRTCLLTVRVLQAHRLPSKDLVTPSDCYVTLWLPTACSHRLQTRTVKNSSSPVWNQSFHFRIHRQLKNVMELKVFDQDLVTGDDPVLSVLFDAGTLRAGEFRRESFSLSPQGEGRLEVEFRLQSLADRGEWLVSNGVLVARELSCLHVQLEETGDQKSSEHRVQLVVPGSCEGPQEASVGTGTFRFHCPACWEQELSIRLQDAPEEQLKAPLSALPSGQVVRLVFPTSQEPLMRVELKKEAGLRELAVRLGFGPCAEEQAFLSRRKQVVAAALRQALQLDGDLQEDEIPVVAIMATGGGIRAMTSLYGQLAGLKELGLLDCVSYITGASGSTWALANLYEDPEWSQKDLAGPTELLKTQVTKNKLGVLAPSQLQRYRQELAERARLGYPSCFTNLWALINEALLHDEPHDHKLSDQREALSHGQNPLPIYCALNTKGQSLTTFEFGEWCEFSPYEVGFPKYGAFIPSELFGSEFFMGQLMKRLPESRICFLEGIWSNLYAANLQDSLYWASEPSQFWDRWVRNQANLDKEQVPLLKIEEPPSTAGRIAEFFTDLLTWRPLAQATHNFLRGLHFHKDYFQHPHFSTWKATTLDGLPNQLTPSEPHLCLLDVGYLINTSCLPLLQPTRDVDLILSLDYNLHGAFQQLQLLGRFCQEQGIPFPPISPSPEEQLQPRECHTFSDPTCPGAPAVLHFPLVSDSFREYSAPGVRRTPEEAAAGEVNLSSSDSPYHYTKVTYSQEDVDKLLHLTHYNVCNNQEQLLEALRQAVQRRRQRRPH

SEQ ID NO: 1265 - DNA, 1361 bp, Homo sapien
ggggaggtagcccgcagtgcaggggcagcgcggcgcggggccaccgacgggacgcggctccgggaacatggctcgcttcgctctgactgttgtccggcatggagaaacaagatttaacaaggagaaaataatccaaggacaaggagtagatgaacctctttcagaaactggatttaaacaagcagcagctgctggtatatttctgaataatgtgaagtttactcatgctttctccagtgatctcatgaggacaaagcagaccatgcatggaattttggagagaagcaaattttgcaaagatatgacggtaaagtatgactcaagacttcgggaaaggaaatacggggttgtagaaggcaaagcgctaagtgagctgagggccatggccaaagcagccagggaagagtgccctgtgtttacaccgcccggaggagagacgctggaccaggtgaaaatgcgtggaatagacttttttgaatttctttgtcaactaatcctgaaagaagcggatcaaaaagaacagttttcccaaggatctccaagcaactgtctggaaacttctttggcagagatatttcctttaggaaaaaatcacagctctaaagttaattcagacagcggtattccaggattagcagccagtgtcttagttgtgagtcacggtgcttacatgagaagtctgtttgattattttctgactgaccttaagtgttccttaccagccactctgagcagatctgaacttatgtcagtcactcccaatacagggatgagtctctttatcataaactttgaggaaggaagagaagttaaaccaacggttcagtgtatttgtatgaacctacaggatcatctaaatggactgactgaaactcgctaaggttaaatctgcatcaaaatctaaccaatttgagcctctgaagggagtgccattggctttatttacttctctcctctgctagtcctgatttggaaacagttaaaagccaatttttagctccagtggaaccatagccacataaaactttaatggacaaccatatagaattaacttattttgtccaagtacagttggcattttccagaataattttaccaccctgctagatgtcatctctggattgcacatggatgatgaaggaactcagcattgaaagttgggggattagtaaccttgttacaacggtttctttttcattttagcctattttaatggctattggtaagatactgtatgtttttagtatctcatccagtgcttagaagaaagaatggtttataattcccagtacatgtttatattgactgtgttatatttttaaatcctttaaataaaaaatccttataagtttatgtaaagc

SEQ ID NO: 1266 - protein, 270 aa, Homo sapien
MARFALTVVRHGETRFNKEKIIQGQGVDEPLSETGFKQAAAAGIFLNNVKFTHAFSSDLMRTKQTMHGILERSKFCKDMTVKYDSRLRERKYGVVEGKALSELRAMAKAAREECPVFTPPGGETLDQVKMRGIDFFEFLCQLILKEADQKEQFSQGSPSNCLETSLAEIFPLGKNHSSKVNSDSGIPGLAASVLVVSHGAYMRSLFDYFLTDLKCSLPATLSRSELMSVTPNTGMSLFIINFEEGREVKPTVQCICMNLQDHLNGLTETR

SEQ ID NO: 1267 - DNA, 3485 bp, Homo sapien
tccagctgggtagccgggggagcgcgcgtgggggctccgcgagtcgctcgcccttggtttctggggaagcctgggggacgcggctgtggcggaggcgccctgggactcaggtcgcctggagcgtggcacgcagagccccaggcgcggagctgaggccgcgcggccgcgcttggccccagcgggcgtgggactgagcagtctgctgccccccgacatgtgacccagccccgccgcccatgcgggctcccggccgcccggccctgcggccgctgccgctgccgccgctgctgctgttgctcctggcggcgccttggggacgggcagttccctgtgtctctggtggtttgcctaaacctgcaaacatcaccttcttatccatcaacatgaagaatgtcctacaatggactccaccagagggtcttcaaggagttaaagttacttacactgtgcagtatttcatatatgggcaaaagaaatggctgaataaatcagaatgcagaaatatcaatagaacctactgtgatctttctgctgaaacttctgactacgaacaccagtattatgccaaagttaaggccatttggggaacaaagtgttccaaatgggctgaaagtggacggttctatccttttttagaaacacaaattggcccaccagaggtggcactgactacagatgagaagtccatttctgttgtcctgacagctccagagaagtggaagagaaatccagaagaccttcctgtttccatgcaacaaatatactccaatctgaagtataacgtgtctgtgttgaatactaaatcaaacagaacgtggtcccagtgtgtgaccaaccacacgctggtgctcacctggctggagccgaacactctttactgcgtacacgtggagtccttcgtcccagggccccctcgccgtgctcagccttctgagaagcagtgtgccaggactttgaaagatcaatcatcagagttcaaggctaaaatcatcttctggtatgttttgcccatatctattaccgtgtttcttttttctgtgatgggctattccatctaccgatatatccacgttggcaaagagaaacacccagcaaatttgattttgatttatggaaatgaatttgacaaaagattctttgtgcctgctgaaaaaatcgtgattaactttatcaccctcaatatctcggatgattctaaaatttctcatcaggatatgagtttactgggaaaaagcagtgatgtatccagccttaatgatcctcagcccagcgggaacctgaggccccctcaggaggaagaggaggtgaaacatttagggtatgcttcgcatttgatggaaattttttgtgactctgaagaaaacacggaaggtacttctttcacccagcaagagtccctcagcagaacaatacccccggataaaacagtcattgaatatgaatatgatgtcagaaccactgacatttgtgcggggcctgaagagcaggagctcagtttgcaggaggaggtgtccacacaaggaacattattggagtcgcaggcagcgttggcagtcttgggcccgcaaacgttacagtactcatacacccctcagctccaagacttagaccccctggcgcaggagcacacagactcggaggaggggccggaggaagagccatcgacgaccctggtcgactgggatccccaaactggcaggctgtgtattccttcgctgtccagcttcgaccaggattcagagggctgcgagccttctgagggggatgggctcggagaggagggtcttctatctagactctatgaggagccggctccagacaggccaccaggagaaaatgaaacctatctcatgcaattcatggaggaatgggggttatatgtgcagatggaaaactgatgccaacacttccttttgccttttgtttcctgtgcaaacaagtgagtcacccctttgatcccagccataaagtacctgggatgaaagaagttttttccagtttgtcagtgtctgtgagaattacttatttcttttctctattctcatagcacgtgtgtgattggttcatgcatgtaggtctcttaacaatgatggtgggcctctggagtccaggggctggccggttgttctatgcagagaaagcagtcaataaatgtttgccagactgggtgcagaatttattcaggtgggtgtactctggcctcttggttcattattttcaaacaagcacacttgtacaattattttctgggtacttcccatatgcacatagcactgtaaaaaatatttcccaaagatcactcattttataaataccactttttcagaattgggtttattgcgagcaggaggagatacttaaaacatgcacatataccaggttggtggtaagttggtcacatgtgaaaacctcaactatttaatcatcatgattcatattttgagtgaatacatcaggcacagaccttcatgatatcacacactcttggctactttaagaggccatctttaatactttatgagtagttctggagtgtaaacataaacgagtattcttttgtagtcagaaaagtgtcctctcaataatttagtaggggcttattgtctctcaaaactaacctaaaagaaaatgacacattttataatagaatattacatttatttctggaagtgtgttttcaaaaagatatttacatagtctgtaaactagaaagtgttaggtaaagctctaggttactgtgttactattataatattaaacattcgaataggcagtcgttcaaagactctttggaatatctatgaatgaatatcctctattcttataatattaaaacccataagtaaatataggacatacaagagaaatgagttaaatgactatgtaagggagagtttattaaaatttgatgaaatttactgtaggaactaaactatgccataaaacaatagctttctagttcatttccagtaactgttcccatctcctttaccacttgttaagaaaattaaattcttcagtcacgctgctttaaaatgggacaaaatctattaagttgaaccatatataattgtggatatttggctgtttttaatctgacaagcagtaacttcatatggtttgccttaatatatatttgttttagtcatgaactcataatccattgatgctctttcatgagaagagatatgacccatatttccttattgatattattggtacaggcagacaaccctggtaggagagatggattctggggtcatgacctttcgtgattatccgcaaatgcaaacagtttcagatctaatggtttaatttagggagtaattatattaatcagagtgttctgttattctcaatctttatagaaacgattctgctggttttgaagaacagatgtattacactaactgtaaaagtagttcaagagtgagaaagaataaattgttattaagagcaaaagaaaaataaagtgattgatgata

SEQ ID NO: 1268 - protein, 553 aa, Homo sapien [sequence omitted]

SEQ ID NO: 1269 - DNA, 1899 bp, Homo sapien
agcgcgcgactttttgaaagccaggagggttcgaattgcaacggcagctgccgggcgtatgtgttggtgctagaggcagctgcagggtctcgctgggggccgctcgggaccaattttgaagaggtacttggccacgacttattttcacctccgacctttccttccaggcggtgagactctggactgagagtggctttcacaatggaagggatcagtaatttcaagacaccaagcaaattatcagaaaaaaagaaatctgtattatgttcaactccaactataaatatcccggcctctccgtttatgcagaagcttggctttggtactggggtaaatgtgtacctaatgaaaagatctccaagaggtttgtctcattctccttgggctgtaaaaaagattaatcctatatgtaatgatcattatcgaagtgtgtatcaaaagagactaatggatgaagctaagattttgaaaagccttcatcatccaaacattgttggttatcgtgcttttactgaagccaatgatggcagtctgtgtcttgctatggaatatggaggtgaaaagtctctaaatgacttaatagaagaacgatataaagccagccaagatccttttccagcagccataattttaaaagttgctttgaatatggcaagagggttaaagtatctgcaccaagaaaagaaactgcttcatggagacataaagtcttcaaatgttgtaattaaaggcgattttgaaacaattaaaatctgtgatgtaggagtctctctaccactggatgaaaatatgactgtgactgaccctgaggcttgttacattggcacagagccatggaaacccaaagaagctgtggaggagaatggtgttattactgacaaggcagacatatttgcctttggccttactttgtgggaaatgatgactttatcgattccacacattaatctttcaaatgatgatgatgatgaagataaaacttttgatgaaagtgattttgatgatgaagcatactatgcagcgttgggaactaggccacctattaatatggaagaactggatgaatcataccagaaagtaattgaactcttctctgtatgcactaatgaagaccctaaagatcgtccttctgctgcacacattgttgaagctctggaaacagatgtctagtgatcatctcagctgaagtgtggcttgcgtaaataactgtttattccaaaatatttacatagttactatcagtagttattagactctaaaattggcatatttgaggaccatagtttcttgttaacatatggataactatttctaatatgaaatatgcttatattggctataagcacttggaattgtactgggttttctgtaaagttttagaaactagctacataagtactttgatactgctcatgctgacttaaaacactagcagtaaaacgctgtaaactgtaacattaaattgaatgaccattacttttattaatgatctttcttaaatattctatattttaatggatctactgacattagcactttgtacagtacaaaataaagtctacatttgtttaaaacactgaaccttttgctgatgtgtttatcaaatgataactggaagctgaggagaatatgcctcaaaaagagtagctccttggatacttcagactctggttacagattgtcttgatctcttggatctcctcagatctttggtttttgctttaatttattaaatgtattttccatactgagtttaaaatttattaatttgtaccttaagcatttcccagctgtgtaaaaacaataaaactcaaataggatgataaagaataaaggacactttgggtaccagaaaaaaaaaaaaaaaaaaaaaaaaaaaaaaaaaaaaaaaaaaaaaaa

SEQ ID NO: 1270 - protein, 322 aa, Homo sapien
MEGISNFKTPSKLSEKKKSVLCSTPTINIPASPFMQKLGFGTGVNVYLMKRSPRGLSHSPWAVKKINPICNDHYRSVYQKRLMDEAKILKSLHHPNIVGYRAFTEANDGSLCLAMEYGGEKSLNDLIEERYKASQDPFPAAIILKVALNMARGLKYLHQEKKLLHGDIKSSNVVIKGDFETIKICDVGVSLPLDENMTVTDPEACYIGTEPWKPKEAVEENGVITDKADIFAFGLTLWEMMTLSIPHINLSNDDDDEDKTFDESDFDDEAYYAALGTRPPINMEELDESYQKVIELFSVCTNEDPKDRPSAAHIVEALETDV

SEQ ID NO: 1271 - DNA, 6303 bp, Homo sapien
tagtaagacaggtgccttcagttcactctcagtaaggggctggttgcctgcatgagtgtgtgctctgtgtcactgtggattggagttgaaaaagcttgactggcgtcattcaggagctggatggcgtgggacatgtgcaaccaggactctgagtctgtatggagtgacatcgagtgtgctgctctggttggtgaagaccagcctctttgcccagatcttcctgaacttgatctttctgaactagatgtgaacgacttggatacagacagctttctgggtggactcaagtggtgcagtgaccaatcagaaataatatccaatcagtacaacaatgagccttcaaacatatttgagaagatagatgaagagaatgaggcaaacttgctagcagtcctcacagagacactagacagtctccctgtggatgaagacggattgccctcatttgatgcgctgacagatggagacgtgaccactgacaatgaggctagtccttcctccatgcctgacggcacccctccaccccaggaggcagaagagccgtctctacttaagaagctcttactggcaccagccaacactcagctaagttataatgaatgcagtggtctcagtacccagaaccatgcaaatcacaatcacaggatcagaacaaaccctgcaattgttaagactgagaattcatggagcaataaagcgaagagtatttgtcaacagcaaaagccacaaagacgtccctgctcggagcttctcaaatatctgaccacaaacgatgaccctcctcacaccaaacccacagagaacagaaacagcagcagagacaaatgcacctccaaaaagaagtcccacacacagtcgcagtcacaacacttacaagccaaaccaacaactttatctcttcctctgaccccagagtcaccaaatgaccccaagggttccccatttgagaacaagactattgaacgcaccttaagtgtggaactctctggaactgcaggcctaactccacccaccactcctcctcataaagccaaccaagataacccttttagggcttctccaaagctgaagtcctcttgcaagactgtggtgccaccaccatcaaagaagcccaggtacagtgagtcttctggtacacaaggcaataactccaccaagaaagggccggagcaatccgagttgtatgcacaactcagcaagtcctcagtcctcactggtggacacgaggaaaggaagaccaagcggcccagtctgcggctgtttggtgaccatgactattgccagtcaattaattccaaaacggaaatactcattaatatatcacaggagctccaagactctagacaactagaaaataaagatgtctcctctgattggcaggggcagatttgttcttccacagattcagaccagtgctacctgagagagactttggaggcaagcaagcaggtctctccttgcagcacaagaaaacagctccaagaccaggaaatccgagccgagctgaacaagcacttcggtcatcccagtcaagctgtttttgacgacgaagcagacaagaccggtgaactgagggacagtgatttcagtaatgaacaattctccaaactacctatgtttataaattcaggactagccatggatggcctgtttgatgacagcgaagatgaaagtgataaactgagctacccttgggatggcacacaatcctattcattgttcaatgtgtctccttcttgttcttcttttaactctccatgtagagattctgtgtcaccacccaaatccttattttctcaaagaccccaaaggatgcgctctcgttcaaggtccttttctcgacacaggtcgtgttcccgatcaccatattccaggtcaagatcaaggtctccaggcagtagatcctcttcaagatcctgctattactatgagtcaagccactacagacaccgcacgcaccgaaattctcccttgtatgtgagatcacgttcaagatcgccctacagccgtcggcccaggtatgacagctacgaggaatatcagcacgagaggctgaagagggaagaatatcgcagagagtatgagaagcgagagtctgagagggccaagcaaagggagaggcagaggcagaaggcaattgaagagcgccgtgtgatttatgtcggtaaaatcagacctgacacaacacggacagaactgagggaccgttttgaagtttttggtgaaattgaggagtgcacagtaaatctgcgggatgatggagacagctatggtttcattacctaccgttatacctgtgatgcttttgctgctcttgaaaatggatacactttgcgcaggtcaaacgaaactgactttgagctgtacttttgtggacgcaagcaatttttcaagtctaactatgcagacctagattcaaactcagatgactttgaccctgcttccaccaagagcaagtatgactctctggattttgatagtttactgaaagaagctcagagaagcttgcgcaggtaacatgttccctagctgaggatgacagagggatggcgaatacctcatgggacagcgcgtccttccctaaagactattgcaagtcatacttaggaatttctcctactttacactctctgtacaaaaacaaaacaaaacaacaacaatacaacaagaacaacaacaacaataacaacaatggtttacatgaacacagctgctgaagaggcaagagacagaatgatatccagtaagcacatgtttattcatgggtgtcagctttgcttttcctggagtctcttggtgatggagtgtgcgtgtgtgcatgtatgtgtgtgtgtatgtatgtgtgtggtgtgtgtgcttggtttaggggaagtatgtgtgggtacatgtgaggactgggggcacctgaccagaatgcgcaagggcaaaccatttcaaatggcagcagttccatgaagacacacttaaaacctagaacttcaaaatgttcgtattctattcaaaaggaaaaatatatatatatatatatatatataaattaaaaaggaaagaaaactaacaaccaaccaaccaaccaaccaaccacaaaccaccctaaaatgacagccgctgatgtctgggcatcagcctttgtactctgtttttttaagaaagtgcagaatcaacttgaagcaagctttctctcataacgtaatgattatatgacaatcctgaagaaaccacaggttccatagaactaatatcctgtctctctctctctctctctctctctcttttttttttctttttccttttgccatggaatctgggtgggagaggatactgcgggcaccagaatgctaaagtttcctaacattttgaagtttctgtagttcatccttaatcctgacacccatgtaaatgtccaaaatgttgatcttccactgcaaatttcaaaagccttgtcaatggtcaagcgtgcagcttgttcagcggttctttctgaggagcggacaccgggttacattactaatgagagttgggtagaactctctgagatgtgttcagatagtgtaattgctacattctctgatgtagttaagtatttacagatgttaaatggagtatttttattttatgtatatactatacaacaatgttcttttttgttacagctatgcactgtaaatgcagccttcttttcaaaactgctaaatttttcttaatcaagaatattcaaatgtaattatgaggtgaaacaattattgtacactaacatatttagaagctgaacttactgcttatatatatttgattgtaaaaacaaaaagacagtgtgtgtgtctgttgagtgcaacaagagcaaaatgatgctttccgcacatccatcccttaggtgagcttcaatctaagcatcttgtcaagaaatatcctagtcccctaaaggtattaaccacttctgcgatatttttccacattttcttgtcgcttgtttttctttgaagttttatacactggatttgttaggggaatgaaattttctcatctaaaatttttctagaagatatcatgattttatgtaaagtctctcaatgggtaaccattaagaaatgtttttattttctctatcaacagtagttttgaaactagaagtcaaaaatctttttaaaatgctgttttgttttaatttttgtgattttaatttgatacaaaatgctgaggtaataattatagtatgatttttacaataattaatgtgtgtctgaagactatctttgaagccagtatttctttcccttggcagagtatgacgatggtatttatctgtattttttacagttatgcatcctgtataaatactgatatttcattcctttgtttactaaagagacatatttatcagttgcagatagcctatttattataaattatgagatgatgaaaataataaagccagtggaaattttctacctaggatgcatgacaattgtcaggttggagtgtaagtgcttcatttgggaaattcagcttttgcagaagcagtgtttctacttgcactagcatggcctctgacgtgaccatggtgttgttcttgatgacattgcttctgctaaatttaataaaaacttcagaaaaacctccattttgatcatcaggatttcatctgagtgtggagtccctggaatggaattcagtaacatttggagtgtgtattcaagtttctaaattgagattcgattactgtttggctgacatgacttttctggaagacatgatacacctactactcaattgttcttttcctttctctcgcccaacacgatcttgtaagatggatttcacccccaggccaatgcagctaattttgatagctgcattcatttatcaccagcatattgtgttctgagtgaatccactgtttgtcctgtcggatgcttgcttgattttttggcttcttatttctaagtagatagaaagcaataaaaatactatgaaatgaaagaacttgttcacaggttctgcgttacaacagtaacacatctttaatccgcctaattcttgttgttctgtaggttaaatgcaggtattttaactgtgtgaacgccaaactaaagtttacagtctttctttctgaattttgagtatcttctgttgtagaataataataaaaagactattaagagcaataaattattttaagaaatcgagatttagtaaatcctattatgtgttcaaggaccacatgtgttctctattttgcctttaaatttttgtgaaccaattttaaatacattctcctttttgccctggattgttgacatgagtggaatacttggtttcttttcttacttatcaaaagacagcactacagatatcatattgaggattaatttatcccccctacccccagcctgacaaatattgttaccatgaagatagttttcctcaatggacttcaaattgcatctagaattagtggagcttttgtatcttctgcagacactgtgggtagcccatcaaaatgtaagctgtgctcctctcatttttatttttatttttttgggagagaatatttcaaatgaacacgtgcaccccatcatcactggaggcaaatttcagcatagatctgtaggatttttagaagaccgtgggccattgccttcatgccgtggtaagtaccacatctacaattttggtaaccgaactggtgctttagtaatgtggatttttttcttttttaaaagagatgtagcaaaataattcttccagtgcaacaaaatcaattttttgctaaacgactccaagaacaacagttgggctgtcaacattcaaagcagcagagagggaactttgcactattggggtatgatgtttgggtcagttgataaaaggaaaccttttcatgcctttagatgtgagcttccagtaggtaatgattatgtgtcctttcttgatggctgtaatgagaacttcaatcactgtagtctaagacctgatctatagatacctagaatagccatgtactataatgtgatgattctaaatttgtacctatgtgacagacattttcaataatgtgaactgctgatttgatggagctactttaagatttgtaggtgaaagtgtaatactgttggttgaactatgctgaagagggaaagtgagcgattagttgagcccttgccgggccttttttccacctgccaattctacatgtattgttgtggttttattcattgtatgaaaattcctgtgattttttttaaatgtgcagtacacatcagcctcactgagctaataaagggaaacgaatgtttcaaatct

SEQ ID NO: 1272 - protein, 798 aa, Homo sapien
MAWDMCNQDSESVWSDIECAALVGEDQPLCPDLPELDLSELDVNDLDTDSFLGGLKWCSDQSEIISNQYNNEPSNIFEKIDEENEANLLAVLTETLDSLPVDEDGLPSFDALTDGDVTTDNEASPSSMPDGTPPPQEAEEPSLLKKLLLAPANTQLSYNECSGLSTQNHANHNHRIRTNPAIVKTENSWSNKAKSICQQQKPQRRPCSELLKYLTTNDDPPHTKPTENRNSSRDKCTSKKKSHTQSQSQHLQAKPTTLSLPLTPESPNDPKGSPFENKTIERTLSVELSGTAGLTPPTTPPHKANQDNPFRASPKLKSSCKTVVPPPSKKPRYSESSGTQGNNSTKKGPEQSELYAQLSKSSVLTGGHEERKTKRPSLRLFGDHDYCQSINSKTEILINISQELQDSRQLENKDVSSDWQGQICSSTDSDQCYLRETLEASKQVSPCSTRKQLQDQEIRAELNKHFGHPSQAVFDDEADKTGELRDSDFSNEQFSKLPMFINSGLAMDGLFDDSEDESDKLSYPWDGTQSYSLFNVSPSCSSFNSPCRDSVSPPKSLFSQRPQRMRSRSRSFSRHRSCSRSPYSRSRSRSPGSRSSSRSCYYYESSHYRHRTHRNSPLYVRSRSRSPYSRRPRYDSYEEYQHERLKREEYRREYEKRESERAKQRERQRQKAIEERRVIYVGKIRPDTTRTELRDRFEVFGEIEECTVNLRDDGDSYGFITYRYTCDAFAALENGYTLRRSNETDFELYFCGRKQFFKSNYADLDSNSDDFDPASTKSKYDSLDFDSLLKEAQRSLRR

SEQ ID NO: 1273 - DNA, 3380 bp, Homo sapien
gcgcgccggcctgagagccctgtggacaacctcgtcattgtcaggcacagagcggtagaccctgcttctctaagtgggcagcggacagcggcacgcacatttcacctgtcccgcagacaacagcaccatctgcttgggagaaccctctcccttctctgagaaagaaagatgtcgaatgggtattccacagacgagaatttccgctatctcatctcgtgcttcagggccagggtgaaaatgtacatccaggtggagcctgtgctggactacctgacctttctgcctgcagaggtgaaggagcagattcagaggacagtcgccacctccgggaacatgcaggcagttgaactgctgctgagcaccttggagaagggagtctggcaccttggttggactcgggaattcgtggaggccctccggagaaccggcagccctctggccgcccgctacatgaaccctgagctcacggacttgccctctccatcgtttgagaacgctcatgatgaatatctccaactgctgaacctccttcagcccactctggtggacaagcttctagttagagacgtcttggataagtgcatggaggaggaactgttgacaattgaagacagaaaccggattgctgctgcagaaaacaatggaaatgaatcaggtgtaagagagctactaaaaaggattgtgcagaaagaaaactggttctctgcatttctgaatgttcttcgtcaaacaggaaacaatgaacttgtccaagagttaacaggctctgattgctcagaaagcaatgcagagattgagaatttatcacaagttgatggtcctcaagtggaagagcaacttctttcaaccacagttcagccaaatctggagaaggaggtctggggcatggagaataactcatcagaatcatcttttgcagattcttctgtagtttcagaatcagacacaagtttggcagaaggaagtgtcagctgcttagatgaaagtcttggacataacagcaacatgggcagtgattcaggcaccatgggaagtgattcagatgaagagaatgtggcagcaagagcatccccggagccagaactccagctcaggccttaccaaatggaagttgcccagccagccttggaagggaagaatatcatcatctgcctccctacagggagtggaaaaaccagagtggctgtttacattgccaaggatcacttagacaagaagaaaaaagcatctgagcctggaaaagttatagttcttgtcaataaggtactgctagttgaacagctcttccgcaaggagttccaaccatttttgaagaaatggtatcgtgttattggattaagtggtgatacccaactgaaaatatcatttccagaagttgtcaagtcctgtgatattattatcagtacagctcaaatccttgaaaactccctcttaaacttggaaaatggagaagatgctggtgttcaattgtcagacttttccctcattatcattgatgaatgtcatcacaccaacaaagaagcagtgtataataacatcatgaggcattatttgatgcagaagttgaaaaacaatagactcaagaaagaaaacaaaccagtgattccccttcctcagatactgggactaacagcttcacctggtgttggaggggccacgaagcaagccaaagctgaagaacacattttaaaactatgtgccaatcttgatgcatttactattaaaactgttaaagaaaaccttgatcaactgaaaaaccaaatacaggagccatgcaagaagtttgccattgcagatgcaaccagagaagatccatttaaagagaaacttctagaaataatgacaaggattcaaacttattgtcaaatgagtccaatgtcagattttggaactcaaccctatgaacaatgggccattcaaatggaaaaaaaagctgcaaaaaaaggaaatcgcaaagaacgtgtttgtgcagaacatttgaggaagtacaatgaggccctacaaattaatgacacaattcgaatgatagatgcgtatactcatcttgaaactttctataatgaagagaaagataagaagtttgcagtcatagaagatgatagtgatgagggtggtgatgatgagtattgtgatggtgatgaagatgaggatgatttaaagaaacctttgaaactggatgaaacagatagatttctcatgactttattttttgaaaacaataaaatgttgaaaaggctggctgaaaacccagaatatgaaaatgaaaagctgaccaaattaagaaataccataatggagcaatatactaggactgaggaatcagcacgaggaataatctttacaaaaacacgacagagtgcatatgcgctttcccagtggattactgaaaatgaaaaatttgctgaagtaggagtcaaagcccaccatctgattggagctggacacagcagtgagttcaaacccatgacacagaatgaacaaaaagaagtcattagtaaatttcgcactggaaaaatcaatctgcttatcgctaccacagtggcagaagaaggtctggatattaaagaatgtaacattgttatccgttatggtctcgtcaccaatgaaatagccatggtccaggcccgtggtcgagccagagctgatgagagcacctacgtcctggttgctcacagtggttcaggagttatcgaacatgagacagttaatgatttccgagagaagatgatgtataaagctatacattgtgttcaaaatatgaaaccagaggagtatgctcataagattttggaattacagatgcaaagtataatggaaaagaaaatgaaaaccaagagaaatattgccaagcattacaagaataacccatcactaataactttcctttgcaaaaactgcagtgtgctagcctgttctggggaagatatccatgtaattgagaaaatgcatcacgtcaatatgaccccagaattcaaggaactttacattgtaagagaaaacaaagcactgcaaaagaagtgtgccgactatcaaataaatggtgaaatcatctgcaaatgtggccaggcttggggaacaatgatggtgcacaaaggcttagatttgccttgtctcaaaataaggaattttgtagtggttttcaaaaataattcaacaaagaaacaatacaaaaagtgggtagaattacctatcacatttcccaatcttgactattcagaatgctgtttatttagtgatgaggattagcacttgattgaagattcttttaaaatactatcagttaaacatttaatatgattatgattaatgtattcattatgctacagaactgacataagaatcaataaaatgattgttttactctgaaaaaaaaaaaaaaa

SEQ ID NO: 1274 - protein, 1025 aa, Homo sapien [sequence omitted]

SEQ ID NO: 1275 - DNA, 1740 bp, Homo sapien
ggccggtagctgttgctgttgggggaccccctcattcctgccgctgccgtccctgctgcctcatggcggccatcggagttcacctgggctgcacctcagcctgtgtggccgtctataaggatggccgggctggtgtggttgcaaatgatgccggtgaccgagttactccagctgttgttgcttactcagaaaatgaagagattgttggattggcagcaaaacaaagtagaataagaaatatttcaaatacagtaatgaaagtaaagcagatcctgggcagaagctccagtgatccacaagctcagaaatacatcgcggaaagtaaatgtttagtcattgaaaaaaatgggaaattacgatatgaaatagatactggagaagaaacaaaatttgttaacccagaagatgttgccagactgatatttagtaaaatgaaagaaacggcacattctgtattgggctcagatgcaaatgatgtagttattactgtcccgtttgattttggagaaaagcaaaaaaatgcccttggagaagcagctagagctgctggatttaatgttttgcgattaattcacgaaccgtctgcagctcttcttgcttatggaattggacaagactcccctactggaaaaagcaatattttggtgtttaagcttggaggaacatccttatctctcagcgtcatggaagttaacagtggaatatatcgggttctttcaacaaacactgatgataacatcggtggtgcacatttcacagaaaccttagcacagtatctagcttctgagttccaaagatccttcaaacatgatgtgagaggaaatgcgcgagccatgatgaaattaacgaacagtgctgaagtagcgaaacattctttgtcaaccttgggaagtgccaactgttttcctgactcattatatgaagggcaagattttgattgcaatgtgtccagagcaagatttgaacttctttgttctccactttttaataagtgtttagaagcaatcagaggactcttagatcaaaatggatttacagcagatgatatcaacaaggttgtcctttgtggagggtcttctcgaatcccaaagctacagcaactgattaaagatcttttcccagctgttgagcttctcaattctatccctcctgatgaagtgatccctattggtgcagctatagaagcaggaattcttattgggaaagaaaacctgttggtggaagactctcttatgatagagtgttcagccagagatattttagttaagggtgtggacgaatcaggagccagtagattcacagtgctgtttccatcagggactcctttgccagctcgaagacaacacacattgcaagcccctggaagcatatcttcagtgtgccttgaactctatgagtctgatgggaagaactctgccaaagaggaaaccaagtttgcacaggttgtactccaggatttagataaaaaagaaaatggattacgtgatatattagctgttcttactatgaaaagggatggatctttacatgtgacatgcacagatcaagaaactggaaaatgtgaagcaatctctattgagatagcatcttagtgttttagagaaatcaagaatttttaaaaacaagaatatcaacatttggttttgtgtataagtggtgtttgtattaaaatactttttcaatgaactgtataaactatgttttattaaactacaatatatcagtaaaaaaaaaaaaaaa

SEQ ID NO: 1276 - protein, 509 aa, Homo sapien
MAAIGVHLGCTSACVAVYKDGRAGVVANDAGDRVTPAVVAYSENEEIVGLAAKQSRIRNISNTVMKVKQILGRSSSDPQAQKYIAESKCLVIEKNGKLRYEIDTGEETKFVNPEDVARLIFSKMKETAHSVLGSDANDVVITVPFDFGEKQKNALGEAARAAGFNVLRLIHEPSAALLAYGIGQDSPTGKSNILVFKLGGTSLSLSVMEVNSGIYRVLSTNTDDNIGGAHFTETLAQYLASEFQRSFKHDVRGNARAMMKLTNSAEVAKHSLSTLGSANCFPDSLYEGQDFDCNVSRARFELLCSPLFNKCLEAIRGLLDQNGFTADDINKVVLCGGSSRIPKLQQLIKDLFPAVELLNSIPPDEVIPIGAAIEAGILIGKENLLVEDSLMIECSARDILVKGVDESGASRFTVLFPSGTPLPARRQHTLQAPGSISSVCLELYESDGKNSAKEETKFAQVVLQDLDKKENGLRDILAVLTMKRDGSLHVTCTDQETGKCEAISIEIAS

(The sequence listing continues in the following parts.)

What is claimed:

1. Isolated nucleic acid comprising at least 80% nucleic acid sequence identity to a nucleotide sequence shown in FIG. 1 (SEQ ID NO:1), FIG. 3 (SEQ ID NO:3), FIG. 5 (SEQ ID NO:5), FIG. 7 (SEQ ID NO:7), FIG. 9A-B (SEQ ID NO:9), FIG. 11 (SEQ ID NO:11), FIG. 13 (SEQ ID NO:13), FIG. 15A-B (SEQ ID NO:15), FIG. 17 (SEQ ID NO:17), FIG. 19 (SEQ ID NO:19), FIG. 21 (SEQ ID NO:21), FIG. 23A-B (SEQ ID NO:23), FIG. 25 (SEQ ID NO:25), FIG. 27A-C (SEQ ID NO:27), FIG. 29 (SEQ ID NO:29), FIG. 31 (SEQ ID NO:31), FIG. 33A-B (SEQ ID NO:33), FIG. 35 (SEQ ID NO:35), FIG. 37 (SEQ ID NO:37), FIG. 39 (SEQ ID NO:39), FIG. 41 (SEQ ID NO:41), FIG. 42 (SEQ ID NO:42), FIG. 45 (SEQ ID NO:45), FIG. 47 (SEQ ID NO:47), FIG. 49 (SEQ ID NO:49), FIG. 51 (SEQ ID NO:51), FIG. 53 (SEQ ID NO:53), FIG. 55A-B (SEQ ID NO:55), FIG. 57 (SEQ ID NO:57), FIG. 59 (SEQ ID NO:59), FIG. 61 (SEQ ID NO:61), FIG. 63A-B (SEQ ID NO:63), FIG. 65 (SEQ ID NO:65), FIG. 67A-B (SEQ ID NO:67), FIG. 69 (SEQ ID NO:69), FIG. 71A-B (SEQ ID NO:71), FIG. 73 (SEQ ID NO:73), FIG. 75 (SEQ ID NO:75), FIG. 77 (SEQ ID NO:77), FIG. 79 (SEQ ID NO:79), FIG. 81 (SEQ ID NO:81), FIG. 83 (SEQ ID NO:83), FIG. 85 (SEQ ID NO:85), FIG. 87 (SEQ ID NO:87), FIG. 89 (SEQ ID NO:89), FIG. 91 (SEQ ID NO:91), FIG. 93A-B (SEQ ID NO:93), FIG. 95A-B (SEQ ID NO:95), FIG. 97 (SEQ ID NO:97), FIG. 99 (SEQ ID NO:99), FIG. 101 (SEQ ID NO:101), FIG. 103 (SEQ ID NO:103), FIG. 105 (SEQ ID NO:105), FIG. 107 (SEQ ID NO:107), FIG. 109 (SEQ ID NO:109), FIG. 111A-B (SEQ ID NO:111), FIG. 113 (SEQ ID NO:113), FIG. 114 (SEQ ID NO:114), FIG. 116 (SEQ ID NO:116), FIG. 118 (SEQ ID NO:118), FIG. 120A-B (SEQ ID NO:120), FIG. 122 (SEQ ID NO:122), FIG. 124A-B (SEQ ID NO:124), FIG. 126 (SEQ ID NO:126), FIG. 128 (SEQ ID NO:128), FIG. 130 (SEQ ID NO:130), FIG. 132 (SEQ ID NO:132), FIG. 134 (SEQ ID NO:134), FIG. 136 (SEQ ID NO:136), FIG. 138A-B (SEQ ID NO:138), FIG. 140 (SEQ ID NO:140), FIG. 142 (SEQ ID NO:142), FIG. 144 (SEQ ID NO:144), FIG. 146 (SEQ ID NO:146), FIG. 148 (SEQ ID NO:148), FIG. 150 (SEQ ID NO:150), FIG. 152A-B (SEQ ID NO:152), FIG. 154 (SEQ ID NO:154), FIG. 156 (SEQ ID NO:156), FIG. 158A-B (SEQ ID NO:158), FIG. 160 (SEQ ID NO:160), FIG. 162 (SEQ ID NO:162), FIG. 164A-B (SEQ ID NO:164), FIG. 166 (SEQ ID NO:166), FIG. 168 (SEQ ID NO:168), FIG. 170 (SEQ ID NO:170), FIG. 172 (SEQ ID NO:172), FIG. 174 (SEQ ID NO:174), FIG. 176 (SEQ ID NO:176), FIG. 178 (SEQ ID NO:178), FIG. 180 (SEQ ID NO:180), FIG. 182 (SEQ ID NO:182), FIG. 184A-B (SEQ ID NO:184), FIG. 186 (SEQ ID NO:186), FIG. 188 (SEQ ID NO:188), FIG. 190 (SEQ ID NO:190), FIG. 192A-B (SEQ ID NO:192), FIG. 193 (SEQ ID NO:193), FIG. 195A-B (SEQ ID NO:195), FIG. 197 (SEQ ID NO:197), FIG. 199 (SEQ ID NO:199), FIG. 201A-B (SEQ ID NO:201), FIG. 203A-B (SEQ ID NO:203), FIG. 205A-B (SEQ ID NO:205), FIG. 207A-B (SEQ ID NO:207), FIG. 209 (SEQ ID NO:209), FIG. 211 (SEQ ID NO:211), FIG. 213A-B (SEQ ID NO:213), FIG. 215 (SEQ ID NO:215), FIG. 217 (SEQ ID NO:217), FIG. 219 (SEQ ID NO:219), FIG. 220 (SEQ ID NO:220), FIG. 222 (SEQ ID NO:222), FIG. 224A-B (SEQ ID NO:224), FIG. 226 (SEQ ID NO:226), FIG. 228 (SEQ ID NO:228), FIG. 230 (SEQ ID NO:230), FIG. 232 (SEQ ID NO:232), FIG. 234 (SEQ ID NO:234), FIG. 236 (SEQ ID NO:236), FIG. 238 (SEQ ID NO:238), FIG. 240A-D (SEQ ID NO:240), FIG. 242 (SEQ ID NO:242), FIG. 244A-B (SEQ ID NO:244), FIG. 246 (SEQ ID NO:246), FIG. 248 (SEQ ID NO:248), FIG. 250 (SEQ ID NO:250), FIG. 252 (SEQ ID NO:252), FIG. 254 (SEQ ID NO:254), FIG. 256A-B (SEQ ID NO:256), FIG. 258 (SEQ ID NO:258), FIG. 260 (SEQ ID NO:260), FIG. 262A-B (SEQ ID NO:262), FIG. 264 (SEQ ID NO:264), FIG. 266A-B (SEQ ID NO:266), FIG. 268A-B (SEQ ID NO:268), FIG. 270A-C (SEQ ID NO:270), FIG. 271 (SEQ ID NO:271), FIG. 273 (SEQ ID NO:273), FIG. 275A-D (SEQ ID NO:275), FIG. 277A-B (SEQ ID NO:277), FIG. 279 (SEQ ID NO:279), FIG. 281 (SEQ ID NO:281), FIG. 283 (SEQ ID NO:283), FIG. 285 (SEQ ID NO:285), FIG. 287 (SEQ ID NO:287), FIG. 289 (SEQ ID NO:289), FIG. 291A-G (SEQ ID NO:291), FIG. 293 (SEQ ID NO:293), FIG. 295A-B (SEQ ID NO:295), FIG. 297 (SEQ ID NO:297), FIG. 299 (SEQ ID NO:299), FIG. 301 (SEQ ID NO:301), FIG. 303 (SEQ ID NO:303), FIG. 305 (SEQ ID NO:305), FIG. 307 (SEQ ID NO:307), FIG. 309A-B (SEQ ID NO:309), FIG. 311 (SEQ ID NO:311), FIG. 313A-B (SEQ ID NO:313), FIG. 315 (SEQ ID NO:315), FIG. 317 (SEQ ID NO:317), FIG. 319 (SEQ ID NO:319), FIG. 321 (SEQ ID NO:321), FIG. 323A-B (SEQ ID NO:323), FIG. 325 (SEQ ID NO:325), FIG. 327 (SEQ ID NO:327), FIG. 329 (SEQ ID NO:329), FIG. 331 (SEQ ID NO:331), FIG. 333 (SEQ ID NO:333), FIG. 335 (SEQ ID NO:335), FIG. 337 (SEQ ID NO:337), FIG. 339A-E (SEQ ID NO:339), FIG. 341 (SEQ ID NO:341), FIG. 343 (SEQ ID NO:343), FIG. 345 (SEQ ID NO:345), FIG. 347 (SEQ ID NO:347), FIG. 349 (SEQ ID NO:349), FIG. 351 (SEQ ID NO:351), FIG. 353 (SEQ ID NO:353), FIG. 355 (SEQ ID NO:355), FIG. 357A-B (SEQ ID NO:357), FIG. 359 (SEQ ID NO:359), FIG. 361 (SEQ ID NO:361), FIG. 363 (SEQ ID NO:363), FIG. 365 (SEQ ID NO:365), FIG. 367A-B (SEQ ID NO:367), FIG. 369A-B (SEQ ID NO:369), FIG. 371 (SEQ ID NO:371), FIG. 373A-B (SEQ ID NO:373), FIG. 375A-B (SEQ ID NO:375), FIG. 377 (SEQ ID NO:377), FIG. 379 (SEQ ID NO:379), FIG. 381A-B (SEQ ID NO:381), FIG. 383 (SEQ ID NO:383), FIG. 385 (SEQ ID NO:385), FIG. 387 (SEQ ID NO:387), FIG. 389 (SEQ ID NO:389), FIG. 391 (SEQ ID NO:391), FIG. 393 (SEQ ID NO:393), FIG. 395 (SEQ ID NO:395), FIG. 397A-D (SEQ ID NO:397), FIG. 399A-B (SEQ ID NO:399), FIG. 401 (SEQ ID NO:401), FIG. 403 (SEQ ID NO:403), FIG. 405 (SEQ ID NO:405), FIG. 407 (SEQ ID NO:407), FIG. 409 (SEQ ID NO:409), FIG. 411 (SEQ ID NO:411), FIG. 413 (SEQ ID NO:413), FIG. 415 (SEQ ID NO:415), FIG. 417 (SEQ ID NO:417), FIG. 419 (SEQ ID NO:419), FIG. 421 (SEQ ID NO:421), FIG. 423 (SEQ ID NO:423), FIG. 425 (SEQ ID NO:425), FIG. 427A-B (SEQ ID NO:427), FIG. 429 (SEQ ID NO:429), FIG. 431 (SEQ ID NO:431), FIG. 433 (SEQ ID NO:433), FIG. 435 (SEQ ID NO:435), FIG. 437A-B (SEQ ID NO:437), FIG. 439 (SEQ ID NO:439), FIG. 441 (SEQ ID NO:441), FIG. 443 (SEQ ID NO:443), FIG. 445 (SEQ ID NO:445), FIG. 447 (SEQ ID NO:447), FIG. 449A-B (SEQ ID NO:449), FIG. 451 (SEQ ID NO:451), FIG. 453 (SEQ ID NO:453), FIG. 455A-C (SEQ ID NO:455), FIG. 457 (SEQ ID NO:457), FIG. 459 (SEQ ID NO:459), FIG. 461 (SEQ ID NO:461), FIG. 463 (SEQ ID NO:463), FIG. 465A-B (SEQ ID NO:465), FIG. 466 (SEQ ID NO:466), FIG. 469 (SEQ ID NO:469), FIG. 471 (SEQ ID NO:471), FIG. 473 (SEQ ID NO:473), FIG. 475 (SEQ ID NO:475), FIG. 477 (SEQ ID NO:477), FIG. 479 (SEQ ID NO:479), FIG. 481 (SEQ ID NO:481), FIG. 483 (SEQ ID NO:483), FIG. 485 (SEQ ID NO:485), FIG. 487 (SEQ ID NO:487), FIG. 489A-B (SEQ ID NO:489), FIG. 491 (SEQ ID NO:491), FIG. 493 (SEQ ID NO:493), FIG. 495A-B (SEQ ID NO:495), FIG. 497 (SEQ ID NO:497), FIG. 499 (SEQ ID NO:499), FIG. 501 (SEQ ID NO:501), FIG. 503 (SEQ ID NO:503), FIG. 505 (SEQ ID NO:505), FIG. 507 (SEQ ID NO:507), FIG. 509 (SEQ ID NO:509), FIG. 511 (SEQ ID NO:511), FIG. 513 (SEQ ID NO:513), FIG. 515 (SEQ ID NO:515), FIG. 517A-B (SEQ ID NO:517), FIG. 519 (SEQ ID NO:519), FIG. 521 (SEQ ID NO:521), FIG. 523 (SEQ ID NO:523), FIG. 525 (SEQ ID NO:525), FIG. 527 (SEQ ID NO:527), FIG. 529 (SEQ ID NO:529), FIG. 531 (SEQ ID NO:531), FIG. 533 (SEQ ID NO:533), FIG. 535 (SEQ ID NO:535), FIG. 537 (SEQ ID NO:537), FIG. 539 (SEQ ID NO:539), FIG. 541 (SEQ ID NO:541), FIG. 543 (SEQ ID NO:543), FIG. 545 (SEQ ID NO:545), FIG. 547 (SEQ ID NO:547), FIG. 549 (SEQ ID NO:549), FIG. 551 (SEQ ID NO:551), FIG. 553 (SEQ ID NO:553), FIG. 555A-B (SEQ ID NO:555), FIG. 557 (SEQ ID NO:557), FIG. 559 (SEQ ID NO:559), FIG. 561 (SEQ ID NO:561), FIG. 563 (SEQ ID NO:563), FIG. 565 (SEQ ID NO:565), FIG. 567 (SEQ ID NO:567), FIG. 569 (SEQ ID NO:569), FIG. 571A-B (SEQ ID NO:571), FIG. 573 (SEQ ID NO:573), FIG. 575 (SEQ ID NO:575), FIG. 577 (SEQ ID NO:577), FIG. 579A-B (SEQ ID NO:579), FIG. 581 (SEQ ID NO:581), FIG. 583 (SEQ ID NO:583), FIG. 585 (SEQ ID NO:585), FIG. 587 (SEQ ID NO:587), FIG. 589A-B (SEQ ID NO:589), FIG. 591 (SEQ ID NO:591), FIG. 593A-B (SEQ ID NO:593), FIG. 595 (SEQ ID NO:595), FIG. 597 (SEQ ID NO:597), FIG. 599 (SEQ ID NO:599), FIG. 601A-B (SEQ ID NO:601), FIG. 603 (SEQ ID NO:603), FIG. 605 (SEQ ID NO:605), FIG. 607 (SEQ ID NO:607), FIG. 609 (SEQ ID NO:609), FIG. 611 (SEQ ID NO:611), FIG. 613 (SEQ ID NO:613), FIG. 615A-B (SEQ ID NO:615), FIG. 617 (SEQ ID NO:617), FIG. 619 (SEQ ID NO:619), FIG. 621 (SEQ ID NO:621), FIG. 623 (SEQ ID NO:623), FIG. 625 (SEQ ID NO:625), FIG. 627 (SEQ ID NO:627), FIG. 629 (SEQ ID NO:629), FIG. 631 (SEQ ID NO:631), FIG. 633 (SEQ ID NO:633), FIG. 635A-B (SEQ ID NO:635), FIG. 636 (SEQ ID NO:636), FIG. 638 (SEQ ID NO:638), FIG. 640 (SEQ ID NO:640), FIG. 642 (SEQ ID NO:642), FIG. 644 (SEQ ID NO:644), FIG. 646 (SEQ ID NO:646), FIG. 648 (SEQ ID NO:648), FIG. 650 (SEQ ID NO:650), FIG. 652 (SEQ ID NO:652), FIG. 654 (SEQ ID NO:654), FIG. 656 (SEQ ID NO:656), FIG. 658 (SEQ ID NO:658), FIG. 660 (SEQ ID NO:660), FIG. 662 (SEQ ID NO:662), FIG. 664 (SEQ ID NO:664), FIG. 666 (SEQ ID NO:666), FIG. 668 (SEQ ID NO:668), FIG. 670 (SEQ ID NO:670), FIG. 672 (SEQ ID NO:672), FIG. 674A-B (SEQ ID NO:674), FIG. 676 (SEQ ID NO:676), FIG. 678 (SEQ ID NO:678), FIG. 680A-B (SEQ ID NO:680), FIG. 682 (SEQ ID NO:682), FIG. 684 (SEQ ID NO:684), FIG. 686 (SEQ ID NO:686), FIG. 688 (SEQ ID NO:688), FIG. 690 (SEQ ID NO:690), FIG. 692 (SEQ ID NO:692), FIG. 694 (SEQ ID NO:694), FIG. 696 (SEQ ID NO:696), FIG. 698A-C (SEQ ID NO:698), FIG. 700 (SEQ ID NO:700), FIG. 702 (SEQ ID NO:702), FIG. 704 (SEQ ID NO:704), FIG. 706A-B (SEQ ID NO:706), FIG. 708 (SEQ ID NO:708), FIG. 710 (SEQ ID NO:710), FIG. 712 (SEQ ID NO:712), FIG. 714 (SEQ ID NO:714), FIG. 716A-B (SEQ ID NO:716), FIG. 718 (SEQ ID NO:718), FIG. 720 (SEQ ID NO:720), FIG. 722 (SEQ ID NO:722), FIG. 724 (SEQ ID NO:724), FIG. 726A-C (SEQ ID NO:726), FIG. 728A-C (SEQ ID NO:728), FIG. 730A-C (SEQ ID NO:730), FIG. 732A-B (SEQ ID NO:732), FIG. 734 (SEQ ID NO:734), FIG. 736 (SEQ ID NO:736), FIG. 738 (SEQ ID NO:738), FIG. 740 (SEQ ID NO:740), FIG. 742 (SEQ ID NO:742), FIG. 744A-B (SEQ ID NO:744), FIG. 746 (SEQ ID NO:746), FIG. 748 (SEQ ID NO:748), FIG. 750 (SEQ ID NO:750), FIG. 752 (SEQ ID NO:752), FIG. 754 (SEQ ID NO:754), FIG. 756A-B (SEQ ID NO:756), FIG. 758 (SEQ ID NO:758), FIG. 760 (SEQ ID NO:760), FIG. 762 (SEQ ID NO:762), FIG. 764 (SEQ ID NO:764), FIG. 766 (SEQ ID NO:766), FIG. 768 (SEQ ID NO:768), FIG. 769 (SEQ ID NO:769), FIG. 771 (SEQ ID NO:771), FIG. 773 (SEQ ID NO:773), FIG. 775 (SEQ ID NO:775), FIG. 777 (SEQ ID NO:777), FIG. 779 (SEQ ID NO:779), FIG. 781 (SEQ ID NO:781), FIG. 783 (SEQ ID NO:783), FIG. 785A-B (SEQ ID NO:785), FIG. 787 (SEQ ID NO:787), FIG. 789 (SEQ ID NO:789), FIG. 791 (SEQ ID NO:791), FIG. 793 (SEQ ID NO:793), FIG. 795 (SEQ ID NO:795), FIG. 797 (SEQ ID NO:797), FIG. 799 (SEQ ID NO:799), FIG. 801 (SEQ ID NO:801), FIG. 803 (SEQ ID NO:803), FIG. 804 (SEQ ID NO:804), FIG. 806 (SEQ ID NO:806), FIG. 808 (SEQ ID NO:808), FIG. 810 (SEQ ID NO:810), FIG. 812 (SEQ ID NO:812), FIG. 814 (SEQ ID NO:814), FIG. 816 (SEQ ID NO:816), FIG. 818 (SEQ ID NO:818), FIG. 820 (SEQ ID NO:820), FIG. 822 (SEQ ID NO:822), FIG. 824 (SEQ ID NO:824), FIG. 825 (SEQ ID NO:825), FIG. 827 (SEQ ID NO:827), FIG. 829A-B (SEQ ID NO:829), FIG. 831 (SEQ ID NO:831), FIG. 833 (SEQ ID NO:833), FIG. 835 (SEQ ID NO:835), FIG. 837 (SEQ ID NO:837), FIG. 839 (SEQ ID NO:839), FIG. 841 (SEQ ID NO:841), FIG. 843 (SEQ ID NO:843), FIG. 845 (SEQ ID NO:845), FIG. 847A-B (SEQ ID NO:847), FIG. 849 (SEQ ID NO:849), FIG. 851 (SEQ ID NO:851), FIG. 853 (SEQ ID NO:853), FIG. 855 (SEQ ID NO:855), FIG. 857 (SEQ ID NO:857), FIG. 859 (SEQ ID NO:859), FIG. 861 (SEQ ID NO:861), FIG. 863 (SEQ ID NO:863), FIG. 865 (SEQ ID NO:865), FIG. 867 (SEQ ID NO:867), FIG. 869 (SEQ ID NO:869), FIG. 871A-D (SEQ ID NO:871), FIG. 873 (SEQ ID NO:873), FIG. 875 (SEQ ID NO:875), FIG. 877 (SEQ ID NO:877), FIG. 879 (SEQ ID NO:879), FIG. 881 (SEQ ID NO:881), FIG. 883 (SEQ ID NO:883), FIG. 885 (SEQ ID NO:885), FIG. 887 (SEQ ID NO:887), FIG. 889 (SEQ ID NO:889), FIG. 891 (SEQ ID NO:891), FIG. 893 (SEQ ID NO:893), FIG. 895 (SEQ ID NO:895), FIG. 897A-B (SEQ ID NO:897), FIG. 899 (SEQ ID NO:899), FIG. 901 (SEQ ID NO:901), FIG. 903 (SEQ ID NO:903), FIG. 905 (SEQ ID NO:905), FIG. 907 (SEQ ID NO:907), FIG. 909 (SEQ ID NO:909), FIG. 910 (SEQ ID NO:910), FIG. 912 (SEQ ID NO:912), FIG. 914 (SEQ ID NO:914), FIG. 916 (SEQ ID NO:916), FIG. 918 (SEQ ID NO:918), FIG. 920A-B (SEQ ID NO:920), FIG. 922 (SEQ ID NO:922), FIG. 924A-D (SEQ ID NO:924), FIG. 926 (SEQ ID NO:926), FIG. 928 (SEQ ID NO:928), FIG. 930 (SEQ ID NO:930), FIG. 932 (SEQ ID NO:932), FIG. 934 (SEQ ID NO:934), FIG. 936 (SEQ ID NO:936), FIG. 938 (SEQ ID NO:938), FIG. 939 (SEQ ID NO:939), FIG. 941 (SEQ ID NO:941), FIG. 942A-C (SEQ ID NO:942), FIG. 944A-B (SEQ ID NO:944), FIG. 945 (SEQ ID NO:945), FIG. 947 (SEQ ID NO:947), FIG. 949A-B (SEQ ID NO:949), FIG. 951 (SEQ ID NO:951), FIG. 953 (SEQ ID NO:953), FIG. 954 (SEQ ID NO:954), FIG. 956 (SEQ ID NO:956), FIG. 958 (SEQ ID NO:958), FIG. 960 (SEQ ID NO:960), FIG. 962A-B (SEQ ID NO:962), FIG. 963 (SEQ ID NO:963), FIG. 964 (SEQ ID NO:964), FIG. 965A-B (SEQ ID NO:965), FIG. 967 (SEQ ID NO:967), FIG. 969A-C (SEQ ID NO:969), FIG. 971A-B (SEQ ID NO:971), FIG. 973A-B (SEQ ID NO:973), FIG. 975 (SEQ ID NO:975), FIG. 977 (SEQ ID NO:977), FIG. 979 (SEQ ID NO:979), FIG. 981A-D (SEQ ID NO:981), FIG. 982A-B (SEQ ID NO:982), FIG. 983A-B (SEQ ID NO:983), FIG. 984A-B (SEQ ID NO:984), FIG. 986A-B (SEQ ID NO:986), FIG. 987A-B (SEQ ID NO:987), FIG. 989 (SEQ ID NO:989), FIG. 990 (SEQ ID NO:990), FIG. 992A-B (SEQ ID NO:992), FIG. 994 (SEQ ID NO:994), FIG. 996 (SEQ ID NO:996), FIG. 998 (SEQ ID NO:998), FIG. 999 (SEQ ID NO:999), FIG. 1001 (SEQ ID NO:1001), FIG. 1003 (SEQ ID NO:1003), FIG. 1004 (SEQ ID NO:1004), FIG. 1006A-B (SEQ ID NO:1006), FIG. 1008 (SEQ ID NO:1008), FIG. 1010 (SEQ ID NO:1010), FIG. 1012A-B (SEQ ID NO:1012), FIG. 1014A-B (SEQ ID NO:1014), FIG. 1016 (SEQ ID NO:1016), FIG. 1018A-D (SEQ ID NO:1018), FIG. 1020 (SEQ ID NO:1020), FIG. 1021 (SEQ ID NO:1021), FIG. 1023 (SEQ ID NO:1023), FIG. 1025 (SEQ ID NO:1025), FIG. 1027 (SEQ ID NO:1027), FIG. 1029 (SEQ ID NO:1029), FIG. 1031 (SEQ ID NO:1031), FIG. 1033 (SEQ ID NO:1033), FIG. 1035 (SEQ ID NO:1035), FIG. 1037 (SEQ ID NO:1037), FIG. 1039A-B (SEQ ID NO:1039), FIG. 1041 (SEQ ID NO:1041), FIG. 1043 (SEQ ID NO:1043), FIG. 1045 (SEQ ID NO:1045), FIG. 1046 (SEQ ID NO:1046), FIG. 1048 (SEQ ID NO:1048), FIG. 1050 (SEQ ID NO:1050), FIG. 1052 (SEQ ID NO:1052), FIG. 1054A-C (SEQ ID NO:1054), FIG. 1056 (SEQ ID NO:1056), FIG. 1058A-B (SEQ ID NO:1058), FIG. 1059 (SEQ ID NO:1059), FIG. 1061 (SEQ ID NO:1061), FIG. 1063 (SEQ ID NO:1063), FIG. 1065 (SEQ ID NO:1065), FIG. 1067 (SEQ ID NO:1067), FIG. 1069 (SEQ ID NO:1069), FIG. 1071 (SEQ ID NO:1071), FIG. 1073 (SEQ ID NO:1073), FIG. 1075 (SEQ ID NO:1075), FIG. 1077 (SEQ ID NO:1077), FIG. 1079 (SEQ ID NO:1079), FIG. 1081A-B (SEQ ID NO:1081), FIG. 1083 (SEQ ID NO:1083), FIG. 1085 (SEQ ID NO:1085), FIG. 1087 (SEQ ID NO:1087), FIG. 1088 (SEQ ID NO:1088), FIG. 1090A-B (SEQ ID NO:1090), FIG. 1092 (SEQ ID NO:1092), FIG. 1094 (SEQ ID NO:1094), FIG. 1095A-B (SEQ ID NO:1095), FIG. 1096 (SEQ ID NO:1096), FIG. 1097 (SEQ ID NO:1097), FIG. 1099A-B (SEQ ID NO:1099), FIG. 1101 (SEQ ID NO:1101), FIG. 1102A-B (SEQ ID NO:1102), FIG. 1104A-B (SEQ ID NO:1104), FIG. 1106 (SEQ ID NO:1106), FIG. 1108A-B (SEQ ID NO:1108), FIG. 1109 (SEQ ID NO:1109), FIG. 1111 (SEQ ID NO:1111), FIG. 1113 (SEQ ID NO:1113), FIG. 1115 (SEQ ID NO:1115), FIG. 1117 (SEQ ID NO:1117), FIG. 1119 (SEQ ID NO:1119), FIG. 1121A-B (SEQ ID NO:1121), FIG. 1123A-B (SEQ ID NO:1123), FIG. 1125 (SEQ ID NO:1125), FIG. 1127 (SEQ ID NO:1127), FIG. 1129A-B (SEQ ID NO:1129), FIG. 1131 (SEQ ID NO:1131), FIG. 1133 (SEQ ID NO:1133), FIG. 1135 (SEQ ID NO:1135), FIG. 1137 (SEQ ID NO:1137), FIG. 1139 (SEQ ID NO:1139), FIG. 1141 (SEQ ID NO:1141), FIG. 1143 (SEQ ID NO:1143), FIG. 1145 (SEQ ID NO:1145), FIG. 1147 (SEQ ID NO:1147), FIG. 1149 (SEQ ID NO:1149), FIG. 1151 (SEQ ID NO:1151), FIG. 1152 (SEQ ID NO:1152), FIG. 1154 (SEQ ID NO:1154), FIG. 1156 (SEQ ID NO:1156), FIG. 1158 (SEQ ID NO:1158), FIG. 1160 (SEQ ID NO:1160), FIG. 1162 (SEQ ID NO:1162), FIG. 1163 (SEQ ID NO:1163), FIG. 1165A-B (SEQ ID NO:1165), FIG. 1167 (SEQ ID NO:1167), FIG. 1169 (SEQ ID NO:1169), FIG. 1171 (SEQ ID NO:1171), FIG. 1173A-B (SEQ ID NO:1173), FIG. 1175 (SEQ ID NO:1175), FIG. 1177 (SEQ ID NO:1177), FIG. 1179 (SEQ ID NO:1179), FIG. 1181 (SEQ ID NO:1181), FIG. 1183 (SEQ ID NO:1183), FIG. 1185A-B (SEQ ID NO:1185), FIG. 1187 (SEQ ID NO:1187), FIG. 1189 (SEQ ID NO:1189), FIG. 1191A-B (SEQ ID NO:1191), FIG. 1193-(SEQ ID NO:1193), FIG. 1195 (SEQ ID NO:1195), FIG. 1197A-B (SEQ ID NO:1197), FIG. 1199 (SEQ ID NO:1199), FIG. 1201 (SEQ ID NO:1201), FIG. 1203 (SEQ ID NO:1203), FIG. 1205 (SEQ ID NO:1205), FIG. 1207 (SEQ ID NO:1207), FIG. 1209 (SEQ ID NO:1209), FIG. 1211 (SEQ ID NO:1211), FIG. 1213 (SEQ ID NO:1213), FIG. 1215 (SEQ ID NO:1215), FIG. 1217 (SEQ ID NO:1217), FIG. 1219 (SEQ ID NO:1219), FIG. 1221 (SEQ ID NO:1221), FIG. 1223A-B (SEQ ID NO:1223), FIG. 1225 (SEQ ID NO:1225), FIG. 1227 (SEQ ID NO:1227), FIG. 1229 (SEQ ID NO:1229), FIG. 1231 (SEQ ID NO:1231), FIG. 1233 (SEQ ID NO:1233), FIG. 1235 (SEQ ID NO:1235), FIG. 1237 (SEQ ID NO:1237), FIG. 1239 (SEQ ID NO:1239), FIG. 1241 (SEQ ID NO:1241), FIG. 1243 (SEQ ID NO:1243), FIG. 1245 (SEQ ID NO:1245), FIG. 1247 (SEQ ID NO:1247), FIG. 1249 (SEQ ID NO:1249), FIG. 1251 (SEQ ID NO:1251), FIG. 1253 (SEQ ID NO:1253), FIG. 1255 (SEQ ID NO:1255), FIG. 1257 (SEQ ID NO:1257), FIG. 1259 (SEQ ID NO:1259), FIG. 1261 (SEQ ID NO:1216), FIG. 1263 (SEQ ID NO:1263), FIG. 1265 (SEQ ID NO:1265), FIG. 1267 (SEQ ID NO:1267), FIG. 1269 (SEQ ID NO:1269), FIG. 1271 (SEQ ID NO:1271), FIG. 1273 (SEQ ID NO:1273), FIG. 1275 (SEQ ID NO:1275), FIG. 1277 (SEQ ID NO:1277), FIG. 1279 (SEQ ID NO:1279), FIG. 1281 (SEQ ID NO:1281), FIG. 1283 (SEQ ID NO:1283), FIG. 1285 (SEQ ID NO:1285), FIG. 1287 (SEQ ID NO:1287), FIG. 1289 (SEQ ID NO:1289), FIG. 1291 (SEQ ID NO:1291), FIG. 1293 (SEQ ID NO:1293), FIG. 1295 (SEQ ID NO:1295), FIG. 1297 (SEQ ID NO:1297), FIG. 1299 (SEQ ID NO:1299), FIG. 1301 (SEQ ID NO:1301), FIG. 1303 (SEQ ID NO:1303), FIG. 1305 (SEQ ID NO:1305), FIG. 1307 (SEQ ID NO:1307), FIG. 1309 (SEQ ID NO:1309), FIG. 1311 (SEQ ID NO:1311), FIG. 1313 (SEQ ID NO:1313), FIG. 1315 (SEQ ID NO:1315), FIG. 1317 (SEQ ID NO:1317), FIG. 1319 (SEQ ID NO:1319), FIG. 1321 (SEQ ID NO:1321), FIG. 1323 (SEQ ID NO:1323), FIG. 1325 (SEQ ID NO:1325), FIG. 1327 (SEQ ID NO:1327), FIG. 1329 (SEQ ID NO:1329), FIG. 1331 (SEQ ID NO:1331), FIG. 1333 (SEQ ID NO:1333), FIG. 1335 (SEQ ID NO:1335), FIG. 1337 (SEQ ID NO:1337), FIG. 1339 (SEQ ID NO:1339), FIG. 1341 (SEQ ID NO:1341), FIG. 1343 (SEQ ID NO:1343), FIG. 1345 (SEQ ID NO:1345), FIG. 1347 (SEQ ID NO:1347), FIG. 1349 (SEQ ID NO:1349), FIG. 1351 (SEQ ID NO:1351), FIG. 1353 (SEQ ID NO:1353), FIG. 1355 (SEQ ID NO:1355), FIG. 1357 (SEQ ID NO:1357), FIG. 1359 (SEQ ID NO:1359), FIG. 1361 (SEQ ID NO:1361), FIG. 1363 (SEQ ID NO:1363), FIG. 1365 (SEQ ID NO:1365), FIG. 1367 (SEQ ID NO:1367), FIG. 1369 (SEQ ID NO:1369), FIG. 1371 (SEQ ID NO:1371), FIG. 1373 (SEQ ID NO:1373), FIG. 1375 (SEQ ID NO:1375), FIG. 1377 (SEQ ID NO:1377), FIG. 1379 (SEQ ID NO:1379), FIG. 1381 (SEQ ID NO:1381), FIG. 1383 (SEQ ID NO:1383), FIG. 1385 (SEQ ID NO:1385), FIG. 1387 (SEQ ID NO:1387), FIG. 1389 (SEQ ID NO:1389), FIG. 1391 (SEQ ID NO:1391), FIG. 1393 (SEQ ID NO:1393), FIG. 1395 (SEQ ID NO:1395), FIG. 1397 (SEQ ID NO:1397), FIG. 1399 (SEQ ID NO:1399), FIG. 1401 (SEQ ID NO:1401), FIG. 1403 (SEQ ID NO:1403), FIG. 1405 (SEQ ID NO:1405), FIG. 1407 (SEQ ID NO:1407), FIG. 1409 (SEQ ID NO:1409), FIG. 1411 (SEQ ID NO:1411), FIG. 1413 (SEQ ID NO:1413), FIG. 1415 (SEQ ID NO:1415), FIG. 1417 (SEQ ID NO:1417), FIG. 1419 (SEQ ID NO:1419), FIG. 1421 (SEQ ID NO:1421), FIG. 1423 (SEQ ID NO:1423), FIG. 1424 (SEQ ID NO:1424), FIG. 1426 (SEQ ID NO:1426), FIG. 1428 (SEQ ID NO:1428), FIG. 1430 (SEQ ID NO:1430), FIG. 1431 (SEQ ID NO:1431), FIG. 1433 (SEQ ID NO:1433), FIG. 1435 (SEQ ID NO:1435), FIG. 1437 (SEQ ID NO:1437), FIG. 1439 (SEQ ID NO:1439), FIG. 1441 (SEQ ID NO:1441), FIG. 1443 (SEQ ID NO:1443), FIG. 1445 (SEQ ID NO:1445), FIG. 1447 (SEQ ID NO:1447), FIG. 1449 (SEQ ID NO:1449), FIG. 1451 (SEQ ID NO:1451), FIG. 1453 (SEQ ID NO:1453), FIG. 1455 (SEQ ID NO:1455), FIG. 1457 (SEQ ID NO:1457), FIG. 1459 (SEQ ID NO:1459), FIG. 1461 (SEQ ID NO:1461), FIG. 1463 (SEQ ID NO:1463), FIG. 1465 (SEQ ID NO:1465), FIG. 1467 (SEQ ID NO:1467), FIG. 1469 (SEQ ID NO:1469), FIG. 1471 (SEQ ID NO:1471), FIG. 1473 (SEQ ID NO:1473), FIG. 1475 (SEQ ID NO:1475), FIG. 1477 (SEQ ID NO:1477), FIG. 1479 (SEQ ID NO:1479), FIG. 1481 (SEQ ID NO:1481), FIG. 1483 (SEQ ID NO:1483), FIG. 1485 (SEQ ID NO:1485), FIG. 1487 (SEQ ID NO:1487), FIG. 1489 (SEQ ID NO:1489), FIG. 1491 (SEQ ID NO:1491), FIG. 1493 (SEQ ID NO:1493), FIG. 1495 (SEQ ID NO:1495), FIG. 1497 (SEQ ID NO:1497), FIG. 1499 (SEQ ID NO:1499), FIG. 1501 (SEQ ID NO:1501), FIG. 1503 (SEQ ID NO:1503), FIG. 1505 (SEQ ID NO:1505), FIG. 1507 (SEQ ID NO:1507), FIG. 1509 (SEQ ID NO:1509), FIG. 1511 (SEQ ID NO:1511), FIG. 1513 (SEQ ID NO:1513), FIG. 1515 (SEQ ID NO:1515), FIG. 1517 (SEQ ID NO:1517), FIG. 1519 (SEQ ID NO:1519), FIG. 1521 (SEQ ID NO:1521), FIG. 1523 (SEQ ID NO:1523), FIG. 1525 (SEQ ID NO:1525), FIG. 1527 (SEQ ID NO:1527), FIG. 1529 (SEQ ID NO:1529), FIG. 1531 (SEQ ID NO:1531), FIG. 1533 (SEQ ID NO:1533), FIG. 1535 (SEQ ID NO:1535), FIG. 1537 (SEQ ID NO:1537), FIG. 1539 (SEQ ID NO:1539), FIG. 1541 (SEQ ID NO:1541), FIG. 1543 (SEQ ID NO:1543), FIG. 1545 (SEQ ID NO:1545), FIG. 1547 (SEQ ID NO:1547), FIG. 1549 (SEQ ID NO:1549), FIG. 1551 (SEQ ID NO:1551), FIG. 1553 (SEQ ID NO:1553), FIG. 1555 (SEQ ID NO:1555), FIG. 1557 (SEQ ID NO:1557), FIG. 1559 (SEQ ID NO:1559), FIG. 1561 (SEQ ID NO:1561), FIG. 1563 (SEQ ID NO:1563), FIG. 1565 (SEQ ID NO:1565), FIG. 1567 (SEQ ID NO:1567), FIG. 1569 (SEQ ID NO:1569), FIG. 1571 (SEQ ID NO:1571), FIG. 1573 (SEQ ID NO:1573), FIG. 1575 (SEQ ID NO:1575), FIG. 1577 (SEQ ID NO:1577), FIG. 1579 (SEQ ID NO:1579), FIG. 1581 (SEQ ID NO:1581), FIG. 1583 (SEQ ID NO:1583), FIG. 1584 (SEQ ID NO:1584), FIG. 1586 (SEQ ID NO:1586), FIG. 1588 (SEQ ID NO:1588), FIG. 1589 (SEQ ID NO:1589), FIG. 1591 (SEQ ID NO:1591), FIG. 1593 (SEQ ID NO:1593), FIG. 1595 (SEQ ID NO:1595), FIG. 1596 (SEQ ID NO:1596), FIG. 1598 (SEQ ID NO:1598), FIG. 1600 (SEQ ID NO:1600), FIG. 1602 (SEQ ID NO:1602), FIG. 1604 (SEQ ID NO:1604), FIG. 1606 (SEQ ID NO:1606), FIG. 1608 (SEQ ID NO:1608), FIG. 1609 (SEQ ID NO:1509), FIG. 1611 (SEQ ID NO:1611), FIG. 1612 (SEQ ID NO:1612), FIG. 1614 (SEQ ID NO:1614), FIG. 1616 (SEQ ID NO:1616), FIG. 1618 (SEQ ID NO:1618), FIG. 1620 (SEQ ID NO:1620), FIG. 1622 (SEQ ID NO:1622), FIG. 1624 (SEQ ID NO:1624), FIG. 1626 (SEQ ID NO:1626), FIG. 1628 (SEQ ID NO:1628), FIG. 1630 (SEQ ID NO:1630), FIG. 1632 (SEQ ID NO:1632), FIG. 1634 (SEQ ID NO:1634), FIG. 1636 (SEQ ID NO:1636), FIG. 1638 (SEQ ID NO:1638), FIG. 1640 (SEQ ID NO:1640), FIG. 1642 (SEQ ID NO:1642), FIG. 1644 (SEQ ID NO:1644), FIG. 1646 (SEQ ID NO:1646), FIG. 1648 (SEQ ID NO:1648), FIG. 1649 (SEQ ID NO:1649), FIG. 1651 (SEQ ID NO:1651), FIG. 1652 (SEQ ID NO:1652), FIG. 1653 (SEQ ID NO:1653), FIG. 1655 (SEQ ID NO:1655), FIG. 1567 (SEQ ID NO:1657), FIG. 1659 (SEQ ID NO:1659), FIG. 1661 (SEQ ID NO:1661), FIG. 1663 (SEQ ID NO:1663), FIG. 1665 (SEQ ID NO:1665), FIG. 1667 (SEQ ID NO:1667), FIG. 1669 (SEQ ID NO:1669), FIG. 1671 (SEQ ID NO:1671), FIG. 1673 (SEQ ID NO:1673), FIG. 1675 (SEQ ID NO:1675), FIG. 1677 (SEQ ID NO:1677), FIG. 1679 (SEQ ID NO:1679), FIG. 1681 (SEQ ID NO:1681), FIG. 1683 (SEQ ID NO:1683), FIG. 1684 (SEQ ID NO:1684), FIG. 1685 (SEQ ID NO:1685), FIG. 1687 (SEQ ID NO:1687), FIG. 1689 (SEQ ID NO:1689), FIG. 1690 (SEQ ID NO:1690), FIG. 1692 (SEQ ID NO:1692), FIG. 1694 (SEQ ID NO:1694), FIG. 1696 (SEQ ID NO:1696), FIG. 1698 (SEQ ID NO:1698), FIG. 1700 (SEQ ID NO:1700), FIG. 1702 (SEQ ID NO:1702), FIG. 1704 (SEQ ID NO:1704), FIG. 1706 (SEQ ID NO:1706), FIG. 1707 (SEQ ID NO:1707), FIG. 1709 (SEQ ID NO:1709), FIG. 1711 (SEQ ID NO:1711), FIG. 1713 (SEQ ID NO:1713), FIG. 1715 (SEQ ID NO:1715), FIG. 1717 (SEQ ID NO:1717), FIG. 1719 (SEQ ID NO:1719), FIG. 1721 (SEQ ID NO:1721), FIG. 1723 (SEQ ID NO:1723), FIG. 1724 (SEQ ID NO:1724), FIG. 1726 (SEQ ID NO:1726), FIG. 1728 (SEQ ID NO:1728), FIG. 1730 (SEQ ID NO:1730), FIG. 1732 (SEQ ID NO:1732), FIG. 1734 (SEQ ID NO:1734), FIG. 1736 (SEQ ID NO:1736), FIG. 1737 (SEQ ID NO:1737), FIG. 1739 (SEQ ID NO:1739), FIG. 1741 (SEQ ID NO:1741), FIG. 1743 (SEQ ID NO:1743), FIG. 1745 (SEQ ID NO:1745), FIG. 1747 (SEQ ID NO:1747), FIG. 1749 (SEQ ID NO:1749), FIG. 1751 (SEQ ID NO:1751), FIG. 1753 (SEQ ID NO:1753), FIG. 1755 (SEQ ID NO:1755), FIG. 1757 (SEQ ID NO:1757), FIG. 1759 (SEQ ID NO:1759), FIG. 1761 (SEQ ID NO:1761), FIG. 1763 (SEQ ID NO:1763), FIG. 1765 (SEQ ID NO:1765), FIG. 1766 (SEQ ID NO:1766), FIG. 1768 (SEQ ID NO:1768), FIG. 1770 (SEQ ID NO:1770), FIG. 1772 (SEQ ID NO:1772), FIG. 1773 (SEQ ID NO:1773), FIG. 1775 (SEQ ID NO:1775), FIG. 1777 (SEQ ID NO:1777), FIG. 1778 (SEQ ID NO:1778), FIG. 1780 (SEQ ID NO:1780), FIG. 1781 (SEQ ID NO:1781), FIG. 1783 (SEQ ID NO:1783), FIG. 1785 (SEQ ID NO:1785), FIG. 1787 (SEQ ID NO:1787), FIG. 1788 (SEQ ID NO:1788), FIG. 1790 (SEQ ID NO:1790), FIG. 1792 (SEQ ID NO:1792), FIG. 1793 (SEQ ID NO:1793), FIG. 1795 (SEQ ID NO:1795), FIG. 1797 (SEQ ID NO:1797), FIG. 1799 (SEQ ID NO:1799), FIG. 1801 (SEQ ID NO:1801), FIG. 1803 (SEQ ID NO:1803), FIG. 1805 (SEQ ID NO:1805), FIG. 1807 (SEQ ID NO:1807), FIG. 1809 (SEQ ID NO:1809), FIG. 1811 (SEQ ID NO:1811), FIG. 1813 (SEQ ID NO:1813), FIG. 1815 (SEQ ID NO:1815), FIG. 1817 (SEQ ID NO:1817), FIG. 1819 (SEQ ID NO:1819), FIG. 1821 (SEQ ID NO:1821), FIG. 1823 (SEQ ID NO:1823), FIG. 1825 (SEQ ID NO:1825), FIG. 1827 (SEQ ID NO:1827), FIG. 1829 (SEQ ID NO:1829), FIG. 1831 (SEQ ID NO:1831), FIG. 1833 (SEQ ID NO:1833), FIG. 1835 (SEQ ID NO:1835), FIG. 1837 (SEQ ID NO:1837), FIG. 1839 (SEQ ID NO:1839), FIG. 1841 (SEQ ID NO:1841), FIG. 1843 (SEQ ID NO:1843), FIG. 1845 (SEQ ID NO:1845), FIG. 1847 (SEQ ID NO:1847), FIG. 1849 (SEQ ID NO:1849), FIG. 1851 (SEQ ID NO:1851), FIG. 1853 (SEQ ID NO:1853), FIG. 1854 (SEQ ID NO:1854), FIG. 1855 (SEQ ID NO:1855), FIG. 1857 (SEQ ID NO:1857), FIG. 1859 (SEQ ID NO:1859), FIG. 1861 (SEQ ID NO:1861), FIG. 1863 (SEQ ID NO:1863), FIG. 1865 (SEQ ID NO:1865), FIG. 1866 (SEQ ID NO:1866), FIG. 1868 (SEQ ID NO:1868), FIG. 1870 (SEQ ID NO:1870), FIG. 1872 (SEQ ID NO:1872), FIG. 1874 (SEQ ID NO:1874), FIG. 1875 (SEQ ID NO:1875), FIG. 1877 (SEQ ID NO:1877), FIG. 1879 (SEQ ID NO:1879), FIG. 1881 (SEQ ID NO:1881), FIG. 1882 (SEQ ID NO:1882), FIG. 1884 (SEQ ID NO:1884), FIG. 1886 (SEQ ID NO:1886), FIG. 1888 (SEQ ID NO:1888), FIG. 1889 (SEQ ID NO:1889), FIG. 1891 (SEQ ID NO:1891), FIG. 1893 (SEQ ID NO:1893), FIG. 1895 (SEQ ID NO:1895), FIG. 1897 (SEQ ID NO:1897), FIG. 1899 (SEQ ID NO:1899), FIG. 1901 (SEQ ID NO:1901), FIG. 1903 (SEQ ID NO:1903), FIG. 1905 (SEQ ID NO:1905), FIG. 1907 (SEQ ID NO:1907), FIG. 1909 (SEQ ID NO:1909), FIG. 1911 (SEQ ID NO:1911), FIG. 1913 (SEQ ID NO:1913), FIG. 1915 (SEQ ID NO:1915), FIG. 1917 (SEQ ID NO:1917), FIG. 1919 (SEQ ID NO:1919), FIG. 1921 (SEQ ID NO:1921), FIG. 1923 (SEQ ID NO:1923), FIG. 1925 (SEQ ID NO:1925), FIG. 1927 (SEQ ID NO:1927), FIG. 1929 (SEQ ID NO:1929), FIG. 1931 (SEQ ID NO:1931), FIG. 1933 (SEQ ID NO:1933), FIG. 1935 (SEQ ID NO:1935), FIG. 1937 (SEQ ID NO:1937), FIG. 1939 (SEQ ID NO:1939), FIG. 1941 (SEQ ID NO:1941), FIG. 1943 (SEQ ID NO:1943), FIG. 1945 (SEQ ID NO:1945), FIG. 1947 (SEQ ID NO:1947), FIG. 1949 (SEQ ID NO:1949), FIG. 1950 (SEQ ID NO:1950), FIG. 1952 (SEQ ID NO:1952), FIG. 1954 (SEQ ID NO:1954), FIG. 1956 (SEQ ID NO:1956), FIG. 1958 (SEQ ID NO:1958), FIG. 1960 (SEQ ID NO:1960), FIG. 1962 (SEQ ID NO:1962), FIG. 1963 (SEQ ID NO:1963), FIG. 1965 (SEQ ID NO:1965), FIG. 1967 (SEQ ID NO:1967), FIG. 1969 (SEQ ID NO:1969), FIG. 1971 (SEQ ID NO:1971), FIG. 1973 (SEQ ID NO:1973), FIG. 1975 (SEQ ID NO:1975), FIG. 1977 (SEQ ID NO:1977), FIG. 1979 (SEQ ID NO:1979), FIG. 1981 (SEQ ID NO:1981), FIG. 1983 (SEQ ID NO:1983), FIG. 1985 (SEQ ID NO:1985), FIG. 1987 (SEQ ID NO:1987), FIG. 1989 (SEQ ID NO:1989), FIG. 1991 (SEQ ID NO:1991), FIG. 1993 (SEQ ID NO:1993), FIG. 1995 (SEQ ID NO:1995), FIG. 1997 (SEQ ID NO:1997), FIG. 1999 (SEQ ID NO:1999), FIG. 2001 (SEQ ID NO:2001), FIG. 2003 (SEQ ID NO:2003), FIG. 2005 (SEQ ID NO:2005), FIG. 2007 (SEQ ID NO:2007), FIG. 2009 (SEQ ID NO:2009), FIG. 2011 (SEQ ID NO:2011), FIG. 2013 (SEQ ID NO:2013), FIG. 2015 (SEQ ID NO:2015), FIG. 2017 (SEQ ID NO:2017), FIG. 2019 (SEQ ID NO:2019), FIG. 2021 (SEQ ID NO:2021), FIG. 2023 (SEQ ID NO:2023), FIG. 2025 (SEQ ID NO:2025), FIG. 2027 (SEQ ID NO:2027), FIG. 2029 (SEQ ID NO:2029), FIG. 2031 (SEQ ID NO:2031), FIG. 2033 (SEQ ID NO:2033), FIG. 2035 (SEQ ID NO:2035), FIG. 2037 (SEQ ID NO:2037), FIG. 2039 (SEQ ID NO:2039), FIG. 2041 (SEQ ID NO:2041), FIG. 2043 (SEQ ID NO:2043), FIG. 2045 (SEQ ID NO:2045), FIG. 2047 (SEQ ID NO:2047), FIG. 2049 (SEQ ID NO:2049), FIG. 2051 (SEQ ID NO:2051), FIG. 2053 (SEQ ID NO:2053), FIG. 2055 (SEQ ID NO:2055), FIG. 2057 (SEQ ID NO:2057), FIG. 2059 (SEQ ID NO:2059), FIG. 2061 (SEQ ID NO:2061), FIG. 2063 (SEQ ID NO:2063), FIG. 2065 (SEQ ID NO:2065), FIG. 2067 (SEQ. ID NO:2067), FIG. 2069 (SEQ ID NO:2069), FIG. 2071 (SEQ ID NO:2071), FIG. 2073 (SEQ ID NO:2073), FIG. 2075 (SEQ ID NO:2075), FIG. 2077 (SEQ ID NO:2077), FIG. 2079 (SEQ ID NO:2079), FIG. 2081 (SEQ ID NO:2081), FIG. 2083 (SEQ ID NO:2083), FIG. 2085 (SEQ ID NO:2085), FIG. 2087 (SEQ ID NO:2087), FIG. 2089 (SEQ ID NO:2089), FIG. 2091 (SEQ ID NO:2091), FIG. 2093 (SEQ ID NO:2093), FIG. 2095 (SEQ ID NO:2095), FIG. 2097 (SEQ ID NO:2097), FIG. 2099 (SEQ ID NO:2099), FIG. 2101 (SEQ ID NO:2101), FIG. 2103 (SEQ ID NO:2103), FIG. 2105 (SEQ ID NO:2105), FIG. 2107 (SEQ ID NO:2107), FIG. 2109 (SEQ ID NO:2109), FIG. 2111 (SEQ ID NO:2111), FIG. 2113 (SEQ ID NO:2113), FIG. 2115 (SEQ ID NO:2115), FIG. 2117 (SEQ ID NO:2117), FIG. 2119 (SEQ ID NO:2119), FIG. 2121 (SEQ ID NO:2121), FIG. 2123 (SEQ ID NO:2123), FIG. 2125 (SEQ ID NO:2125), FIG. 2127 (SEQ ID NO:2127), FIG. 2129 (SEQ ID NO:2129), FIG. 2131 (SEQ ID NO:2131), FIG. 2133 (SEQ ID NO:2133), FIG. 2135 (SEQ ID NO:2135), FIG. 2137 (SEQ ID NO:2137), FIG. 2138 (SEQ ID NO:2138), FIG. 2140 (SEQ ID NO:2140), FIG. 2142 (SEQ ID NO:2142), FIG. 2144 (SEQ ID NO:2144), FIG. 2146 (SEQ ID NO:2146), FIG. 2147 (SEQ ID NO:2147), FIG. 2148 (SEQ ID NO:2148), FIG. 2150 (SEQ ID NO:2150), FIG. 2152 (SEQ ID NO:2152), FIG. 2154 (SEQ ID NO:2154), FIG. 2156 (SEQ ID NO:2156), FIG. 2158 (SEQ ID NO:2158), FIG. 2160 (SEQ ID NO:2160), FIG. 2162 (SEQ ID NO:2162), FIG. 2164 (SEQ ID NO:2164), FIG. 2166 (SEQ ID NO:2166), FIG. 2168 (SEQ ID NO:2168), FIG. 2170 (SEQ ID NO:2170), FIG. 2172 (SEQ ID NO:2172), FIG. 2174 (SEQ ID NO2174), FIG. 2176 (SEQ ID NO:2176), FIG. 2178 (SEQ ID NO:2178), FIG. 2180 (SEQ ID NO:2180), FIG. 2182 (SEQ ID NO:2182), FIG. 2184 (SEQ ID NO:2184), FIG. 2186 (SEQ ID NO:2186), FIG. 2188 (SEQ ID NO:2188), FIG. 2190 (SEQ ID NO:2190), FIG. 2192 (SEQ ID NO:2192), FIG. 2194 (SEQ ID NO:2194), FIG. 2196 (SEQ ID NO:2196), FIG. 2198 (SEQ ID NO:2198), FIG. 2200 (SEQ ID NO:2200), FIG. 2202 (SEQ ID NO:2202), FIG. 2204 (SEQ ID NO:2204), FIG. 2206 (SEQ ID NO:2206), FIG. 2208 (SEQ ID NO:2208), FIG. 2210 (SEQ ID NO:2210), FIG. 2212 (SEQ ID NO:2212), FIG. 2214 (SEQ ID NO:2214), FIG. 2216 (SEQ ID NO:2216), FIG. 2217A-B (SEQ ID NO:2217), FIG. 2219 (SEQ ID NO:2219), FIG. 2221 (SEQ ID NO:2221), FIG. 2223 (SEQ ID NO:2223), FIG. 2225 (SEQ ID NO:2225), FIG. 2227 (SEQ ID NO:2227), FIG. 2229 (SEQ ID NO:2229), FIG. 2230 (SEQ ID NO:2230), FIG. 2232 (SEQ ID NO:2232), FIG. 2234 (SEQ ID NO:2234), FIG. 2236A-B (SEQ ID NO:2236), FIG. 2238 (SEQ ID NO:2238), FIG. 2240 (SEQ ID NO:2240), FIG. 2242 (SEQ ID NO:2242), FIG. 2244 (SEQ ID NO:2244), FIG. 2246 (SEQ ID NO:2246), FIG. 2248A-B (SEQ ID NO:2248), FIG. 2250A-B (SEQ ID NO:2250), FIG. 2252 (SEQ ID NO:2252), FIG. 2254 (SEQ ID NO:2254), FIG. 2256 (SEQ ID NO:2256), FIG. 2258 (SEQ ID NO:2258), FIG. 2260 (SEQ ID NO:2260), FIG. 2262 (SEQ ID NO:2262), FIG. 2264 (SEQ ID NO:2264), FIG. 2266 (SEQ ID NO:2266), FIG. 2268 (SEQ ID NO:2268), FIG. 2270 (SEQ ID NO:2270), FIG. 2272 (SEQ ID NO:2272), FIG. 2274 (SEQ ID NO:2274), FIG. 2276 (SEQ ID NO:2276), FIG. 2278A-B (SEQ ID NO:2278), FIG. 2280 (SEQ ID NO:2280), FIG. 2282 (SEQ ID NO:2282), FIG. 2284 (SEQ ID NO:2284), FIG. 2286 (SEQ ID NO:2286), FIG. 2288 (SEQ ID NO:2288), FIG. 2290 (SEQ. ID NO:2290), FIG. 2292 (SEQ ID NO:2292), FIG. 2294 (SEQ ID NO:2294), FIG. 2296A-B (SEQ ID NO:2296), FIG. 2298 (SEQ ID NO:2298), FIG. 2300 (SEQ ID NO:2300), FIG. 2301 (SEQ ID NO:2301), FIG. 2303 (SEQ ID NO:2303), FIG. 2305A-B (SEQ ID NO:2305), FIG. 2307 (SEQ ID NO:2307), FIG. 2308 (SEQ ID NO:2308), FIG. 2309A-B (SEQ ID NO:2309), FIG. 2311 (SEQ ID NO:2311), FIG. 2312 (SEQ ID NO:2312), FIG. 2314 (SEQ ID NO:2314), FIG. 2316 (SEQ ID NO:2316), FIG. 2318A-B (SEQ ID NO:2318), FIG. 2320 (SEQ ID NO:2320), FIG. 2322A-B (SEQ ID NO:2322), FIG. 2323A-B (SEQ ID NO:2323), FIG. 2325 (SEQ ID NO:2325), FIG. 2327 (SEQ ID NO:2327), FIG. 2329 (SEQ ID NO:2329), FIG. 2331A-B (SEQ ID NO:2331), FIG. 2333 (SEQ ID NO:2333), FIG. 2335 (SEQ ID NO:2335), FIG. 2337 (SEQ ID NO:2337), FIG. 2339A-B (SEQ ID NO:2339), FIG. 2341A-C (SEQ ID NO:2341), FIG. 2343 (SEQ ID NO:2343), FIG. 2345 (SEQ ID NO:2345), FIG. 2346 (SEQ ID NO:2346), FIG. 2348 (SEQ ID NO:2348), FIG. 2349 (SEQ ID NO:2349), FIG. 2351 (SEQ ID NO:2351), FIG. 2353A-B (SEQ ID NO:2353), FIG. 2355A-C (SEQ ID NO:2355), FIG. 2357 (SEQ ID NO:2357), FIG. 2359 (SEQ ID NO:2359), FIG. 2361 (SEQ ID NO:2361), FIG. 2363 (SEQ ID NO:2363), FIG. 2365 (SEQ ID NO:2365), FIG. 2367 (SEQ ID NO:2367), FIG. 2369 (SEQ ID NO:2369), FIG. 2371 (SEQ ID NO:2371), FIG. 2373 (SEQ ID NO:2373), FIG. 2375 (SEQ ID NO:2375), FIG. 2377 (SEQ ID NO:2377), FIG. 2379 (SEQ ID NO:2379), FIG. 2381 (SEQ ID NO:2381), FIG. 2383 (SEQ ID NO:2383), FIG. 2385 (SEQ ID NO:2385), FIG. 2387 (SEQ ID NO:2387), FIG. 2389 (SEQ ID NO:2389), FIG. 2391 (SEQ ID NO:2391), FIG. 2393 (SEQ ID NO:2393), FIG. 2395 (SEQ ID NO:2395), FIG. 2397 (SEQ ID NO:2397), FIG. 2399 (SEQ ID NO:2399), FIG. 2401 (SEQ ID NO:2401), FIG. 2403 (SEQ ID NO:2403), FIG. 2405A-B (SEQ ID NO:2405), FIG. 2406 (SEQ ID NO:2406), FIG. 2408 (SEQ ID NO:2408), FIG. 2410A-B (SEQ ID NO:2410), FIG. 2411 (SEQ ID NO:2411), FIG. 2413 (SEQ ID NO:2413), FIG. 2414 (SEQ ID NO:2414), FIG. 2416 (SEQ ID NO:2416), FIG. 2417 (SEQ ID NO:2417), FIG. 2418 (SEQ ID NO:2418), FIG. 2420 (SEQ ID NO:2420), FIG. 2421 (SEQ ID NO:2421), FIG. 2422 (SEQ ID NO:2422), FIG. 2424 (SEQ ID NO:2424), FIG. 2426A-B (SEQ ID NO:2426), FIG. 2428 (SEQ ID NO:2428), FIG. 2430 (SEQ ID NO:2430), FIG. 2432A-B (SEQ ID NO:2432), FIG. 2434 (SEQ ID NO:2434), FIG. 2436 (SEQ ID NO:2436), FIG. 2438 (SEQ ID NO:2438), FIG. 2440 (SEQ ID NO:2440), FIG. 2442 (SEQ ID NO:2442), FIG. 2444 (SEQ ID NO:2444), FIG. 2446 (SEQ ID NO:2446), FIG. 2447 (SEQ ID NO:2447), FIG. 2449 (SEQ ID NO:2449), FIG. 2451 (SEQ ID NO:2451), FIG. 2453 (SEQ ID NO:2453), FIG. 2455 (SEQ ID NO:2455), FIG. 2456A-B (SEQ ID NO:2456), FIG. 2458 (SEQ ID NO:2458), FIG. 2460 (SEQ ID NO:2460), FIG. 2462 (SEQ ID NO:2462), FIG. 2463 (SEQ ID NO:2463), FIG. 2464 (SEQ ID NO:2464), FIG. 2466 (SEQ ID NO:2466), FIG. 2467 (SEQ ID NO:2467), FIG. 2469 (SEQ ID NO:2469), FIG. 2470 (SEQ ID NO:2470), FIG. 2471A-B (SEQ ID NO:2471), FIG. 2473 (SEQ ID NO:2473), FIG. 2475 (SEQ ID NO:2475), FIG. 2476 (SEQ ID NO:2476), FIG. 2477 (SEQ ID NO:2477), FIG. 2478 (SEQ ID NO:2478), FIG. 2479 (SEQ ID NO:2479), FIG. 2480 (SEQ ID NO:2480), FIG. 2481 (SEQ ID NO:2481) or FIG. 2483 (SEQ ID NO:2483).

2. Isolated nucleic acid comprising at least 80% nucleic acid sequence identity to a nucleotide sequence consisting of the full-length coding sequence of the nucleotide sequence shown in FIG. 1 (SEQ ID NO:1), FIG. 3 (SEQ ID NO:3), FIG. 5 (SEQ ID NO:5), FIG. 7 (SEQ ID NO:7), FIG. 9A-B (SEQ ID NO:9), FIG. 11 (SEQ ID NO:11), FIG. 13 (SEQ ID NO:13), FIG. 15A-B (SEQ ID NO:15), FIG. 17 (SEQ ID NO:17), FIG. 19 (SEQ ID NO:19), FIG. 21 (SEQ ID NO:21), FIG. 23A-B (SEQ ID NO:23), FIG. 25 (SEQ ID NO:25), FIG. 27A-C (SEQ ID NO:27), FIG. 29 (SEQ ID NO:29), FIG. 31 (SEQ ID NO:31), FIG. 33A-B (SEQ ID NO:33), FIG. 35 (SEQ ID NO:35), FIG. 37 (SEQ ID NO:37), FIG. 39 (SEQ ID NO:39), FIG. 41 (SEQ ID NO:41), FIG. 42 (SEQ ID NO:42), FIG. 45 (SEQ ID NO:45), FIG. 47 (SEQ ID NO:47), FIG. 49 (SEQ ID NO:49), FIG. 51 (SEQ ID NO:51), FIG. 53 (SEQ ID NO:53), FIG. 55A-B (SEQ ID NO:55), FIG. 57 (SEQ ID NO:57), FIG. 59 (SEQ ID NO:59), FIG. 61 (SEQ ID NO:61), FIG. 63A-B (SEQ ID NO:63), FIG. 65 (SEQ ID NO:65), FIG. 67A-B (SEQ ID NO:67), FIG. 69 (SEQ ID NO:69), FIG. 71A-B (SEQ ID NO:71), FIG. 73 (SEQ ID NO:73), FIG. 75 (SEQ ID NO:75), FIG. 77 (SEQ ID NO:77), FIG. 79 (SEQ ID NO:79), FIG. 81 (SEQ ID NO:81), FIG. 83 (SEQ ID NO:83), FIG. 85 (SEQ ID NO:85), FIG. 87 (SEQ ID NO:87), FIG. 89 (SEQ ID NO:89), FIG. 91 (SEQ ID NO:91), FIG. 93A-B (SEQ ID NO:93), FIG. 95A-B (SEQ ID NO:95), FIG. 97 (SEQ ID NO:97), FIG. 99 (SEQ ID NO:99), FIG. 101 (SEQ ID NO:101), FIG. 103 (SEQ ID NO:103), FIG. 105 (SEQ ID NO:105), FIG. 107 (SEQ ID NO:107), FIG. 109 (SEQ ID NO:109), FIG. 111A-B (SEQ ID NO:111), FIG. 113 (SEQ ID NO:113), FIG. 114 (SEQ ID NO:114), FIG. 116 (SEQ ID NO:116), FIG. 118 (SEQ ID NO:118), FIG. 120A-B (SEQ ID NO:120), FIG. 122 (SEQ ID NO:122), FIG. 124A-B (SEQ ID NO:124), FIG. 126 (SEQ ID NO:126), FIG. 128 (SEQ ID NO:128), FIG. 130 (SEQ ID NO:130), FIG. 132 (SEQ ID NO:132), FIG. 134 (SEQ ID NO:134), FIG. 136 (SEQ ID NO:136), FIG. 138A-B (SEQ ID NO:138), FIG. 140 (SEQ ID NO:140), FIG. 142 (SEQ ID NO:142), FIG. 144 (SEQ ID NO:144), FIG. 146 (SEQ ID NO:146), FIG. 148 (SEQ ID NO:148), FIG. 150 (SEQ ID NO:150), FIG. 152A-B (SEQ ID NO:152), FIG. 154 (SEQ ID NO:154), FIG. 156 (SEQ ID NO:156), FIG. 158A-B (SEQ ID NO:158), FIG. 160 (SEQ ID NO:160), FIG. 162 (SEQ ID NO:162), FIG. 164A-B (SEQ ID NO:164), FIG. 166 (SEQ ID NO:166), FIG. 168 (SEQ ID NO:168), FIG. 170 (SEQ ID NO:170), FIG. 172 (SEQ ID NO:172), FIG. 174 (SEQ ID NO:174), FIG. 176 (SEQ ID NO:176), FIG. 178 (SEQ ID NO:178), FIG. 180 (SEQ ID NO:180), FIG. 182 (SEQ ID NO:182), FIG. 184A-B (SEQ ID NO:184), FIG. 186 (SEQ ID NO:186), FIG. 188 (SEQ ID NO:188), FIG. 190 (SEQ ID NO:190), FIG. 192A-B (SEQ ID NO:192), FIG. 193 (SEQ ID NO:193), FIG. 195A-B (SEQ ID NO:195), FIG. 197 (SEQ ID NO:197), FIG. 199 (SEQ ID NO:199), FIG. 201A-B (SEQ ID NO:201), FIG. 203A-B (SEQ ID NO:203), FIG. 205A-B (SEQ ID NO:205), FIG. 207A-B (SEQ ID NO:207), FIG. 209 (SEQ ID NO:209), FIG. 211 (SEQ ID NO:211), FIG. 213A-B (SEQ ID NO:213), FIG. 215 (SEQ ID NO:215), FIG. 217 (SEQ ID NO:217), FIG. 219 (SEQ ID NO:219), FIG. 220 (SEQ ID NO:220), FIG. 222 (SEQ ID NO:222), FIG. 224A-B (SEQ ID NO:224), FIG. 226 (SEQ ID NO:226), FIG. 228 (SEQ ID NO:228), FIG. 230 (SEQ ID NO:230), FIG. 232 (SEQ ID NO:232), FIG. 234 (SEQ ID NO:234), FIG. 236 (SEQ ID NO:236), FIG. 238 (SEQ ID NO:238), FIG. 240A-D (SEQ ID NO:240), FIG. 242 (SEQ ID NO:242), FIG. 244A-B (SEQ ID NO:244), FIG. 246 (SEQ ID NO:246), FIG. 248 (SEQ ID NO:248), FIG. 250 (SEQ ID NO:250), FIG. 252 (SEQ ID NO:252), FIG. 254 (SEQ ID NO:254), FIG. 256A-B (SEQ ID NO:256), FIG. 258 (SEQ ID NO:258), FIG. 260 (SEQ ID NO:260), FIG. 262A-B (SEQ ID NO:262), FIG. 264 (SEQ ID NO:264), FIG. 266A-B (SEQ ID NO:266), FIG. 268A-B (SEQ ID NO:268), FIG. 270A-C (SEQ ID NO:270), FIG. 271 (SEQ ID NO:271), FIG. 273 (SEQ ID NO:273), FIG. 275A-D (SEQ ID NO:275), FIG. 277A-B (SEQ ID NO:277), FIG. 279 (SEQ ID NO:279), FIG. 281 (SEQ ID NO:281), FIG. 283 (SEQ ID NO:283), FIG. 285 (SEQ ID NO:285), FIG. 287 (SEQ ID NO:287), FIG. 289 (SEQ ID NO:289), FIG. 291A-G (SEQ ID NO:291), FIG. 293 (SEQ ID NO:293), FIG. 295A-B (SEQ ID NO:295), FIG. 297 (SEQ ID NO:297), FIG. 299 (SEQ ID NO:299), FIG. 301 (SEQ ID NO:301), FIG. 303 (SEQ ID NO:303), FIG. 305 (SEQ ID NO:305), FIG. 307 (SEQ ID NO:307), FIG. 309A-B (SEQ ID NO:309), FIG. 311 (SEQ ID NO:311), FIG. 313A-B (SEQ ID NO:313), FIG. 315 (SEQ ID NO:31.5), FIG. 317 (SEQ ID NO:317), FIG. 319 (SEQ ID NO:319), FIG. 321 (SEQ ID NO:321), FIG. 323A-B (SEQ ID NO:323), FIG. 325 (SEQ ID NO:325), FIG. 327 (SEQ ID NO:327), FIG. 329 (SEQ ID NO:329), FIG. 331 (SEQ ID NO:331), FIG. 333 (SEQ ID NO:333), FIG. 335 (SEQ ID NO:335), FIG. 337 (SEQ ID NO:337), FIG. 339A-E (SEQ ID NO:339), FIG. 341 (SEQ ID NO:341), FIG. 343 (SEQ ID NO:343), FIG. 345 (SEQ ID NO:345), FIG. 347 (SEQ ID NO:347), FIG. 349 (SEQ ID NO:349), FIG. 351 (SEQ ID NO:351), FIG. 353 (SEQ ID NO:353), FIG. 355 (SEQ ID NO:355), FIG. 357A-B (SEQ ID NO:357), FIG. 359 (SEQ ID NO:359), FIG. 361 (SEQ ID NO:361), FIG. 363 (SEQ ID NO:363), FIG. 365 (SEQ ID NO:365), FIG. 367A-B (SEQ ID NO:367), FIG. 369A-B (SEQ ID NO:369), FIG. 371 (SEQ ID NO:371), FIG. 373A-B (SEQ ID NO:373), FIG. 375A-B (SEQ ID NO:375), FIG. 377 (SEQ ID NO:377), FIG. 379 (SEQ ID NO:379), FIG. 381A-B (SEQ ID NO:381), FIG. 383 (SEQ ID NO:383), FIG. 385 (SEQ ID NO:385), FIG. 387 (SEQ ID NO:387), FIG. 389 (SEQ ID NO:389), FIG. 391 (SEQ ID NO:391), FIG. 393 (SEQ ID NO:393), FIG. 395 (SEQ ID NO:395), FIG. 397A-D (SEQ ID NO:397), FIG. 399A-B (SEQ ID NO:399), FIG. 401 (SEQ ID NO:401), FIG. 403 (SEQ ID NO:403), FIG. 405 (SEQ ID NO:405), FIG. 407 (SEQ ID NO:407), FIG. 409 (SEQ ID NO:409), FIG. 411 (SEQ ID NO:411), FIG. 413 (SEQ ID NO:413), FIG. 415 (SEQ ID NO:415), FIG. 417 (SEQ ID NO:417), FIG. 419 (SEQ ID NO:419), FIG. 421 (SEQ ID NO:421), FIG. 423 (SEQ ID NO:423), FIG. 425 (SEQ ID NO:425), FIG. 427A-B (SEQ ID NO:427), FIG. 429 (SEQ ID NO:429), FIG. 431 (SEQ ID NO:431), FIG. 433 (SEQ ID NO:433), FIG. 435 (SEQ ID NO:435), FIG. 437A-B (SEQ ID NO:437), FIG. 439 (SEQ ID NO:439), FIG. 441 (SEQ ID NO:441), FIG. 443 (SEQ ID NO:443), FIG. 445 (SEQ ID NO:445), FIG. 447 (SEQ ID NO:447), FIG. 449A-B (SEQ ID NO:449), FIG. 451 (SEQ ID NO:451), FIG. 453 (SEQ ID NO:453), FIG. 455A-C (SEQ ID NO:455), FIG. 457 (SEQ ID NO:457), FIG. 459 (SEQ ID NO:459), FIG. 461 (SEQ ID NO:461), FIG. 463 (SEQ ID NO:463), FIG. 465A-B (SEQ ID NO:465), FIG. 466 (SEQ ID NO:466), FIG. 469 (SEQ ID NO:469), FIG. 471 (SEQ ID NO:471), FIG. 473 (SEQ ID NO:473), FIG. 475 (SEQ ID NO:475), FIG. 477 (SEQ ID NO:477), FIG. 479 (SEQ ID NO:479), FIG. 481 (SEQ ID NO:481), FIG. 483 (SEQ ID NO:483), FIG. 485 (SEQ ID NO:485), FIG. 487 (SEQ ID NO:487), FIG. 489A-B (SEQ ID NO:489), FIG. 491 (SEQ ID NO:491), FIG. 493 (SEQ ID NO:493), FIG. 495A-B (SEQ ID NO:495), FIG. 497 (SEQ ID NO:497), FIG. 499 (SEQ ID NO:499), FIG. 501 (SEQ ID NO:501), FIG. 503 (SEQ ID NO:503), FIG. 505 (SEQ ID NO:505), FIG. 507 (SEQ ID NO:507), FIG. 509 (SEQ ID NO:509), FIG. 511 (SEQ ID NO:511), FIG. 513 (SEQ ID NO:513), FIG. 515 (SEQ ID NO:515), FIG. 517A-B (SEQ ID NO:517), FIG. 519 (SEQ ID NO:519), FIG. 521 (SEQ ID NO:521), FIG. 523 (SEQ ID NO:523), FIG. 525 (SEQ ID NO:525), FIG. 527 (SEQ ID NO:527), FIG. 529 (SEQ ID NO:529), FIG. 531 (SEQ ID NO:531), FIG. 533 (SEQ ID NO:533), FIG. 535 (SEQ ID NO:535), FIG. 537 (SEQ ID NO:537), FIG. 539 (SEQ ID NO:539), FIG. 541 (SEQ ID NO:541), FIG. 543 (SEQ ID NO:543), FIG. 545 (SEQ ID NO:545), FIG. 547 (SEQ ID NO:547), FIG. 549 (SEQ ID NO:549), FIG. 551 (SEQ ID NO:551), FIG. 553 (SEQ ID NO:553), FIG. 555A-B (SEQ ID NO:555), FIG. 557 (SEQ ID NO:557), FIG. 559 (SEQ ID NO:559), FIG. 561 (SEQ ID NO:561), FIG. 563 (SEQ ID NO:563), FIG. 565 (SEQ ID NO:565), FIG. 567 (SEQ ID NO:567), FIG. 569 (SEQ ID NO:569), FIG. 571A-B (SEQ ID NO:571), FIG. 573 (SEQ ID NO:573), FIG. 575 (SEQ ID NO:575), FIG. 577 (SEQ ID NO:577), FIG. 579A-B (SEQ ID NO:579), FIG. 581 (SEQ ID NO:581), FIG. 583 (SEQ ID NO:583), FIG. 585 (SEQ ID NO:585), FIG. 587 (SEQ ID NO:587), FIG. 589A-B (SEQ ID NO:589), FIG. 591 (SEQ ID NO:591), FIG. 593A-B (SEQ ID NO:593), FIG. 595 (SEQ ID NO:595), FIG. 597 (SEQ ID NO:597), FIG. 599 (SEQ ID NO:599), FIG. 601A-B (SEQ ID NO:601), FIG. 603 (SEQ ID NO:603), FIG. 605 (SEQ ID NO:605), FIG. 607 (SEQ ID NO:607), FIG. 609 (SEQ ID NO:609), FIG. 611 (SEQ ID NO:611), FIG. 613 (SEQ ID NO:613), FIG. 615A-B (SEQ ID NO:615), FIG. 617 (SEQ ID NO:617), FIG. 619 (SEQ ID NO:619), FIG. 621 (SEQ ID NO:621), FIG. 623 (SEQ ID NO:623), FIG. 625 (SEQ ID NO:625), FIG. 627 (SEQ ID NO:627), FIG. 629 (SEQ ID NO:629), FIG. 631 (SEQ ID NO:631), FIG. 633 (SEQ ID NO:633), FIG. 635A-B (SEQ ID NO:635), FIG. 636 (SEQ ID NO:636), FIG. 638 (SEQ ID NO:638), FIG. 640 (SEQ ID NO:640), FIG. 642 (SEQ ID NO:642), FIG. 644 (SEQ ID NO:644), FIG. 646 (SEQ ID NO:646), FIG. 648 (SEQ ID NO:648), FIG. 650 (SEQ ID NO:650), FIG. 652 (SEQ ID NO:652), FIG. 654 (SEQ ID NO:654), FIG. 656 (SEQ ID NO:656), FIG. 658 (SEQ ID NO:658), FIG. 660 (SEQ ID NO:660), FIG. 662 (SEQ ID NO:662), FIG. 664 (SEQ ID NO:664), FIG. 666 (SEQ ID NO:666), FIG. 668 (SEQ ID NO:668), FIG. 670 (SEQ ID NO:670), FIG. 672 (SEQ ID NO:672), FIG. 674A-B (SEQ ID NO:674), FIG. 676 (SEQ ID NO:676), FIG. 678 (SEQ ID NO:678), FIG. 680A-B (SEQ ID NO:680), FIG. 682 (SEQ ID NO:682), FIG. 684 (SEQ ID NO:684), FIG. 686 (SEQ ID NO:686), FIG. 688 (SEQ ID NO:688), FIG. 690 (SEQ ID NO:690), FIG. 692 (SEQ ID NO:692), FIG. 694 (SEQ ID NO:694), FIG. 696 (SEQ ID NO:696), FIG. 698A-C (SEQ ID NO:698), FIG. 700 (SEQ ID NO:700), FIG. 702 (SEQ ID NO:702), FIG. 704 (SEQ ID NO:704), FIG. 706A-B (SEQ ID NO:706), FIG. 708 (SEQ ID NO:708), FIG. 710 (SEQ ID NO:710), FIG. 712 (SEQ ID NO:712), FIG. 714 (SEQ ID NO:714), FIG. 716A-B (SEQ ID NO:716), FIG. 718 (SEQ ID NO:718), FIG. 720 (SEQ ID NO:720), FIG. 722 (SEQ ID NO:722), FIG. 724 (SEQ ID NO:724), FIG. 726A-C (SEQ ID NO:726), FIG. 728A-C (SEQ ID NO:728), FIG. 730A-C (SEQ ID NO:730), FIG. 732A-B (SEQ ID NO:732), FIG. 734 (SEQ ID NO:734), FIG. 736 (SEQ ID NO:736), FIG. 738 (SEQ ID NO:738), FIG. 740 (SEQ ID NO:740), FIG. 742 (SEQ ID NO:742), FIG. 744A-B (SEQ ID NO:744), FIG. 746 (SEQ ID NO:746), FIG. 748 (SEQ ID NO:748), FIG. 750 (SEQ ID NO:750), FIG. 752 (SEQ ID NO:752), FIG. 754 (SEQ ID NO:754), FIG. 756A-B (SEQ ID NO:756), FIG. 758 (SEQ ID NO:758), FIG. 760 (SEQ ID NO:760), FIG. 762 (SEQ ID NO:762), FIG. 764 (SEQ ID NO:764), FIG. 766 (SEQ ID NO:766), FIG. 768 (SEQ ID NO:768), FIG. 769 (SEQ ID NO:769), FIG. 771 (SEQ ID NO:771), FIG. 773 (SEQ ID NO:773), FIG. 775 (SEQ ID NO:775), FIG. 777 (SEQ ID NO:777), FIG. 779 (SEQ ID NO:779), FIG. 781 (SEQ ID NO:781), FIG. 783 (SEQ ID NO:783), FIG. 785A-B (SEQ ID NO:785), FIG. 787 (SEQ ID NO:787), FIG. 789 (SEQ ID NO:789), FIG. 791 (SEQ ID NO:791), FIG. 793 (SEQ ID NO:793), FIG. 795 (SEQ ID NO:795), FIG. 797 (SEQ ID NO:797), FIG. 799 (SEQ ID NO:799), FIG. 801 (SEQ ID NO:801), FIG. 803 (SEQ ID NO:803), FIG. 804 (SEQ ID NO:804), FIG. 806 (SEQ ID NO:806), FIG. 808 (SEQ ID NO:808), FIG. 810 (SEQ ID NO:810), FIG. 812 (SEQ ID NO:812), FIG. 814 (SEQ ID NO:814), FIG. 816 (SEQ ID NO:816), FIG. 818 (SEQ ID NO:818), FIG. 820 (SEQ ID NO:820), FIG. 822 (SEQ ID NO:822), FIG. 824 (SEQ ID NO:824), FIG. 825 (SEQ ID NO:825), FIG. 827 (SEQ ID NO:827), FIG. 829A-B (SEQ ID NO:829), FIG. 831 (SEQ ID NO:831), FIG. 833 (SEQ ID NO:833), FIG. 835 (SEQ ID NO:835), FIG. 837 (SEQ ID NO:837), FIG. 839 (SEQ ID NO:839), FIG. 841 (SEQ ID NO:841), FIG. 843 (SEQ ID NO:843), FIG. 845 (SEQ ID NO:845), FIG. 847A-B (SEQ ID NO:847), FIG. 849 (SEQ ID NO:849), FIG. 851 (SEQ ID NO:851), FIG. 853 (SEQ ID NO:853), FIG. 855 (SEQ ID NO:855), FIG. 857 (SEQ ID NO:857), FIG. 859 (SEQ ID NO:859), FIG. 861 (SEQ ID NO:861), FIG. 863 (SEQ ID NO:863), FIG. 865 (SEQ ID NO:865), FIG. 867 (SEQ ID NO:867), FIG. 869 (SEQ ID NO:869), FIG. 871A-D (SEQ ID NO:871), FIG. 873 (SEQ ID NO:873), FIG. 875 (SEQ ID NO:875), FIG. 877 (SEQ ID NO:877), FIG. 879 (SEQ ID NO:879), FIG. 881 (SEQ ID NO:881), FIG. 883 (SEQ ID NO:883), FIG. 885 (SEQ ID NO:885), FIG. 887 (SEQ ID NO:887), FIG. 889 (SEQ ID NO:889), FIG. 891 (SEQ ID NO:891), FIG. 893 (SEQ ID NO:893), FIG. 895 (SEQ ID NO:895), FIG. 897A-B (SEQ ID NO:897), FIG. 899 (SEQ ID NO:899), FIG. 901 (SEQ ID NO:901), FIG. 903 (SEQ ID NO:903), FIG. 905 (SEQ ID NO:905), FIG. 907 (SEQ ID NO:907), FIG. 909 (SEQ ID NO:909), FIG. 910 (SEQ ID NO:910), FIG. 912 (SEQ ID NO:912), FIG. 914 (SEQ ID NO:914), FIG. 916 (SEQ ID NO:916), FIG. 918 (SEQ ID NO:918), FIG. 920A-B (SEQ ID NO:920), FIG. 922 (SEQ ID NO:922), FIG. 924A-D (SEQ ID NO:924), FIG. 926 (SEQ ID NO:926), FIG. 928 (SEQ ID NO:928), FIG. 930 (SEQ ID NO:930), FIG. 932 (SEQ ID NO:932), FIG. 934 (SEQ ID NO:934), FIG. 936 (SEQ ID NO:936), FIG. 938 (SEQ ID NO:938), FIG. 939 (SEQ ID NO:939), FIG. 941 (SEQ ID NO:941), FIG. 942A-C (SEQ ID NO:942), FIG. 944A-B (SEQ ID NO:944), FIG. 945 (SEQ ID NO:945), FIG. 947 (SEQ ID NO:947), FIG. 949A-B (SEQ ID NO:949), FIG. 951 (SEQ ID NO:951), FIG. 953 (SEQ ID NO:953), FIG. 954 (SEQ ID NO:954), FIG. 956 (SEQ ID NO:956), FIG. 958 (SEQ ID NO:958), FIG. 960 (SEQ ID NO:960), FIG. 962A-B (SEQ ID NO:962), FIG. 963 (SEQ ID NO:963), FIG. 964 (SEQ ID NO:964), FIG. 965A-B (SEQ ID NO:965), FIG. 967 (SEQ ID NO:967), FIG. 969A-C (SEQ ID NO:969), FIG. 971A-B (SEQ ID NO:971), FIG. 973A-B (SEQ ID NO:973), FIG. 975 (SEQ ID NO:975), FIG. 977 (SEQ ID NO:977), FIG. 979 (SEQ ID NO:979), FIG. 981A-D (SEQ ID NO:981), FIG. 982A-B (SEQ ID NO:982), FIG. 983A-B (SEQ ID NO:983), FIG. 984A-B (SEQ ID NO:984), FIG. 986A-B (SEQ ID NO:986), FIG. 987A-B (SEQ ID NO:987), FIG. 989 (SEQ ID NO:989), FIG. 990 (SEQ ID NO:990), FIG. 992A-B (SEQ ID NO:992), FIG. 994 (SEQ ID NO:994), FIG. 996 (SEQ ID NO:996), FIG. 998 (SEQ ID NO:998), FIG. 999 (SEQ ID NO:999), FIG. 1001 (SEQ ID NO:1001), FIG. 1003 (SEQ ID NO:1003), FIG. 1004 (SEQ ID NO:1004), FIG. 1006A-B (SEQ ID NO:1006), FIG. 1008 (SEQ ID NO:1008), FIG. 1010 (SEQ ID NO:1010), FIG. 1012A-B (SEQ ID NO:1012), FIG. 1014A-B (SEQ ID NO:1014), FIG. 1016 (SEQ ID NO:1016), FIG. 1018A-D (SEQ ID NO:1018), FIG. 1020 (SEQ ID NO:1020), FIG. 1021 (SEQ ID NO:1021), FIG. 1023 (SEQ ID NO:1023), FIG. 1025 (SEQ ID NO:1025), FIG. 1027 (SEQ ID NO:1027), FIG. 1029 (SEQ ID NO:1029), FIG. 1031 (SEQ ID NO:1031), FIG. 1033 (SEQ ID NO:1033), FIG. 1035 (SEQ ID NO:1035), FIG. 1037 (SEQ ID NO:1037), FIG. 1039A-B (SEQ ID NO:1039), FIG. 1041 (SEQ ID NO:1041), FIG. 1043 (SEQ ID NO:1043), FIG. 1045 (SEQ ID NO:1045), FIG. 1046 (SEQ ID NO:1046), FIG. 1048 (SEQ ID NO:1048), FIG. 1050 (SEQ ID NO:1050), FIG. 1052 (SEQ ID NO:1052), FIG. 1054A-C (SEQ ID NO:1054), FIG. 1056 (SEQ ID NO:1056), FIG. 1058A-B (SEQ ID NO:1058), FIG. 1059 (SEQ ID NO:1059), FIG. 1061 (SEQ ID NO:1061), FIG. 1063 (SEQ ID NO:1063), FIG. 1065 (SEQ ID NO:1065), FIG. 1067 (SEQ ID NO:1067), FIG. 1069 (SEQ ID NO:1069), FIG. 1071 (SEQ ID NO:1071), FIG. 1073 (SEQ ID NO:1073), FIG. 1075 (SEQ ID NO:1075), FIG. 1077 (SEQ ID NO:1077), FIG. 1079 (SEQ ID NO:1079), FIG. 1081A-B (SEQ ID NO:1081), FIG. 1083 (SEQ ID NO:1083), FIG. 1085 (SEQ ID NO:1085), FIG. 1087 (SEQ ID NO:1087), FIG. 1088 (SEQ ID NO:1088), FIG. 1090A-B (SEQ ID NO:1090), FIG. 1092 (SEQ ID NO:1092), FIG. 1094 (SEQ ID NO:1094), FIG. 1095A-B (SEQ ID NO:1095), FIG. 1096 (SEQ ID NO:1096), FIG. 1097 (SEQ ID NO:1097), FIG. 1099A-B (SEQ ID NO:1099), FIG. 1101 (SEQ ID NO:1101), FIG. 1102A-B (SEQ ID NO:1102), FIG. 1104A-B (SEQ ID NO:1104), FIG. 1106 (SEQ ID NO:1106), FIG. 1108A-B (SEQ ID NO:1108), FIG. 1109 (SEQ ID NO:1109), FIG. 1111 (SEQ ID NO:1111), FIG. 1113 (SEQ ID NO:1113), FIG. 1115 (SEQ ID NO:1115), FIG. 1117 (SEQ ID NO:1117), FIG. 1119 (SEQ ID NO:1119), FIG. 1121A-B (SEQ ID NO:1121), FIG. 1123A-B (SEQ ID NO:1123), FIG. 1125 (SEQ ID NO:1125), FIG. 1127 (SEQ ID NO:1127), FIG. 1129A-B (SEQ ID NO:1129), FIG. 1131 (SEQ ID NO:1131), FIG. 1133 (SEQ ID NO:1133), FIG. 1135 (SEQ ID NO:1135), FIG. 1137 (SEQ ID NO:1137), FIG. 1139 (SEQ ID NO:1139), FIG. 1141 (SEQ ID NO:1141), FIG. 1143 (SEQ ID NO:1143), FIG. 1145 (SEQ ID NO:1145), FIG. 1147 (SEQ ID NO:1147), FIG. 1149 (SEQ ID NO:1149), FIG. 1151 (SEQ ID NO:1151), FIG. 1152 (SEQ ID NO:1152), FIG. 1154 (SEQ ID NO:1154), FIG. 1156 (SEQ ID NO:1156), FIG. 1158 (SEQ ID NO:1158), FIG. 1160 (SEQ ID NO:1160), FIG. 1162 (SEQ ID NO:1162), FIG. 1163 (SEQ ID NO:1163), FIG. 1165A-B (SEQ ID NO:1165), FIG. 1167 (SEQ ID NO:1167), FIG. 1169 (SEQ ID NO:1169), FIG. 1171 (SEQ ID NO:1171), FIG. 1173A-B (SEQ ID NO:1173), FIG. 1175 (SEQ ID NO:1175), FIG. 1177 (SEQ ID NO:1177), FIG. 1179 (SEQ ID NO:1179), FIG. 1181 (SEQ ID NO:1181), FIG. 1183 (SEQ ID NO:1183), FIG. 1185A-B (SEQ ID NO:1185), FIG. 1187 (SEQ ID NO:1187), FIG. 1189 (SEQ ID NO:1189), FIG. 1191A-B (SEQ ID NO:1191), FIG. 1193 (SEQ ID NO:1193), FIG. 1195 (SEQ ID NO:1195), FIG. 1197A-B (SEQ ID NO:1197), FIG. 1199 (SEQ ID NO:1199), FIG. 1201 (SEQ ID NO:1201), FIG. 1203 (SEQ ID NO:1203), FIG. 1205 (SEQ ID NO:1205), FIG. 1207 (SEQ ID NO:1207), FIG. 1209 (SEQ ID NO:1209), FIG. 1211 (SEQ ID NO:1211), FIG. 1213 (SEQ ID NO:1213), FIG. 1215 (SEQ ID NO:1215), FIG. 1217 (SEQ ID NO:1217), FIG. 1219 (SEQ ID NO:1219), FIG. 1221 (SEQ ID NO:1221), FIG. 1223A-B (SEQ ID NO:1223), FIG. 1225 (SEQ ID NO:1225), FIG. 1227 (SEQ ID NO:1227), FIG. 1229 (SEQ ID NO:1229), FIG. 1231 (SEQ ID NO:1231), FIG. 1233 (SEQ ID NO:1233), FIG. 1235 (SEQ ID NO:1235), FIG. 1237 (SEQ ID NO:1237), FIG. 1239 (SEQ ID NO:1239), FIG. 1241 (SEQ ID NO:1241), FIG. 1243 (SEQ ID NO:1243), FIG. 1245 (SEQ ID NO:1245), FIG. 1247 (SEQ ID NO:1247), FIG. 1249 (SEQ ID NO:1249), FIG. 1251 (SEQ ID NO:1251), FIG. 1253 (SEQ ID NO:1253), FIG. 1255 (SEQ ID NO:1255), FIG. 1257 (SEQ ID NO:1257), FIG. 1259 (SEQ ID NO:1259), FIG. 1261 (SEQ ID NO:1216), FIG. 1263 (SEQ ID NO:1263), FIG. 1265 (SEQ ID NO:1265), FIG. 1267 (SEQ ID NO:1267), FIG. 1269 (SEQ ID NO:1269), FIG. 1271 (SEQ ID NO:1271), FIG. 1273 (SEQ ID NO:1273), FIG. 1275 (SEQ ID NO:1275), FIG. 1277 (SEQ ID NO:1277), FIG. 1279 (SEQ ID NO:1279), FIG. 1281 (SEQ ID NO:1281), FIG. 1283 (SEQ ID NO:1283), FIG. 1285 (SEQ ID NO:1285), FIG. 1287 (SEQ ID NO:1287), FIG. 1289 (SEQ ID NO:1289), FIG. 1291 (SEQ ID NO:1291), FIG. 1293 (SEQ ID NO:1293), FIG. 1295 (SEQ ID NO:1295), FIG. 1297 (SEQ ID NO:1297), FIG. 1299 (SEQ ID NO:1299), FIG. 1301 (SEQ ID NO:1301), FIG. 1303 (SEQ ID NO:1303), FIG. 1305 (SEQ ID NO:1305), FIG. 1307 (SEQ ID NO:1307), FIG. 1309 (SEQ ID NO:1309), FIG. 1311 (SEQ ID NO:1311), FIG. 1313 (SEQ ID NO:1313), FIG. 1315 (SEQ ID NO:1315), FIG. 1317 (SEQ ID NO:1317), FIG. 1319 (SEQ ID NO:1319), FIG. 1321 (SEQ ID NO:1321), FIG. 1323 (SEQ ID NO:1323), FIG. 1325 (SEQ ID NO:1325), FIG. 1327 (SEQ ID NO:1327), FIG. 1329 (SEQ ID NO:1329), FIG. 1331 (SEQ ID NO:1331), FIG. 1333 (SEQ ID NO:1333), FIG. 1335 (SEQ ID NO:1335), FIG. 1337 (SEQ ID NO:1337), FIG. 1339 (SEQ ID NO:1339), FIG. 1341 (SEQ ID NO:1341), FIG. 1343 (SEQ ID NO:1343), FIG. 1345 (SEQ ID NO:1345), FIG. 1347 (SEQ ID NO:1347), FIG. 1349 (SEQ ID NO:1349), FIG. 1351 (SEQ ID NO:1351), FIG. 1353 (SEQ ID NO:1353), FIG. 1355 (SEQ ID NO:1355), FIG. 1357 (SEQ ID NO:1357), FIG. 1359 (SEQ ID NO:1359), FIG. 1361 (SEQ ID NO:1361), FIG. 1363 (SEQ ID NO:1363), FIG. 1365 (SEQ ID NO:1365), FIG. 1367 (SEQ ID NO:1367), FIG. 1369 (SEQ ID NO:1369), FIG. 1371 (SEQ ID NO:1371), FIG. 1373 (SEQ ID NO:1373), FIG. 1375 (SEQ ID NO:1375), FIG. 1377 (SEQ ID NO:1377), FIG. 1379 (SEQ ID NO:1379), FIG. 1381 (SEQ ID NO:1381), FIG. 1383 (SEQ ID NO:1383), FIG. 1385 (SEQ ID NO:1385), FIG. 1387 (SEQ ID NO:1387), FIG. 1389 (SEQ ID NO:1389), FIG. 1391 (SEQ ID NO:1391), FIG. 1393 (SEQ ID NO:1393), FIG. 1395 (SEQ ID NO:1395), FIG. 1397 (SEQ ID NO:1397), FIG. 1399 (SEQ ID NO:1399), FIG. 1401 (SEQ ID NO:1401), FIG. 1403 (SEQ ID NO:1403), FIG. 1405 (SEQ ID NO:1405), FIG. 1407 (SEQ ID NO:1407), FIG. 1409 (SEQ ID NO:1409), FIG. 1411 (SEQ ID NO:1411), FIG. 1413 (SEQ ID NO:1413), FIG. 1415 (SEQ ID NO:1415), FIG. 1417 (SEQ ID NO:1417), FIG. 1419 (SEQ ID NO:1419), FIG. 1421 (SEQ ID NO:1421), FIG. 1423 (SEQ ID NO:1423), FIG. 1424 (SEQ ID NO:1424), FIG. 1426 (SEQ ID NO:1426), FIG. 1428 (SEQ ID NO:1428), FIG. 1430 (SEQ ID NO:1430), FIG. 1431 (SEQ ID NO:1431), FIG. 1433 (SEQ ID NO:1433), FIG. 1435 (SEQ ID NO:1435), FIG. 1437 (SEQ ID NO:1437), FIG. 1439 (SEQ ID NO:1439), FIG. 1441 (SEQ ID NO:1441), FIG. 1443 (SEQ ID NO:1443), FIG. 1445 (SEQ ID NO:1445), FIG. 1447 (SEQ ID NO:1447), FIG. 1449 (SEQ ID NO:1449), FIG. 1451 (SEQ ID NO:1451), FIG. 1453 (SEQ ID NO:1453), FIG. 1455 (SEQ ID NO:1455), FIG. 1457 (SEQ ID NO:1457), FIG. 1459 (SEQ ID NO:1459), FIG. 1461 (SEQ ID NO:1461), FIG. 1463 (SEQ ID NO:1463), FIG. 1465 (SEQ ID NO:1465), FIG. 1467 (SEQ ID NO:1467), FIG. 1469 (SEQ ID NO:1469), FIG. 1471 (SEQ ID NO:1471), FIG. 1473 (SEQ ID NO:1473), FIG. 1475 (SEQ ID NO:1475), FIG. 1477 (SEQ ID NO:1477), FIG. 1479 (SEQ ID NO:1479), FIG. 1481 (SEQ ID NO:1481), FIG. 1483 (SEQ ID NO:1483), FIG. 1485 (SEQ ID NO:1485), FIG. 1487 (SEQ ID NO:1487), FIG. 1489 (SEQ ID NO:1489), FIG. 1491 (SEQ ID NO:1491), FIG. 1493 (SEQ ID NO:1493), FIG. 1495 (SEQ ID NO:1495), FIG. 1497 (SEQ ID NO:1497), FIG. 1499 (SEQ ID NO:1499), FIG. 1501 (SEQ ID NO:1501), FIG. 1503 (SEQ ID NO:1503), FIG. 1505 (SEQ ID NO:1505), FIG. 1507 (SEQ ID NO:1507), FIG. 1509 (SEQ ID NO:1509), FIG. 1511 (SEQ ID NO:1511), FIG. 1513 (SEQ ID NO:1513), FIG. 1515 (SEQ ID NO:1515), FIG. 1517 (SEQ ID NO:1517), FIG. 1519 (SEQ ID NO:1519), FIG. 1521 (SEQ ID NO:1521), FIG. 1523 (SEQ ID NO:1523), FIG. 1525 (SEQ ID NO:1525), FIG. 1527 (SEQ ID NO:1527), FIG. 1529 (SEQ ID NO:1529), FIG. 1531 (SEQ ID NO:1531), FIG. 1533 (SEQ ID NO:1533), FIG. 1535 (SEQ ID NO:1535), FIG. 1537 (SEQ ID NO:1537), FIG. 1539 (SEQ ID NO:1539), FIG. 1541 (SEQ ID NO:1541), FIG. 1543 (SEQ ID NO:1543), FIG. 1545 (SEQ ID NO:1545), FIG. 1547 (SEQ ID NO:1547), FIG. 1549 (SEQ ID NO:1549), FIG. 1551 (SEQ ID NO:1551), FIG. 1553 (SEQ ID NO:1553), FIG. 1555 (SEQ ID NO:1555), FIG. 1557 (SEQ ID NO:1557), FIG. 1559 (SEQ ID NO:1559), FIG. 1561 (SEQ ID NO:1561), FIG. 1563 (SEQ ID NO:1563), FIG. 1565 (SEQ ID NO:1565), FIG. 1567 (SEQ ID NO:1567), FIG. 1569 (SEQ ID NO:1569), FIG. 1571 (SEQ ID NO:1571), FIG. 1573 (SEQ ID NO:1573), FIG. 1575 (SEQ ID NO:1575), FIG. 1577 (SEQ ID NO:1577), FIG. 1579 (SEQ ID NO:1579), FIG. 1581 (SEQ ID NO:1581), FIG. 1583 (SEQ ID NO:1583), FIG. 1584, (SEQ ID NO:1584), FIG. 1586 (SEQ ID NO:1586), FIG. 1588 (SEQ ID NO:1588), FIG. 1589 (SEQ ID NO:1589), FIG. 1591 (SEQ ID NO:1591), FIG. 1593 (SEQ ID NO:1593), FIG. 1595 (SEQ ID NO:1595), FIG. 1596 (SEQ ID NO:1596), FIG. 1598 (SEQ ID NO:1598), FIG. 1600 (SEQ ID NO:1600), FIG. 1602 (SEQ ID NO:1602), FIG. 1604 (SEQ ID NO:1604), FIG. 1606 (SEQ ID NO:1606), FIG. 1608 (SEQ ID NO:1608), FIG. 1609 (SEQ ID NO:1509), FIG. 1611 (SEQ ID NO:1611), FIG. 1612 (SEQ ID NO:1612), FIG. 1614 (SEQ ID NO:1614), FIG. 1616 (SEQ ID NO:1616), FIG. 1618 (SEQ ID NO:1618), FIG. 1620 (SEQ ID NO:1620), FIG. 1622 (SEQ ID NO:1622), FIG. 1624 (SEQ ID NO:1624), FIG. 1626 (SEQ ID NO:1626), FIG. 1628 (SEQ ID NO:1628), FIG. 1630 (SEQ ID NO:1630), FIG. 1632 (SEQ ID NO:1632), FIG. 1634 (SEQ ID NO:1634), FIG. 1636 (SEQ ID NO:1636), FIG. 1638 (SEQ ID NO:1638), FIG. 1640 (SEQ ID NO:1640), FIG. 1642 (SEQ ID NO:1642), FIG. 1644 (SEQ ID NO:1644), FIG. 1646 (SEQ ID NO:1646), FIG. 1648 (SEQ ID NO:1648), FIG. 1649 (SEQ ID NO:1649), FIG. 1651 (SEQ ID NO:1651), FIG. 1652 (SEQ ID NO:1652), FIG. 1653 (SEQ ID NO:1653), FIG. 1655 (SEQ ID NO:1655), FIG. 1567 (SEQ ID NO:1657), FIG. 1659 (SEQ ID NO:1659), FIG. 1661 (SEQ ID NO:1661), FIG. 1663 (SEQ ID NO:1663), FIG. 1665 (SEQ ID NO:1665), FIG. 1667 (SEQ ID NO:1667), FIG. 1669 (SEQ ID NO:1669), FIG. 1671 (SEQ ID NO:1671), FIG. 1673 (SEQ ID NO:1673), FIG. 1675 (SEQ ID NO:1675), FIG. 1677 (SEQ ID NO:1677), FIG. 1679 (SEQ ID NO:1679), FIG. 1681 (SEQ ID NO:1681), FIG. 1683 (SEQ ID NO:1683), FIG. 1684 (SEQ ID NO:1684), FIG. 1685 (SEQ ID NO:1685), FIG. 1687 (SEQ ID NO:1687), FIG. 1689 (SEQ ID NO:1689), FIG. 1690 (SEQ ID NO:1690), FIG. 1692 (SEQ ID NO:1692), FIG. 1694 (SEQ ID NO:1694), FIG. 1696 (SEQ ID NO:1696), FIG. 1698 (SEQ ID NO:1698), FIG. 1700 (SEQ ID NO:1700), FIG. 1702 (SEQ ID NO:1702), FIG. 1704 (SEQ ID NO:1704), FIG. 1706 (SEQ ID NO:1706), FIG. 1707 (SEQ ID NO:1707), FIG. 1709 (SEQ ID NO:1709), FIG. 1711 (SEQ ID NO:1711), FIG. 1713 (SEQ ID NO:1713), FIG. 1715 (SEQ ID NO:1715), FIG. 1717 (SEQ ID NO:1717), FIG. 1719 (SEQ ID NO:1719), FIG. 1721 (SEQ ID NO:1721), FIG. 1723 (SEQ ID NO:1723), FIG. 1724 (SEQ ID NO:1724), FIG. 1726 (SEQ ID NO:1726), FIG. 1728 (SEQ ID NO:1728), FIG. 1730 (SEQ ID NO:1730), FIG. 1732 (SEQ, ID NO:1732), FIG. 1734 (SEQ ID NO:1734), FIG. 1736 (SEQ ID NO:1736), FIG. 1737 (SEQ ID NO:1737), FIG. 1739 (SEQ ID NO:1739), FIG. 1741 (SEQ ID NO:1741), FIG. 1743 (SEQ ID NO:1743), FIG. 1745 (SEQ ID NO:1745), FIG. 1747 (SEQ ID NO:1747), FIG. 1749 (SEQ ID NO:1749), FIG. 1751 (SEQ ID NO:1751), FIG. 1753 (SEQ ID NO:1753), FIG. 1755 (SEQ ID NO:1755), FIG. 1757 (SEQ ID NO:1757), FIG. 1759 (SEQ ID NO:1759), FIG. 1761 (SEQ ID NO:1761), FIG. 1763 (SEQ ID NO:1763), FIG. 1765 (SEQ ID NO:1765), FIG. 1766 (SEQ ID NO:1766), FIG. 1768 (SEQ ID NO:1768), FIG. 1770 (SEQ ID NO:1770), FIG. 1772 (SEQ ID NO:1772), FIG. 1773 (SEQ ID NO:1773), FIG. 1775 (SEQ ID NO:1775), FIG. 1777 (SEQ ID NO:1777), FIG. 1778 (SEQ ID NO:1778), FIG. 1780 (SEQ ID NO:1780), FIG. 1781 (SEQ ID NO:1781), FIG. 1783 (SEQ ID NO:1783), FIG. 1785 (SEQ ID NO:1785), FIG. 1787 (SEQ ID NO:1787), FIG. 1788 (SEQ ID NO:1788), FIG. 1790 (SEQ ID NO:1790), FIG. 1792 (SEQ ID NO:1792), FIG. 1793 (SEQ ID NO:1793), FIG. 1795 (SEQ ID NO:1795), FIG. 1797 (SEQ ID NO:1797), FIG. 1799 (SEQ ID NO:1799), FIG. 1801 (SEQ ID NO:1801), FIG. 1803 (SEQ ID NO:1803), FIG. 1805 (SEQ ID NO:1805), FIG. 1807 (SEQ ID NO:1807), FIG. 1809 (SEQ ID NO:1809), FIG. 1811 (SEQ ID NO:1811), FIG. 1813 (SEQ ID NO:1813), FIG. 1815 (SEQ ID NO:1815), FIG. 1817 (SEQ ID NO:1817), FIG. 1819 (SEQ ID NO:1819), FIG. 1821 (SEQ ID NO:1821), FIG. 1823 (SEQ ID NO:1823), FIG. 1825 (SEQ ID NO:1825), FIG. 1827 (SEQ ID NO:1827), FIG. 1829 (SEQ ID NO:1829), FIG. 1831 (SEQ ID NO:1831), FIG. 1833 (SEQ ID NO:1833), FIG. 1835 (SEQ ID NO:1835), FIG. 1837 (SEQ ID NO:1837), FIG. 1839 (SEQ ID NO:1839), FIG. 1841 (SEQ ID NO:1841), FIG. 1843 (SEQ ID NO:1843), FIG. 1845 (SEQ ID NO:1845), FIG. 1847 (SEQ ID NO:1847), FIG. 1849 (SEQ ID NO:1849), FIG. 1851 (SEQ ID NO:1851), FIG. 1853 (SEQ ID NO:1853), FIG. 1854 (SEQ ID NO:1854), FIG. 1855 (SEQ ID NO:1855), FIG. 1857 (SEQ ID NO:1857), FIG. 1859 (SEQ ID NO:1859), FIG. 1861 (SEQ ID NO:1861), FIG. 1863 (SEQ ID NO:1863), FIG. 1865 (SEQ ID NO:1865), FIG. 1866 (SEQ ID NO:1866), FIG. 1868 (SEQ ID NO:1868), FIG. 1870 (SEQ ID NO:1870), FIG. 1872 (SEQ ID NO:1872), FIG. 1874 (SEQ ID NO:1874), FIG. 1875 (SEQ ID NO:1875), FIG. 1877 (SEQ ID NO:1877), FIG. 1879 (SEQ ID NO:1879), FIG. 1881 (SEQ ID NO:1881), FIG. 1882 (SEQ ID NO:1882), FIG. 1884 (SEQ ID NO:1884), FIG. 1886 (SEQ ID NO:1886), FIG. 1888 (SEQ ID NO:1888), FIG. 1889 (SEQ ID NO:1889), FIG. 1891 (SEQ ID NO:1891), FIG. 1893 (SEQ ID NO:1893), FIG. 1895 (SEQ ID NO:1895), FIG. 1897 (SEQ ID NO:1897), FIG. 1899 (SEQ ID NO:1899), FIG. 1901 (SEQ ID NO:1901), FIG. 1903 (SEQ ID NO:1903), FIG. 1905 (SEQ ID NO:1905), FIG. 1907 (SEQ ID NO:1907), FIG. 1909 (SEQ ID NO:1909), FIG. 1911 (SEQ ID NO:1911), FIG. 1913 (SEQ ID NO:1913), FIG. 1915 (SEQ ID NO:1915), FIG. 1917 (SEQ ID NO:1917), FIG. 1919 (SEQ ID NO:1919), FIG. 1921 (SEQ ID NO:1921), FIG. 1923 (SEQ ID NO:1923), FIG. 1925 (SEQ ID NO:1925), FIG. 1927 (SEQ ID NO:1927), FIG. 1929 (SEQ ID NO:1929), FIG. 1931 (SEQ ID NO:1931), FIG. 1933 (SEQ ID NO:1933), FIG. 1935 (SEQ ID NO:1935), FIG. 1937 (SEQ ID NO:1937), FIG. 1939 (SEQ ID NO:1939), FIG. 1941 (SEQ ID NO:1941), FIG. 1943 (SEQ ID NO:1943), FIG. 1945 (SEQ ID NO:1945), FIG. 1947 (SEQ ID NO:1947), FIG. 1949 (SEQ ID NO:1949), FIG. 1950 (SEQ ID NO:1950), FIG. 1952 (SEQ ID NO:1952), FIG. 1954 (SEQ ID NO:1954), FIG. 1956 (SEQ ID NO:1956), FIG. 1958 (SEQ ID NO:1958), FIG. 1960 (SEQ ID NO:1960), FIG. 1962 (SEQ ID NO:1962), FIG. 1963 (SEQ ID NO:1963), FIG. 1965 (SEQ ID NO:1965), FIG. 1967 (SEQ ID NO:1967), FIG. 1969 (SEQ ID NO:1969), FIG. 1971 (SEQ ID NO:1971), FIG. 1973 (SEQ ID NO:1973), FIG. 1975 (SEQ ID NO:1975), FIG. 1977 (SEQ ID NO:1977), FIG. 1979 (SEQ ID NO:1979), FIG. 1981 (SEQ ID NO:1981), FIG. 1983 (SEQ ID NO:1983), FIG. 1985 (SEQ ID NO:1985), FIG. 1987 (SEQ ID NO:1987), FIG. 1989 (SEQ ID NO:1989), FIG. 1991 (SEQ ID NO:1991), FIG. 1993 (SEQ ID NO:1993), FIG. 1995 (SEQ ID NO:1995), FIG. 1997 (SEQ ID NO:1997), FIG. 1999 (SEQ ID NO:1999), FIG. 2001 (SEQ ID NO:2001), FIG. 2003 (SEQ ID NO:2003), FIG. 2005 (SEQ ID NO:2005), FIG. 2007 (SEQ ID NO:2007), FIG. 2009 (SEQ ID NO:2009), FIG. 2011 (SEQ ID NO:2011), FIG. 2013 (SEQ ID NO:2013), FIG. 2015 (SEQ ID NO:2015), FIG. 2017 (SEQ ID NO:2017), FIG. 2019 (SEQ ID NO:2019), FIG. 2021 (SEQ ID NO:2021), FIG. 2023 (SEQ ID NO:2023), FIG. 2025 (SEQ ID NO:2025), FIG. 2027 (SEQ ID NO:2027), FIG. 2029 (SEQ ID NO:2029), FIG. 2031 (SEQ ID NO:2031), FIG. 2033 (SEQ ID NO:2033), FIG. 2035 (SEQ ID NO:2035), FIG. 2037 (SEQ ID NO:2037), FIG. 2039 (SEQ ID NO:2039), FIG. 2041 (SEQ ID NO:2041), FIG. 2043 (SEQ ID NO:2043), FIG. 2045 (SEQ ID NO:2045), FIG. 2047 (SEQ ID NO:2047), FIG. 2049 (SEQ ID NO:2049), FIG. 2051 (SEQ ID NO:2051), FIG. 2053 (SEQ ID NO:2053), FIG. 2055 (SEQ ID NO:2055), FIG. 2057 (SEQ ID NO:2057), FIG. 2059 (SEQ ID NO:2059), FIG. 2061 (SEQ ID NO:2061), FIG. 2063 (SEQ ID NO:2063), FIG. 2065 (SEQ ID NO:2065), FIG. 2067 (SEQ ID NO:2067), FIG. 2069 (SEQ ID NO:2069), FIG. 2071 (SEQ ID NO:2071), FIG. 2073 (SEQ ID NO:2073), FIG. 2075 (SEQ ID NO:2075), FIG. 2077 (SEQ ID NO:2077), FIG. 2079 (SEQ ID NO:2079), FIG. 2081 (SEQ ID NO:2081), FIG. 2083 (SEQ ID NO:2083), FIG. 2085 (SEQ ID NO:2085), FIG. 2087 (SEQ ID NO:2087), FIG. 2089 (SEQ ID NO:2089), FIG. 2091 (SEQ ID NO:2091), FIG. 2093 (SEQ ID NO:2093), FIG. 2095 (SEQ ID NO:2095), FIG. 2097 (SEQ ID NO:2097), FIG. 2099 (SEQ ID NO:2099), FIG. 2101 (SEQ ID NO:2101), FIG. 2103 (SEQ ID NO:2103), FIG. 2105 (SEQ ID NO:2105), FIG. 2107 (SEQ ID NO:2107), FIG. 2109 (SEQ ID NO:2109), FIG. 2111 (SEQ ID NO:2111), FIG. 2113 (SEQ ID NO:2113), FIG. 2115 (SEQ ID NO:2115), FIG. 2117 (SEQ ID NO:2117), FIG. 2119 (SEQ ID NO:2119), FIG. 2121 (SEQ ID NO:2121), FIG. 2123 (SEQ ID NO:2123), FIG. 2125 (SEQ ID NO:2125), FIG. 2127 (SEQ ID NO:2127), FIG. 2129 (SEQ ID NO:2129), FIG. 2131 (SEQ ID NO:2131), FIG. 2133 (SEQ ID NO:2133), FIG. 2135 (SEQ ID NO:2135), FIG. 2137 (SEQ ID NO:2137), FIG. 2138 (SEQ ID NO:2138), FIG. 2140 (SEQ ID NO:2140), FIG. 2142 (SEQ ID NO:2142), FIG. 2144 (SEQ ID NO:2144), FIG. 2146 (SEQ ID NO:2146), FIG. 2147 (SEQ ID NO:2147), FIG. 2148 (SEQ ID NO:2148), FIG. 2150 (SEQ ID NO:2150), FIG. 2152 (SEQ ID NO:2152), FIG. 2154 (SEQ ID NO:2154), FIG. 2156 (SEQ ID NO:2156), FIG. 2158 (SEQ ID NO:2158), FIG. 2160 (SEQ ID NO:2160), FIG. 2162 (SEQ ID NO:2162), FIG. 2164 (SEQ ID NO:2164), FIG. 2166 (SEQ ID NO:2166), FIG. 2168 (SEQ ID NO:2168), FIG. 2170 (SEQ ID NO:2170), FIG. 2172 (SEQ ID NO:2172), FIG. 2174 (SEQ ID NO2174), FIG. 2176 (SEQ ID NO:2176), FIG. 2178 (SEQ ID NO:2178), FIG. 2180 (SEQ ID NO:2180), FIG. 2182 (SEQ ID NO:2182), FIG. 2184 (SEQ ID NO:2184), FIG. 2186 (SEQ ID NO:2186), FIG. 2188 (SEQ ID NO:2188), FIG. 2190 (SEQ ID NO:2190), FIG. 2192 (SEQ ID NO:2192), FIG. 2194 (SEQ ID NO:2194), FIG. 2196 (SEQ ID NO:2196), FIG. 2198 (SEQ ID NO:2198), FIG. 2200 (SEQ ID NO:2200), FIG. 2202 (SEQ ID NO:2202), FIG. 2204 (SEQ ID NO:2204), FIG. 2206 (SEQ ID NO:2206), FIG. 2208 (SEQ ID NO:2208), FIG. 2210 (SEQ ID NO:2210), FIG. 2212 (SEQ ID NO:2212), FIG. 2214 (SEQ ID NO:2214), FIG. 2216 (SEQ ID NO:2216), FIG. 2217A-B (SEQ ID NO:2217), FIG. 2219 (SEQ ID NO:2219), FIG. 2221 (SEQ ID NO:2221), FIG. 2223 (SEQ ID NO:2223), FIG. 2225 (SEQ ID NO:2225), FIG. 2227 (SEQ ID NO:2227), FIG. 2229 (SEQ ID NO:2229), FIG. 2230 (SEQ ID NO:2230), FIG. 2232 (SEQ ID NO:2232), FIG. 2234 (SEQ ID NO:2234), FIG. 2236A-B (SEQ ID NO:2236), FIG. 2238 (SEQ ID NO:2238), FIG. 2240 (SEQ ID NO:2240), FIG. 2242 (SEQ ID NO:2242), FIG. 2244 (SEQ ID NO:2244), FIG. 2246 (SEQ ID NO:2246), FIG. 2248A-B (SEQ ID NO:2248), FIG. 2250A-B (SEQ ID NO:2250), FIG. 2252 (SEQ ID NO:2252), FIG. 2254 (SEQ ID NO:2254), FIG. 2256 (SEQ ID NO:2256), FIG. 2258 (SEQ ID NO:2258), FIG. 2260 (SEQ ID NO:2260), FIG. 2262 (SEQ ID NO:2262), FIG. 2264 (SEQ ID NO:2264), FIG. 2266 (SEQ ID NO:2266), FIG. 2268 (SEQ ID NO:2268), FIG. 2270 (SEQ ID NO:2270), FIG. 2272 (SEQ ID NO:2272), FIG. 2274 (SEQ ID NO:2274), FIG. 2276 (SEQ ID NO:2276), FIG. 2278A-B (SEQ ID NO:2278), FIG. 2280 (SEQ ID NO:2280), FIG. 2282 (SEQ ID NO:2282), FIG. 2284 (SEQ ID NO:2284), FIG. 2286 (SEQ ID NO:2286), FIG. 2288 (SEQ ID NO:2288), FIG. 2290 (SEQ ID NO:2290), FIG. 2292 (SEQ ID NO:2292), FIG. 2294 (SEQ ID NO:2294), FIG. 2296A-B (SEQ ID NO:2296), FIG. 2298 (SEQ ID NO:2298), FIG. 2300 (SEQ ID NO:2300), FIG. 2301 (SEQ ID NO:2301), FIG. 2303 (SEQ ID NO:2303), FIG. 2305A-B (SEQ ID NO:2305), FIG. 2307 (SEQ ID NO:2307), FIG. 2308 (SEQ ID NO:2308), FIG. 2309A-B (SEQ ID NO:2309), FIG. 2311 (SEQ ID NO:2311), FIG. 2312 (SEQ ID NO:2312), FIG. 2314 (SEQ ID NO:2314), FIG. 2316 (SEQ ID NO:2316), FIG. 2318A-B (SEQ ID NO:2318), FIG. 2320 (SEQ ID NO:2320), FIG. 2322A-B (SEQ ID NO:2322), FIG. 2323A-B (SEQ ID NO:2323), FIG. 2325 (SEQ ID NO:2325), FIG. 2327 (SEQ ID NO:2327), FIG. 2329 (SEQ ID NO:2329), FIG. 2331A-B (SEQ ID NO:2331), FIG. 2333 (SEQ ID NO:2333), FIG. 2335 (SEQ ID NO:2335), FIG. 2337 (SEQ ID NO:2337), FIG. 2339A-B (SEQ ID NO:2339), FIG. 2341A-C (SEQ ID NO:2341), FIG. 2343 (SEQ ID NO:2343), FIG. 2345 (SEQ ID NO:2345), FIG. 2346 (SEQ ID NO:2346), FIG. 2348 (SEQ ID NO:2348), FIG. 2349 (SEQ ID NO:2349), FIG. 2351 (SEQ ID NO:2351), FIG. 2353A-B (SEQ ID NO:2353), FIG. 2355A-C (SEQ ID NO:2355), FIG. 2357 (SEQ ID NO:2357), FIG. 2359 (SEQ ID NO:2359), FIG. 2361 (SEQ ID NO:2361), FIG. 2363 (SEQ ID NO:2363), FIG. 2365 (SEQ ID NO:2365), FIG. 2367 (SEQ ID NO:2367), FIG. 2369 (SEQ ID NO:2369), FIG. 2371 (SEQ ID NO:2371), FIG. 2373 (SEQ ID NO:2373), FIG. 2375 (SEQ ID NO:2375), FIG. 2377 (SEQ ID NO:2377), FIG. 2379 (SEQ ID NO:2379), FIG. 2381 (SEQ ID NO:2381), FIG. 2383 (SEQ ID NO:2383), FIG. 2385 (SEQ ID NO:2385), FIG. 2387 (SEQ ID NO:2387), FIG. 2389 (SEQ ID NO:2389), FIG. 2391 (SEQ ID NO:2391), FIG. 2393 (SEQ ID NO:2393), FIG. 2395 (SEQ ID NO:2395), FIG. 2397 (SEQ ID NO:2397), FIG. 2399 (SEQ ID NO:2399), FIG. 2401 (SEQ ID NO:2401), FIG. 2403 (SEQ ID NO:2403), FIG. 2405A-B (SEQ ID NO:2405), FIG. 2406 (SEQ ID NO:2406), FIG. 2408 (SEQ ID NO:2408), FIG. 2410A-B (SEQ ID NO:2410), FIG. 2411 (SEQ ID NO:2411), FIG. 2413 (SEQ ID NO:2413), FIG. 2414 (SEQ ID NO:2414), FIG. 2416 (SEQ ID NO:2416), FIG. 2417 (SEQ ID NO:2417), FIG. 2418 (SEQ ID NO:2418), FIG. 2420 (SEQ ID NO:2420), FIG. 2421 (SEQ ID NO:2421), FIG. 2422 (SEQ ID NO:2422), FIG. 2424 (SEQ ID NO:2424), FIG. 2426A-B (SEQ ID NO:2426), FIG. 2428 (SEQ ID NO:2428), FIG. 2430 (SEQ ID NO:2430), FIG. 2432A-B (SEQ ID NO:2432), FIG. 2434 (SEQ ID NO:2434), FIG. 2436 (SEQ ID NO:2436), FIG. 2438 (SEQ ID NO:2438), FIG. 2440 (SEQ ID NO:2440), FIG. 2442 (SEQ ID NO:2442), FIG. 2444 (SEQ ID NO:2444), FIG. 2446 (SEQ ID NO:2446), FIG. 2447 (SEQ ID NO:2447), FIG. 2449 (SEQ ID NO:2449), FIG. 2451 (SEQ ID NO:2451), FIG. 2453 (SEQ ID NO:2453), FIG. 2455 (SEQ ID NO:2455), FIG. 2456A-B (SEQ ID NO:2456), FIG. 2458 (SEQ ID NO:2458), FIG. 2460 (SEQ ID NO:2460), FIG. 2462 (SEQ ID NO:2462), FIG. 2463 (SEQ ID NO:2463), FIG. 2464 (SEQ ID NO:2464), FIG. 2466 (SEQ ID NO:2466), FIG. 2467 (SEQ ID NO:2467), FIG. 2469 (SEQ ID NO:2469), FIG. 2470 (SEQ ID NO:2470), FIG. 2471A-B (SEQ ID NO:2471), FIG. 2473 (SEQ ID NO:2473), FIG. 2475 (SEQ ID NO:2475), FIG. 2476 (SEQ ID NO:2476), FIG. 2477 (SEQ ID NO:2477), FIG. 2478 (SEQ ID NO:2478), FIG. 2479 (SEQ ID NO:2479), FIG. 2480 (SEQ ID NO:2480), FIG. 2481 (SEQ ID NO:2481) or FIG. 2483 (SEQ ID NO:2483).

3. Isolated nucleic acid consisting of the nucleotide sequence shown in FIG. 1-2484.

4. A vector comprising the nucleic acid of claim 1.

5. The vector of claim 4 operably linked to control sequences recognized by a host cell transformed with the vector.

6. A host cell comprising the vector of claim 4.

7. The host cell of claim 6, wherein said cell is a CHO cell, an E. coli cell or a yeast cell.

8. A process for producing a PRO polypeptide comprising culturing the host cell of claim 6 under conditions suitable for expression of said PRO polypeptide and recovering said PRO polypeptide from the cell culture.

9. An isolated polypeptide having at least 80% amino acid sequence identity to the polypeptide shown in FIG. 2 (SEQ ID NO:2), FIG. 4 (SEQ ID NO:4), FIG. 6 (SEQ ID NO:6), FIG. 8 (SEQ ID NO:8), FIG. 10 (SEQ ID NO:10), FIG. 12 (SEQ ID NO:12), FIG. 14 (SEQ ID NO:14), FIG. 16 (SEQ ID NO:16), FIG. 18 (SEQ ID NO:18), FIG. 20 (SEQ ID NO:20), FIG. 22 (SEQ ID NO:22), FIG. 24 (SEQ ID NO:24), FIG. 26 (SEQ ID NO:26), FIG. 28 (SEQ ID NO:28), FIG. 30 (SEQ ID NO:30), FIG. 32 (SEQ ID NO:32), FIG. 34 (SEQ ID NO:34), FIG. 36 (SEQ ID NO:36), FIG. 38 (SEQ ID NO:38), FIG. 40 (SEQ ID NO:40), FIG. 42 (SEQ ID NO:42), FIG. 43 (SEQ ID NO:43), FIG. 46 (SEQ ID NO:46), FIG. 48 (SEQ ID NO:48), FIG. 50 (SEQ ID NO:50), FIG. 52 (SEQ ID NO:52), FIG. 54 (SEQ ID NO:54), FIG. 56 (SEQ ID NO:56), FIG. 58 (SEQ ID NO:58), FIG. 60 (SEQ ID NO:60), FIG. 62 (SEQ ID NO:62), FIG. 64 (SEQ ID NO:64), FIG. 66 (SEQ ID NO:66), FIG. 68 (SEQ ID NO:68), FIG. 70 (SEQ ID NO:70), FIG. 72 (SEQ ID NO:72), FIG. 74 (SEQ ID NO:74), FIG. 76 (SEQ ID NO:76), FIG. 78 (SEQ ID NO:78), FIG. 80 (SEQ ID NO:80), FIG. 80 (SEQ ID NO:80), FIG. 84 (SEQ ID NO:84), FIG. 86 (SEQ ID NO:86), FIG. 88 (SEQ ID NO:88), FIG. 90 (SEQ ID NO:90), FIG. 92 (SEQ ID NO:92), FIG. 94 (SEQ ID NO:94), FIG. 96 (SEQ ID NO:96), FIG. 98 (SEQ ID NO:98), FIG. 100 (SEQ ID NO:100), FIG. 102 (SEQ ID NO:102), FIG. 104 (SEQ ID NO:104), FIG. 106 (SEQ ID NO:106), FIG. 108 (SEQ ID NO:108), FIG. 108 (SEQ ID NO:108), FIG. 112 (SEQ ID NO:112), FIG. 115 (SEQ ID NO:115), FIG. 117 (SEQ ID NO:117), FIG. 119 (SEQ ID NO:119), FIG. 121 (SEQ ID NO:121), FIG. 123 (SEQ ID NO:123), FIG. 125 (SEQ ID NO:125), FIG. 127 (SEQ ID NO:127), FIG. 129 (SEQ ID NO:129), FIG. 131 (SEQ ID NO:131), FIG. 133 (SEQ ID NO:133), FIG. 135 (SEQ ID NO:135), FIG. 137 (SEQ ID NO:137), FIG. 139 (SEQ ID NO:139), FIG. 141 (SEQ ID NO:141), FIG. 143 (SEQ ID NO:143), FIG. 145 (SEQ ID NO:145), FIG. 147 (SEQ ID NO:147), FIG. 149 (SEQ ID NO:149), FIG. 151 (SEQ ID NO:151), FIG. 153 (SEQ ID NO:153), FIG. 155 (SEQ ID NO:155), FIG. 157 (SEQ ID NO:157), FIG. 159 (SEQ ID NO:159), FIG. 161 (SEQ ID NO:161), FIG. 163 (SEQ ID NO:163), FIG. 165 (SEQ ID NO:165), FIG. 167 (SEQ ID NO:167), FIG. 169 (SEQ ID NO:169), FIG. 171 (SEQ ID NO:171), FIG. 173 (SEQ ID NO:173), FIG. 175 (SEQ ID NO:175), FIG. 177 (SEQ ID NO:177), FIG. 179 (SEQ ID NO:179), FIG. 181 (SEQ ID NO:181), FIG. 183 (SEQ ID NO:183), FIG. 185 (SEQ ID NO:185), FIG. 187 (SEQ ID NO:187), FIG. 189 (SEQ ID NO:189), FIG. 191 (SEQ ID NO:191), FIG. 194 (SEQ ID NO:194), FIG. 196 (SEQ ID NO:196), FIG. 198 (SEQ ID NO:198), FIG. 200 (SEQ ID NO:200), FIG. 202 (SEQ ID NO:202), FIG. 204 (SEQ ID NO:204), FIG. 206 (SEQ ID NO:206), FIG. 208 (SEQ ID NO:208), FIG. 210 (SEQ ID NO:210), FIG. 212 (SEQ ID NO:212), FIG. 214 (SEQ ID NO:214), FIG. 216 (SEQ ID NO:216), FIG. 218 (SEQ ID NO:218), FIG. 221 (SEQ ID NO:221), FIG. 223 (SEQ ID NO:223), FIG. 225 (SEQ ID NO:225), FIG. 227 (SEQ ID NO:227), FIG. 229 (SEQ ID NO:229), FIG. 231 (SEQ ID NO:231), FIG. 233 (SEQ ID NO:233), FIG. 235 (SEQ ID NO:235), FIG. 237 (SEQ ID NO:237), FIG. 239 (SEQ ID NO:239), FIG. 241 (SEQ ID NO:241), FIG. 243 (SEQ ID NO:243), FIG. 245 (SEQ ID NO:245), FIG. 247 (SEQ ID NO:247), FIG. 249 (SEQ ID NO:249), FIG. 251 (SEQ ID NO:251), FIG. 253 (SEQ ID NO:253), FIG. 255 (SEQ ID NO:255), FIG. 257 (SEQ ID NO:257), FIG. 259 (SEQ ID NO:259), FIG. 261 (SEQ ID NO:261), FIG. 263 (SEQ ID NO:263), FIG. 265 (SEQ ID NO:265), FIG. 267 (SEQ ID NO:267), FIG. 269 (SEQ ID NO:269), FIG. 272 (SEQ ID NO:272), FIG. 274 (SEQ ID NO:274), FIG. 276 (SEQ ID NO:276), FIG. 278 (SEQ ID NO:278), FIG. 280 (SEQ ID NO:280), FIG. 282 (SEQ ID NO:282), FIG. 284 (SEQ ID NO:284), FIG. 286 (SEQ ID NO:286), FIG. 288 (SEQ ID NO:288), FIG. 290 (SEQ ID NO:290), FIG. 292 (SEQ ID NO:292), FIG. 294 (SEQ ID NO:294), FIG. 296 (SEQ ID NO:296), FIG. 298 (SEQ ID NO:298), FIG. 300 (SEQ ID NO:300), FIG. 302 (SEQ ID NO:302), FIG. 304 (SEQ ID NO:304), FIG. 306 (SEQ ID NO:306), FIG. 308 (SEQ ID NO:308), FIG. 310 (SEQ ID NO:310), FIG. 312 (SEQ ID NO:312), FIG. 314 (SEQ ID NO:314), FIG. 316 (SEQ ID NO:316), FIG. 318 (SEQ ID NO:318), FIG. 320 (SEQ ID NO:320), FIG. 322 (SEQ ID NO:322), FIG. 324 (SEQ ID NO:324), FIG. 326 (SEQ ID NO:326), FIG. 328 (SEQ ID NO:328), FIG. 330 (SEQ ID NO:330), FIG. 332 (SEQ ID NO:332), FIG. 334 (SEQ ID NO:334), FIG. 336 (SEQ ID NO:336), FIG. 338 (SEQ ID NO:338), FIG. 340 (SEQ ID NO:340), FIG. 342 (SEQ ID NO:342), FIG. 344 (SEQ ID NO:344), FIG. 346 (SEQ ID NO:346), FIG. 348 (SEQ ID NO:348), FIG. 350 (SEQ ID NO:350), FIG. 352 (SEQ ID NO:352), FIG. 354 (SEQ ID NO:354), FIG. 356 (SEQ ID NO:356), FIG. 358 (SEQ ID NO:358), FIG. 360 (SEQ ID NO:360), FIG. 362 (SEQ ID NO:362), FIG. 364 (SEQ ID NO:364), FIG. 366 (SEQ ID NO:366), FIG. 368 (SEQ ID NO:368), FIG. 370 (SEQ ID NO:370), FIG. 372 (SEQ ID NO:372), FIG. 374 (SEQ ID NO:374), FIG. 376 (SEQ ID NO:376), FIG. 378 (SEQ ID NO:378), FIG. 380 (SEQ ID NO:380), FIG. 382 (SEQ ID NO:382), FIG. 384 (SEQ ID NO:384), FIG. 386 (SEQ ID NO:386), FIG. 388 (SEQ ID NO:388), FIG. 390 (SEQ ID NO:390), FIG. 392 (SEQ ID NO:392), FIG. 394 (SEQ ID NO:394), FIG. 396 (SEQ ID NO:396), FIG. 398 (SEQ ID NO:398), FIG. 400 (SEQ ID NO:400), FIG. 402 (SEQ ID NO:402), FIG. 404 (SEQ ID NO:404), FIG. 406 (SEQ ID NO:406), FIG. 408 (SEQ ID NO:408), FIG. 410 (SEQ ID NO:410), FIG. 412 (SEQ ID NO:412), FIG. 414 (SEQ ID NO:414), FIG. 416 (SEQ ID NO:416), FIG. 418 (SEQ ID NO:418), FIG. 420 (SEQ ID NO:420), FIG. 422 (SEQ ID NO:422), FIG. 424 (SEQ ID NO:424), FIG. 426 (SEQ ID NO:426), FIG. 428 (SEQ ID NO:428), FIG. 430 (SEQ ID NO:430), FIG. 432 (SEQ ID NO:432), FIG. 434 (SEQ ID NO:434), FIG. 436 (SEQ ID NO:436), FIG. 438 (SEQ ID NO:438), FIG. 440 (SEQ ID NO:440), FIG. 442 (SEQ ID NO:442), FIG. 444 (SEQ ID NO:444), FIG. 446 (SEQ ID NO:446), FIG. 448 (SEQ ID NO:448), FIG. 450 (SEQ ID NO:450), FIG. 452 (SEQ ID NO:452), FIG. 454 (SEQ ID NO:454), FIG. 456 (SEQ ID NO:456), FIG. 458 (SEQ ID NO:458), FIG. 460 (SEQ ID NO:460), FIG. 462 (SEQ ID NO:462), FIG. 464 (SEQ ID NO:464), FIG. 466 (SEQ ID NO:466), FIG. 467 (SEQ ID NO:467), FIG. 470 (SEQ ID NO:470), FIG. 472 (SEQ ID NO:472), FIG. 474 (SEQ ID NO:474), FIG. 476 (SEQ ID NO:476), FIG. 478 (SEQ ID NO:478), FIG. 480 (SEQ ID NO:480), FIG. 482 (SEQ ID NO:482), FIG. 484 (SEQ ID NO:484), FIG. 486 (SEQ ID NO:486), FIG. 488 (SEQ ID NO:488), FIG. 490 (SEQ ID NO:490), FIG. 492 (SEQ ID NO:492), FIG. 494 (SEQ ID NO:494), FIG. 496 (SEQ ID NO:496), FIG. 498 (SEQ ID NO:498), FIG. 500 (SEQ ID NO:500), FIG. 502 (SEQ ID NO:502), FIG. 504 (SEQ ID NO:504), FIG. 506 (SEQ ID NO:506), FIG. 508 (SEQ ID NO:508), FIG. 510 (SEQ ID NO:510), FIG. 512 (SEQ ID NO:512), FIG. 514 (SEQ ID NO:514), FIG. 516 (SEQ ID NO:516), FIG. 518 (SEQ ID NO:518), FIG. 520 (SEQ ID NO:520), FIG. 522 (SEQ ID NO:522), FIG. 524 (SEQ ID NO:524), FIG. 526 (SEQ ID NO:526), FIG. 528 (SEQ ID NO:528), FIG. 530 (SEQ ID NO:530), FIG. 532 (SEQ ID NO:532), FIG. 534 (SEQ ID NO:534), FIG. 536 (SEQ ID NO:536), FIG. 538 (SEQ ID NO:538), FIG. 540 (SEQ ID NO:540), FIG. 542 (SEQ ID NO:542), FIG. 544 (SEQ ID NO:544), FIG. 546 (SEQ ID NO:546), FIG. 548 (SEQ ID NO:548), FIG. 550 (SEQ ID NO:550), FIG. 552 (SEQ ID NO:552), FIG. 554 (SEQ ID NO:554), FIG. 556 (SEQ ID NO:556), FIG. 558 (SEQ ID NO:558), FIG. 560 (SEQ ID NO:560), FIG. 562 (SEQ ID NO:562), FIG. 564 (SEQ ID NO:564), FIG. 566 (SEQ ID NO:566), FIG. 568 (SEQ ID NO:568), FIG. 570 (SEQ ID NO:570), FIG. 572 (SEQ ID NO:572), FIG. 574 (SEQ ID NO:574), FIG. 576 (SEQ ID NO:576), FIG. 578 (SEQ ID NO:578), FIG. 580 (SEQ ID NO:580), FIG. 582 (SEQ ID NO:582), FIG. 584 (SEQ ID NO:584), FIG. 586 (SEQ ID NO:586), FIG. 588 (SEQ ID NO:588), FIG. 590 (SEQ ID NO:590), FIG. 592 (SEQ ID NO:592), FIG. 594 (SEQ ID NO:594), FIG. 596 (SEQ ID NO:596), FIG. 598 (SEQ ID NO:598), FIG. 600 (SEQ ID NO:600), FIG. 602 (SEQ ID NO:602), FIG. 604 (SEQ ID NO:604), FIG. 606 (SEQ ID NO:606), FIG. 608 (SEQ ID NO:608), FIG. 610 (SEQ ID NO:610), FIG. 612 (SEQ ID NO:612), FIG. 614 (SEQ ID NO:614), FIG. 616 (SEQ ID NO:616), FIG. 618 (SEQ ID NO:618), FIG. 620 (SEQ ID NO:620), FIG. 622 (SEQ ID NO:622), FIG. 624 (SEQ ID NO:624), FIG. 626 (SEQ ID NO:626), FIG. 628 (SEQ ID NO:628), FIG. 630 (SEQ ID NO:630), FIG. 632 (SEQ ID NO:632), FIG. 634 (SEQ ID NO:634), FIG. 637 (SEQ ID NO:637), FIG. 639 (SEQ ID NO:639), FIG. 641 (SEQ ID NO:641), FIG. 643 (SEQ ID NO:643), FIG. 645 (SEQ ID NO:645), FIG. 647 (SEQ ID NO:647), FIG. 649 (SEQ ID NO:649), FIG. 651 (SEQ ID NO:651), FIG. 653 (SEQ ID NO:653), FIG. 655 (SEQ ID NO:655), FIG. 657 (SEQ ID NO:657), FIG. 659 (SEQ ID NO:659), FIG. 661 (SEQ ID NO:661), FIG. 663 (SEQ ID NO:663), FIG. 665 (SEQ ID NO:665), FIG. 667 (SEQ ID NO:667), FIG. 669 (SEQ ID NO:669), FIG. 671 (SEQ ID NO:671), FIG. 673 (SEQ ID NO:673), FIG. 675 (SEQ ID NO:675), FIG. 677 (SEQ ID NO:677), FIG. 679 (SEQ ID NO:679), FIG. 681 (SEQ ID NO:681), FIG. 683 (SEQ ID NO:683), FIG. 685 (SEQ ID NO:685), FIG. 687 (SEQ ID NO:687), FIG. 689 (SEQ ID NO:689), FIG. 691 (SEQ ID NO:691), FIG. 693 (SEQ ID NO:693), FIG. 695 (SEQ ID NO:695), FIG. 697 (SEQ ID NO:697), FIG. 699 (SEQ ID NO:699), FIG. 701 (SEQ ID NO:701), FIG. 703 (SEQ ID NO:703), FIG. 705 (SEQ ID NO:705), FIG. 707 (SEQ ID NO:707), FIG. 709 (SEQ ID NO:709), FIG. 711 (SEQ ID NO:711), FIG. 713 (SEQ ID NO:713), FIG. 715 (SEQ ID NO:715), FIG. 717 (SEQ ID NO:717), FIG. 719 (SEQ ID NO:719), FIG. 721 (SEQ ID NO:721), FIG. 723 (SEQ ID NO:723), FIG. 725 (SEQ ID NO:725), FIG. 727 (SEQ ID NO:727), FIG. 729 (SEQ ID NO:729), FIG. 731 (SEQ ID NO:731), FIG. 733 (SEQ ID NO:733), FIG. 735 (SEQ ID NO:735), FIG. 737 (SEQ ID NO:737), FIG. 739 (SEQ ID NO:739), FIG. 741 (SEQ ID NO:741), FIG. 743 (SEQ ID NO:743), FIG. 745 (SEQ ID NO:745), FIG. 747 (SEQ ID NO:747), FIG. 749 (SEQ ID NO:749), FIG. 751 (SEQ ID NO:751), FIG. 753 (SEQ ID NO:753), FIG. 755 (SEQ ID NO:755), FIG. 757 (SEQ ID NO:757), FIG. 759 (SEQ ID NO:759), FIG. 761 (SEQ ID NO:761), FIG. 763 (SEQ ID NO:763), FIG. 765 (SEQ ID NO:765), FIG. 767 (SEQ ID NO:767), FIG. 770 (SEQ ID NO:770), FIG. 772 (SEQ ID NO:772), FIG. 774 (SEQ ID NO:774), FIG. 776 (SEQ ID NO:776), FIG. 778 (SEQ ID NO:778), FIG. 780 (SEQ ID NO:780), FIG. 782 (SEQ ID NO:782), FIG. 784 (SEQ ID NO:784), FIG. 786 (SEQ ID NO:786), FIG. 788 (SEQ ID NO:788), FIG. 790 (SEQ ID NO:790), FIG. 792 (SEQ ID NO:792), FIG. 794 (SEQ ID NO:794), FIG. 796 (SEQ ID NO:796), FIG. 798 (SEQ ID NO:798), FIG. 800 (SEQ ID NO:800), FIG. 802 (SEQ ID NO:802), FIG. 805 (SEQ ID NO:805), FIG. 807 (SEQ ID NO:807), FIG. 809 (SEQ ID NO:809), FIG. 811 (SEQ ID NO:811), FIG. 813 (SEQ ID NO:813), FIG. 815 (SEQ ID NO:815), FIG. 817 (SEQ ID NO:817), FIG. 819 (SEQ ID NO:819), FIG. 821 (SEQ ID NO:821), FIG. 823 (SEQ ID NO:823), FIG. 826 (SEQ ID NO:826), FIG. 828 (SEQ ID NO:828), FIG. 830 (SEQ ID NO:830), FIG. 832 (SEQ ID NO:832), FIG. 834 (SEQ ID NO:834), FIG. 836 (SEQ ID NO:836), FIG. 838 (SEQ ID NO:838), FIG. 840 (SEQ ID NO:840), FIG. 842 (SEQ ID NO:842), FIG. 844 (SEQ ID NO:844), FIG. 846 (SEQ ID NO:846), FIG. 848 (SEQ ID NO:848), FIG. 850 (SEQ ID NO:850), FIG. 852 (SEQ ID NO:852), FIG. 854 (SEQ ID NO:854), FIG. 856 (SEQ ID NO:856), FIG. 858 (SEQ ID NO:858), FIG. 860 (SEQ ID NO:860), FIG. 862 (SEQ ID NO:862), FIG. 864 (SEQ ID NO:864), FIG. 866 (SEQ ID NO:866), FIG. 868 (SEQ ID NO:868), FIG. 870 (SEQ ID NO:870), FIG. 872 (SEQ ID NO:872), FIG. 874 (SEQ ID NO:874), FIG. 876 (SEQ ID NO:876), FIG. 878 (SEQ ID NO:878), FIG. 880 (SEQ ID NO:880), FIG. 882 (SEQ ID NO:882), FIG. 884 (SEQ ID NO:884), FIG. 886 (SEQ ID NO:886), FIG. 888 (SEQ ID NO:888), FIG. 890 (SEQ ID NO:890), FIG. 892 (SEQ ID NO:892), FIG. 894 (SEQ ID NO:894), FIG. 896 (SEQ ID NO:896), FIG. 898 (SEQ ID NO:898), FIG. 900 (SEQ ID NO:900), FIG. 902 (SEQ ID NO:902), FIG. 904 (SEQ ID NO:904), FIG. 906 (SEQ ID NO:906), FIG. 908 (SEQ ID NO:908), FIG. 911 (SEQ ID NO:911), FIG. 913 (SEQ ID NO:913), FIG. 915 (SEQ ID NO:915), FIG. 917 (SEQ ID NO:917), FIG. 919 (SEQ ID NO:919), FIG. 921 (SEQ ID NO:921), FIG. 923 (SEQ ID NO:923), FIG. 925 (SEQ ID NO:925), FIG. 927 (SEQ ID NO:927), FIG. 929 (SEQ ID NO:929), FIG. 931 (SEQ ID NO:931), FIG. 933 (SEQ ID NO:933), FIG. 935 (SEQ ID NO:935), FIG. 937 (SEQ ID NO:937), FIG. 940 (SEQ ID NO:940), FIG. 943 (SEQ ID NO:943), FIG. 946 (SEQ ID NO:946), FIG. 948 (SEQ ID NO:948), FIG. 950 (SEQ ID NO:950), FIG. 952 (SEQ ID NO:952), FIG. 955 (SEQ ID NO:955), FIG. 957 (SEQ ID NO:957), FIG. 959 (SEQ ID NO:959), FIG. 961 (SEQ ID NO:961), FIG. 966 (SEQ ID NO:966), FIG. 968 (SEQ ID NO:968), FIG. 970 (SEQ ID NO:970), FIG. 972 (SEQ ID NO:972), FIG. 974 (SEQ ID NO:974), FIG. 976 (SEQ ID NO:976), FIG. 978 (SEQ ID NO:978), FIG. 980 (SEQ ID NO:980), FIG. 985 (SEQ ID NO:985), FIG. 988 (SEQ ID NO:988), FIG. 991 (SEQ ID NO:991), FIG. 993 (SEQ ID NO:993), FIG. 995 (SEQ ID NO:995), FIG. 997 (SEQ ID NO:997), FIG. 1000 (SEQ ID NO:1000), FIG. 1002 (SEQ ID NO:1002), FIG. 1005 (SEQ ID NO:1005), FIG. 1007 (SEQ ID NO:1007), FIG. 1009 (SEQ ID NO:1009), FIG. 1011 (SEQ ID NO:1011), FIG. 1013 (SEQ ID NO:1013), FIG. 1015 (SEQ ID NO:1015), FIG. 1017 (SEQ ID NO:1017), FIG. 1019 (SEQ ID NO:1019), FIG. 1022 (SEQ ID NO:1022), FIG. 1024 (SEQ ID NO:1024), FIG. 1026 (SEQ ID NO:1026), FIG. 1028 (SEQ ID NO:1028), FIG. 1030 (SEQ ID NO:1030), FIG. 1032 (SEQ ID NO:1032), FIG. 1034 (SEQ ID NO:1034), FIG. 1036 (SEQ ID NO:1036), FIG. 1038 (SEQ ID NO:1083), FIG. 1040 (SEQ ID NO:1040), FIG. 1042 (SEQ ID NO:1042), FIG. 1044 (SEQ ID NO:1044), FIG. 1047 (SEQ ID NO:1047), FIG. 1049 (SEQ ID NO:1049), FIG. 1051 (SEQ ID NO:1051), FIG. 1053 (SEQ ID NO:1053), FIG. 1055 (SEQ ID NO1055), FIG. 1057 (SEQ ID NO:1057), FIG. 1060 (SEQ ID NO:1060), FIG. 1062 (SEQ ID NO:1062), FIG. 1064 (SEQ ID NO:1064), FIG. 1066 (SEQ ID NO:1066), FIG. 1068 (SEQ ID NO:1068), FIG. 1070 (SEQ ID NO:1070), FIG. 1072 (SEQ ID NO:1072), FIG. 1074 (SEQ ID NO:1074), FIG. 1076 (SEQ ID NO:1076), FIG. 1078 (SEQ ID NO:1078), FIG. 1080 (SEQ ID NO:1080), FIG. 1082 (SEQ ID NO:1082), FIG. 1084 (SEQ ID NO:1084), FIG. 1086 (SEQ ID NO:1086), FIG. 1089 (SEQ ID NO:1089), FIG. 1091 (SEQ ID NO:1091), FIG. 1093 (SEQ ID NO:1093), FIG. 1098 (SEQ ID NO:1098), FIG. 1100 (SEQ ID NO:1100), FIG. 1103 (SEQ ID NO:1103), FIG. 1105 (SEQ ID NO:1105), FIG. 1107 (SEQ ID NO:1107), FIG. 1110 (SEQ ID NO:1110), FIG. 1112 (SEQ ID NO:1112), FIG. 1114 (SEQ ID NO:1114), FIG. 1116 (SEQ ID NO:1116), FIG. 1118 (SEQ ID NO:1118), FIG. 1120 (SEQ ID NO:1120), FIG. 1122 (SEQ ID NO:1122), FIG. 1124 (SEQ ID NO:1124), FIG. 1126 (SEQ ID NO:1126), FIG. 1128 (SEQ ID NO:1128), FIG. 1130 (SEQ ID NO:1130), FIG. 1132 (SEQ ID NO:1132), FIG. 1134 (SEQ ID NO:1134), FIG. 1136 (SEQ ID NO:1136), FIG. 1138 (SEQ ID NO:1138), FIG. 1140 (SEQ ID NO:1140), FIG. 1142 (SEQ ID NO:1142), FIG. 1144 (SEQ ID NO:1144), FIG. 1146 (SEQ ID NO:1146), FIG. 1148 (SEQ ID NO:1148), FIG. 1150 (SEQ ID NO:1150), FIG. 1153 (SEQ ID NO:1153), FIG. 1155 (SEQ ID NO:1155), FIG. 1157 (SEQ ID NO:1157), FIG. 1159 (SEQ ID NO:1159), FIG. 1161 (SEQ ID NO:1161), FIG. 1164 (SEQ ID NO:1164), FIG. 1166 (SEQ ID NO:1166), FIG. 1168 (SEQ ID NO:1168), FIG. 1170 (SEQ ID NO:1170), FIG. 1172 (SEQ ID NO:1172), FIG. 1174 (SEQ ID NO:1174), FIG. 1176 (SEQ ID NO:1176), FIG. 1178 (SEQ ID NO:1178), FIG. 1180 (SEQ ID NO:1180), FIG. 1182 (SEQ ID NO:1182), FIG. 1184 (SEQ ID NO:1184), FIG. 1186 (SEQ ID NO:1186), FIG. 1188 (SEQ ID NO:1188), FIG. 1190 (SEQ ID NO:1190), FIG. 1192 (SEQ ID NO:1192), FIG. 1194 (SEQ ID NO:1194), FIG. 1196 (SEQ ID NO:1196), FIG. 1198 (SEQ ID NO:1198), FIG. 1200 (SEQ ID NO:1200), FIG. 1202 (SEQ ID NO:1202), FIG. 1204 (SEQ ID NO:1204), FIG. 1206 (SEQ ID NO:1206), FIG. 1208 (SEQ ID NO:1208), FIG. 1210 (SEQ ID NO:1210), FIG. 1212 (SEQ ID NO:1212), FIG. 1214 (SEQ ID NO:1214), FIG. 1216 (SEQ ID NO:1216), FIG. 1218 (SEQ ID NO:1218), FIG. 1220 (SEQ ID NO:1220), FIG. 1222 (SEQ ID NO:1222), FIG. 1224 (SEQ ID NO:1224), FIG. 1226 (SEQ ID NO:1226), FIG. 1228 (SEQ ID NO:1228), FIG. 1230 (SEQ ID NO:1230), FIG. 1232 (SEQ ID NO:1232), FIG. 1234 (SEQ ID NO:1234), FIG. 1236 (SEQ ID NO:1236), FIG. 1238 (SEQ ID NO:1238), FIG. 1240 (SEQ ID NO:1240), FIG. 1242 (SEQ ID NO:1242), FIG. 1244 (SEQ ID NO:1244), FIG. 1246 (SEQ ID NO:1246), FIG. 1248 (SEQ ID NO:1248), FIG. 1250 (SEQ ID NO:1250), FIG. 1252 (SEQ ID NO:1252), FIG. 1254 (SEQ ID NO:1254), FIG. 1256 (SEQ ID NO:1256), FIG. 1258 (SEQ ID NO:1258), FIG. 1260 (SEQ ID NO:1260), FIG. 1262 (SEQ ID NO:1262), FIG. 1264 (SEQ ID NO:1264), FIG. 1266 (SEQ ID NO:1266), FIG. 1268 (SEQ ID NO:1268), FIG. 1270 (SEQ ID NO:1270), FIG. 1272 (SEQ ID NO:1272), FIG. 1274 (SEQ ID NO:1274), FIG. 1276 (SEQ ID NO:1276), FIG. 1278 (SEQ ID NO:1278), FIG. 1280 (SEQ ID NO:1280), FIG. 1282 (SEQ ID NO:1282), FIG. 1284 (SEQ ID NO:1284), FIG. 1286 (SEQ ID NO:1286), FIG. 1288 (SEQ ID NO:1288), FIG. 1290 (SEQ ID NO:1290), FIG. 1292 (SEQ ID NO:1292), FIG. 1294 (SEQ ID NO:1294), FIG. 1296 (SEQ ID NO:1296), FIG. 1298 (SEQ ID NO:1298), FIG. 1300 (SEQ ID NO:1300), FIG. 1302 (SEQ ID NO:1302), FIG. 1304 (SEQ ID NO:1304), FIG. 1306 (SEQ ID NO:1306), FIG. 1308 (SEQ ID NO:1308), FIG. 1310 (SEQ ID NO:1310), FIG. 1312 (SEQ ID NO:1312), FIG. 1314 (SEQ ID NO:1314), FIG. 1316 (SEQ ID NO:1316), FIG. 1318 (SEQ ID NO:1318), FIG. 1320 (SEQ ID NO:1320), FIG. 1322 (SEQ ID NO:1322), FIG. 1324 (SEQ ID NO:1324), FIG. 1326 (SEQ ID NO:1326), FIG. 1328 (SEQ ID NO:1328), FIG. 1330 (SEQ ID NO:1330), FIG. 1332 (SEQ ID NO:1332), FIG. 1334 (SEQ ID NO:1334), FIG. 1336 (SEQ ID NO:1336), FIG. 1338 (SEQ ID NO:1338), FIG. 1340 (SEQ ID NO:140), FIG. 1342 (SEQ ID NO:1342), FIG. 1344 (SEQ ID NO:1344), FIG. 1346 (SEQ ID NO:1346), FIG. 1348 (SEQ ID NO:1348), FIG. 1350 (SEQ ID NO:1350), FIG. 1352 (SEQ ID NO:1352), FIG. 1354 (SEQ ID NO:1354), FIG. 1356 (SEQ ID NO:1356), FIG. 1358 (SEQ ID NO:1358), FIG. 1360 (SEQ ID NO:1360), FIG. 1362 (SEQ ID NO:1362), FIG. 1364 (SEQ ID NO:1364), FIG. 1366 (SEQ ID NO:1366), FIG. 1368 (SEQ ID NO:1368), FIG. 1370 (SEQ ID NO:1370), FIG. 1372 (SEQ ID NO:1372), FIG. 1374 (SEQ ID NO:1374), FIG. 1376 (SEQ ID NO:1376), FIG. 1378 (SEQ ID NO:1378), FIG. 1380 (SEQ ID NO:1379), FIG. 1382 (SEQ ID NO:1382), FIG. 1384 (SEQ ID NO:1384), FIG. 1386 (SEQ ID NO:1386), FIG. 1388 (SEQ ID NO:1388), FIG. 1390 (SEQ ID NO:1390), FIG. 1392 (SEQ ID NO:1392), FIG. 1394 (SEQ ID NO:1394), FIG. 1396 (SEQ ID NO:1396), FIG. 1398 (SEQ ID NO:1398), FIG. 1400 (SEQ ID NO:1400), FIG. 1402 (SEQ ID NO:1402), FIG. 1404 (SEQ ID NO:1404), FIG. 1406 (SEQ ID NO:1406), FIG. 1408 (SEQ ID NO:1408), FIG. 1410 (SEQ ID NO:1410), FIG. 1412 (SEQ ID NO:1412), FIG. 1414 (SEQ ID NO:1414), FIG. 1416 (SEQ ID NO:1416), FIG. 1418 (SEQ ID NO:1418), FIG. 1420 (SEQ ID NO:1420), FIG. 1422 (SEQ ID NO:1422), FIG. 1425 (SEQ ID NO:1425), FIG. 1427 (SEQ ID NO:1427), FIG. 1429 (SEQ ID NO:1429), FIG. 1432 (SEQ ID NO:1432), FIG. 1434 (SEQ ID NO:1434), FIG. 1436 (SEQ ID NO:1436), FIG. 1438 (SEQ ID NO:1438), FIG. 1440 (SEQ ID NO:1440), FIG. 1442 (SEQ ID NO:1442), FIG. 1444 (SEQ ID NO:1444), FIG. 1446 (SEQ ID NO:1446), FIG. 1448 (SEQ ID NO:1448), FIG. 1450 (SEQ ID NO:1450), FIG. 1452 (SEQ ID NO:1452), FIG. 1454 (SEQ ID NO:1454), FIG. 1456 (SEQ ID NO:1456), FIG. 1458 (SEQ ID NO:1458), FIG. 1460 (SEQ ID NO:1460), FIG. 1462 (SEQ ID NO:1462), FIG. 1464 (SEQ ID NO:1464), FIG. 1466 (SEQ ID NO:1466), FIG. 1468 (SEQ ID NO:1468), FIG. 1470 (SEQ ID NO:1470), FIG. 1472 (SEQ ID NO:1472), FIG. 1474 (SEQ ID NO:1474), FIG. 1476 (SEQ ID NO:1476), FIG. 1478 (SEQ ID NO:1478), FIG. 1480 (SEQ ID NO:1480), FIG. 1482 (SEQ ID NO:1482), FIG. 1484 (SEQ ID NO:1484), FIG. 1486 (SEQ ID NO:1486), FIG. 1488 (SEQ ID NO:1488), FIG. 1490 (SEQ ID NO:1490), FIG. 1492 (SEQ ID NO:1492), FIG. 1494 (SEQ ID NO:1494), FIG. 1496 (SEQ ID NO:1496), FIG. 1498 (SEQ ID NO:1498), FIG. 1500 (SEQ ID NO:1500), FIG. 1502 (SEQ ID NO:1502), FIG. 1504 (SEQ ID NO:1504), FIG. 1506 (SEQ ID NO:1506), FIG. 1508 (SEQ ID NO:1508), FIG. 1510 (SEQ ID NO:1510), FIG. 1512 (SEQ ID NO:1512), FIG. 1514 (SEQ ID NO:1514), FIG. 1516 (SEQ ID NO:1516), FIG. 1518 (SEQ ID NO:1518), FIG. 1520 (SEQ ID NO:1520), FIG. 1522 (SEQ ID NO:1522), FIG. 1524 (SEQ ID NO:1524), FIG. 1526 (SEQ ID NO:1526), FIG. 1528 (SEQ ID NO:1528), FIG. 1530 (SEQ ID NO:1530), FIG. 1532 (SEQ ID NO:1532), FIG. 1534 (SEQ ID NO:1534), FIG. 1536 (SEQ ID NO:1536), FIG. 1538 (SEQ ID NO:1538), FIG. 1540 (SEQ ID NO:1540), FIG. 1542 (SEQ ID NO:1542), FIG. 1544 (SEQ ID NO:1544), FIG. 1546 (SEQ ID NO:1546), FIG. 1548 (SEQ ID NO:1548), FIG. 1550 (SEQ ID NO:1550), FIG. 1552 (SEQ ID NO:1552), FIG. 1554 (SEQ ID NO:1554), FIG. 1556 (SEQ ID NO:1556), FIG. 1558 (SEQ ID NO:1558), FIG. 1560 (SEQ ID NO:1560), FIG. 1562 (SEQ ID NO:1562), FIG. 1564 (SEQ ID NO:1654), FIG. 1566 (SEQ ID NO:1566), FIG. 1568 (SEQ ID NO:1568), FIG. 1570 (SEQ ID NO:1570), FIG. 1572 (SEQ ID NO:1572), FIG. 1574 (SEQ ID NO:1574), FIG. 1576 (SEQ ID NO:1576), FIG. 1578 (SEQ ID NO:1578), FIG. 1580 (SEQ ID NO:1580), FIG. 1582 (SEQ ID NO:1582), FIG. 1585 (SEQ ID NO:1585), FIG. 1587 (SEQ ID NO:1587), FIG. 1590 (SEQ ID NO:1590), FIG. 1592 (SEQ ID NO:1592), FIG. 1594 (SEQ ID NO:1594), FIG. 1597 (SEQ ID NO:1597), FIG. 1599 (SEQ ID NO:1599), FIG. 1601 (SEQ ID NO:1601), FIG. 1603 (SEQ ID NO:1603), FIG. 1605 (SEQ ID NO:1605), FIG. 1607 (SEQ ID NO:1607), FIG. 1610 (SEQ ID NO:1610), FIG. 1613 (SEQ ID NO:1613), FIG. 1615 (SEQ ID NO:1615), FIG. 1617 (SEQ ID NO:1617), FIG. 1619 (SEQ ID NO:1619), FIG. 1621 (SEQ ID NO:1621), FIG. 1623 (SEQ ID NO:1623), FIG. 1625 (SEQ ID NO:1625), FIG. 1627 (SEQ ID NO:1627), FIG. 1629 (SEQ ID NO:1629), FIG. 1631 (SEQ ID NO:1631), FIG. 1633 (SEQ ID NO:1633), FIG. 1635 (SEQ ID NO:1635), FIG. 1637 (SEQ ID NO:1637), FIG. 1639 (SEQ ID NO:1639), FIG. 1641 (SEQ ID NO:1641), FIG. 1643 (SEQ ID NO:1643), FIG. 1645 (SEQ ID NO:1645), FIG. 1647 (SEQ ID NO:1647), FIG. 1650 (SEQ ID NO:1650), FIG. 1654 (SEQ ID NO:1654), FIG. 1656 (SEQ ID NO:1656), FIG. 1658 (SEQ ID NO:1658), FIG. 1660 (SEQ ID NO:1660), FIG. 1662 (SEQ ID NO:1662), FIG. 1664 (SEQ ID NO:1664), FIG. 1666 (SEQ ID NO:1666), FIG. 1668 (SEQ ID NO:1668), FIG. 1670 (SEQ ID NO:1670), FIG. 1672 (SEQ ID NO:1672), FIG. 1674 (SEQ ID NO:1674), FIG. 1676 (SEQ ID NO:1676), FIG. 1678 (SEQ ID NO:1678), FIG. 1680 (SEQ ID NO:1680), FIG. 1682 (SEQ ID NO:1682), FIG. 1686 (SEQ ID NO:1686), FIG. 1688 (SEQ ID NO:1688), FIG. 1691 (SEQ ID NO:1691), FIG. 1693 (SEQ ID NO:1693), FIG. 1695 (SEQ ID NO:1695), FIG. 1697 (SEQ ID NO:1697), FIG. 1699 (SEQ ID NO:1699), FIG. 1701 (SEQ ID NO:1701), FIG. 1703 (SEQ ID NO:1703), FIG. 1705 (SEQ ID NO:1705), FIG. 1708 (SEQ ID NO:1708), FIG. 1710 (SEQ ID NO:1710), FIG. 1712 (SEQ ID NO:1712), FIG. 1714 (SEQ ID NO:1714), FIG. 1716 (SEQ ID NO:1716), FIG. 1718 (SEQ ID NO:1718), FIG. 1720 (SEQ ID NO:1720), FIG. 1722 (SEQ ID NO:1722), FIG. 1725 (SEQ ID NO:1725), FIG. 1727 (SEQ ID NO:1727), FIG. 1729 (SEQ ID NO:1729), FIG. 1731 (SEQ ID NO:1731), FIG. 1733 (SEQ ID NO:1733), FIG. 1735 (SEQ ID NO:1735), FIG. 1738 (SEQ ID NO:1738), FIG. 1740 (SEQ ID NO:1740), FIG. 1742 (SEQ ID NO:1742), FIG. 1744 (SEQ ID NO:1744), FIG. 1746 (SEQ ID NO:1746), FIG. 1748 (SEQ ID NO:1748), FIG. 1750 (SEQ ID NO:1750), FIG. 1752 (SEQ ID NO:1752), FIG. 1754 (SEQ ID NO:1754), FIG. 1756 (SEQ ID NO:1756), FIG. 1758 (SEQ ID NO:1758), FIG. 1760 (SEQ ID NO:1760), FIG. 1762 (SEQ ID NO:1762), FIG. 1764 (SEQ ID NO:1764), FIG. 1767 (SEQ ID NO:1767), FIG. 1769 (SEQ ID NO:1769), FIG. 1771 (SEQ ID NO:1771), FIG. 1774 (SEQ ID NO:1774), FIG. 1776 (SEQ ID NO:1776), FIG. 1779 (SEQ ID NO:1779), FIG. 1782 (SEQ ID NO:1782), FIG. 1784 (SEQ ID NO:1784), FIG. 1786 (SEQ ID NO:1786), FIG. 1789 (SEQ ID NO:1789), FIG. 1791 (SEQ ID NO:1791), FIG. 1794 (SEQ ID NO:1794), FIG. 1796 (SEQ ID NO:1796), FIG. 1798 (SEQ ID NO:1798), FIG. 1800 (SEQ ID NO:1800), FIG. 1802 (SEQ ID NO:1802), FIG. 1804 (SEQ ID NO:1804), FIG. 1806 (SEQ ID NO:1806), FIG. 1808 (SEQ ID NO:1808), FIG. 1810 (SEQ ID NO:1810), FIG. 1812 (SEQ ID NO:1812), FIG. 1814 (SEQ ID NO:1814), FIG. 1816 (SEQ ID NO:1816), FIG. 1818 (SEQ ID NO:1818), FIG. 1820 (SEQ ID NO:1820), FIG. 1822 (SEQ ID NO:1822), FIG. 1824 (SEQ ID NO:1824), FIG. 1826 (SEQ ID NO:1826), FIG. 1828 (SEQ ID NO:1828), FIG. 1830 (SEQ ID NO:1830), FIG. 1832 (SEQ ID NO:1832), FIG. 1834 (SEQ ID NO:1834), FIG. 1836 (SEQ ID NO:1836), FIG. 1838 (SEQ ID NO:1838), FIG. 1840 (SEQ ID NO:1840), FIG. 1842 (SEQ ID NO:1842), FIG. 1844 (SEQ ID NO:1844), FIG. 1846 (SEQ ID NO:1846), FIG. 1848 (SEQ ID NO:1848), FIG. 1850 (SEQ ID NO:1850), FIG. 1852 (SEQ ID NO:1852), FIG. 1856 (SEQ ID NO:1856), FIG. 1858 (SEQ ID NO:1858), FIG. 1860 (SEQ ID NO:1860), FIG. 1862 (SEQ ID NO:1862), FIG. 1864 (SEQ ID NO:1864), FIG. 1867 (SEQ ID NO:1867), FIG. 1869 (SEQ ID NO:1869), FIG. 1871 (SEQ ID NO:1871), FIG. 1873 (SEQ ID NO:1873), FIG. 1876 (SEQ ID NO:1876), FIG. 1878 (SEQ ID NO:1878), FIG. 1880 (SEQ ID NO:1880), FIG. 1883 (SEQ ID NO:1883), FIG. 1885 (SEQ ID NO:1885), FIG. 1887 (SEQ ID NO:1887), FIG. 1890 (SEQ ID NO:1890), FIG. 1892 (SEQ ID NO:1892), FIG. 1894 (SEQ ID NO:1894), FIG. 1896 (SEQ ID NO:1896), FIG. 1898 (SEQ ID NO:1898), FIG. 1900 (SEQ ID NO:1900), FIG. 1902 (SEQ ID NO:1902), FIG. 1904 (SEQ ID NO:1904), FIG. 1906 (SEQ ID NO:1906), FIG. 1908 (SEQ ID NO:1908), FIG. 1910 (SEQ ID NO:1910), FIG. 1912 (SEQ ID NO:1912), FIG. 1914 (SEQ ID NO:1914), FIG. 1916 (SEQ ID NO:1916), FIG. 1918 (SEQ ID NO:1918), FIG. 1920 (SEQ ID NO:1920), FIG. 1922 (SEQ ID NO:1922), FIG. 1924 (SEQ ID NO:1924), FIG. 1926 (SEQ ID NO:1926), FIG. 1928 (SEQ ID NO:1928), FIG. 1930 (SEQ ID NO:1930), FIG. 1932 (SEQ ID NO:1932), FIG. 1934 (SEQ ID NO:1934), FIG. 1936 (SEQ ID NO:1936), FIG. 1938 (SEQ ID NO:1938), FIG. 1940 (SEQ ID NO:1940), FIG. 1942 (SEQ ID NO:1942), FIG. 1944 (SEQ ID NO:1944), FIG. 1946 (SEQ ID NO:1946), FIG. 1948 (SEQ ID NO:1948), FIG. 1951 (SEQ ID NO:1951), FIG. 1953 (SEQ ID NO:1953), FIG. 1955 (SEQ ID NO:1955), FIG. 1957 (SEQ ID NO:1957), FIG. 1959 (SEQ ID NO:1959), FIG. 1961 (SEQ ID NO:1961), FIG. 1964 (SEQ ID NO:1964), FIG. 1966 (SEQ ID NO:1966), FIG. 1968 (SEQ ID NO:1968), FIG. 1970 (SEQ ID NO:1970), FIG. 1972 (SEQ ID NO:1972), FIG. 1974 (SEQ ID NO:1974), FIG. 1976 (SEQ ID NO:1976), FIG. 1978 (SEQ ID NO:1978), FIG. 1980 (SEQ ID NO:1980), FIG. 1982 (SEQ ID NO:1982), FIG. 1984 (SEQ ID NO:1984), FIG. 1986 (SEQ ID NO:1986), FIG. 1988 (SEQ ID NO:1988), FIG. 1990 (SEQ ID NO:1990), FIG. 1992 (SEQ ID NO:1992), FIG. 1994 (SEQ ID NO:1994), FIG. 1996 (SEQ ID NO:1996), FIG. 1998 (SEQ ID NO:1998), FIG. 2000 (SEQ ID NO:2000), FIG. 2002 (SEQ ID NO:2002), FIG. 2004 (SEQ ID NO:2004), FIG. 2006 (SEQ ID NO:2006), FIG. 2008 (SEQ ID NO:2008), FIG. 2010 (SEQ ID NO:2010), FIG. 2012 (SEQ ID NO:2012), FIG. 2014 (SEQ ID NO:2014), FIG. 2016 (SEQ ID NO:2016), FIG. 2018 (SEQ ID NO:2018), FIG. 2020 (SEQ ID NO:2020), FIG. 2022 (SEQ ID NO:2022), FIG. 2024 (SEQ ID NO:2024), FIG. 2026 (SEQ ID NO:2026), FIG. 2028 (SEQ ID NO:2028), FIG. 2030 (SEQ ID NO:2030), FIG. 2032 (SEQ ID NO:2032), FIG. 2034 (SEQ ID NO:2034), FIG. 2036 (SEQ ID NO:2036), FIG. 2038 (SEQ ID NO:2038), FIG. 2040 (SEQ ID NO:2040), FIG. 2042 (SEQ ID NO:2042), FIG. 2044 (SEQ ID NO:2044), FIG. 2046 (SEQ ID NO:2046), FIG. 2048 (SEQ ID NO:2048), FIG. 2050 (SEQ ID NO:2050), FIG. 2052 (SEQ ID NO:5052), FIG. 2054 (SEQ ID NO:2054), FIG. 2056 (SEQ ID NO:2056), FIG. 2058 (SEQ ID NO:2058), FIG. 2060 (SEQ ID NO:2060), FIG. 2062 (SEQ ID NO:2062), FIG. 2064 (SEQ ID NO:2064), FIG. 2066 (SEQ ID NO:2066), FIG. 2068 (SEQ ID NO:2068), FIG. 2070 (SEQ ID NO:2070), FIG. 2072 (SEQ ID NO:2072), FIG. 2074 (SEQ ID NO:2074), FIG. 2076 (SEQ ID NO:2076), FIG. 2078 (SEQ ID NO:2078), FIG. 2080 (SEQ ID NO:2080), FIG. 2082 (SEQ ID NO:2082), FIG. 2084 (SEQ ID NO:2084), FIG. 2086 (SEQ ID NO:2086), FIG. 2088 (SEQ ID NO:2088), FIG. 2090 (SEQ ID NO:2090), FIG. 2092 (SEQ ID NO:2092), FIG. 2094 (SEQ ID NO:2094), FIG. 2096 (SEQ ID NO:2096), FIG. 2098 (SEQ ID NO:2098), FIG. 2100 (SEQ ID NO:2100), FIG. 2102 (SEQ ID NO:2102), FIG. 2104 (SEQ ID NO:2104), FIG. 2106 (SEQ ID NO:2106), FIG. 2108 (SEQ ID NO:2108), FIG. 2110 (SEQ ID NO:2110), FIG. 2112 (SEQ ID NO:2112), FIG. 2114 (SEQ ID NO:2114), FIG. 2116 (SEQ ID NO:2116), FIG. 2118 (SEQ ID NO:2118), FIG. 2120 (SEQ ID NO:2120), FIG. 2122 (SEQ ID NO:2122), FIG. 2124 (SEQ ID NO:2124), FIG. 2126 (SEQ ID NO:2126), FIG. 2128 (SEQ ID NO:2128), FIG. 2130 (SEQ ID NO:2130), FIG. 2132 (SEQ ID NO:2132), FIG. 2134 (SEQ ID NO:2134), FIG. 2136 (SEQ ID NO:2136), FIG. 2139 (SEQ ID NO:2139), FIG. 2141 (SEQ ID NO:2141), FIG. 2143 (SEQ ID NO:2143), FIG. 2145 (SEQ ID NO:2145), FIG. 2149 (SEQ ID NO:2149), FIG. 2151 (SEQ ID NO:2151), FIG. 2153 (SEQ ID NO:2153), FIG. 2155 (SEQ ID NO:2155), FIG. 2157 (SEQ ID NO:2157), FIG. 2159 (SEQ ID NO:2159), FIG. 2161 (SEQ ID NO:2161), FIG. 2163 (SEQ ID NO:2163), FIG. 2165 (SEQ ID NO:2165), FIG. 2167 (SEQ ID NO:2167), FIG. 2169 (SEQ ID NO:2169), FIG. 2171 (SEQ ID NO:2171), FIG. 2173 (SEQ ID NO:2173), FIG. 2175 (SEQ ID NO:2175), FIG. 2177 (SEQ ID NO:2177), FIG. 2179 (SEQ ID NO:2179), FIG. 2181 (SEQ ID NO:2181), FIG. 2183 (SEQ ID NO:2183), FIG. 2185 (SEQ ID NO:2185), FIG. 2187 (SEQ ID NO:2187), FIG. 2189 (SEQ ID NO:2189), FIG. 2191 (SEQ ID NO:2191), FIG. 2193 (SEQ ID NO:2193), FIG. 2195 (SEQ ID NO:2195), FIG. 2197 (SEQ ID NO:2197), FIG. 2199 (SEQ ID NO:2199), FIG. 2201 (SEQ ID NO:2201), FIG. 2203 (SEQ ID NO:2203), FIG. 2205 (SEQ ID NO:2205), FIG. 2207 (SEQ ID NO:2207), FIG. 2209 (SEQ ID NO:2209), FIG. 2211 (SEQ ID NO:2211), FIG. 2213 (SEQ ID NO:2213), FIG. 2215 (SEQ ID NO:2215), FIG. 2218 (SEQ ID NO:2218), FIG. 2220 (SEQ ID NO:2220), FIG. 2222 (SEQ ID NO:2222), FIG. 2224 (SEQ ID NO:2224), FIG. 2226 (SEQ ID NO:2226), FIG. 2228 (SEQ ID NO:2228), FIG. 2231 (SEQ ID NO:2231), FIG. 2233 (SEQ ID NO:2233), FIG. 2235 (SEQ ID NO:2235), FIG. 2237 (SEQ ID NO:2237), FIG. 2239 (SEQ ID NO:2239), FIG. 2241 (SEQ ID NO:2241), FIG. 2243 (SEQ ID NO:2243), FIG. 2245 (SEQ ID NO:2245), FIG. 2247 (SEQ ID NO:2247), FIG. 2249 (SEQ ID NO:2249), FIG. 2251 (SEQ ID NO:2251), FIG. 2253 (SEQ ID NO:2253), FIG. 2255 (SEQ ID NO:2255), FIG. 2257 (SEQ ID NO:2257), FIG. 2259 (SEQ ID NO:2259), FIG. 2261 (SEQ ID NO:2261), FIG. 2263 (SEQ ID NO:2263), FIG. 2265 (SEQ ID NO:2265), FIG. 2267 (SEQ ID NO:2267), FIG. 2269 (SEQ ID NO:2269), FIG. 2271 (SEQ ID NO:2271), FIG. 2273 (SEQ ID NO:2273), FIG. 2275 (SEQ ID NO:2275), FIG. 2277 (SEQ ID NO:2277), FIG. 2279 (SEQ ID NO:2279), FIG. 2281 (SEQ ID NO:2281), FIG. 2283 (SEQ ID NO:2283), FIG. 2285 (SEQ ID NO:2285), FIG. 2287 (SEQ ID NO:2287), FIG. 2289 (SEQ ID NO:2289), FIG. 2291 (SEQ ID NO:2291), FIG. 2293 (SEQ ID NO:2293), FIG. 2295 (SEQ ID NO:2295), FIG. 2297 (SEQ ID NO:2297), FIG. 2299 (SEQ ID NO:2299), FIG. 2302 (SEQ ID NO:2302), FIG. 2304 (SEQ ID NO:2304), FIG. 2306 (SEQ ID NO:2306), FIG. 2310 (SEQ ID NO:2310), FIG. 2313 (SEQ ID NO:2313), FIG. 2315 (SEQ ID NO:2315), FIG. 2317 (SEQ ID NO:2317), FIG. 2319 (SEQ ID NO:2319), FIG. 2321 (SEQ ID NO:2321), FIG. 2324 (SEQ ID NO:2324), FIG. 2326 (SEQ ID NO:2326), FIG. 2328 (SEQ ID NO:2328), FIG. 2330 (SEQ ID NO:2330), FIG. 2332 (SEQ ID NO:2332), FIG. 2334 (SEQ ID NO:2334), FIG. 2336 (SEQ ID NO:2336), FIG. 2338 (SEQ ID NO:2338), FIG. 2340 (SEQ ID NO:2340), FIG. 2342 (SEQ ID NO:2342), FIG. 2344 (SEQ ID NO:2344), FIG. 2347 (SEQ ID NO:2347), FIG. 2350 (SEQ ID NO:2350), FIG. 2352 (SEQ ID NO:2352), FIG. 2354 (SEQ ID NO:2354), FIG. 2356 (SEQ ID NO:2356), FIG. 2358 (SEQ ID NO:2358), FIG. 2360 (SEQ ID NO:2360), FIG. 2362 (SEQ ID NO:2362), FIG. 2364 (SEQ ID NO:2364), FIG. 2366 (SEQ ID NO:2366), FIG. 2368 (SEQ ID NO:2368), FIG. 2370 (SEQ ID NO:2370), FIG. 2372 (SEQ ID NO:2372), FIG. 2374 (SEQ ID NO:2374), FIG. 2376 (SEQ ID NO:2376), FIG. 2378 (SEQ ID NO:2378), FIG. 2380 (SEQ ID NO:2380), FIG. 2382 (SEQ ID NO:2382), FIG. 2384 (SEQ ID NO:2384), FIG. 2386 (SEQ ID NO:2386), FIG. 2388 (SEQ ID NO:2388), FIG. 2390 (SEQ ID NO:2390), FIG. 2392 (SEQ ID NO:2392), FIG. 2394 (SEQ ID NO:2394), FIG. 2396 (SEQ ID NO:2396), FIG. 2398 (SEQ ID NO:2398), FIG. 2400 (SEQ ID NO:2400), FIG. 2402 (SEQ ID NO:2402), FIG. 2404 (SEQ ID NO:2404), FIG. 2407 (SEQ ID NO:2407), FIG. 2409 (SEQ ID NO:2409), FIG. 2412 (SEQ ID NO:2412), FIG. 2415 (SEQ ID NO:2415), FIG. 2419 (SEQ ID NO:2419), FIG. 2423 (SEQ ID NO:2423), FIG. 2425 (SEQ ID NO:2425), FIG. 2427 (SEQ ID NO:2427), FIG. 2429 (SEQ ID NO:2429), FIG. 2431 (SEQ ID NO:2431), FIG. 2433 (SEQ ID NO:2433), FIG. 2435 (SEQ ID NO:2435), FIG. 2437 (SEQ ID NO:2437), FIG. 2439 (SEQ ID NO:2439), FIG. 2441 (SEQ ID NO:2441), FIG. 2443 (SEQ ID NO:2443), FIG. 2445 (SEQ ID NO:2445), FIG. 2448 (SEQ ID NO:2448), FIG. 2450 (SEQ ID NO:2450), FIG. 2452 (SEQ ID NO:2452), FIG. 2454 (SEQ ID NO:2454), FIG. 2457 (SEQ ID NO:2457), FIG. 2459 (SEQ ID NO:2459), FIG. 2461 (SEQ ID NO:2461), FIG. 2465 (SEQ ID NO:2465), FIG. 2468 (SEQ ID NO:2468), FIG. 2472 (SEQ ID NO:2472), FIG. 2474 (SEQ ID NO:2474), FIG. 2482 (SEQ ID NO:2482) or FIG. 2484 (SEQ ID NO:2484).

10. A chimeric molecule comprising a polypeptide according to claim 9 fused to a heterologous amino acid sequence.

11. The chimeric molecule of claim 9, wherein said heterologous amino acid sequence is an epitope tag sequence or an Fc region of an immunoglobulin.

12. An antibody which specifically binds to a polypeptide according to claim 9.

13. The antibody of claim 12, wherein said antibody is a monoclonal antibody, a humanized antibody or a single-chain antibody.

14. A composition of matter comprising (a) a polypeptide of claim 9, (b) an agonist of said polypeptide, (c) an antagonist of said polypeptide, or (d) an antibody that binds to said polypeptide, in combination with a carrier.

15. The composition of matter of claim 14, wherein said carrier is a pharmaceutically acceptable carrier.

16. The composition of matter of claim 15 comprising a therapeutically effective amount of (a), (b), (c) or (d).

17. An article of manufacture, comprising:
a container;
a label on said container; and
a composition of matter comprising (a) a polypeptide of claim 9, (b) an agonist of said polypeptide, (c) an antagonist of said polypeptide, or (d) an antibody that binds to said polypeptide, contained within said container, wherein label on said container indicates that said composition of matter can be used for treating psoriasis.

18. A method of alleviating psoriasis in a mammal in need thereof comprising administering to said mammal a therapeutically effective amount of (a) a polypeptide of claim 9, (b) an antagonist of said polypeptide, or (c) an antibody that binds to said polypeptide.

19. A method for determining the presence of a PRO polypeptide of the invention as described in FIG. 2 (SEQ ID NO:2), FIG. 4 (SEQ ID NO:4), FIG. 6 (SEQ ID NO:6), FIG. 8 (SEQ ID NO:8), FIG. 10 (SEQ ID NO:10), FIG. 12 (SEQ ID NO:12), FIG. 14 (SEQ ID NO:14), FIG. 16 (SEQ ID NO:16), FIG. 18 (SEQ ID NO:18), FIG. 20 (SEQ ID NO:20), FIG. 22 (SEQ ID NO:22), FIG. 24 (SEQ ID NO:24), FIG. 26 (SEQ ID NO:26), FIG. 28 (SEQ ID NO:28), FIG. 30 (SEQ ID NO:30), FIG. 32 (SEQ ID NO:32), FIG. 34 (SEQ ID NO:34), FIG. 36 (SEQ ID NO:36), FIG. 38 (SEQ ID NO:38), FIG. 40 (SEQ ID NO:40), FIG. 42 (SEQ ID NO:42), FIG. 43 (SEQ ID NO:43), FIG. 46 (SEQ ID NO:46), FIG. 48 (SEQ ID NO:48), FIG. 50 (SEQ ID NO:50), FIG. 52 (SEQ ID NO:52), FIG. 54 (SEQ ID NO:54), FIG. 56 (SEQ ID NO:56), FIG. 58 (SEQ ID NO:58), FIG. 60 (SEQ ID NO:60), FIG. 62 (SEQ ID NO:62), FIG. 64 (SEQ ID NO:64), FIG. 66 (SEQ ID NO:66), FIG. 68 (SEQ ID NO:68), FIG. 70 (SEQ ID NO:70), FIG. 72 (SEQ ID NO:72), FIG. 74 (SEQ ID NO:74), FIG. 76 (SEQ ID NO:76), FIG. 78 (SEQ ID NO:78), FIG. 80 (SEQ ID NO:80), FIG. 80 (SEQ ID NO:80), FIG. 84 (SEQ ID NO:84), FIG. 86 (SEQ ID NO:86), FIG. 88 (SEQ ID NO:88), FIG. 90 (SEQ ID NO:90), FIG. 92 (SEQ ID NO:92), FIG. 94 (SEQ ID NO:94), FIG. 96 (SEQ ID NO:96), FIG. 98 (SEQ ID NO:98), FIG. 100 (SEQ ID NO:100), FIG. 102 (SEQ ID NO:102), FIG. 104 (SEQ ID NO:104), FIG. 106 (SEQ ID NO:106), FIG. 108 (SEQ ID NO:108), FIG. 108 (SEQ ID NO:108), FIG. 112 (SEQ ID NO:112), FIG. 115 (SEQ ID NO:115), FIG. 117 (SEQ ID NO:117), FIG. 119 (SEQ ID NO:119), FIG. 121 (SEQ ID NO:121), FIG. 123 (SEQ ID NO:123), FIG. 125 (SEQ ID NO:125), FIG. 127 (SEQ ID NO:127), FIG. 129 (SEQ ID NO:129), FIG. 131 (SEQ ID NO:131), FIG. 133 (SEQ ID NO:133), FIG. 135 (SEQ ID NO:135), FIG. 137 (SEQ ID NO:137), FIG. 139 (SEQ ID NO:139), FIG. 141 (SEQ ID NO:141), FIG. 143 (SEQ ID NO:143), FIG. 145 (SEQ ID NO:145), FIG. 147 (SEQ ID NO:147), FIG. 149 (SEQ ID NO:149), FIG. 151 (SEQ ID NO:151), FIG. 153 (SEQ ID NO:153), FIG. 155 (SEQ ID NO:155), FIG. 157 (SEQ ID NO:157), FIG. 159 (SEQ ID NO:159), FIG. 161 (SEQ ID NO:161), FIG. 163 (SEQ ID NO:163), FIG. 165 (SEQ ID NO:165), FIG. 167 (SEQ ID NO:167), FIG. 169 (SEQ ID NO:169), FIG. 171 (SEQ ID NO:171), FIG. 173 (SEQ ID NO:173), FIG. 175 (SEQ ID NO:175), FIG. 177 (SEQ ID NO:177), FIG. 179 (SEQ ID NO:179), FIG. 181 (SEQ ID NO:181), FIG. 183 (SEQ ID NO:183), FIG. 185 (SEQ ID NO:185), FIG. 187 (SEQ ID NO:187), FIG. 189 (SEQ ID NO:189), FIG. 191 (SEQ ID NO:191), FIG. 194 (SEQ ID NO:194), FIG. 196 (SEQ ID NO:196), FIG. 198 (SEQ ID NO:198), FIG. 200 (SEQ ID NO:200), FIG. 202 (SEQ ID NO:202), FIG. 204 (SEQ ID NO:204), FIG. 206 (SEQ ID NO:206), FIG. 208 (SEQ ID NO:208), FIG. 210 (SEQ ID NO:210), FIG. 212 (SEQ ID NO:212), FIG. 214 (SEQ ID NO:214), FIG. 216 (SEQ ID NO:216), FIG. 218 (SEQ ID NO:218), FIG. 221 (SEQ ID NO:221), FIG. 223 (SEQ ID NO:223), FIG. 225 (SEQ ID NO:225), FIG. 227 (SEQ ID NO:227), FIG. 229 (SEQ ID NO:229), FIG. 231 (SEQ ID NO:231), FIG. 233 (SEQ ID NO:233), FIG. 235 (SEQ ID NO:235), FIG. 237 (SEQ ID NO:237), FIG. 239 (SEQ ID NO:239), FIG. 241 (SEQ ID NO:241), FIG. 243 (SEQ ID NO:243), FIG. 245 (SEQ ID NO:245), FIG. 247 (SEQ ID NO:247), FIG. 249 (SEQ ID NO:249), FIG. 251 (SEQ ID NO:251), FIG. 253 (SEQ ID NO:253), FIG. 255 (SEQ ID NO:255), FIG. 257 (SEQ ID NO:257), FIG. 259 (SEQ ID NO:259), FIG. 261 (SEQ ID NO:261), FIG. 263 (SEQ ID NO:263), FIG. 265 (SEQ ID NO:265), FIG. 267 (SEQ ID NO:267), FIG. 269 (SEQ ID NO:269), FIG. 272 (SEQ ID NO:272), FIG. 274 (SEQ ID NO:274), FIG. 276 (SEQ ID NO:276), FIG. 278 (SEQ ID NO:278), FIG. 280 (SEQ ID NO:280), FIG. 282 (SEQ ID NO:282), FIG. 284 (SEQ ID NO:284), FIG. 286 (SEQ ID NO:286), FIG. 288 (SEQ ID NO:288), FIG. 290 (SEQ ID NO:290), FIG. 292 (SEQ ID NO:292), FIG. 294 (SEQ ID NO:294), FIG. 296 (SEQ ID NO:296), FIG. 298 (SEQ ID NO:298), FIG. 300 (SEQ ID NO:300), FIG. 302 (SEQ ID NO:302), FIG. 304 (SEQ ID NO:304), FIG. 306 (SEQ ID NO:306), FIG. 308 (SEQ ID NO:308), FIG. 310 (SEQ ID NO:310), FIG. 312 (SEQ ID NO:312), FIG. 314 (SEQ ID NO:314), FIG. 316 (SEQ ID NO:316), FIG. 318 (SEQ ID NO:318), FIG. 320 (SEQ ID NO:320), FIG. 322 (SEQ ID NO:322), FIG. 324 (SEQ ID NO:324), FIG. 326 (SEQ ID NO:326), FIG. 328 (SEQ ID NO:328), FIG. 330 (SEQ ID NO:330), FIG. 332 (SEQ ID NO:332), FIG. 334 (SEQ ID NO:334), FIG. 336 (SEQ ID NO:336), FIG. 338 (SEQ ID NO:338), FIG. 340 (SEQ ID NO:340), FIG. 342 (SEQ ID NO:342), FIG. 344 (SEQ ID NO:344), FIG. 346 (SEQ ID NO:346), FIG. 348 (SEQ ID NO:348), FIG. 350 (SEQ ID NO:350), FIG. 352 (SEQ ID NO:352), FIG. 354 (SEQ ID NO:354), FIG. 356 (SEQ ID NO:356), FIG. 358 (SEQ ID NO:358), FIG. 360 (SEQ ID NO:360), FIG. 362 (SEQ ID NO:362), FIG. 364 (SEQ ID NO:364), FIG. 366 (SEQ ID NO:366), FIG. 368 (SEQ ID NO:368), FIG. 370 (SEQ ID NO:370), FIG. 372 (SEQ ID NO:372), FIG. 374 (SEQ ID NO:374), FIG. 376 (SEQ ID NO:376), FIG. 378 (SEQ ID NO:378), FIG. 380 (SEQ ID NO:380), FIG. 382 (SEQ ID NO:382), FIG. 384 (SEQ ID NO:384), FIG. 386 (SEQ ID NO:386), FIG. 388 (SEQ ID NO:388), FIG. 390 (SEQ ID NO:390), FIG. 392 (SEQ ID NO:392), FIG. 394 (SEQ ID NO:394), FIG. 396 (SEQ ID NO:396), FIG. 398 (SEQ ID NO:398), FIG. 400 (SEQ ID NO:400), FIG. 402 (SEQ ID NO:402), FIG. 404 (SEQ ID NO:404), FIG. 406 (SEQ ID NO:406), FIG. 408 (SEQ ID NO:408), FIG. 410 (SEQ ID NO:410), FIG. 412 (SEQ ID NO:412), FIG. 414 (SEQ ID NO:414), FIG. 416 (SEQ ID NO:416), FIG. 418 (SEQ ID NO:418), FIG. 420 (SEQ ID NO:420), FIG. 422 (SEQ ID NO:422), FIG. 424 (SEQ ID NO:424), FIG. 426 (SEQ ID NO:426), FIG. 428 (SEQ ID NO:428), FIG. 430 (SEQ ID NO:430), FIG. 432 (SEQ ID NO:432), FIG. 434 (SEQ ID NO:434), FIG. 436 (SEQ ID NO:436), FIG. 438 (SEQ ID NO:438), FIG. 440 (SEQ ID NO:440), FIG. 442 (SEQ ID NO:442), FIG. 444 (SEQ ID NO:444), FIG. 446 (SEQ ID NO:446), FIG. 448 (SEQ ID NO:448), FIG. 450 (SEQ ID NO:450), FIG. 452 (SEQ ID NO:452), FIG. 454 (SEQ ID NO:454), FIG. 456 (SEQ ID NO:456), FIG. 458 (SEQ ID NO:458), FIG. 460 (SEQ ID NO:460), FIG. 462 (SEQ ID NO:462), FIG. 464 (SEQ ID NO:464), FIG. 466 (SEQ ID NO:466), FIG. 467 (SEQ ID NO:467), FIG. 470 (SEQ ID NO:470), FIG. 472 (SEQ ID NO:472), FIG. 474 (SEQ ID NO:474), FIG. 476 (SEQ ID NO:476), FIG. 478 (SEQ ID NO:478), FIG. 480 (SEQ ID NO:480), FIG. 482 (SEQ ID NO:482), FIG. 484 (SEQ ID NO:484), FIG. 486 (SEQ ID NO:486), FIG. 488 (SEQ ID NO:488), FIG. 490 (SEQ ID NO:490), FIG. 492 (SEQ ID NO:492), FIG. 494 (SEQ ID NO:494), FIG. 496 (SEQ ID NO:496), FIG. 498 (SEQ ID NO:498), FIG. 500 (SEQ ID NO:500), FIG. 502 (SEQ ID NO:502), FIG. 504 (SEQ ID NO:504), FIG. 506 (SEQ ID NO:506), FIG. 508 (SEQ ID NO:508), FIG. 510 (SEQ ID NO:510), FIG. 512 (SEQ ID NO:512), FIG. 514 (SEQ ID NO:514), FIG. 516 (SEQ ID NO:516), FIG. 518 (SEQ ID NO:518), FIG. 520 (SEQ ID NO:520), FIG. 522 (SEQ ID NO:522), FIG. 524 (SEQ ID NO:524), FIG. 526 (SEQ ID NO:526), FIG. 528 (SEQ ID NO:528), FIG. 530 (SEQ ID NO:530), FIG. 532 (SEQ. ID NO:532), FIG. 534 (SEQ ID NO:534), FIG. 536 (SEQ ID NO:536), FIG. 538 (SEQ ID NO:538), FIG. 540 (SEQ ID NO:540), FIG. 542 (SEQ ID NO:542), FIG. 544 (SEQ ID NO:544), FIG. 546 (SEQ ID NO:546), FIG. 548 (SEQ ID NO:548), FIG. 550 (SEQ ID NO:550), FIG. 552 (SEQ ID NO:552), FIG. 554 (SEQ ID NO:554), FIG. 556 (SEQ ID NO:556), FIG. 558 (SEQ ID NO:558), FIG. 560 (SEQ ID NO:560), FIG. 562 (SEQ ID NO:562), FIG. 564 (SEQ ID NO:564), FIG. 566 (SEQ ID NO:566), FIG. 568 (SEQ ID NO:568), FIG. 570 (SEQ ID NO:570), FIG. 572 (SEQ ID NO:572), FIG. 574 (SEQ ID NO:574), FIG. 576 (SEQ ID NO:576), FIG. 578 (SEQ ID NO:578), FIG. 580 (SEQ ID NO:580), FIG. 582 (SEQ ID NO:582), FIG. 584 (SEQ ID NO:584), FIG. 586 (SEQ ID NO:586), FIG. 588 (SEQ ID NO:588), FIG. 590 (SEQ ID NO:590), FIG. 592 (SEQ ID NO:592), FIG. 594 (SEQ ID NO:594), FIG. 596 (SEQ ID NO:596), FIG. 598 (SEQ ID NO:598), FIG. 600 (SEQ ID NO:600), FIG. 602 (SEQ ID NO:602), FIG. 604 (SEQ ID NO:604), FIG. 606 (SEQ ID NO:606), FIG. 608 (SEQ ID NO:608), FIG. 610 (SEQ ID NO:610), FIG. 612 (SEQ ID NO:612), FIG. 614 (SEQ ID NO:614), FIG. 616 (SEQ ID NO:616), FIG. 618 (SEQ ID NO:618), FIG. 620 (SEQ ID NO:620), FIG. 622 (SEQ ID NO:622), FIG. 624 (SEQ ID NO:624), FIG. 626 (SEQ ID NO:626), FIG. 628 (SEQ ID NO:628), FIG. 630 (SEQ ID NO:630), FIG. 632 (SEQ ID NO:632), FIG. 634 (SEQ ID NO:634), FIG. 637 (SEQ ID NO:637), FIG. 639 (SEQ ID NO:639), FIG. 641 (SEQ ID NO:641), FIG. 643 (SEQ ID NO:643), FIG. 645 (SEQ ID NO:645), FIG. 647 (SEQ ID NO:647), FIG. 649 (SEQ ID NO:649), FIG. 651 (SEQ ID NO:651), FIG. 653 (SEQ ID NO:653), FIG. 655 (SEQ ID NO:655), FIG. 657 (SEQ ID NO:657), FIG. 659 (SEQ ID NO:659), FIG. 661 (SEQ ID NO:661), FIG. 663 (SEQ ID NO:663), FIG. 665 (SEQ ID NO:665), FIG. 667 (SEQ ID NO:667), FIG. 669 (SEQ ID NO:669), FIG. 671 (SEQ ID NO:671), FIG. 673 (SEQ ID NO:673), FIG. 675 (SEQ ID NO:675), FIG. 677 (SEQ ID NO:677), FIG. 679 (SEQ ID NO:679), FIG. 681 (SEQ ID NO:681), FIG. 683 (SEQ ID NO:683), FIG. 685 (SEQ ID NO:685), FIG. 687 (SEQ ID NO:687), FIG. 689 (SEQ ID NO:689), FIG. 691 (SEQ ID NO:691), FIG. 693 (SEQ ID NO:693), FIG. 695 (SEQ ID NO:695), FIG. 697 (SEQ ID NO:697), FIG. 699 (SEQ ID NO:699), FIG. 701 (SEQ ID NO:701), FIG. 703 (SEQ ID NO:703), FIG. 705 (SEQ ID NO:705), FIG. 707 (SEQ ID NO:707), FIG. 709 (SEQ ID NO:709), FIG. 711 (SEQ ID NO:711), FIG. 713 (SEQ ID NO:713), FIG. 715 (SEQ ID NO:715), FIG. 717 (SEQ ID NO:717), FIG. 719 (SEQ ID NO:719), FIG. 721 (SEQ ID NO:721), FIG. 723 (SEQ ID NO:723), FIG. 725 (SEQ ID NO:725), FIG. 727 (SEQ ID NO:727), FIG. 729 (SEQ ID NO:729), FIG. 731 (SEQ ID NO:731), FIG. 733 (SEQ ID NO:733), FIG. 735 (SEQ ID NO:735), FIG. 737 (SEQ ID NO:737), FIG. 739 (SEQ ID NO:739), FIG. 741 (SEQ ID NO:741), FIG. 743 (SEQ ID NO:743), FIG. 745 (SEQ ID NO:745), FIG. 747 (SEQ ID NO:747), FIG. 749 (SEQ ID NO:749), FIG. 751 (SEQ ID NO:751), FIG. 753 (SEQ ID NO:753), FIG. 755 (SEQ ID NO:755), FIG. 757 (SEQ ID NO:757), FIG. 759 (SEQ ID NO:759), FIG. 761 (SEQ ID NO:761), FIG. 763 (SEQ ID NO:763), FIG. 765 (SEQ ID NO:765), FIG. 767 (SEQ ID NO:767), FIG. 770 (SEQ ID NO:770), FIG. 772 (SEQ ID NO:772), FIG. 774 (SEQ ID NO:774), FIG. 776 (SEQ ID NO:776), FIG. 778 (SEQ. ID NO:778), FIG. 780 (SEQ ID NO:780), FIG. 782 (SEQ ID NO:782), FIG. 784 (SEQ ID NO:784), FIG. 786 (SEQ ID NO:786), FIG. 788 (SEQ ID NO:788), FIG. 790 (SEQ ID NO:790), FIG. 792 (SEQ ID NO:792), FIG. 794 (SEQ ID NO:794), FIG. 796 (SEQ ID NO:796), FIG. 798 (SEQ ID NO:798), FIG. 800 (SEQ ID NO:800), FIG. 802 (SEQ ID NO:802), FIG. 805 (SEQ ID NO:805), FIG. 807 (SEQ ID NO:807), FIG. 809 (SEQ ID NO:809), FIG. 811 (SEQ ID NO:811), FIG. 813 (SEQ ID NO:813), FIG. 815 (SEQ ID NO:815), FIG. 817 (SEQ ID NO:817), FIG. 819 (SEQ ID NO:819), FIG. 821 (SEQ ID NO:821), FIG. 823 (SEQ ID NO:823), FIG. 826 (SEQ ID NO:826), FIG. 828 (SEQ ID NO:828), FIG. 830 (SEQ ID NO:830), FIG. 832 (SEQ ID NO:832), FIG. 834 (SEQ ID NO:834), FIG. 836 (SEQ ID NO:836), FIG. 838 (SEQ ID NO:838), FIG. 840 (SEQ ID NO:840), FIG. 842 (SEQ ID NO:842), FIG. 844 (SEQ ID NO:844), FIG. 846 (SEQ ID NO:846), FIG. 848 (SEQ ID NO:848), FIG. 850 (SEQ ID NO:850), FIG. 852 (SEQ ID NO:852), FIG. 854 (SEQ ID NO:854), FIG. 856 (SEQ ID NO:856), FIG. 858 (SEQ ID NO:858), FIG. 860 (SEQ ID NO:860), FIG. 862 (SEQ ID NO:862), FIG. 864 (SEQ ID NO:864), FIG. 866 (SEQ ID NO:866), FIG. 868 (SEQ ID NO:868), FIG. 870 (SEQ ID NO:870), FIG. 872 (SEQ ID NO:872), FIG. 874 (SEQ ID NO:874), FIG. 876 (SEQ ID NO:876), FIG. 878 (SEQ ID NO:878), FIG. 880 (SEQ ID NO:880), FIG. 882 (SEQ ID NO:882), FIG. 884 (SEQ ID NO:884), FIG. 886 (SEQ ID NO:886), FIG. 888 (SEQ ID NO:888), FIG. 890 (SEQ ID NO:890), FIG. 892 (SEQ ID NO:892), FIG. 894 (SEQ ID NO:894), FIG. 896 (SEQ ID NO:896), FIG. 898 (SEQ ID NO:898), FIG. 900 (SEQ ID NO:900), FIG. 902 (SEQ ID NO:902), FIG. 904 (SEQ ID NO:904), FIG. 906 (SEQ ID NO:906), FIG. 908 (SEQ ID NO:908), FIG. 911 (SEQ ID NO:911), FIG. 913 (SEQ ID NO:913), FIG. 915 (SEQ ID NO:915), FIG. 917 (SEQ ID NO:917), FIG. 919 (SEQ ID NO:919), FIG. 921 (SEQ ID NO:921), FIG. 923 (SEQ ID NO:923), FIG. 925 (SEQ ID NO:925), FIG. 927 (SEQ ID NO:927), FIG. 929 (SEQ ID NO:929), FIG. 931 (SEQ ID NO:931), FIG. 933 (SEQ ID NO:933), FIG. 935 (SEQ ID NO:935), FIG. 937 (SEQ ID NO:937), FIG. 940 (SEQ ID NO:940), FIG. 943 (SEQ ID NO:943), FIG. 946 (SEQ ID NO:946), FIG. 948 (SEQ ID NO:948), FIG. 950 (SEQ ID NO:950), FIG. 952 (SEQ ID NO:952), FIG. 955 (SEQ ID NO:955), FIG. 957 (SEQ ID NO:957), FIG. 959 (SEQ ID NO:959), FIG. 961 (SEQ ID NO:961), FIG. 966 (SEQ ID NO:966), FIG. 968 (SEQ ID NO:968), FIG. 970 (SEQ ID NO:970), FIG. 972 (SEQ ID NO:972), FIG. 974 (SEQ ID NO:974), FIG. 976 (SEQ ID NO:976), FIG. 978 (SEQ ID NO:978), FIG. 980 (SEQ ID NO:980), FIG. 985 (SEQ ID NO:985), FIG. 988 (SEQ ID NO:988), FIG. 991 (SEQ ID NO:991), FIG. 993 (SEQ ID NO:993), FIG. 995 (SEQ ID NO:995), FIG. 997 (SEQ ID NO:997), FIG. 1000 (SEQ ID NO:1000), FIG. 1002 (SEQ ID NO:1002), FIG. 1005 (SEQ ID NO:1005), FIG. 1007 (SEQ ID NO:1007), FIG. 1009 (SEQ ID NO:1009), FIG. 101 (SEQ ID NO:1011), FIG. 1013 (SEQ ID NO:1013), FIG. 1015 (SEQ ID NO:1015), FIG. 1017 (SEQ ID NO:1017), FIG. 1019 (SEQ ID NO:1019), FIG. 1022 (SEQ ID NO:1022), FIG. 1024 (SEQ ID NO:1024), FIG. 1026 (SEQ ID NO:1026), FIG. 1028 (SEQ ID NO:1028), FIG. 1030 (SEQ ID NO:1030), FIG. 1032 (SEQ ID NO:1032), FIG. 1034 (SEQ ID NO:1034), FIG. 1036 (SEQ ID NO:1036), FIG. 1038 (SEQ ID NO:1083), FIG. 1040 (SEQ ID NO:1040), FIG. 1042 (SEQ ID NO:1042), FIG. 1044 (SEQ ID NO:1044), FIG. 1047 (SEQ ID NO:1047), FIG. 1049 (SEQ ID NO:1049), FIG. 1051 (SEQ ID NO:1051), FIG. 1053 (SEQ ID NO:1053), FIG. 1055 (SEQ ID NO1055), FIG. 1057 (SEQ ID NO:1057), FIG. 1060 (SEQ ID NO:1060), FIG. 1062 (SEQ ID NO:1062), FIG. 1064 (SEQ ID NO:1064), FIG. 1066 (SEQ ID NO:1066), FIG. 1068 (SEQ ID NO:1068), FIG. 1070 (SEQ ID NO:1070), FIG. 1072 (SEQ ID NO:1072), FIG. 1074 (SEQ ID NO:1074), FIG. 1076 (SEQ ID NO:1076), FIG. 1078 (SEQ ID NO:1078), FIG. 1080 (SEQ ID NO:1080), FIG. 1082 (SEQ ID NO:1082), FIG. 1084 (SEQ ID NO:1084), FIG. 1086 (SEQ ID NO:1086), FIG. 1089 (SEQ ID NO:1089), FIG. 1091 (SEQ ID NO:1091), FIG. 1093 (SEQ ID NO:1093), FIG. 1098 (SEQ ID NO:1098), FIG. 1100 (SEQ ID NO:100), FIG. 1103 (SEQ ID NO:1103), FIG. 1105 (SEQ ID NO:1105), FIG. 1107 (SEQ ID NO:1107), FIG. 1110 (SEQ ID NO:1110), FIG. 1112 (SEQ ID NO:1112), FIG. 1114 (SEQ ID NO:1114), FIG. 1116 (SEQ ID NO:1116), FIG. 1118 (SEQ ID NO:1118), FIG. 1120 (SEQ ID NO:1120), FIG. 1122 (SEQ ID NO:1122), FIG. 1124 (SEQ ID NO:1124), FIG. 1126 (SEQ ID NO:1126), FIG. 1128 (SEQ ID NO:1128), FIG. 1130 (SEQ ID NO:1130), FIG. 1132 (SEQ ID NO:1132), FIG. 1134 (SEQ ID NO:1134), FIG. 1136 (SEQ ID NO:1136), FIG. 1138 (SEQ ID NO:1138), FIG. 1140 (SEQ ID NO:1140), FIG. 1142 (SEQ ID NO:1142), FIG. 1144 (SEQ ID NO:1144), FIG. 1146 (SEQ ID NO:1146), FIG. 1148 (SEQ ID NO:1148), FIG. 1150 (SEQ ID NO:1150), FIG. 1153 (SEQ ID NO:1153), FIG. 1155 (SEQ ID NO:1155), FIG. 1157 (SEQ ID NO:1157), FIG. 1159 (SEQ ID NO:1159), FIG. 1161 (SEQ ID NO:1161), FIG. 1164 (SEQ ID NO:1164), FIG. 1166 (SEQ ID NO:1166), FIG. 1168 (SEQ ID NO:1168), FIG. 1170 (SEQ ID NO:1170), FIG. 1172 (SEQ ID NO:1172), FIG. 1174 (SEQ ID NO:1174), FIG. 1176 (SEQ ID NO:1176), FIG. 1178 (SEQ ID NO:1178), FIG. 1180 (SEQ ID NO:1180), FIG. 1182 (SEQ ID NO:1182), FIG. 1184 (SEQ ID NO:1184), FIG. 1186 (SEQ ID NO:1186), FIG. 1188 (SEQ ID NO:1188), FIG. 1190 (SEQ ID NO:1190), FIG. 1192 (SEQ ID NO:1192), FIG. 1194 (SEQ ID NO:1194), FIG. 1196 (SEQ ID NO:1196), FIG. 1198 (SEQ ID NO:1198), FIG. 1200 (SEQ ID NO:1200), FIG. 1202 (SEQ ID NO:1202), FIG. 1204 (SEQ ID NO:1204), FIG. 1206 (SEQ ID NO:1206), FIG. 1208 (SEQ ID NO:1208), FIG. 1210 (SEQ ID NO:1210), FIG. 1212 (SEQ ID NO:1212), FIG. 1214 (SEQ ID NO:1214), FIG. 1216 (SEQ ID NO:1216), FIG. 1218 (SEQ ID NO:1218), FIG. 1220 (SEQ ID NO:1220), FIG. 1222 (SEQ ID NO:1222), FIG. 1224 (SEQ ID NO:1224), FIG. 1226 (SEQ ID NO:1226), FIG. 1228 (SEQ ID NO:1228), FIG. 1230 (SEQ ID NO:1230), FIG. 1232 (SEQ ID NO:1232), FIG. 1234 (SEQ ID NO:1234), FIG. 1236 (SEQ ID NO:1236), FIG. 1238 (SEQ ID NO:1238), FIG. 1240 (SEQ ID NO:1240), FIG. 1242 (SEQ ID NO:1242), FIG. 1244 (SEQ ID NO:1244), FIG. 1246 (SEQ ID NO:1246), FIG. 1248 (SEQ ID NO:1248), FIG. 1250 (SEQ ID NO:1250), FIG. 1252 (SEQ ID NO:1252), FIG. 1254 (SEQ ID NO:1254), FIG. 1256 (SEQ ID NO:1256), FIG. 1258 (SEQ ID NO:1258), FIG. 1260 (SEQ ID NO:1260), FIG. 1262 (SEQ ID NO:1262), FIG. 1264 (SEQ ID NO:1264), FIG. 1266 (SEQ ID NO:1266), FIG. 1268 (SEQ ID NO:1268), FIG. 1270 (SEQ ID NO:1270), FIG. 1272 (SEQ ID NO:1272), FIG. 1274 (SEQ ID NO:1274), FIG. 1276 (SEQ ID NO:1276), FIG. 1278 (SEQ ID NO:1278), FIG. 1280 (SEQ ID NO:1280), FIG. 1282 (SEQ ID NO:1282), FIG. 1284 (SEQ ID NO:1284), FIG. 1286 (SEQ ID NO:1286), FIG. 1288 (SEQ ID NO:1288), FIG. 1290 (SEQ ID NO:1290), FIG. 1292 (SEQ ID NO:1292), FIG. 1294 (SEQ ID NO:1294), FIG. 1296 (SEQ ID NO:1296), FIG. 1298 (SEQ ID NO:1298), FIG. 1300 (SEQ ID NO:1300), FIG. 1302 (SEQ ID NO:1302), FIG. 1304 (SEQ ID NO:1304), FIG. 1306 (SEQ ID NO:1306), FIG. 1308 (SEQ ID NO:1308), FIG. 1310 (SEQ ID NO:1310), FIG. 1312 (SEQ ID NO:1312), FIG. 1314 (SEQ ID NO:1314), FIG. 1316 (SEQ ID NO:1316), FIG. 1318 (SEQ ID NO:1318), FIG. 1320 (SEQ ID NO:1320), FIG. 1322 (SEQ ID NO:1322), FIG. 1324 (SEQ ID NO:1324), FIG. 1326 (SEQ ID NO:1326), FIG. 1328 (SEQ ID NO:1328), FIG. 1330 (SEQ ID NO:1330), FIG. 1332 (SEQ ID NO:1332), FIG. 1334 (SEQ ID NO:1334), FIG. 1336 (SEQ ID NO:1336), FIG. 1338 (SEQ ID NO:1338), FIG. 1340 (SEQ ID NO:140), FIG. 1342 (SEQ ID NO:1342), FIG. 1344 (SEQ ID NO:1344), FIG. 1346 (SEQ ID NO:1346), FIG. 1348 (SEQ ID NO:1348), FIG. 1350 (SEQ ID NO:1350), FIG. 1352 (SEQ ID NO:1352), FIG. 1354 (SEQ ID NO:1354), FIG. 1356 (SEQ ID NO:1356), FIG. 1358 (SEQ ID NO:1358), FIG. 1360 (SEQ ID NO:1360), FIG. 1362 (SEQ ID NO:1362), FIG. 1364 (SEQ ID NO:1364), FIG. 1366 (SEQ ID NO:1366), FIG. 1368 (SEQ ID NO:1368), FIG. 1370 (SEQ ID NO:1370), FIG. 1372 (SEQ ID NO:1372), FIG. 1374 (SEQ ID NO:1374), FIG. 1376 (SEQ ID NO:1376), FIG. 1378 (SEQ ID NO:1378), FIG. 1380 (SEQ ID NO:1379), FIG. 1382 (SEQ ID NO:1382), FIG. 1384 (SEQ ID NO:1384), FIG. 1386 (SEQ ID NO:1386), FIG. 1388 (SEQ ID NO:1388), FIG. 1390 (SEQ ID NO:1390), FIG. 1392 (SEQ ID NO:1392), FIG. 1394 (SEQ ID NO:1394), FIG. 1396 (SEQ ID NO:1396), FIG. 1398 (SEQ ID NO:1398), FIG. 1400 (SEQ ID NO:1400), FIG. 1402 (SEQ ID NO:1402), FIG. 1404 (SEQ ID NO:1404), FIG. 1406 (SEQ ID NO:1406), FIG. 1408 (SEQ ID NO:1408), FIG. 1410 (SEQ ID NO:1410), FIG. 1412 (SEQ ID NO:1412), FIG. 1414 (SEQ ID NO:1414), FIG. 1416 (SEQ ID NO:1416), FIG. 1418 (SEQ ID NO:1418), FIG. 1420 (SEQ ID NO:1420), FIG. 1422 (SEQ ID NO:1422), FIG. 1425 (SEQ ID NO:1425), FIG. 1427 (SEQ ID NO:1427), FIG. 1429 (SEQ ID NO:1429), FIG. 1432 (SEQ ID NO:1432), FIG. 1434 (SEQ ID NO:1434), FIG. 1436 (SEQ ID NO:1436), FIG. 1438 (SEQ ID NO:1438), FIG. 1440 (SEQ ID NO:1440), FIG. 1442 (SEQ ID NO:1442), FIG. 1444 (SEQ ID NO:1444), FIG. 1446 (SEQ ID NO:1446), FIG. 1448 (SEQ ID NO:1448), FIG. 1450 (SEQ ID NO:1450), FIG. 1452 (SEQ ID NO:1452), FIG. 1454 (SEQ ID NO:1454), FIG. 1456 (SEQ ID NO:1456), FIG. 1458 (SEQ ID NO:1458), FIG. 1460 (SEQ ID NO:1460), FIG. 1462 (SEQ ID NO:1462), FIG. 1464 (SEQ ID NO:1464), FIG. 1466 (SEQ ID NO:1466), FIG. 1468 (SEQ ID NO:1468), FIG. 1470 (SEQ ID NO:1470), FIG. 1472 (SEQ ID NO:1472), FIG. 1474 (SEQ ID NO:1474), FIG. 1476 (SEQ ID NO:1476), FIG. 1478 (SEQ ID NO:1478), FIG. 1480 (SEQ ID NO:1480), FIG. 1482 (SEQ ID NO:1482), FIG. 1484 (SEQ ID NO:1484), FIG. 1486 (SEQ ID NO:1486), FIG. 1488 (SEQ ID NO:1488), FIG. 1490 (SEQ ID NO:1490), FIG. 1492 (SEQ ID NO:1492), FIG. 1494 (SEQ ID NO:1494), FIG. 1496 (SEQ ID NO:1496), FIG. 1498 (SEQ ID NO:1498), FIG. 1500 (SEQ ID NO:1500), FIG. 1502 (SEQ ID NO:1502), FIG. 1504 (SEQ ID NO:1504), FIG. 1506 (SEQ ID NO:1506), FIG. 1508 (SEQ ID NO:1508), FIG. 1510 (SEQ ID NO:1510), FIG. 1512 (SEQ ID NO:1512), FIG. 1514 (SEQ ID NO:1514), FIG. 1516 (SEQ ID NO:1516), FIG. 1518 (SEQ ID NO:1518), FIG. 1520 (SEQ ID NO:1520), FIG. 1522 (SEQ ID NO:1522), FIG. 1524 (SEQ ID NO:1524), FIG. 1526 (SEQ ID NO:1526), FIG. 1528 (SEQ ID NO:1528), FIG. 1530 (SEQ ID NO:1530), FIG. 1532 (SEQ ID NO:1532), FIG. 1534 (SEQ ID NO:1534), FIG. 1536 (SEQ ID NO:1536), FIG. 1538 (SEQ ID NO:1538), FIG. 1540 (SEQ ID NO:1540), FIG. 1542 (SEQ ID NO:1542), FIG. 1544 (SEQ ID NO:1544), FIG. 1546 (SEQ ID NO:1546), FIG. 1548 (SEQ ID NO:1548), FIG. 1550 (SEQ ID NO:1550), FIG. 1552 (SEQ ID NO:1552), FIG. 1554 (SEQ ID NO:1554), FIG. 1556 (SEQ ID NO:1556), FIG. 1558 (SEQ ID NO:1558), FIG. 1560 (SEQ ID NO:1560), FIG. 1562 (SEQ ID NO:1562), FIG. 1564 (SEQ ID NO:1654), FIG. 1566 (SEQ ID NO:1566), FIG. 1568 (SEQ ID NO:1568), FIG. 1570 (SEQ ID NO:1570), FIG. 1572 (SEQ ID NO:1572), FIG. 1574 (SEQ ID NO:1574), FIG. 1576 (SEQ ID NO:1576), FIG. 1578 (SEQ ID NO:1578), FIG. 1580 (SEQ ID NO:1580), FIG. 1582 (SEQ ID NO:1582), FIG. 1585 (SEQ ID NO:1585), FIG. 1587 (SEQ ID NO:1587), FIG. 1590 (SEQ ID NO:1590), FIG. 1592 (SEQ ID NO:1592), FIG. 1594 (SEQ ID NO:1594), FIG. 1597 (SEQ ID NO:1597), FIG. 1599 (SEQ ID NO:1599), FIG. 1601 (SEQ ID NO:1601), FIG. 1603 (SEQ ID NO:1603), FIG. 1605 (SEQ ID NO:1605), FIG. 1607 (SEQ ID NO:1607), FIG. 1610 (SEQ ID NO:1610), FIG. 1613 (SEQ ID NO:1613), FIG. 1615 (SEQ ID NO:1615), FIG. 1617 (SEQ ID NO:1617), FIG. 1619 (SEQ ID NO:1619), FIG. 1621 (SEQ ID NO:1621), FIG. 1623 (SEQ ID NO:1623), FIG. 1625 (SEQ ID NO:1625), FIG. 1627 (SEQ ID NO:1627), FIG. 1629 (SEQ ID NO:1629), FIG. 1631 (SEQ ID NO:1631), FIG. 1633 (SEQ ID NO:1633), FIG. 1635 (SEQ ID NO:1635), FIG. 1637 (SEQ ID NO:1637), FIG. 1639 (SEQ ID NO:1639), FIG. 1641 (SEQ ID NO:1641), FIG. 1643 (SEQ ID NO:1643), FIG. 1645 (SEQ ID NO:1645), FIG. 1647 (SEQ ID NO:1647), FIG. 1650 (SEQ ID NO:1650), FIG. 1654 (SEQ ID NO:1654), FIG. 1656 (SEQ ID NO:1656), FIG. 1658 (SEQ ID NO:1658), FIG. 1660 (SEQ ID NO:1660), FIG. 1662 (SEQ ID NO:1662), FIG. 1664 (SEQ ID NO:1664), FIG. 1666 (SEQ ID NO:1666), FIG. 1668 (SEQ ID NO:1668), FIG. 1670 (SEQ ID NO:1670), FIG. 1672 (SEQ ID NO:1672), FIG. 1674 (SEQ ID NO:1674), FIG. 1676 (SEQ ID NO:1676), FIG. 1678 (SEQ ID NO:1678), FIG. 1680 (SEQ ID NO:1680), FIG. 1682 (SEQ ID NO:1682), FIG. 1686 (SEQ ID NO:1686), FIG. 1688 (SEQ ID NO:1688), FIG. 1691 (SEQ ID NO:1691), FIG. 1693 (SEQ ID NO:1693), FIG. 1695 (SEQ ID NO:1695), FIG. 1697 (SEQ ID NO:1697), FIG. 1699 (SEQ ID NO:1699), FIG. 1701 (SEQ ID NO:1701), FIG. 1703 (SEQ ID NO:1703), FIG. 1705 (SEQ ID NO:1705), FIG. 1708 (SEQ ID NO:1708), FIG. 1710 (SEQ ID NO:1710), FIG. 1712 (SEQ ID NO:1712), FIG. 1714 (SEQ ID NO:1714), FIG. 1716 (SEQ ID NO:1716), FIG. 1718 (SEQ ID NO:1718), FIG. 1720 (SEQ ID NO:1720), FIG. 1722 (SEQ ID NO:1722), FIG. 1725 (SEQ ID NO:1725), FIG. 1727 (SEQ ID NO:1727), FIG. 1729 (SEQ ID NO:1729), FIG. 1731 (SEQ ID NO:1731), FIG. 1733 (SEQ ID NO:1733), FIG. 1735 (SEQ ID NO:1735), FIG. 1738 (SEQ ID NO:1738), FIG. 1740 (SEQ ID NO:1740), FIG. 1742 (SEQ ID NO:1742), FIG. 1744 (SEQ ID NO:1744), FIG. 1746 (SEQ ID NO:1746), FIG. 1748 (SEQ ID NO:1748), FIG. 1750 (SEQ ID NO:1750), FIG. 1752 (SEQ ID NO:1752), FIG. 1754 (SEQ ID NO:1754), FIG. 1756 (SEQ ID NO:1756), FIG. 1758 (SEQ ID NO:1758), FIG. 1760 (SEQ ID NO:1760), FIG. 1762 (SEQ ID NO:1762), FIG. 1764 (SEQ ID NO:1764), FIG. 1767 (SEQ ID NO:1767), FIG. 1769 (SEQ ID NO:1769), FIG. 1771 (SEQ ID NO:1771), FIG. 1774 (SEQ ID NO:1774), FIG. 1776 (SEQ ID NO:1776), FIG. 1779 (SEQ ID NO:1779), FIG. 1782 (SEQ ID NO:1782), FIG. 1784 (SEQ ID NO:1784), FIG. 1786 (SEQ ID NO:1786), FIG. 1789 (SEQ ID NO:1789), FIG. 1791 (SEQ ID NO:1791), FIG. 1794 (SEQ ID NO:1794), FIG. 1796 (SEQ ID NO:1796), FIG. 1798 (SEQ ID NO:1798), FIG. 1800 (SEQ ID NO:1800), FIG. 1802 (SEQ ID NO:1802), FIG. 1804 (SEQ ID NO:1804), FIG. 1806 (SEQ ID NO:1806), FIG. 1808 (SEQ ID NO:1808), FIG. 1810 (SEQ ID NO:1810), FIG. 1812 (SEQ ID NO:1812), FIG. 1814 (SEQ ID NO:1814), FIG. 1816 (SEQ ID NO:1816), FIG. 1818 (SEQ ID NO:1818), FIG. 1820 (SEQ ID NO:1820), FIG. 1822 (SEQ ID NO:1822), FIG. 1824 (SEQ ID NO:1824), FIG. 1826 (SEQ ID NO:1826), FIG. 1828 (SEQ ID NO:1828), FIG. 1830 (SEQ ID NO:1830), FIG. 1832 (SEQ ID NO:1832), FIG. 1834 (SEQ ID NO:1834), FIG. 1836 (SEQ ID NO:1836), FIG. 1838 (SEQ ID NO:1838), FIG. 1840 (SEQ ID NO:1840), FIG. 1842 (SEQ ID NO:1842), FIG. 1844 (SEQ ID NO:1844), FIG. 1846 (SEQ ID NO:1846), FIG. 1848 (SEQ ID NO:1848), FIG. 1850 (SEQ ID NO:1850), FIG. 1852 (SEQ ID NO:1852), FIG. 1856 (SEQ ID NO:1856), FIG. 1858 (SEQ ID NO:1858), FIG. 1860 (SEQ ID NO:1860), FIG. 1862 (SEQ ID NO:1862), FIG. 1864 (SEQ ID NO:1864), FIG. 1867 (SEQ ID NO:1867), FIG. 1869 (SEQ ID NO:1869), FIG. 1871 (SEQ ID NO:1871), FIG. 1873 (SEQ ID NO:1873), FIG. 1876 (SEQ ID NO:1876), FIG. 1878 (SEQ ID NO:1878), FIG. 1880 (SEQ ID NO:1880), FIG. 1883 (SEQ ID NO:1883), FIG. 1885 (SEQ ID NO:1885), FIG. 1887 (SEQ ID NO:1887), FIG. 1890 (SEQ ID NO:1890), FIG. 1892 (SEQ ID NO:1892), FIG. 1894 (SEQ ID NO:1894), FIG. 1896 (SEQ ID NO:1896), FIG. 1898 (SEQ ID NO:1898), FIG. 1900 (SEQ ID NO:1900), FIG. 1902 (SEQ ID NO:1902), FIG. 1904 (SEQ ID NO:1904), FIG. 1906 (SEQ ID NO:1906), FIG. 1908 (SEQ ID NO:1908), FIG. 1910 (SEQ ID NO:1910), FIG. 1912 (SEQ ID NO:1912), FIG. 1914 (SEQ ID NO:1914), FIG. 1916 (SEQ ID NO:1916), FIG. 1918 (SEQ ID NO:1918), FIG. 1920 (SEQ ID NO:1920), FIG. 1922 (SEQ ID NO:1922), FIG. 1924 (SEQ ID NO:1924), FIG. 1926 (SEQ ID NO:1926), FIG. 1928 (SEQ ID NO:1928), FIG. 1930 (SEQ ID NO:1930), FIG. 1932 (SEQ ID NO:1932), FIG. 1934 (SEQ ID NO:1934), FIG. 1936 (SEQ ID NO:1936), FIG. 1938 (SEQ ID NO:1938), FIG. 1940 (SEQ ID NO:1940), FIG. 1942 (SEQ ID NO:1942), FIG. 1944 (SEQ ID NO:1944), FIG. 1946 (SEQ ID NO:1946), FIG. 1948 (SEQ ID NO:1948), FIG. 1951 (SEQ ID NO:1951), FIG. 1953 (SEQ ID NO:1953), FIG. 1955 (SEQ ID NO:1955), FIG. 1957 (SEQ ID NO:1957), FIG. 1959 (SEQ ID NO:1959), FIG. 1961 (SEQ ID NO:1961), FIG. 1964 (SEQ ID NO:1964), FIG. 1966 (SEQ ID NO:1966), FIG. 1968 (SEQ ID NO:1968), FIG. 1970 (SEQ ID NO:1970), FIG. 1972 (SEQ ID NO:1972), FIG. 1974 (SEQ ID NO:1974), FIG. 1976 (SEQ ID NO:1976), FIG. 1978 (SEQ ID NO:1978), FIG. 1980 (SEQ ID NO:1980), FIG. 1982 (SEQ ID NO:1982), FIG. 1984 (SEQ ID NO:1984), FIG. 1986 (SEQ ID NO:1986), FIG. 1988 (SEQ ID NO:1988), FIG. 1990 (SEQ ID NO:1990), FIG. 1992 (SEQ ID NO:1992), FIG. 1994 (SEQ ID NO:1994), FIG. 1996 (SEQ ID NO:1996), FIG. 1998 (SEQ ID NO:1998), FIG. 2000 (SEQ ID NO:2000), FIG. 2002 (SEQ ID NO:2002), FIG. 2004 (SEQ ID NO:2004), FIG. 2006 (SEQ ID NO:2006), FIG. 2008 (SEQ ID NO:2008), FIG. 2010 (SEQ ID NO:2010), FIG. 2012 (SEQ ID NO:2012), FIG. 2014 (SEQ ID NO:2014), FIG. 2016 (SEQ ID NO:2016), FIG. 2018 (SEQ ID NO:2018), FIG. 2020 (SEQ ID NO:2020), FIG. 2022 (SEQ ID NO:2022), FIG. 2024 (SEQ ID NO:2024), FIG. 2026 (SEQ ID NO:2026), FIG. 2028 (SEQ ID NO:2028), FIG. 2030 (SEQ ID NO:2030), FIG. 2032 (SEQ ID NO:2032), FIG. 2034 (SEQ ID NO:2034), FIG. 2036 (SEQ ID NO:2036), FIG. 2038 (SEQ ID NO:2038), FIG. 2040 (SEQ ID NO:2040), FIG. 2042 (SEQ ID NO:2042), FIG. 2044 (SEQ ID NO:2044), FIG. 2046 (SEQ ID NO:2046), FIG. 2048 (SEQ ID NO:2048), FIG. 2050 (SEQ ID NO:2050), FIG. 2052 (SEQ ID NO:5052), FIG. 2054 (SEQ ID NO:2054), FIG. 2056 (SEQ ID NO:2056), FIG. 2058 (SEQ ID NO:2058), FIG. 2060 (SEQ ID NO:2060), FIG. 2062 (SEQ ID NO:2062), FIG. 2064 (SEQ ID NO:2064), FIG. 2066 (SEQ ID NO:2066), FIG. 2068 (SEQ ID NO:2068), FIG. 2070 (SEQ ID NO:2070), FIG. 2072 (SEQ ID NO:2072), FIG. 2074 (SEQ ID NO:2074), FIG. 2076 (SEQ ID NO:2076), FIG. 2078 (SEQ ID NO:2078), FIG. 2080 (SEQ ID NO:2080), FIG. 2082 (SEQ ID NO:2082), FIG. 2084 (SEQ ID NO:2084), FIG. 2086 (SEQ ID NO:2086), FIG. 2088 (SEQ ID NO:2088), FIG. 2090 (SEQ ID NO:2090), FIG. 2092 (SEQ ID NO:2092), FIG. 2094 (SEQ ID NO:2094), FIG. 2096 (SEQ ID NO:2096), FIG. 2098 (SEQ ID NO:2098), FIG. 2100 (SEQ ID NO:2100), FIG. 2102 (SEQ ID NO:2102), FIG. 2104 (SEQ ID NO:2104), FIG. 2106 (SEQ ID NO:2106), FIG. 2108 (SEQ ID NO:2108), FIG. 2110 (SEQ ID NO:2110), FIG. 2112 (SEQ ID NO:2112), FIG. 2114 (SEQ ID NO:2114), FIG. 2116 (SEQ ID NO:2116), FIG. 2118 (SEQ ID NO:2118), FIG. 2120 (SEQ ID NO:2120), FIG. 2122 (SEQ ID NO:2122), FIG. 2124 (SEQ ID NO:2124), FIG. 2126 (SEQ ID NO:2126), FIG. 2128 (SEQ ID NO:2128), FIG. 2130 (SEQ ID NO:2130), FIG. 2132 (SEQ ID NO:2132), FIG. 2134 (SEQ ID NO:2134), FIG. 2136 (SEQ ID NO:2136), FIG. 2139 (SEQ ID NO:2139), FIG. 2141 (SEQ ID NO:2141), FIG. 2143 (SEQ ID NO:2143), FIG. 2145 (SEQ ID NO:2145), FIG. 2149 (SEQ ID NO:2149), FIG. 2151 (SEQ ID NO:2151), FIG. 2153 (SEQ ID NO:2153), FIG. 2155 (SEQ ID NO:2155), FIG. 2157 (SEQ ID NO:2157), FIG. 2159 (SEQ ID NO:2159), FIG. 2161 (SEQ ID NO:2161), FIG. 2163 (SEQ ID NO:2163), FIG. 2165 (SEQ ID NO:2165), FIG. 2167 (SEQ ID NO:2167), FIG. 2169 (SEQ ID NO:2169), FIG. 2171 (SEQ ID NO:2171), FIG. 2173 (SEQ ID NO:2173), FIG. 2175 (SEQ ID NO:2175), FIG. 2177 (SEQ ID NO:2177), FIG. 2179 (SEQ ID NO:2179), FIG. 2181 (SEQ ID NO:2181), FIG. 2183 (SEQ ID NO:2183), FIG. 2185 (SEQ ID NO:2185), FIG. 2187 (SEQ ID NO:2187), FIG. 2189 (SEQ ID NO:2189), FIG. 2191 (SEQ ID NO:2191), FIG. 2193 (SEQ ID NO:2193), FIG. 2195 (SEQ ID NO:2195), FIG. 2197 (SEQ ID NO:2197), FIG. 2199 (SEQ ID NO:2199), FIG. 2201 (SEQ ID NO:2201), FIG. 2203 (SEQ ID NO:2203), FIG. 2205 (SEQ ID NO:2205), FIG. 2207 (SEQ ID NO:2207), FIG. 2209 (SEQ ID NO:2209), FIG. 2211 (SEQ ID NO:2211), FIG. 2213 (SEQ ID NO:2213), FIG. 2215 (SEQ ID NO:2215), FIG. 2218 (SEQ ID NO:2218), FIG. 2220 (SEQ ID NO:2220), FIG. 2222 (SEQ ID NO:2222), FIG. 2224 (SEQ ID NO:2224), FIG. 2226 (SEQ ID NO:2226), FIG. 2228 (SEQ ID NO:2228), FIG. 2231 (SEQ ID NO:2231), FIG. 2233 (SEQ ID NO:2233), FIG. 2235 (SEQ ID NO:2235), FIG. 2237 (SEQ ID NO:2237), FIG. 2239 (SEQ ID NO:2239), FIG. 2241 (SEQ ID NO:2241), FIG. 2243 (SEQ ID NO:2243), FIG. 2245 (SEQ ID NO:2245), FIG. 2247 (SEQ ID NO:2247), FIG. 2249 (SEQ ID NO:2249), FIG. 2251 (SEQ ID NO:2251), FIG. 2253 (SEQ ID NO:2253), FIG. 2255 (SEQ ID NO:2255), FIG. 2257 (SEQ ID NO:2257), FIG. 2259 (SEQ ID NO:2259), FIG. 2261 (SEQ ID NO:2261), FIG. 2263 (SEQ ID NO:2263), FIG. 2265 (SEQ ID NO:2265), FIG. 2267 (SEQ ID NO:2267), FIG. 2269 (SEQ ID NO:2269), FIG. 2271 (SEQ ID NO:2271), FIG. 2273 (SEQ ID NO:2273), FIG. 2275 (SEQ ID NO:2275), FIG. 2277 (SEQ ID NO:2277), FIG. 2279 (SEQ ID NO:2279), FIG. 2281 (SEQ ID NO:2281), FIG. 2283 (SEQ ID NO:2283), FIG. 2285 (SEQ ID NO:2285), FIG. 2287 (SEQ ID NO:2287), FIG. 2289 (SEQ ID NO:2289), FIG. 2291 (SEQ ID NO:2291), FIG. 2293 (SEQ ID NO:2293), FIG. 2295 (SEQ ID NO:2295), FIG. 2297 (SEQ ID NO:2297), FIG. 2299 (SEQ ID NO:2299), FIG. 2302 (SEQ ID NO:2302), FIG. 2304 (SEQ ID NO:2304), FIG. 2306 (SEQ ID NO:2306), FIG. 2310 (SEQ ID NO:2310), FIG. 2313 (SEQ ID NO:2313), FIG. 2315 (SEQ ID NO:2315), FIG. 2317 (SEQ ID NO:2317), FIG. 2319 (SEQ ID NO:2319), FIG. 2321 (SEQ ID NO:2321), FIG. 2324 (SEQ ID NO:2324), FIG. 2326 (SEQ ID NO:2326), FIG. 2328 (SEQ ID NO:2328), FIG. 2330 (SEQ ID NO:2330), FIG. 2332 (SEQ ID NO:2332), FIG. 2334 (SEQ ID NO:2334), FIG. 2336 (SEQ ID NO:2336), FIG. 2338 (SEQ ID NO:2338), FIG. 2340 (SEQ ID NO:2340), FIG. 2342 (SEQ ID NO:2342), FIG. 2344 (SEQ ID NO:2344), FIG. 2347 (SEQ ID NO:2347), FIG. 2350 (SEQ ID NO:2350), FIG. 2352 (SEQ ID NO:2352), FIG. 2354 (SEQ ID NO:2354), FIG. 2356 (SEQ ID NO:2356), FIG. 2358 (SEQ ID NO:2358), FIG. 2360 (SEQ ID NO:2360), FIG. 2362 (SEQ ID NO:2362), FIG. 2364 (SEQ ID NO:2364), FIG. 2366 (SEQ ID NO:2366), FIG. 2368 (SEQ ID NO:2368), FIG. 2370 (SEQ ID NO:2370), FIG. 2372 (SEQ ID NO:2372), FIG. 2374 (SEQ ID NO:2374), FIG. 2376 (SEQ ID NO:2376), FIG. 2378 (SEQ ID NO:2378), FIG. 2380 (SEQ ID NO:2380), FIG. 2382 (SEQ ID NO:2382), FIG. 2384 (SEQ ID NO:2384), FIG. 2386 (SEQ ID NO:2386), FIG. 2388 (SEQ ID NO:2388), FIG. 2390 (SEQ ID NO:2390), FIG. 2392 (SEQ ID NO:2392), FIG. 2394 (SEQ ID NO:2394), FIG. 2396 (SEQ ID NO:2396), FIG. 2398 (SEQ ID NO:2398), FIG. 2400 (SEQ ID NO:2400), FIG. 2402 (SEQ ID NO:2402), FIG. 2404 (SEQ ID NO:2404), FIG. 2407 (SEQ ID NO:2407), FIG. 2409 (SEQ ID NO:2409), FIG. 2412 (SEQ ID NO:2412), FIG. 2415 (SEQ ID NO:2415), FIG. 2419 (SEQ ID NO:2419), FIG. 2423 (SEQ ID NO:2423), FIG. 2425 (SEQ ID NO:2425), FIG. 2427 (SEQ ID NO:2427), FIG. 2429 (SEQ ID NO:2429), FIG. 2431 (SEQ ID NO:2431), FIG. 2433 (SEQ ID NO:2433), FIG. 2435 (SEQ ID NO:2435), FIG. 2437 (SEQ ID NO:2437), FIG. 2439 (SEQ ID NO:2439), FIG. 2441 (SEQ ID NO:2441), FIG. 2443 (SEQ ID NO:2443), FIG. 2445 (SEQ ID NO:2445), FIG. 2448 (SEQ ID NO:2448), FIG. 2450 (SEQ ID NO:2450), FIG. 2452 (SEQ ID NO:2452), FIG. 2454 (SEQ ID NO:2454), FIG. 2457 (SEQ ID NO:2457), FIG. 2459 (SEQ ID NO:2459), FIG. 2461 (SEQ ID NO:2461), FIG. 2465 (SEQ ID NO:2465), FIG. 2468 (SEQ ID NO:2468), FIG. 2472 (SEQ ID NO:2472), FIG. 2474 (SEQ ID NO:2474), FIG. 2482 (SEQ ID NO:2482) or FIG. 2484 (SEQ ID NO:2484), in a sample suspected of containing said polypeptide, said method comprising exposing said sample to an anti-PRO polypeptide antibody and determining binding of said antibody to a component of said sample.

20. A method of diagnosing psoriasis in a mammal, said method comprising detecting the level of expression of a gene encoding a PRO polypeptide of the invention as described in FIG. 2 (SEQ ID NO:2), FIG. 4 (SEQ ID NO:4), FIG. 6 (SEQ ID NO:6), FIG. 8 (SEQ ID NO:8), FIG. 10 (SEQ ID NO:10), FIG. 12 (SEQ ID NO:12), FIG. 14 (SEQ ID NO:14), FIG. 16 (SEQ ID NO:16), FIG. 18 (SEQ ID NO:18), FIG. 20 (SEQ ID NO:20), FIG. 22 (SEQ ID NO:22), FIG. 24 (SEQ ID NO:24), FIG. 26 (SEQ ID NO:26), FIG. 28 (SEQ ID NO:28), FIG. 30 (SEQ ID NO:30), FIG. 32 (SEQ ID NO:32), FIG. 34 (SEQ ID NO:34), FIG. 36 (SEQ ID NO:36), FIG. 38 (SEQ ID NO:38), FIG. 40 (SEQ ID NO:40), FIG. 42 (SEQ ID NO:42), FIG. 43 (SEQ ID NO:43), FIG. 46 (SEQ ID NO:46), FIG. 48 (SEQ ID NO:48), FIG. 50 (SEQ ID NO:50), FIG. 52 (SEQ ID NO:52), FIG. 54 (SEQ ID NO:54), FIG. 56 (SEQ ID NO:56), FIG. 58 (SEQ ID NO:58), FIG. 60 (SEQ ID NO:60), FIG. 62 (SEQ ID NO:62), FIG. 64 (SEQ ID NO:64), FIG. 66 (SEQ ID NO:66), FIG. 68 (SEQ ID NO:68), FIG. 70 (SEQ ID NO:70), FIG. 72 (SEQ ID NO:72), FIG. 74 (SEQ ID NO:74), FIG. 76 (SEQ ID NO:76), FIG. 78 (SEQ ID NO:78), FIG. 80 (SEQ ID NO:80), FIG. 80 (SEQ ID NO:80), FIG. 84 (SEQ ID NO:84), FIG. 86 (SEQ ID NO:86), FIG. 88 (SEQ ID NO:88), FIG. 90 (SEQ ID NO:90), FIG. 92 (SEQ ID NO:92), FIG. 94 (SEQ ID NO:94), FIG. 96 (SEQ ID NO:96), FIG. 98 (SEQ ID NO:98), FIG. 100 (SEQ ID NO:100), FIG. 102 (SEQ ID NO:102), FIG. 104 (SEQ ID NO:104), FIG. 106 (SEQ ID NO:106), FIG. 108 (SEQ ID NO:108), FIG. 108 (SEQ ID NO:108), FIG. 112 (SEQ ID NO:112), FIG. 115 (SEQ ID NO:115), FIG. 117 (SEQ ID NO:117), FIG. 119 (SEQ ID NO:119), FIG. 121 (SEQ ID NO:121), FIG. 123 (SEQ ID NO:123), FIG. 125 (SEQ ID NO:125), FIG. 127 (SEQ ID NO:127), FIG. 129 (SEQ ID NO:129), FIG. 131 (SEQ ID NO:131), FIG. 133 (SEQ ID NO:133), FIG. 135 (SEQ ID NO:135), FIG. 137 (SEQ ID NO:137), FIG. 139 (SEQ ID NO:139), FIG. 141 (SEQ ID NO:141), FIG. 143 (SEQ ID NO:143), FIG. 145 (SEQ ID NO:145), FIG. 147 (SEQ ID NO:147), FIG. 149 (SEQ ID NO:149), FIG. 151 (SEQ ID NO:151), FIG. 153 (SEQ ID NO:153), FIG. 155 (SEQ ID NO:155), FIG. 157 (SEQ ID NO:157), FIG. 159 (SEQ ID NO:159), FIG. 161 (SEQ ID NO:161), FIG. 163 (SEQ ID NO:163), FIG. 165 (SEQ ID NO:165), FIG. 167 (SEQ ID NO:167), FIG. 169 (SEQ ID NO:169), FIG. 171 (SEQ ID NO:171), FIG. 173 (SEQ ID NO:173), FIG. 175 (SEQ ID NO:175), FIG. 177 (SEQ ID NO:177), FIG. 179 (SEQ ID NO:179), FIG. 181 (SEQ ID NO:181), FIG. 183 (SEQ ID NO:183), FIG. 185 (SEQ ID NO:185), FIG. 187 (SEQ ID NO:187), FIG. 189 (SEQ ID NO:189), FIG. 191 (SEQ ID NO:191), FIG. 194 (SEQ ID NO:194), FIG. 196 (SEQ ID NO:196), FIG. 198 (SEQ ID NO:198), FIG. 200 (SEQ ID NO:200), FIG. 202 (SEQ ID NO:202), FIG. 204 (SEQ ID NO:204), FIG. 206 (SEQ ID NO:206), FIG. 208 (SEQ ID NO:208), FIG. 210 (SEQ ID NO:210), FIG. 212 (SEQ ID NO:212), FIG. 214 (SEQ ID NO:214), FIG. 216 (SEQ ID NO:216), FIG. 218 (SEQ ID NO:218), FIG. 221 (SEQ ID NO:221), FIG. 223 (SEQ ID NO:223), FIG. 225 (SEQ ID NO:225), FIG. 227 (SEQ ID NO:227), FIG. 229 (SEQ ID NO:229), FIG. 231 (SEQ ID NO:231), FIG. 233 (SEQ ID NO:233), FIG. 235 (SEQ ID NO:235), FIG. 237 (SEQ ID NO:237), FIG. 239 (SEQ ID NO:239), FIG. 241 (SEQ ID NO:241), FIG. 243 (SEQ ID NO:243), FIG. 245 (SEQ ID NO:245), FIG. 247 (SEQ ID NO:247), FIG. 249 (SEQ ID NO:249), FIG. 251 (SEQ ID NO:251), FIG. 253 (SEQ ID NO:253), FIG. 255 (SEQ ID NO:255), FIG. 257 (SEQ ID NO:257), FIG. 259 (SEQ ID NO:259), FIG. 261 (SEQ ID NO:261), FIG. 263 (SEQ ID NO:263), FIG. 265 (SE Q ID NO:265), FIG. 267 (SEQ ID NO:267), FIG. 269 (SEQ ID NO:269), FIG. 272 (SEQ ID NO:272), FIG. 274 (SEQ ID NO:274), FIG. 276 (SEQ ID NO:276), FIG. 278 (SEQ ID NO:278), FIG. 280 (SEQ ID NO:280), FIG. 282 (SEQ ID NO:282), FIG. 284 (SEQ ID NO:284), FIG. 286 (SEQ ID NO:286), FIG. 288 (SEQ ID NO:288), FIG. 290 (SEQ ID NO:290), FIG. 292 (SEQ ID NO:292), FIG. 294 (SEQ ID NO:294), FIG. 296 (SEQ ID NO:296), FIG. 298 (SEQ ID NO:298), FIG. 300 (SEQ ID NO:300), FIG. 302 (SEQ ID NO:302), FIG. 304 (SEQ ID NO:304), FIG. 306 (SEQ ID NO:306), FIG. 308 (SEQ ID NO:308), FIG. 310 (SEQ ID NO:310), FIG. 312 (SEQ ID NO:312), FIG. 314 (SEQ ID NO:314), FIG. 316 (SEQ ID NO:316), FIG. 318 (SEQ ID NO:318), FIG. 320 (SEQ ID NO:320), FIG. 322 (SEQ ID NO:322), FIG. 324 (SEQ ID NO:324), FIG. 326 (SEQ ID NO:326), FIG. 328 (SEQ ID NO:328), FIG. 330 (SEQ ID NO:330), FIG. 332 (SEQ ID NO:332), FIG. 334 (SEQ ID NO:334), FIG. 336 (SEQ ID NO:336), FIG. 338 (SEQ ID NO:338), FIG. 340 (SEQ ID NO:340), FIG. 342 (SEQ ID NO:342), FIG. 344 (SEQ ID NO:344), FIG. 346 (SEQ ID NO:346), FIG. 348 (SEQ ID NO:348), FIG. 350 (SEQ ID NO:350), FIG. 352 (SEQ ID NO:352), FIG. 354 (SEQ ID NO:354), FIG. 356 (SEQ ID NO:356), FIG. 358 (SEQ ID NO:358), FIG. 360 (SEQ ID NO:360), FIG. 362 (SEQ ID NO:362), FIG. 364 (SEQ ID NO:364), FIG. 366 (SEQ ID NO:366), FIG. 368 (SEQ ID NO:368), FIG. 370 (SEQ ID NO:370), FIG. 372 (SEQ ID NO:372), FIG. 374 (SEQ ID NO:374), FIG. 376 (SEQ ID NO:376), FIG. 378 (SEQ ID NO:378), FIG. 380 (SEQ ID NO:380), FIG. 382 (SEQ ID NO:382), FIG. 384 (SEQ ID NO:384), FIG. 386 (SEQ ID NO:386), FIG. 388 (SEQ ID NO:388), FIG. 390 (SEQ ID NO:390), FIG. 392 (SEQ ID NO:392), FIG. 394 (SEQ ID NO:394), FIG. 396 (SEQ ID NO:396), FIG. 398 (SEQ ID NO:398), FIG. 400 (SEQ ID NO:400), FIG. 402 (SEQ ID NO:402), FIG. 404 (SEQ ID NO:404), FIG. 406 (SEQ ID NO:406), FIG. 408 (SEQ ID NO:408), FIG. 410 (SEQ ID NO:410), FIG. 412 (SEQ ID NO:412), FIG. 414 (SEQ ID NO:414), FIG. 416 (SEQ ID NO:416), FIG. 418 (SEQ ID NO:418), FIG. 420 (SEQ ID NO:420), FIG. 422 (SEQ ID NO:422), FIG. 424 (SEQ ID NO:424), FIG. 426 (SEQ ID NO:426), FIG. 428 (SEQ ID NO:428), FIG. 430 (SEQ ID NO:430), FIG. 432 (SEQ ID NO:432), FIG. 434 (SEQ ID NO:434), FIG. 436 (SEQ ID NO:436), FIG. 438 (SEQ ID NO:438), FIG. 440 (SEQ ID NO:440), FIG. 442 (SEQ ID NO:442), FIG. 444 (SEQ ID NO:444), FIG. 446 (SEQ ID NO:446), FIG. 448 (SEQ ID NO:448), FIG. 450 (SEQ ID NO:450), FIG. 452 (SEQ ID NO:452), FIG. 454 (SEQ ID NO:454), FIG. 456 (SEQ ID NO:456), FIG. 458 (SEQ ID NO:458), FIG. 460 (SEQ ID NO:460), FIG. 462 (SEQ ID NO:462), FIG. 464 (SEQ ID NO:464), FIG. 466 (SEQ ID NO:466), FIG. 467 (SEQ ID NO:467), FIG. 470 (SEQ ID NO:470), FIG. 472 (SEQ ID NO:472), FIG. 474 (SEQ ID NO:474), FIG. 476 (SEQ ID NO:476), FIG. 478 (SEQ ID NO:478), FIG. 480 (SEQ ID NO:480), FIG. 482 (SEQ ID NO:482), FIG. 484 (SEQ ID NO:484), FIG. 486 (SEQ ID NO:486), FIG. 488 (SEQ ID NO:488), FIG. 490 (SEQ ID NO:490), FIG. 492 (SEQ ID NO:492), FIG. 494 (SEQ ID NO:494), FIG. 496 (SEQ ID NO:496), FIG. 498 (SEQ ID NO:498), FIG. 500 (SEQ ID NO:500), FIG. 502 (SEQ ID NO:502), FIG. 504 (SEQ ID NO:504), FIG. 506 (SEQ ID NO:506), FIG. 508 (SEQ ID NO:508), FIG. 510 (SEQ ID NO:510), FIG. 512 (SEQ ID NO:512), FIG. 514 (SEQ ID NO:514), FIG. 516 (SEQ ID NO:516), FIG. 518 (SEQ ID NO:518), FIG. 520 (SEQ ID NO:520), FIG. 522 (SEQ ID NO:522), FIG. 524 (SEQ ID NO:524), FIG. 526 (SEQ ID NO:526), FIG. 528 (SEQ ID NO:528), FIG. 530 (SEQ ID NO:530), FIG. 532 (SEQ ID NO:532), FIG. 534 (SEQ ID NO:534), FIG. 536 (SEQ ID NO:536), FIG. 538 (SEQ ID NO:538), FIG. 540 (SEQ ID NO:540), FIG. 542 (SEQ ID NO:542), FIG. 544 (SEQ ID NO:544), FIG. 546 (SEQ ID NO:546), FIG. 548 (SEQ ID NO:548), FIG. 550 (SEQ ID NO:550), FIG. 552 (SEQ ID NO:552), FIG. 554 (SEQ ID NO:554), FIG. 556 (SEQ ID NO:556), FIG. 558 (SEQ ID NO:558), FIG. 560 (SEQ ID NO:560), FIG. 562 (SEQ ID NO:562), FIG. 564 (SEQ ID NO:564), FIG. 566 (SEQ ID NO:566), FIG. 568 (SEQ ID NO:568), FIG. 570 (SEQ ID NO:570), FIG. 572 (SEQ ID NO:572), FIG. 574 (SEQ ID NO:574), FIG. 576 (SEQ ID NO:576), FIG. 578 (SEQ ID NO:578), FIG. 580 (SEQ ID NO:580), FIG. 582 (SEQ ID NO:582), FIG. 584 (SEQ ID NO:584), FIG. 586 (SEQ ID NO:586), FIG. 588 (SEQ ID NO:588), FIG. 590 (SEQ ID NO:590), FIG. 592 (SEQ ID NO:592), FIG. 594 (SEQ ID NO:594), FIG. 596 (SEQ ID NO:596), FIG. 598 (SEQ ID NO:598), FIG. 600 (SEQ ID NO:600), FIG. 602 (SEQ ID NO:602), FIG. 604 (SEQ ID NO:604), FIG. 606 (SEQ ID NO:606), FIG. 608 (SEQ ID NO:608), FIG. 610 (SEQ ID NO:610), FIG. 612 (SEQ ID NO:612), FIG. 614 (SEQ ID NO:614), FIG. 616 (SEQ ID NO:616), FIG. 618 (SEQ ID NO:618), FIG. 620 (SEQ ID NO:620), FIG. 622 (SEQ ID NO:622), FIG. 624 (SEQ ID NO:624), FIG. 626 (SEQ ID NO:626), FIG. 628 (SEQ ID NO:628), FIG. 630 (SEQ ID NO:630), FIG. 632 (SEQ ID NO:632), FIG. 634 (SEQ ID NO:634), FIG. 637 (SEQ ID NO:637), FIG. 639 (SEQ ID NO:639), FIG. 641 (SEQ ID NO:641), FIG. 643 (SEQ ID NO:643), FIG. 645 (SEQ ID NO:645), FIG. 647 (SEQ ID NO:647), FIG. 649 (SEQ ID NO:649), FIG. 651 (SEQ ID NO:651), FIG. 653 (SEQ ID NO:653), FIG. 655 (SEQ ID NO:655), FIG. 657 (SEQ ID NO:657), FIG. 659 (SEQ ID NO:659), FIG. 661 (SEQ ID NO:661), FIG. 663 (SEQ ID NO:663), FIG. 665 (SEQ ID NO:665), FIG. 667 (SEQ ID NO:667), FIG. 669 (SEQ ID NO:669), FIG. 671 (SEQ ID NO:671), FIG. 673 (SEQ ID NO:673), FIG. 675 (SEQ ID NO:675), FIG. 677 (SEQ ID NO:677), FIG. 679 (SEQ ID NO:679), FIG. 681 (SEQ ID NO:681), FIG. 683 (SEQ ID NO:683), FIG. 685 (SEQ ID NO:685), FIG. 687 (SEQ ID NO:687), FIG. 689 (SEQ ID NO:689), FIG. 691 (SEQ ID NO:691), FIG. 693 (SEQ ID NO:693), FIG. 695 (SEQ ID NO:695), FIG. 697 (SEQ ID NO:697), FIG. 699 (SEQ ID NO:699), FIG. 701 (SEQ ID NO:701), FIG. 703 (SEQ ID NO:703), FIG. 705 (SEQ ID NO:705), FIG. 707 (SEQ ID NO:707), FIG. 709 (SEQ ID NO:709), FIG. 711 (SEQ ID NO:711), FIG. 713 (SEQ ID NO:713), FIG. 715 (SEQ ID NO:715), FIG. 717 (SEQ ID NO:717), FIG. 719 (SEQ ID NO:719), FIG. 721 (SEQ ID NO:721), FIG. 723 (SEQ ID NO:723), FIG. 725 (SEQ ID NO:725), FIG. 727 (SEQ ID NO:727), FIG. 729 (SEQ ID NO:729), FIG. 731 (SEQ ID NO:731), FIG. 733 (SEQ ID NO:733), FIG. 735 (SEQ ID NO:735), FIG. 737 (SEQ ID NO:737), FIG. 739 (SEQ ID NO:739), FIG. 741 (SEQ ID NO:741), FIG. 743 (SEQ ID NO:743), FIG. 745 (SEQ ID NO:745), FIG. 747 (SEQ ID NO:747), FIG. 749 (SEQ ID NO:749), FIG. 751 (SEQ ID NO:751), FIG. 753 (SEQ ID NO:753), FIG. 755 (SEQ ID NO:755), FIG. 757 (SEQ ID NO:757), FIG. 759 (SEQ ID NO:759), FIG. 761 (SEQ ID NO:761), FIG. 763 (SEQ ID NO:763), FIG. 765 (SEQ ID NO:765), FIG. 767 (SEQ ID NO:767), FIG. 770 (SEQ ID NO:770), FIG. 772 (SEQ ID NO:772), FIG. 774 (SEQ ID NO:774), FIG. 776 (SEQ ID NO:776), FIG. 778 (SEQ ID NO:778), FIG. 780 (SEQ ID NO:780), FIG. 782 (SEQ ID NO:782), FIG. 784 (SEQ ID NO:784), FIG. 786 (SEQ ID NO:786), FIG. 788 (SEQ ID NO:788), FIG. 790 (SEQ ID NO:790), FIG. 792 (SEQ ID NO:792), FIG. 794 (SEQ ID NO:794), FIG. 796 (SEQ ID NO:796), FIG. 798 (SEQ ID NO:798), FIG. 800 (SEQ ID NO:800), FIG. 802 (SEQ ID NO:802), FIG. 805 (SEQ ID NO:805), FIG. 807 (SEQ ID NO:807), FIG. 809 (SEQ ID NO:809), FIG. 811 (SEQ ID NO:811), FIG. 813 (SEQ ID NO:813), FIG. 815 (SEQ ID NO:815), FIG. 817 (SEQ ID NO:817), FIG. 819 (SEQ ID NO:819), FIG. 821 (SEQ ID NO:821), FIG. 823 (SEQ ID NO:823), FIG. 826 (SEQ ID NO:826), FIG. 828 (SEQ ID NO:828), FIG. 830 (SEQ ID NO:830), FIG. 832 (SEQ ID NO:832), FIG. 834 (SEQ ID NO:834), FIG. 836 (SEQ ID NO:836), FIG. 838 (SEQ ID NO:838), FIG. 840 (SEQ ID NO:840), FIG. 842 (SEQ ID NO:842), FIG. 844 (SEQ ID NO:844), FIG. 846 (SEQ ID NO:846), FIG. 848 (SEQ ID NO:848), FIG. 850 (SEQ ID NO:850), FIG. 852 (SEQ ID NO:852), FIG. 854 (SEQ ID NO:854), FIG. 856 (SEQ ID NO:856), FIG. 858 (SEQ ID NO:858), FIG. 860 (SEQ ID NO:860), FIG. 862 (SEQ ID NO:862), FIG. 864 (SEQ ID NO:864), FIG. 866 (SEQ ID NO:866), FIG. 868 (SEQ ID NO:868), FIG. 870 (SEQ ID NO:870), FIG. 872 (SEQ ID NO:872), FIG. 874 (SEQ ID NO:874), FIG. 876 (SEQ ID NO:876), FIG. 878 (SEQ ID NO:878), FIG. 880 (SEQ ID NO:880), FIG. 882 (SEQ ID NO:882), FIG. 884 (SEQ ID NO:884), FIG. 886 (SEQ ID NO:886), FIG. 888 (SEQ ID NO:888), FIG. 890 (SEQ ID NO:890), FIG. 892 (SEQ ID NO:892), FIG. 894 (SEQ ID NO:894), FIG. 896 (SEQ ID NO:896), FIG. 898 (SEQ ID NO:898), FIG. 900 (SEQ ID NO:900), FIG. 902 (SEQ ID NO:902), FIG. 904 (SEQ ID NO:904), FIG. 906 (SEQ ID NO:906), FIG. 908 (SEQ ID NO:908), FIG. 911 (SEQ ID NO:911), FIG. 913 (SEQ ID NO:913), FIG. 915 (SEQ ID NO:915), FIG. 917 (SEQ ID NO:917), FIG. 919 (SEQ ID NO:919), FIG. 921 (SEQ ID NO:921), FIG. 923 (SEQ ID NO:923), FIG. 925 (SEQ ID NO:925), FIG. 927 (SEQ ID NO:927), FIG. 929 (SEQ ID NO:929), FIG. 931 (SEQ ID NO:931), FIG. 933 (SEQ ID NO:933), FIG. 935 (SEQ ID NO:935), FIG. 937 (SEQ ID NO:937), FIG. 940 (SEQ ID NO:940), FIG. 943 (SEQ ID NO:943), FIG. 946 (SEQ ID NO:946), FIG. 948 (SEQ ID NO:948), FIG. 950 (SEQ ID NO:950), FIG. 952 (SEQ ID NO:952), FIG. 955 (SEQ ID NO:955), FIG. 957 (SEQ ID NO:957), FIG. 959 (SEQ ID NO:959), FIG. 961 (SEQ ID NO:961), FIG. 966 (SEQ ID NO:966), FIG. 968 (SEQ ID NO:968), FIG. 970 (SEQ ID NO:970), FIG. 972 (SEQ ID NO:972), FIG. 974 (SEQ ID NO:974), FIG. 976 (SEQ ID NO:976), FIG. 978 (SEQ ID NO:978), FIG. 980 (SEQ ID NO:980), FIG. 985 (SEQ ID NO:985), FIG. 988 (SEQ ID NO:988), FIG. 991 (SEQ ID NO:991), FIG. 993 (SEQ ID NO:993), FIG. 995 (SEQ ID NO:995), FIG. 997 (SEQ ID NO:997), FIG. 1000 (SEQ ID NO:1000), FIG. 1002 (SEQ ID NO:1002), FIG. 1005 (SEQ ID NO:1005), FIG. 1007 (SEQ ID NO:1007), FIG. 1009 (SEQ ID NO:1009), FIG. 1011 (SEQ ID NO:1011), FIG. 1013 (SEQ ID NO:1013), FIG. 1015 (SEQ ID NO:1015), FIG. 1017 (SEQ ID NO:1017), FIG. 1019 (SEQ ID NO:1019), FIG. 1022 (SEQ ID NO:1022), FIG. 1024 (SEQ ID NO:1024), FIG. 1026 (SEQ ID NO:1026), FIG. 1028 (SEQ ID NO:1028), FIG. 1030 (SEQ ID NO:1030), FIG. 1032 (SEQ ID NO:1032), FIG. 1034 (SEQ ID NO:1034), FIG. 1036 (SEQ ID NO:1036), FIG. 1038 (SEQ ID NO:1083), FIG. 1040 (SEQ ID NO:1040), FIG. 1042 (SEQ ID NO:1042), FIG. 1044 (SEQ ID NO:1044), FIG. 1047 (SEQ ID NO:1047), FIG. 1049 (SEQ ID NO:1049), FIG. 1051 (SEQ ID NO:1051), FIG. 1053 (SEQ ID NO:1053), FIG. 1055 (SEQ ID NO:1055), FIG. 1057 (SEQ ID NO:1057), FIG. 1060 (SEQ ID NO:1060), FIG. 1062 (SEQ ID NO:1062), FIG. 1064 (SEQ ID NO:1064), FIG. 1066 (SEQ ID NO:1066), FIG. 1068 (SEQ ID NO:1068), FIG. 1070 (SEQ ID NO:1070), FIG. 1072 (SEQ ID NO:1072), FIG. 1074 (SEQ ID NO:1074), FIG. 1076 (SEQ ID NO:1076), FIG. 1078 (SEQ ID NO:1078), FIG. 1080 (SEQ ID NO:1080), FIG. 1082 (SEQ ID NO:1082), FIG. 1084 (SEQ ID NO:1084), FIG. 1086 (SEQ ID NO:1086), FIG. 1089 (SEQ ID NO:1089), FIG. 1091 (SEQ ID NO:1091), FIG. 1093 (SEQ ID NO:1093), FIG. 1098 (SEQ ID NO:1098), FIG. 1100 (SEQ ID NO:1100), FIG. 1103 (SEQ ID NO:1103), FIG. 1105 (SEQ ID NO:1105), FIG. 1107 (SEQ ID NO:1107), FIG. 1110 (SEQ ID NO:110), FIG. 1112 (SEQ ID NO:1112), FIG. 1114 (SEQ ID NO:1114), FIG. 1116 (SEQ ID NO:1116), FIG. 1118 (SEQ ID NO:1118), FIG. 1120 (SEQ ID NO:1120), FIG. 1122 (SEQ ID NO:1122), FIG. 1124 (SEQ ID NO:1124), FIG. 1126 (SEQ ID NO:1126), FIG. 1128 (SEQ ID NO:1128), FIG. 1130 (SEQ ID NO:1130), FIG. 1132 (SEQ ID NO:1132), FIG. 1134 (SEQ ID NO:1134), FIG. 1136 (SEQ ID NO:1136), FIG. 1138 (SEQ ID NO:1138), FIG. 1140 (SEQ ID NO:1140), FIG. 1142 (SEQ ID NO:1142), FIG. 1144 (SEQ ID NO:1144), FIG. 1146 (SEQ ID NO:1146), FIG. 1148 (SEQ ID NO:1148), FIG. 1150 (SEQ ID NO:1150), FIG. 1153 (SEQ ID NO:1153), FIG. 1155 (SEQ ID NO:1155), FIG. 1157 (SEQ ID NO:1157), FIG. 1159 (SEQ ID NO:1159), FIG. 1161 (SEQ ID NO:1161), FIG. 1164 (SEQ ID NO:1164), FIG. 1166 (SEQ ID NO:1166), FIG. 1168 (SEQ ID NO:1168), FIG. 1170 (SEQ ID NO:1170), FIG. 1172 (SEQ ID NO:1172), FIG. 1174 (SEQ ID NO:1174), FIG. 1176 (SEQ ID NO:1176), FIG. 1178 (SEQ ID NO:1178), FIG. 1180 (SEQ ID NO:1180), FIG. 1182 (SEQ ID NO:1182), FIG. 1184 (SEQ ID NO:1184), FIG. 1186 (SEQ ID NO:1186), FIG. 1188 (SEQ ID NO:1188), FIG. 1190 (SEQ ID NO:1190), FIG. 1192 (SEQ ID NO:1192), FIG. 1194 (SEQ ID NO:1194), FIG. 1196 (SEQ ID NO:1196), FIG. 1198 (SEQ ID NO:1198), FIG. 1200 (SEQ ID NO:1200), FIG. 1202 (SEQ ID NO:1202), FIG. 1204 (SEQ ID NO:1204), FIG. 1206 (SEQ ID NO:1206), FIG. 1208 (SEQ ID NO:1208), FIG. 1210 (SEQ ID NO:1210), FIG. 1212 (SEQ ID NO:1212), FIG. 1214 (SEQ ID NO:1214), FIG. 1216 (SEQ ID NO:1216), FIG. 1218 (SEQ ID NO:1218), FIG. 1220 (SEQ ID NO:1220), FIG. 1222 (SEQ ID NO:1222), FIG. 1224 (SEQ ID NO:1224), FIG. 1226 (SEQ ID NO:1226), FIG. 1228 (SEQ ID NO:1228), FIG. 1230 (SEQ ID NO:1230), FIG. 1232 (SEQ ID NO:1232), FIG. 1234 (SEQ ID NO:1234), FIG. 1236 (SEQ ID NO:1236), FIG. 1238 (SEQ ID NO:1238), FIG. 1240 (SEQ ID NO:1240), FIG. 1242 (SEQ ID NO:1242), FIG. 1244 (SEQ ID NO:1244), FIG. 1246 (SEQ ID NO:1246), FIG. 1248 (SEQ ID NO:1248), FIG. 1250 (SEQ ID NO:1250), FIG. 1252 (SEQ ID NO:1252), FIG. 1254 (SEQ ID NO:1254), FIG. 1256 (SEQ ID NO:1256), FIG. 1258 (SEQ ID NO:1258), FIG. 1260 (SEQ ID NO:1260), FIG. 1262 (SEQ ID NO:1262), FIG. 1264 (SEQ ID NO:1264), FIG. 1266 (SEQ ID NO:1266), FIG. 1268 (SEQ ID NO:1268), FIG. 1270 (SEQ ID NO:1270), FIG. 1272 (SEQ ID NO:1272), FIG. 1274 (SEQ ID NO:1274), FIG. 1276 (SEQ ID NO:1276), FIG. 1278 (SEQ ID NO:1278), FIG. 1280 (SEQ ID NO:1280), FIG. 1282 (SEQ ID NO:1282), FIG. 1284 (SEQ ID NO:1284), FIG. 1286 (SEQ ID NO:1286), FIG. 1288 (SEQ ID NO:1288), FIG. 1290 (SEQ ID NO:1290), FIG. 1292 (SEQ ID NO:1292), FIG. 1294 (SEQ ID NO:1294), FIG. 1296 (SEQ ID NO:1296), FIG. 1298 (SEQ ID NO:1298), FIG. 1300 (SEQ ID NO:1300), FIG. 1302 (SEQ ID NO:1302), FIG. 1304 (SEQ ID NO:1304), FIG. 1306 (SEQ ID NO:1306), FIG. 1308 (SEQ ID NO:1308), FIG. 1310 (SEQ ID NO:1310), FIG. 1312 (SEQ ID NO:1312), FIG. 1314 (SEQ ID NO:1314), FIG. 1316 (SEQ ID NO:1316), FIG. 1318 (SEQ ID NO:1318), FIG. 1320 (SEQ ID NO:1320), FIG. 1322 (SEQ ID NO:1322), FIG. 1324 (SEQ ID NO:1324), FIG. 1326 (SEQ ID NO:1326), FIG. 1328 (SEQ ID NO:1328), FIG. 1330 (SEQ ID NO:1330), FIG. 1332 (SEQ ID NO:1332), FIG. 1334 (SEQ ID NO:1334), FIG. 1336 (SEQ ID NO:1336), FIG. 1338 (SEQ ID NO:1338), FIG. 1340 (SEQ ID NO:140), FIG. 1342 (SEQ ID NO:1342), FIG. 1344 (SEQ ID NO:1344), FIG. 1346 (SEQ ID NO:1346), FIG. 1348 (SEQ ID NO:1348), FIG. 1350 (SEQ ID NO:1350), FIG. 1352 (SEQ ID NO:1352), FIG. 1354 (SEQ ID NO:1354), FIG. 1356 (SEQ ID NO:1356), FIG. 1358 (SEQ ID NO:1358), FIG. 1360 (SEQ ID NO:1360), FIG. 1362 (SEQ ID NO:1362), FIG. 1364 (SEQ ID NO:1364), FIG. 1366 (SEQ ID NO:1366), FIG. 1368 (SEQ ID NO:1368), FIG. 1370 (SEQ ID NO:1370), FIG. 1372 (SEQ ID NO:1372), FIG. 1374 (SEQ ID NO:1374), FIG. 1376 (SEQ ID NO:1376), FIG. 1378 (SEQ ID NO:1378), FIG. 1380 (SEQ ID NO:1379), FIG. 1382 (SEQ ID NO:1382), FIG. 1384 (SEQ ID NO:1384), FIG. 1386 (SEQ ID NO:1386), FIG. 1388 (SEQ ID NO:1388), FIG. 1390 (SEQ ID NO:1390), FIG. 1392 (SEQ ID NO:1392), FIG. 1394 (SEQ ID NO:1394), FIG. 1396 (SEQ ID NO:1396), FIG. 1398 (SEQ ID NO:1398), FIG. 1400 (SEQ ID NO:1400), FIG. 1402 (SEQ ID NO:1402), FIG. 1404 (SEQ ID NO:1404), FIG. 1406 (SEQ ID NO:1406), FIG. 1408 (SEQ ID NO:1408), FIG. 1410 (SEQ ID NO:1410), FIG. 1412 (SEQ ID NO:1412), FIG. 1414 (SEQ ID NO:1414), FIG. 1416 (SEQ ID NO:1416), FIG. 1418 (SEQ ID NO:1418), FIG. 1420 (SEQ ID NO:1420), FIG. 1422 (SEQ ID NO:1422), FIG. 1425 (SEQ ID NO:1425), FIG. 1427 (SEQ ID NO:1427), FIG. 1429 (SEQ ID NO:1429), FIG. 1432 (SEQ ID NO:1432), FIG. 1434 (SEQ ID NO:1434), FIG. 1436 (SEQ ID NO:1436), FIG. 1438 (SEQ ID NO:1438), FIG. 1440 (SEQ ID NO:1440), FIG. 1442 (SEQ ID NO:1442), FIG. 1444 (SEQ ID NO:1444), FIG. 1446 (SEQ ID NO:1446), FIG. 1448 (SEQ ID NO:1448), FIG. 1450 (SEQ ID NO:1450), FIG. 1452 (SEQ ID NO:1452), FIG. 1454 (SEQ ID NO:1454), FIG. 1456 (SEQ ID NO:1456), FIG. 1458 (SEQ ID NO:1458), FIG. 1460 (SEQ ID NO:1460), FIG. 1462 (SEQ ID NO:1462), FIG. 1464 (SEQ ID NO:1464), FIG. 1466 (SEQ ID NO:1466), FIG. 1468 (SEQ ID NO:1468), FIG. 1470 (SEQ ID NO:1470), FIG. 1472 (SEQ ID NO:1472), FIG. 1474 (SEQ ID NO:1474), FIG. 1476 (SEQ ID NO:1476), FIG. 1478 (SEQ ID NO:1478), FIG. 1480 (SEQ ID NO:1480), FIG. 1482 (SEQ ID NO:1482), FIG. 1484 (SEQ ID NO:1484), FIG. 1486 (SEQ ID NO:1486), FIG. 1488 (SEQ ID NO:1488), FIG. 1490 (SEQ ID NO:1490), FIG. 1492 (SEQ ID NO:1492), FIG. 1494 (SEQ ID NO:1494), FIG. 1496 (SEQ ID NO:1496), FIG. 1498 (SEQ ID NO:1498), FIG. 1500 (SEQ ID NO:1500), FIG. 1502 (SEQ ID NO:1502), FIG. 1504 (SEQ ID NO:1504), FIG. 1506 (SEQ ID NO:1506), FIG. 1508 (SEQ ID NO:1508), FIG. 1510 (SEQ ID NO:1510), FIG. 1512 (SEQ ID NO:1512), FIG. 1514 (SEQ ID NO:1514), FIG. 1516 (SEQ ID NO:1516), FIG. 1518 (SEQ ID NO:1518), FIG. 1520 (SEQ ID NO:1520), FIG. 1522 (SEQ ID NO:1522), FIG. 1524 (SEQ ID NO:1524), FIG. 1526 (SEQ ID NO:1526), FIG. 1528 (SEQ ID NO:1528), FIG. 1530 (SEQ ID NO:1530), FIG. 1532 (SEQ ID NO:1532), FIG. 1534 (SEQ ID NO:1534), FIG. 1536 (SEQ ID NO:1536), FIG. 1538 (SEQ ID NO:1538), FIG. 1540 (SEQ ID NO:1540), FIG. 1542 (SEQ ID NO:1542), FIG. 1544 (SEQ ID NO:1544), FIG. 1546 (SEQ ID NO:1546), FIG. 1548 (SEQ ID NO:1548), FIG. 1550 (SEQ ID NO:1550), FIG. 1552 (SEQ ID NO:1552), FIG. 1554 (SEQ ID NO:1554), FIG. 1556 (SEQ ID NO:1556), FIG. 1558 (SEQ ID NO:1558), FIG. 1560 (SEQ ID NO:1560), FIG. 1562 (SEQ ID NO:1562), FIG. 1564 (SEQ ID NO:1654), FIG. 1566 (SEQ ID NO:1566), FIG. 1568 (SEQ ID NO:1568), FIG. 1570 (SEQ ID NO:1570), FIG. 1572 (SEQ ID NO:1572), FIG. 1574 (SEQ ID NO:1574), FIG. 1576 (SEQ ID NO:1576), FIG. 1578 (SEQ ID NO:1578), FIG. 1580 (SEQ ID NO:1580), FIG. 1582 (SEQ ID NO:1582), FIG. 1585 (SEQ ID NO:1585), FIG. 1587 (SEQ ID NO:1587), FIG. 1590 (SEQ ID NO:1590), FIG. 1592 (SEQ ID NO:1592), FIG. 1594 (SEQ ID NO:1594), FIG. 1597 (SEQ ID NO:1597), FIG. 1599 (SEQ ID NO:1599), FIG. 1601 (SEQ ID NO:1601), FIG. 1603 (SEQ ID NO:1603), FIG. 1605 (SEQ ID NO:1605), FIG. 1607 (SEQ ID NO:1607), FIG. 1610 (SEQ ID NO:1610), FIG. 1613 (SEQ ID NO:1613), FIG. 1615 (SEQ ID NO:1615), FIG. 1617 (SEQ ID NO:1617), FIG. 1619 (SEQ ID NO:1619), FIG. 1621 (SEQ ID NO:1621), FIG. 1623 (SEQ ID NO:1623), FIG. 1625 (SEQ ID NO:1625), FIG. 1627 (SEQ ID NO:1627), FIG. 1629 (SEQ ID NO:1629), FIG. 1631 (SEQ ID NO:1631), FIG. 1633 (SEQ ID NO:1633), FIG. 1635 (SEQ ID NO:1635), FIG. 1637 (SEQ ID NO:1637), FIG. 1639 (SEQ ID NO:1639), FIG. 1641 (SEQ ID NO:1641), FIG. 1643 (SEQ ID NO:1643), FIG. 1645 (SEQ ID NO:1645), FIG. 1647 (SEQ ID NO:1647), FIG. 1650 (SEQ ID NO:1650), FIG. 1654 (SEQ ID NO:1654), FIG. 1656 (SEQ ID NO:1656), FIG. 1658 (SEQ ID NO:1658), FIG. 1660 (SEQ ID NO:1660), FIG. 1662 (SEQ ID NO:1662), FIG. 1664 (SEQ ID NO:1664), FIG. 1666 (SEQ ID NO:1666), FIG. 1668 (SEQ ID NO:1668), FIG. 1670 (SEQ ID NO:1670), FIG. 1672 (SEQ ID NO:1672), FIG. 1674 (SEQ ID NO:1674), FIG. 1676 (SEQ ID NO:1676), FIG. 1678 (SEQ ID NO:1678), FIG. 1680 (SEQ ID NO:1680), FIG. 1682 (SEQ ID NO:1682), FIG. 1686 (SEQ ID NO:1686), FIG. 1688 (SEQ ID NO:1688), FIG. 1691 (SEQ ID NO:1691), FIG. 1693 (SEQ ID NO:1693), FIG. 1695 (SEQ ID NO:1695), FIG. 1697 (SEQ ID NO:1697), FIG. 1699 (SEQ ID NO:1699), FIG. 1701 (SEQ ID NO:1701), FIG. 1703 (SEQ ID NO:1703), FIG. 1705 (SEQ ID NO:1705), FIG. 1708 (SEQ ID NO:1708), FIG. 1710 (SEQ ID NO:1710), FIG. 1712 (SEQ ID NO:1712), FIG. 1714 (SEQ ID NO:1714), FIG. 1716 (SEQ ID NO:1716), FIG. 1718 (SEQ ID NO:1718), FIG. 1720 (SEQ ID NO:1720), FIG. 1722 (SEQ ID NO:1722), FIG. 1725 (SEQ ID NO:1725), FIG. 1727 (SEQ ID NO:1727), FIG. 1729 (SEQ ID NO:1729), FIG. 1731 (SEQ ID NO:1731), FIG. 1733 (SEQ ID NO:1733), FIG. 1735 (SEQ ID NO:1735), FIG. 1738 (SEQ ID NO:1738), FIG. 1740 (SEQ ID NO:1740), FIG. 1742 (SEQ ID NO:1742), FIG. 1744 (SEQ ID NO:1744), FIG. 1746 (SEQ ID NO:1746), FIG. 1748 (SEQ ID NO:1748), FIG. 1750 (SEQ ID NO:1750), FIG. 1752 (SEQ ID NO:1752), FIG. 1754 (SEQ ID NO:1754), FIG. 1756 (SEQ ID NO:1756), FIG. 1758 (SEQ ID NO:1758), FIG. 1760 (SEQ ID NO:1760), FIG. 1762 (SEQ ID NO:1762), FIG. 1764 (SEQ ID NO:1764), FIG. 1767 (SEQ ID NO:1767), FIG. 1769 (SEQ ID NO:1769), FIG. 1771 (SEQ ID NO:1771), FIG. 1774 (SEQ ID NO:1774), FIG. 1776 (SEQ ID NO:1776), FIG. 1779 (SEQ ID NO:1779), FIG. 1782 (SEQ ID NO:1782), FIG. 1784 (SEQ ID NO:1784), FIG. 1786 (SEQ ID NO:1786), FIG. 1789 (SEQ ID NO:1789), FIG. 1791 (SEQ ID NO:1791), FIG. 1794 (SEQ ID NO:1794), FIG. 1796 (SEQ ID NO:1796), FIG. 1798 (SEQ ID NO:1798), FIG. 1800 (SEQ ID NO:1800), FIG. 1802 (SEQ ID NO:1802), FIG. 1804 (SEQ ID NO:1804), FIG. 1806 (SEQ ID NO:1806), FIG. 1808 (SEQ ID NO:1808), FIG. 1810 (SEQ ID NO:1810), FIG. 1812 (SEQ ID NO:1812), FIG. 1814 (SEQ ID NO:1814), FIG. 1816 (SEQ ID NO:1816), FIG. 1818 (SEQ ID NO:1818), FIG. 1820 (SEQ ID NO:1820), FIG. 1822 (SEQ ID NO:1822), FIG. 1824 (SEQ ID NO:1824), FIG. 1826 (SEQ ID NO:1826), FIG. 1828 (SEQ ID NO:1828), FIG. 1830 (SEQ ID NO:1830), FIG. 1832 (SEQ ID NO:1832), FIG. 1834 (SEQ ID NO:1834), FIG. 1836 (SEQ ID NO:1836), FIG. 1838 (SEQ ID NO:1838), FIG. 1840 (SEQ ID NO:1840), FIG. 1842 (SEQ ID NO:1842), FIG. 1844 (SEQ ID NO:1844), FIG. 1846 (SEQ ID NO:1846), FIG. 1848 (SEQ ID NO:1848), FIG. 1850 (SEQ ID NO:1850), FIG. 1852 (SEQ ID NO:1852), FIG. 1856 (SEQ ID NO:1856), FIG. 1858 (SEQ ID NO:1858), FIG. 1860 (SEQ ID NO:1860), FIG. 1862 (SEQ ID NO:1862), FIG. 1864 (SEQ ID NO:1864), FIG. 1867 (SEQ ID NO:1867), FIG. 1869 (SEQ ID NO:1869), FIG. 1871 (SEQ ID NO:1871), FIG. 1873 (SEQ ID NO:1873), FIG. 1876 (SEQ ID NO:1876), FIG. 1878 (SEQ ID NO:1878), FIG. 1880 (SEQ ID NO:1880), FIG. 1883 (SEQ ID NO:1883), FIG. 1885 (SEQ ID NO:1885), FIG. 1887 (SEQ ID NO:1887), FIG. 1890 (SEQ ID NO:1890), FIG. 1892 (SEQ ID NO:1892), FIG. 1894 (SEQ ID NO:1894), FIG. 1896 (SEQ ID NO:1896), FIG. 1898 (SEQ ID NO:1898), FIG. 1900 (SEQ ID NO:1900), FIG. 1902 (SEQ ID NO:1902), FIG. 1904 (SEQ ID NO:1904), FIG. 1906 (SEQ ID NO:1906), FIG. 1908 (SEQ ID NO:1908), FIG. 1910 (SEQ ID NO:1910), FIG. 1912 (SEQ ID NO:1912), FIG. 1914 (SEQ ID NO:1914), FIG. 1916 (SEQ ID NO:1916), FIG. 1918 (SEQ ID NO:1918), FIG. 1920 (SEQ ID NO:1920), FIG. 1922 (SEQ ID NO:1922), FIG. 1924 (SEQ ID NO:1924), FIG. 1926 (SEQ ID NO:1926), FIG. 1928 (SEQ ID NO:1928), FIG. 1930 (SEQ ID NO:1930), FIG. 1932 (SEQ ID NO:1932), FIG. 1934 (SEQ ID NO:1934), FIG. 1936 (SEQ ID NO:1936), FIG. 1938 (SEQ ID NO:1938), FIG. 1940 (SEQ ID NO:1940), FIG. 1942 (SEQ ID NO:1942), FIG. 1944 (SEQ ID NO:1944), FIG. 1946 (SEQ ID NO:1946), FIG. 1948 (SEQ ID NO:1948), FIG. 1951 (SEQ ID NO:1951), FIG. 1953 (SEQ ID NO:1953), FIG. 1955 (SEQ ID NO:1955), FIG. 1957 (SEQ ID NO:1957), FIG. 1959 (SEQ ID NO:1959), FIG. 1961 (SEQ ID NO:1961), FIG. 1964 (SEQ ID NO:1964), FIG. 1966 (SEQ ID NO:1966), FIG. 1968 (SEQ ID NO:1968), FIG. 1970 (SEQ ID NO:1970), FIG. 1972 (SEQ ID NO:1972), FIG. 1974 (SEQ ID NO:1974), FIG. 1976 (SEQ ID NO:1976), FIG. 1978 (SEQ ID NO:1978), FIG. 1980 (SEQ ID NO:1980), FIG. 1982 (SEQ ID NO:1982), FIG. 1984 (SEQ ID NO:1984), FIG. 1986 (SEQ ID NO:1986), FIG. 1988 (SEQ ID NO:1988), FIG. 1990 (SEQ ID NO:1990), FIG. 1992 (SEQ ID NO:1992), FIG. 1994 (SEQ ID NO:1994), FIG. 1996 (SEQ ID NO:1996), FIG. 1998 (SEQ ID NO:1998), FIG. 2000 (SEQ ID NO:2000), FIG. 2002 (SEQ ID NO:2002), FIG. 2004 (SEQ ID NO:2004), FIG. 2006 (SEQ ID NO:2006), FIG. 2008 (SEQ ID NO:2008), FIG. 2010 (SEQ ID NO:2010), FIG. 2012 (SEQ ID NO:2012), FIG. 2014 (SEQ ID NO:2014), FIG. 2016 (SEQ ID NO:2016), FIG. 2018 (SEQ ID NO:2018), FIG. 2020 (SEQ ID NO:2020), FIG. 2022 (SEQ ID NO:2022), FIG. 2024 (SEQ ID NO:2024), FIG. 2026 (SEQ ID NO:2026), FIG. 2028 (SEQ ID NO:2028), FIG. 2030 (SEQ ID NO:2030), FIG. 2032 (SEQ ID NO:2032), FIG. 2034 (SEQ ID NO:2034), FIG. 2036 (SEQ ID NO:2036), FIG. 2038 (SEQ ID NO:2038), FIG. 2040 (SEQ ID NO:2040), FIG. 2042 (SEQ ID NO:2042), FIG. 2044 (SEQ ID NO:2044), FIG. 2046 (SEQ ID NO:2046), FIG. 2048 (SEQ ID NO:2048), FIG. 2050 (SEQ ID NO:2050), FIG. 2052 (SEQ ID NO:5052), FIG. 2054 (SEQ ID NO:2054), FIG. 2056 (SEQ ID NO:2056), FIG. 2058 (SEQ ID NO:2058), FIG. 2060 (SEQ ID NO:2060), FIG. 2062 (SEQ ID NO:2062), FIG. 2064 (SEQ ID NO:2064), FIG. 2066 (SEQ ID NO:2066), FIG. 2068 (SEQ ID NO:2068), FIG. 2070 (SEQ ID NO:2070), FIG. 2072 (SEQ ID NO:2072), FIG. 2074 (SEQ ID NO:2074), FIG. 2076 (SEQ ID NO:2076), FIG. 2078 (SEQ ID NO:2078), FIG. 2080 (SEQ ID NO:2080), FIG. 2082 (SEQ ID NO:2082), FIG. 2084 (SEQ ID NO:2084), FIG. 2086 (SEQ ID NO:2086), FIG. 2088 (SEQ ID NO:2088), FIG. 2090 (SEQ ID NO:2090), FIG. 2092 (SEQ ID NO:2092), FIG. 2094 (SEQ ID NO:2094), FIG. 2096 (SEQ ID NO:2096), FIG. 2098 (SEQ ID NO:2098), FIG. 2100 (SEQ ID NO:2100), FIG. 2102 (SEQ ID NO:2102), FIG. 2104 (SEQ ID NO:2104), FIG. 2106 (SEQ ID NO:2106), FIG. 2108 (SEQ ID NO:2108), FIG. 2110 (SEQ ID NO:2110), FIG. 2112 (SEQ ID NO:2112), FIG. 2114 (SEQ ID NO:2114), FIG. 2116 (SEQ ID NO:2116), FIG. 2118 (SEQ ID NO:2118), FIG. 2120 (SEQ ID NO:2120), FIG. 2122 (SEQ ID NO:2122), FIG. 2124 (SEQ ID NO:2124), FIG. 2126 (SEQ ID NO:2126), FIG. 2128 (SEQ ID NO:2128), FIG. 2130 (SEQ ID NO:2130), FIG. 2132 (SEQ ID NO:2132), FIG. 2134 (SEQ ID NO:2134), FIG. 2136 (SEQ ID NO:2136), FIG. 2139 (SEQ ID NO:2139), FIG. 2141 (SEQ ID NO:2141), FIG. 2143 (SEQ ID NO:2143), FIG. 2145 (SEQ ID NO:2145), FIG. 2149 (SEQ ID NO:2149), FIG. 2151 (SEQ ID NO:2151), FIG. 2153 (SEQ ID NO:2153), FIG. 2155 (SEQ ID NO:2155), FIG. 2157 (SEQ ID NO:2157), FIG. 2159 (SEQ ID NO:2159), FIG. 2161 (SEQ ID NO:2161), FIG. 2163 (SEQ ID NO:2163), FIG. 2165 (SEQ ID NO:2165), FIG. 2167 (SEQ ID NO:2167), FIG. 2169 (SEQ ID NO:2169), FIG. 2171 (SEQ ID NO:2171), FIG. 2173 (SEQ ID NO:2173), FIG. 2175 (SEQ ID NO:2175), FIG. 2177 (SEQ ID NO:2177), FIG. 2179 (SEQ ID NO:2179), FIG. 2181 (SEQ ID NO:2181), FIG. 2183 (SEQ ID NO:2183), FIG. 2185 (SEQ ID NO:2185), FIG. 2187 (SEQ ID NO:2187), FIG. 2189 (SEQ ID NO:2189), FIG. 2191 (SEQ ID NO:2191), FIG. 2193 (SEQ ID NO:2193), FIG. 2195 (SEQ ID NO:2195), FIG. 2197 (SEQ ID NO:2197), FIG. 2199 (SEQ ID NO:2199), FIG. 2201 (SEQ ID NO:2201), FIG. 2203 (SEQ ID NO:2203), FIG. 2205 (SEQ ID NO:2205), FIG. 2207 (SEQ ID NO:2207), FIG. 2209 (SEQ ID NO:2209), FIG. 2211 (SEQ ID NO:2211), FIG. 2213 (SEQ ID NO:2213), FIG. 2215 (SEQ ID NO:2215), FIG. 2218 (SEQ ID NO:2218), FIG. 2220 (SEQ ID NO:2220), FIG. 2222 (SEQ ID NO:2222), FIG. 2224 (SEQ ID NO:2224), FIG. 2226 (SEQ ID NO:2226), FIG. 2228 (SEQ ID NO:2228), FIG. 2231 (SEQ ID NO:2231), FIG. 2233 (SEQ ID NO:2233), FIG. 2235 (SEQ ID NO:2235), FIG. 2237 (SEQ ID NO:2237), FIG. 2239 (SEQ ID NO:2239), FIG. 2241 (SEQ ID NO:2241), FIG. 2243 (SEQ ID NO:2243), FIG. 2245 (SEQ ID NO:2245), FIG. 2247 (SEQ ID NO:2247), FIG. 2249 (SEQ ID NO:2249), FIG. 2251 (SEQ ID NO:2251), FIG. 2253 (SEQ ID NO:2253), FIG. 2255 (SEQ ID NO:2255), FIG. 2257 (SEQ ID NO:2257), FIG. 2259 (SEQ ID NO:2259), FIG. 2261 (SEQ ID NO:2261), FIG. 2263 (SEQ ID NO:2263), FIG. 2265 (SEQ ID NO:2265), FIG. 2267 (SEQ ID NO:2267), FIG. 2269 (SEQ ID NO:2269), FIG. 2271 (SEQ ID NO:2271), FIG. 2273 (SEQ ID NO:2273), FIG. 2275 (SEQ ID NO:2275), FIG. 2277 (SEQ ID NO:2277), FIG. 2279 (SEQ ID NO:2279), FIG. 2281 (SEQ ID NO:2281), FIG. 2283 (SEQ ID NO:2283), FIG. 2285 (SEQ ID NO:2285), FIG. 2287 (SEQ ID NO:2287), FIG. 2289 (SEQ ID NO:2289), FIG. 2291 (SEQ ID NO:2291), FIG. 2293 (SEQ ID NO:2293), FIG. 2295 (SEQ ID NO:2295), FIG. 2297 (SEQ ID NO:2297), FIG. 2299 (SEQ ID NO:2299), FIG. 2302 (SEQ ID NO:2302), FIG. 2304 (SEQ ID NO:2304), FIG. 2306 (SEQ ID NO:2306), FIG. 2310 (SEQ ID NO:2310), FIG. 2313 (SEQ ID NO:2313), FIG. 2315 (SEQ ID NO:2315), FIG. 2317 (SEQ ID NO:2317), FIG. 2319 (SEQ ID NO:2319), FIG. 2321 (SEQ ID NO:2321), FIG. 2324 (SEQ ID NO:2324), FIG. 2326 (SEQ ID NO:2326), FIG. 2328 (SEQ ID NO:2328), FIG. 2330 (SEQ ID NO:2330), FIG. 2332 (SEQ ID NO:2332), FIG. 2334 (SEQ ID NO:2334), FIG. 2336 (SEQ ID NO:2336), FIG. 2338 (SEQ ID NO:2338), FIG. 2340 (SEQ ID NO:2340), FIG. 2342 (SEQ ID NO:2342), FIG. 2344 (SEQ ID NO:2344), FIG. 2347 (SEQ ID NO:2347), FIG. 2350 (SEQ ID NO:2350), FIG. 2352 (SEQ ID NO:2352), FIG. 2354 (SEQ ID NO:2354), FIG. 2356 (SEQ ID NO:2356), FIG. 2358 (SEQ ID NO:2358), FIG. 2360 (SEQ ID NO:2360), FIG. 2362 (SEQ ID NO:2362), FIG. 2364 (SEQ ID NO:2364), FIG. 2366 (SEQ ID NO:2366), FIG. 2368 (SEQ ID NO:2368), FIG. 2370 (SEQ ID NO:2370), FIG. 2372 (SEQ ID NO:2372), FIG. 2374 (SEQ ID NO:2374), FIG. 2376 (SEQ ID NO:2376), FIG. 2378 (SEQ ID NO:2378), FIG. 2380 (SEQ ID NO:2380), FIG. 2382 (SEQ ID NO:2382), FIG. 2384 (SEQ ID NO:2384), FIG. 2386 (SEQ ID NO:2386), FIG. 2388 (SEQ ID NO:2388), FIG. 2390 (SEQ ID NO:2390), FIG. 2392 (SEQ ID NO:2392), FIG. 2394 (SEQ ID NO:2394), FIG. 2396 (SEQ ID NO:2396), FIG. 2398 (SEQ ID NO:2398), FIG. 2400 (SEQ ID NO:2400), FIG. 2402 (SEQ ID NO:2402), FIG. 2404 (SEQ ID NO:2404), FIG. 2407 (SEQ ID NO:2407), FIG. 2409 (SEQ ID NO:2409), FIG. 2412 (SEQ ID NO:2412), FIG. 2415 (SEQ ID NO:2415), FIG. 2419 (SEQ ID NO:2419), FIG. 2423 (SEQ ID NO:2423), FIG. 2425 (SEQ ID NO:2425), FIG. 2427 (SEQ ID NO:2427), FIG. 2429 (SEQ ID NO:2429), FIG. 2431 (SEQ ID NO:2431), FIG. 2433 (SEQ ID NO:2433), FIG. 2435 (SEQ ID NO:2435), FIG. 2437 (SEQ ID NO:2437), FIG. 2439 (SEQ ID NO:2439), FIG. 2441 (SEQ ID NO:2441), FIG. 2443 (SEQ ID NO:2443), FIG. 2445 (SEQ ID NO:2445), FIG. 2448 (SEQ ID NO:2448), FIG. 2450 (SEQ ID NO:2450), FIG. 2452 (SEQ ID NO:2452), FIG. 2454 (SEQ ID NO:2454), FIG. 2457 (SEQ ID NO:2457), FIG. 2459 (SEQ ID NO:2459), FIG. 2461 (SEQ ID NO:2461), FIG. 2465 (SEQ ID NO:2465), FIG. 2468 (SEQ ID NO:2468), FIG. 2472 (SEQ ID NO:2472), FIG. 2474 (SEQ ID NO:2474), FIG. 2482 (SEQ ID NO:2482) or FIG. 2484 (SEQ ID NO:2484) (a) in a test sample of tissue cells obtained from the mammal, and (b) in a control sample of known normal tissue cells of the same cell type, wherein a higher or lower level of expression of said gene in the test sample as compared to the control sample is indicative of the presence of psoriasis in the mammal from which the test tissue cells were obtained.

21. A method of diagnosing an psoriasis in a mammal, said method comprising (a) contacting a PRO polypeptide of the invention as described in FIG. 2 (SEQ ID NO:2), FIG. 4 (SEQ ID NO:4), FIG. 6 (SEQ ID NO:6), FIG. 8 (SEQ ID NO:8), FIG. 10 (SEQ ID NO:10), FIG. 12 (SEQ ID NO:12), FIG. 14 (SEQ ID NO:14), FIG. 16 (SEQ ID NO:16), FIG. 18 (SEQ ID NO:18), FIG. 20 (SEQ ID NO:20), FIG. 22 (SEQ ID NO:22), FIG. 24 (SEQ ID NO:24), FIG. 26 (SEQ ID NO:26), FIG. 28 (SEQ ID NO:28), FIG. 30 (SEQ ID NO:30), FIG. 32 (SEQ ID NO:32), FIG. 34 (SEQ ID NO:34), FIG. 36 (SEQ ID NO:36), FIG. 38 (SEQ ID NO:38), FIG. 40 (SEQ ID NO:40), FIG. 42 (SEQ ID NO:42), FIG. 43 (SEQ ID NO:43), FIG. 46 (SEQ ID NO:46), FIG. 48 (SEQ ID NO:48), FIG. 50 (SEQ ID NO:50), FIG. 52 (SEQ ID NO:52), FIG. 54 (SEQ ID NO:54), FIG. 56 (SEQ ID NO:56), FIG. 58 (SEQ ID NO:58), FIG. 60 (SEQ ID NO:60), FIG. 62 (SEQ ID NO:62), FIG. 64 (SEQ ID NO:64), FIG. 66 (SEQ ID NO:66), FIG. 68 (SEQ ID NO:68), FIG. 70 (SEQ ID NO:70), FIG. 72 (SEQ ID NO:72), FIG. 74 (SEQ ID NO:74), FIG. 76 (SEQ ID NO:76), FIG. 78 (SEQ ID NO:78), FIG. 80 (SEQ ID NO:80), FIG. 80 (SEQ ID NO:80), FIG. 84 (SEQ ID NO:84), FIG. 86 (SEQ ID NO:86), FIG. 88 (SEQ ID NO:88), FIG. 90 (SEQ ID NO:90), FIG. 92 (SEQ ID NO:92), FIG. 94 (SEQ ID NO:94), FIG. 96 (SEQ ID NO:96), FIG. 98 (SEQ ID NO:98), FIG. 100 (SEQ ID NO:100), FIG. 102 (SEQ ID NO:102), FIG. 104 (SEQ ID NO:104), FIG. 106 (SEQ ID NO:106), FIG. 108 (SEQ ID NO:108), FIG. 108 (SEQ ID NO:108), FIG. 112 (SEQ ID NO:112), FIG. 115 (SEQ ID NO:115), FIG. 117 (SEQ ID NO:117), FIG. 119 (SEQ ID NO:119), FIG. 121 (SEQ ID NO:121), FIG. 123 (SEQ ID NO:123), FIG. 125 (SEQ ID NO:125), FIG. 127 (SEQ ID NO:127), FIG. 129 (SEQ ID NO:129), FIG. 131 (SEQ ID NO:131), FIG. 133 (SEQ ID NO:133), FIG. 135 (SEQ ID NO:135), FIG. 137 (SEQ ID NO:137), FIG. 139 (SEQ ID NO:139), FIG. 141 (SEQ ID NO:141), FIG. 143 (SEQ ID NO:143), FIG. 145 (SEQ ID NO:145), FIG. 147 (SEQ ID NO:147), FIG. 149 (SEQ ID NO:149), FIG. 151 (SEQ ID NO:151), FIG. 153 (SEQ ID NO:153), FIG. 155 (SEQ ID NO:155), FIG. 157 (SEQ ID NO:157), FIG. 159 (SEQ ID NO:159), FIG. 161 (SEQ ID NO:161), FIG. 163 (SEQ ID NO:163), FIG. 165 (SEQ ID NO:165), FIG. 167 (SEQ ID NO:167), FIG. 169 (SEQ ID NO:169), FIG. 171 (SEQ ID NO:171), FIG. 173 (SEQ ID NO:173), FIG. 175 (SEQ ID NO:1.75), FIG. 177 (SEQ ID NO:177), FIG. 179 (SEQ ID NO:179), FIG. 181 (SEQ ID NO:181), FIG. 183 (SEQ ID NO:183), FIG. 185 (SEQ ID NO:185), FIG. 187 (SEQ ID NO:187), FIG. 189 (SEQ ID NO:189), FIG. 191 (SEQ ID NO:191), FIG. 194 (SEQ ID NO:194), FIG. 196 (SEQ ID NO:196), FIG. 198 (SEQ ID NO:198), FIG. 200 (SEQ ID NO:200), FIG. 202 (SEQ ID NO:202), FIG. 204 (SEQ ID NO:204), FIG. 206 (SEQ ID NO:206), FIG. 208 (SEQ ID NO:208), FIG. 210 (SEQ ID NO:210), FIG. 212 (SEQ ID NO:212), FIG. 214 (SEQ ID NO:214), FIG. 216 (SEQ ID NO:216), FIG. 218 (SEQ ID NO:218), FIG. 221 (SEQ ID NO:221), FIG. 223 (SEQ ID NO:223), FIG. 225 (SEQ ID NO:225), FIG. 227 (SEQ ID NO:227), FIG. 229 (SEQ ID NO:229), FIG. 231 (SEQ ID NO:231), FIG. 233 (SEQ ID NO:233), FIG. 235 (SEQ ID NO:235), FIG. 237 (SEQ ID NO:237), FIG. 239 (SEQ ID NO:239), FIG. 241 (SEQ ID NO:241), FIG. 243 (SEQ ID NO:243), FIG. 245 (SEQ ID NO:245), FIG. 247 (SEQ ID NO:247), FIG. 249 (SEQ ID NO:249), FIG. 251 (SEQ ID NO:251), FIG. 253 (SEQ ID NO:253), FIG. 255 (SEQ ID NO:255), FIG. 257 (SEQ ID NO:257), FIG. 259 (SEQ ID NO:259), FIG. 261 (SEQ ID NO:261), FIG. 263 (SEQ ID NO:263), FIG. 265 (SEQ ID NO:265), FIG. 267 (SEQ ID NO:267), FIG. 269 (SEQ ID NO:269), FIG. 272 (SEQ ID NO:272), FIG. 274 (SEQ ID NO:274), FIG. 276 (SEQ ID NO:276), FIG. 278 (SEQ ID NO:278), FIG. 280 (SEQ ID NO:280), FIG. 282 (SEQ ID NO:282), FIG. 284 (SEQ ID NO:284), FIG. 286 (SEQ ID NO:286), FIG. 288 (SEQ ID NO:288), FIG. 290 (SEQ ID NO:290), FIG. 292 (SEQ ID NO:292), FIG. 294 (SEQ ID NO:294), FIG. 296 (SEQ ID NO:296), FIG. 298 (SEQ ID NO:298), FIG. 300 (SEQ ID NO:300), FIG. 302 (SEQ ID NO:302), FIG. 304 (SEQ ID NO:304), FIG. 306 (SEQ ID NO:306), FIG. 308 (SEQ ID NO:308), FIG. 310 (SEQ ID NO:310), FIG. 312 (SEQ ID NO:312), FIG. 314 (SEQ ID NO:314), FIG. 316 (SEQ ID NO:316), FIG. 318 (SEQ ID NO:318), FIG. 320 (SEQ ID NO:320), FIG. 322 (SEQ ID NO:322), FIG. 324 (SEQ ID NO:324), FIG. 326 (SEQ ID NO:326), FIG. 328 (SEQ ID NO:328), FIG. 330 (SEQ ID NO:330), FIG. 332 (SEQ ID NO:332), FIG. 334 (SEQ ID NO:334), FIG. 336 (SEQ ID NO:336), FIG. 338 (SEQ ID NO:338), FIG. 340 (SEQ ID NO:340), FIG. 342 (SEQ ID NO:342), FIG. 344 (SEQ ID NO:344), FIG. 346 (SEQ ID NO:346), FIG. 348 (SEQ ID NO:348), FIG. 350 (SEQ ID NO:350), FIG. 352 (SEQ ID NO:352), FIG. 354 (SEQ ID NO:354), FIG. 356 (SEQ ID NO:356), FIG. 358 (SEQ ID NO:358), FIG. 360 (SEQ ID NO:360), FIG. 362 (SEQ ID NO:362), FIG. 364 (SEQ ID NO:364), FIG. 366 (SEQ ID NO:366), FIG. 368 (SEQ ID NO:368), FIG. 370 (SEQ ID NO:370), FIG. 372 (SEQ ID NO:372), FIG. 374 (SEQ ID NO:374), FIG. 376 (SEQ ID NO:376), FIG. 378 (SEQ ID NO:378), FIG. 380 (SEQ ID NO:380), FIG. 382 (SEQ ID NO:382), FIG. 384 (SEQ ID NO:384), FIG. 386 (SEQ ID NO:386), FIG. 388 (SEQ ID NO:388), FIG. 390 (SEQ ID NO:390), FIG. 392 (SEQ ID NO:392), FIG. 394 (SEQ ID NO:394), FIG. 396 (SEQ ID NO:396), FIG. 398 (SEQ ID NO:398), FIG. 400 (SEQ ID NO:400), FIG. 402 (SEQ ID NO:402), FIG. 404 (SEQ ID NO:404), FIG. 406 (SEQ ID NO:406), FIG. 408 (SEQ ID NO:408), FIG. 410 (SEQ ID NO:410), FIG. 412 (SEQ ID NO:412), FIG. 414 (SEQ ID NO:414), FIG. 416 (SEQ ID NO:416), FIG. 418 (SEQ ID NO:418), FIG. 420 (SEQ ID NO:420), FIG. 422 (SEQ ID NO:422), FIG. 424 (SEQ ID NO:424), FIG. 426 (SEQ ID NO:426), FIG. 428 (SEQ ID NO:428), FIG. 430 (SEQ ID NO:430), FIG. 432 (SEQ ID NO:432), FIG. 434 (SEQ ID NO:434), FIG. 436 (SEQ ID NO:436), FIG. 438 (SEQ ID NO:438), FIG. 440 (SEQ ID NO:440), FIG. 442 (SEQ ID NO:442), FIG. 444 (SEQ ID NO:444), FIG. 446 (SEQ ID NO:446), FIG. 448 (SEQ ID NO:448), FIG. 450 (SEQ ID NO:450), FIG. 452 (SEQ ID NO:452), FIG. 454 (SEQ ID NO:454), FIG. 456 (SEQ ID NO:456), FIG. 458 (SEQ ID NO:458), FIG. 460 (SEQ ID NO:460), FIG. 462 (SEQ ID NO:462), FIG. 464 (SEQ ID NO:464), FIG. 466 (SEQ ID NO:466), FIG. 467 (SEQ ID NO:467), FIG. 470 (SEQ ID NO:470), FIG. 472 (SEQ ID NO:472), FIG. 474 (SEQ ID NO:474), FIG. 476 (SEQ ID NO:476), FIG. 478 (SEQ ID NO:478), FIG. 480 (SEQ ID NO:480), FIG. 482 (SEQ ID NO:482), FIG. 484 (SEQ ID NO:484), FIG. 486 (SEQ ID NO:486), FIG. 488 (SEQ ID NO:488), FIG. 490 (SEQ ID NO:490), FIG. 492 (SEQ ID NO:492), FIG. 494 (SEQ ID NO:494), FIG. 496 (SEQ ID NO:496), FIG. 498 (SEQ ID NO:498), FIG. 500 (SEQ ID NO:500), FIG. 502 (SEQ ID NO:502), FIG. 504 (SEQ ID NO:504), FIG. 506 (SEQ ID NO:506), FIG. 508 (SEQ ID NO:508), FIG. 510 (SEQ ID NO:510), FIG. 512 (SEQ ID NO:512), FIG. 514 (SEQ ID NO:514), FIG. 516 (SEQ ID NO:516), FIG. 518 (SEQ ID NO:518), FIG. 520 (SEQ ID NO:520), FIG. 522 (SEQ ID NO:522), FIG. 524 (SEQ ID NO:524), FIG. 526 (SEQ ID NO:526), FIG. 528 (SEQ ID NO:528), FIG. 530 (SEQ ID NO:530), FIG. 532 (SEQ ID NO:532), FIG. 534 (SEQ ID NO:534), FIG. 536 (SEQ ID NO:536), FIG. 538 (SEQ ID NO:538), FIG. 540 (SEQ ID NO:540), FIG. 542 (SEQ ID NO:542), FIG. 544 (SEQ ID NO:544), FIG. 546 (SEQ ID NO:546), FIG. 548 (SEQ ID NO:548), FIG. 550 (SEQ ID NO:550), FIG. 552 (SEQ ID NO:552), FIG. 554 (SEQ ID NO:554), FIG. 556 (SEQ ID NO:556), FIG. 558 (SEQ ID NO:558), FIG. 560 (SEQ ID NO:560), FIG. 562 (SEQ ID NO:562), FIG. 564 (SEQ ID NO:564), FIG. 566 (SEQ ID NO:566), FIG. 568 (SEQ ID NO:568), FIG. 570 (SEQ ID NO:570), FIG. 572 (SEQ ID NO:572), FIG. 574 (SEQ ID NO:574), FIG. 576 (SEQ ID NO:576), FIG. 578 (SEQ ID NO:578), FIG. 580 (SEQ ID NO:580), FIG. 582 (SEQ ID NO:582), FIG. 584 (SEQ ID NO:584), FIG. 586 (SEQ ID NO:586), FIG. 588 (SEQ ID NO:588), FIG. 590 (SEQ ID NO:590), FIG. 592 (SEQ ID NO:592), FIG. 594 (SEQ ID NO:594), FIG. 596 (SEQ ID NO:596), FIG. 598 (SEQ ID NO:598), FIG. 600 (SEQ ID NO:600), FIG. 602 (SEQ ID NO:602), FIG. 604 (SEQ ID NO:604), FIG. 606 (SEQ ID NO:606), FIG. 608 (SEQ ID NO:608), FIG. 610 (SEQ ID NO:610), FIG. 612 (SEQ ID NO:612), FIG. 614 (SEQ ID NO:614), FIG. 616 (SEQ ID NO:616), FIG. 618 (SEQ ID NO:618), FIG. 620 (SEQ ID NO:620), FIG. 622 (SEQ ID NO:622), FIG. 624 (SEQ ID NO:624), FIG. 626 (SEQ ID NO:626), FIG. 628 (SEQ ID NO:628), FIG. 630 (SEQ ID NO:630), FIG. 632 (SEQ ID NO:632), FIG. 634 (SEQ ID NO:634), FIG. 637 (SEQ ID NO:637), FIG. 639 (SEQ ID NO:639), FIG. 641 (SEQ ID NO:641), FIG. 643 (SEQ ID NO:643), FIG. 645 (SEQ ID NO:645), FIG. 647 (SEQ ID NO:647), FIG. 649 (SEQ ID NO:649), FIG. 651 (SEQ ID NO:651), FIG. 653 (SEQ ID NO:653), FIG. 655 (SEQ ID NO:655), FIG. 657 (SEQ ID NO:657), FIG. 659 (SEQ ID NO:659), FIG. 661 (SEQ ID NO:661), FIG. 663 (SEQ ID NO:663), FIG. 665 (SEQ ID NO:665), FIG. 667 (SEQ ID NO:667), FIG. 669 (SEQ ID NO:669), FIG. 671 (SEQ ID NO:671), FIG. 673 (SEQ ID NO:673), FIG. 675 (SEQ ID NO:675), FIG. 677 (SEQ ID NO:677), FIG. 679 (SEQ ID NO:679), FIG. 681 (SEQ ID NO:681), FIG. 683 (SEQ ID NO:683), FIG. 685 (SEQ ID NO:685), FIG. 687 (SEQ ID NO:687), FIG. 689 (SEQ ID NO:689), FIG. 691 (SEQ ID NO:691), FIG. 693 (SEQ ID NO:693), FIG. 695 (SEQ ID NO:695), FIG. 697 (SEQ ID NO:697), FIG. 699 (SEQ ID NO:699), FIG. 701 (SEQ ID NO:701), FIG. 703 (SEQ ID NO:703), FIG. 705 (SEQ ID NO:705), FIG. 707 (SEQ ID NO:707), FIG. 709 (SEQ ID NO:709), FIG. 711 (SEQ ID NO:711), FIG. 713 (SEQ ID NO:713), FIG. 715 (SEQ ID NO:715), FIG. 717 (SEQ ID NO:717), FIG. 719 (SEQ ID NO:719), FIG. 721 (SEQ ID NO:721), FIG. 723 (SEQ ID NO:723), FIG. 725 (SEQ ID NO:725), FIG. 727 (SEQ ID NO:727), FIG. 729 (SEQ ID NO:729), FIG. 731 (SEQ ID NO:731), FIG. 733 (SEQ ID NO:733), FIG. 735 (SEQ ID NO:735), FIG. 737 (SEQ ID NO:737), FIG. 739 (SEQ ID NO:739), FIG. 741 (SEQ ID NO:741), FIG. 743 (SEQ ID NO:743), FIG. 745 (SEQ ID NO:745), FIG. 747 (SEQ JD NO:747), FIG. 749 (SEQ ID NO:749), FIG. 751 (SEQ ID NO:751), FIG. 753 (SEQ ID NO:753), FIG. 755 (SEQ ID NO:755), FIG. 757 (SEQ ID NO:757), FIG. 759 (SEQ ID NO:759), FIG. 761 (SEQ ID NO:761), FIG. 763 (SEQ ID NO:763), FIG. 765 (SEQ ID NO:765), FIG. 767 (SEQ ID NO:767), FIG. 770 (SEQ ID NO:770), FIG. 772 (SEQ ID NO:772), FIG. 774 (SEQ ID NO:774), FIG. 776 (SEQ ID NO:776), FIG. 778 (SEQ ID NO:778), FIG. 780 (SEQ ID NO:780), FIG. 782 (SEQ ID NO:782), FIG. 784 (SEQ ID NO:784), FIG. 786 (SEQ ID NO:786), FIG. 788 (SEQ ID NO:788), FIG. 790 (SEQ ID NO:790), FIG. 792 (SEQ ID NO:792), FIG. 794 (SEQ ID NO:794), FIG. 796 (SEQ ID NO:796), FIG. 798 (SEQ ID NO:798), FIG. 800 (SEQ ID NO:800), FIG. 802 (SEQ ID NO:802), FIG. 805 (SEQ ID NO:805), FIG. 807 (SEQ ID NO:807), FIG. 809 (SEQ ID NO:809), FIG. 811 (SEQ ID NO:811), FIG. 813 (SEQ ID NO:813), FIG. 815 (SEQ ID NO:815), FIG. 817 (SEQ ID NO:817), FIG. 819 (SEQ ID NO:819), FIG. 821 (SEQ ID NO:821), FIG. 823 (SEQ ID NO:823), FIG. 826 (SEQ ID NO:826), FIG. 828 (SEQ ID NO:828), FIG. 830 (SEQ ID NO:830), FIG. 832 (SEQ ID NO:832), FIG. 834 (SEQ ID NO:834), FIG. 836 (SEQ ID NO:836), FIG. 838 (SEQ ID NO:838), FIG. 840 (SEQ ID NO:840), FIG. 842 (SEQ ID NO:842), FIG. 844 (SEQ ID NO:844), FIG. 846 (SEQ ID NO:846), FIG. 848 (SEQ ID NO:848), FIG. 850 (SEQ ID NO:850), FIG. 852 (SEQ ID NO:852), FIG. 854 (SEQ ID NO:854), FIG. 856 (SEQ ID NO:856), FIG. 858 (SEQ ID NO:858), FIG. 860 (SEQ ID NO:860), FIG. 862 (SEQ ID NO:862), FIG. 864 (SEQ ID NO:864), FIG. 866 (SEQ ID NO:866), FIG. 868 (SEQ ID NO:868), FIG. 870 (SEQ ID NO:870), FIG. 872 (SEQ ID NO:872), FIG. 874 (SEQ ID NO:874), FIG. 876 (SEQ ID NO:876), FIG. 878 (SEQ ID NO:878), FIG. 880 (SEQ ID NO:880), FIG. 882 (SEQ ID NO:882), FIG. 884 (SEQ ID NO:884), FIG. 886 (SEQ ID NO:886), FIG. 888 (SEQ ID NO:888), FIG. 890 (SEQ ID NO:890), FIG. 892 (SEQ ID NO:892), FIG. 894 (SEQ ID NO:894), FIG. 896 (SEQ ID NO:896), FIG. 898 (SEQ ID NO-898), FIG. 900 (SEQ ID NO:900), FIG. 902 (SEQ ID NO:902), FIG. 904 (SEQ ID NO:904), FIG. 906 (SEQ ID NO:906), FIG. 908 (SEQ ID NO:908), FIG. 911 (SEQ ID NO:911), FIG. 913 (SEQ ID NO:913), FIG. 915 (SEQ ID NO:915), FIG. 917 (SEQ ID NO:917), FIG. 919 (SEQ ID NO:919), FIG. 921 (SEQ ID NO:921), FIG. 923 (SEQ ID NO:923), FIG. 925 (SEQ ID NO:925), FIG. 927 (SEQ ID NO:927), FIG. 929 (SEQ ID NO:929), FIG. 931 (SEQ ID NO:931), FIG. 933 (SEQ ID NO:933), FIG. 935 (SEQ ID NO:935), FIG. 937 (SEQ ID NO:937), FIG. 940 (SEQ ID NO:940), FIG. 943 (SEQ ID NO:943), FIG. 946 (SEQ ID NO:946), FIG. 948 (SEQ ID NO:948), FIG. 950 (SEQ ID NO:950), FIG. 952 (SEQ ID NO:952), FIG. 955 (SEQ ID NO:955), FIG. 957 (SEQ ID NO:957), FIG. 959 (SEQ ID NO:959), FIG. 961 (SEQ ID NO:961), FIG. 966 (SEQ ID NO:966), FIG. 968 (SEQ ID NO:968), FIG. 970 (SEQ ID NO:970), FIG. 972 (SEQ ID NO:972), FIG. 974 (SEQ ID NO:974), FIG. 976 (SEQ ID NO:976), FIG. 978 (SEQ ID NO:978), FIG. 980 (SEQ ID NO:980), FIG. 985 (SEQ ID NO:985), FIG. 988 (SEQ ID NO:988), FIG. 991 (SEQ ID NO:991), FIG. 993 (SEQ ID NO:993), FIG. 995 (SEQ ID NO:995), FIG. 997 (SEQ ID NO:997), FIG. 1000 (SEQ ID NO:1000), FIG. 1002 (SEQ ID NO:1002), FIG. 1005 (SEQ ID NO:1005), FIG. 1007 (SEQ ID NO:1007), FIG. 1009 (SEQ ID NO:1009), FIG. 1011 (SEQ ID NO:1011), FIG. 1013 (SEQ ID NO:1013), FIG. 1015 (SEQ ID NO:1015), FIG. 1017 (SEQ ID NO:1017), FIG. 1019 (SEQ ID NO:1019), FIG. 1022 (SEQ ID NO:1022), FIG. 1024 (SEQ ID NO:1024), FIG. 1026 (SEQ ID NO:1026), FIG. 1028 (SEQ ID NO:1028), FIG. 1030 (SEQ ID NO:1030), FIG. 1032 (SEQ ID NO:1032), FIG. 1034 (SEQ ID NO:1034), FIG. 1036 (SEQ ID NO:1036), FIG. 1038 (SEQ ID NO:1083), FIG. 1040 (SEQ ID NO:1040), FIG. 1042 (SEQ ID NO:1042), FIG. 1044 (SEQ ID NO:1044), FIG. 1047 (SEQ ID NO:1047), FIG. 1049 (SEQ ID NO:1049), FIG. 1051 (SEQ ID NO:1051), FIG. 1053 (SEQ ID NO:1053), FIG. 1055 (SEQ ID NO1055), FIG. 1057 (SEQ ID NO:1057), FIG. 1060 (SEQ ID NO:1060), FIG. 1062 (SEQ ID NO:1062), FIG. 1064 (SEQ ID NO:1064), FIG. 1066 (SEQ ID NO:1066), FIG. 1068 (SEQ ID NO:1068), FIG. 1070 (SEQ ID NO:1070), FIG. 1072 (SEQ ID NO:1072), FIG. 1074 (SEQ ID NO:1074), FIG. 1076 (SEQ ID NO:1076), FIG. 1078 (SEQ ID NO:1078), FIG. 1080 (SEQ ID NO:1080), FIG. 1082 (SEQ ID NO:1082), FIG. 1084 (SEQ ID NO:1084), FIG. 1086 (SEQ ID NO:1086), FIG. 1089 (SEQ ID NO:1089), FIG. 1091 (SEQ ID NO:1091), FIG. 1093 (SEQ ID NO:1093), FIG. 1098 (SEQ ID NO:1098), FIG. 1100 (SEQ ID NO:1100), FIG. 1103 (SEQ ID NO:1103), FIG. 1105 (SEQ ID NO:1105), FIG. 1107 (SEQ ID NO:1107), FIG. 1110 (SEQ ID NO:1110), FIG. 1112 (SEQ ID NO:1112), FIG. 1114 (SEQ ID NO:1114), FIG. 1116 (SEQ ID NO:1116), FIG. 1118 (SEQ ID NO:1118), FIG. 1120 (SEQ ID NO:1120), FIG. 1122 (SEQ ID NO:1122), FIG. 1124 (SEQ ID NO:1124), FIG. 1126 (SEQ ID NO:1126), FIG. 1128 (SEQ ID NO:1128), FIG. 1130 (SEQ ID NO:1130), FIG. 1132 (SEQ ID NO:1132), FIG. 1134 (SEQ ID NO:1134), FIG. 1136 (SEQ ID NO:1136), FIG. 1138 (SEQ ID NO:1138), FIG. 1140 (SEQ ID NO:1140), FIG. 1142 (SEQ ID NO:1142), FIG. 1144 (SEQ ID NO:1144), FIG. 1146 (SEQ ID NO:1146), FIG. 1148 (SEQ ID NO:1148), FIG. 1150 (SEQ ID NO:1150), FIG. 1153 (SEQ ID NO:1153), FIG. 1155 (SEQ ID NO:1155), FIG. 1157 (SEQ ID NO:1157), FIG. 1159 (SEQ ID NO:1159), FIG. 1161 (SEQ ID NO:1161), FIG. 1164 (SEQ ID NO:1164), FIG. 1166 (SEQ ID NO:1166), FIG. 1168 (SEQ ID NO:1168), FIG. 1170 (SEQ ID NO:1170), FIG. 1172 (SEQ ID NO:1172), FIG. 1174 (SEQ ID NO:1174), FIG. 1176 (SEQ ID NO:1176), FIG. 1178 (SEQ ID NO:1178), FIG. 1180 (SEQ ID NO:1180), FIG. 1182 (SEQ ID NO:1182), FIG. 1184 (SEQ ID NO:1184), FIG. 1186 (SEQ ID NO:1186), FIG. 1188 (SEQ ID NO:1188), FIG. 1190 (SEQ ID NO:1190), FIG. 1192 (SEQ ID NO:1192), FIG. 1194 (SEQ ID NO:1194), FIG. 1196 (SEQ ID NO:1196), FIG. 1198 (SEQ ID NO:1198), FIG. 1200 (SEQ ID NO:1200), FIG. 1202 (SEQ ID NO:1202), FIG. 1204 (SEQ ID NO:1204), FIG. 1206 (SEQ ID NO:1206), FIG. 1208 (SEQ ID NO:1208), FIG. 1210 (SEQ ID NO:1210), FIG. 1212 (SEQ ID NO:1212), FIG. 1214 (SEQ ID NO:1214), FIG. 1216 (SEQ ID NO:1216), FIG. 1218 (SEQ ID NO:1218), FIG. 1220 (SEQ ID NO:1220), FIG. 1222 (SEQ ID NO:1222), FIG. 1224 (SEQ ID NO:1224), FIG. 1226 (SEQ ID NO:1226), FIG. 1228 (SEQ ID NO:1228), FIG. 1230 (SEQ ID NO:1230), FIG. 1232 (SEQ ID NO:1232), FIG. 1234 (SEQ ID NO:1234), FIG. 1236 (SEQ ID NO:1236), FIG. 1238 (SEQ ID NO:1238), FIG. 1240 (SEQ ID NO:1240), FIG. 1242 (SEQ ID NO:1242), FIG. 1244 (SEQ ID NO:1244), FIG. 1246 (SEQ ID NO:1246), FIG. 1248 (SEQ ID NO:1248), FIG. 1250 (SEQ ID NO:1250), FIG. 1252 (SEQ ID NO:1252), FIG. 1254 (SEQ ID NO:1254), FIG. 1256 (SEQ ID NO:1256), FIG. 1258 (SEQ ID NO:1258), FIG. 1260 (SEQ ID NO:1260), FIG. 1262 (SEQ ID NO:1262), FIG. 1264 (SEQ ID NO:1264), FIG. 1266 (SEQ ID NO:1266), FIG. 1268 (SEQ ID NO:1268), FIG. 1270 (SEQ ID NO:1270), FIG. 1272 (SEQ ID NO:1272), FIG. 1274 (SEQ ID NO:1274), FIG. 1276 (SEQ ID NO:1276), FIG. 1278 (SEQ ID NO:1278), FIG. 1280 (SEQ ID NO:1280), FIG. 1282 (SEQ ID NO:1282), FIG. 1284 (SEQ ID NO:1284), FIG. 1286 (SEQ ID NO:1286), FIG. 1288 (SEQ ID NO:1288), FIG. 1290 (SEQ ID NO:1290), FIG. 1292 (SEQ ID NO:1292), FIG. 1294 (SEQ ID NO:1294), FIG. 1296 (SEQ ID NO:1296), FIG. 1298 (SEQ ID NO:1298), FIG. 1300 (SEQ ID NO:1300), FIG. 1302 (SEQ ID NO:1302), FIG. 1304 (SEQ ID NO:1304), FIG. 1306 (SEQ ID NO:1306), FIG. 1308 (SEQ ID NO:1308), FIG. 1310 (SEQ ID NO:1310), FIG. 1312 (SEQ ID NO:1312), FIG. 1314 (SEQ ID NO:1314), FIG. 1316 (SEQ ID NO:1316), FIG. 1318 (SEQ ID NO:1318), FIG. 1320 (SEQ ID NO:1320), FIG. 1322 (SEQ ID NO:1322), FIG. 1324 (SEQ ID NO:1324), FIG. 1326 (SEQ ID NO:1326), FIG. 1328 (SEQ ID NO:1328), FIG. 1330 (SEQ ID NO:1330), FIG. 1332 (SEQ ID NO:1332), FIG. 1334 (SEQ ID NO:1334), FIG. 1336 (SEQ ID NO:1336), FIG. 1338 (SEQ ID NO:1338), FIG. 1340 (SEQ ID NO:140), FIG. 1342 (SEQ ID NO:1342), FIG. 1344 (SEQ ID NO:1344), FIG. 1346 (SEQ ID NO:1346), FIG. 1348 (SEQ ID NO:1348), FIG. 1350 (SEQ ID NO:1350), FIG. 1352 (SEQ ID NO:1352), FIG. 1354 (SEQ ID NO:1354), FIG. 1356 (SEQ ID NO:1356), FIG. 1358 (SEQ ID NO:1358), FIG. 1360 (SEQ ID NO:1360), FIG. 1362 (SEQ ID NO:1362), FIG. 1364 (SEQ ID NO:1364), FIG. 1366 (SEQ ID NO:1366), FIG. 1368 (SEQ ID NO:1368), FIG. 1370 (SEQ ID NO:1370), FIG. 1372 (SEQ ID NO:1372), FIG. 1374 (SEQ ID NO:1374), FIG. 1376 (SEQ ID NO:1376), FIG. 1378 (SEQ ID NO:1378), FIG. 1380 (SEQ ID NO:1379), FIG. 1382 (SEQ ID NO:1382), FIG. 1384 (SEQ ID NO:1384), FIG. 1386 (SEQ ID NO:1386), FIG. 1388 (SEQ ID NO:1388), FIG. 1390 (SEQ ID NO:1390), FIG. 1392 (SEQ ID NO:1392), FIG. 1394 (SEQ ID NO:1394), FIG. 1396 (SEQ ID NO:1396), FIG. 1398 (SEQ ID NO:1398), FIG. 1400 (SEQ ID NO:1400), FIG. 1402 (SEQ ID NO:1402), FIG. 1404 (SEQ ID NO:1404), FIG. 1406 (SEQ ID NO:1406), FIG. 1408 (SEQ ID NO:1408), FIG. 1410 (SEQ ID NO:1410), FIG. 1412 (SEQ ID NO:1412), FIG. 1414 (SEQ ID NO:1414), FIG. 1416 (SEQ ID NO:1416), FIG. 1418 (SEQ ID NO:1418), FIG. 1420 (SEQ ID NO:1420), FIG. 1422 (SEQ ID NO:1422), FIG. 1425 (SEQ ID NO:1425), FIG. 1427 (SEQ ID NO:1427), FIG. 1429 (SEQ ID NO:1429), FIG. 1432 (SEQ ID NO:1432), FIG. 1434 (SEQ ID NO:1434), FIG. 1436 (SEQ ID NO:1436), FIG. 1438 (SEQ ID NO:1438), FIG. 1440 (SEQ ID NO:1440), FIG. 1442 (SEQ ID NO:1442), FIG. 1444 (SEQ ID NO:1444), FIG. 1446 (SEQ ID NO:1446), FIG. 1448 (SEQ ID NO:1448), FIG. 1450 (SEQ ID NO:1450), FIG. 1452 (SEQ ID NO:1452), FIG. 1454 (SEQ ID NO:1454), FIG. 1456 (SEQ ID NO:1456), FIG. 1458 (SEQ ID NO:1458), FIG. 1460 (SEQ ID NO:1460), FIG. 1462 (SEQ ID NO:1462), FIG. 1464 (SEQ ID NO:1464), FIG. 1466 (SEQ ID NO:1466), FIG. 1468 (SEQ ID NO:1468), FIG. 1470 (SEQ ID NO:1470), FIG. 1472 (SEQ ID NO:1472), FIG. 1474 (SEQ ID NO:1474), FIG. 1476 (SEQ ID NO:1476), FIG. 1478 (SEQ ID NO:1478), FIG. 1480 (SEQ ID NO:1480), FIG. 1482 (SEQ ID NO:1482), FIG. 1484 (SEQ ID NO:1484), FIG. 1486 (SEQ ID NO:1486), FIG. 1488 (SEQ ID NO:1488), FIG. 1490 (SEQ ID NO:1490), FIG. 1492 (SEQ ID NO:1492), FIG. 1494 (SEQ ID NO:1494), FIG. 1496 (SEQ ID NO:1496), FIG. 1498 (SEQ ID NO:1498), FIG. 1500 (SEQ ID NO:1500), FIG. 1502 (SEQ ID NO:1502), FIG. 1504 (SEQ ID NO:1504), FIG. 1506 (SEQ ID NO:1506), FIG. 1508 (SEQ ID NO:1508), FIG. 1510 (SEQ ID NO:1510), FIG. 1512 (SEQ ID NO:1512), FIG. 1514 (SEQ ID NO:1514), FIG. 1516 (SEQ ID NO:1516), FIG. 1518 (SEQ ID NO:1518), FIG. 1520 (SEQ ID NO:1520), FIG. 1522 (SEQ ID NO:1522), FIG. 1524 (SEQ ID NO:1524), FIG. 1526 (SEQ ID NO:1526), FIG. 1528 (SEQ ID NO:1528), FIG. 1530 (SEQ ID NO:1530), FIG. 1532 (SEQ ID NO:1532), FIG. 1534 (SEQ ID NO:1534), FIG. 1536 (SEQ ID NO:1536), FIG. 1538 (SEQ ID NO:1538), FIG. 1540 (SEQ ID NO:1540), FIG. 1542 (SEQ ID NO:1542), FIG. 1544 (SEQ ID NO:1544), FIG. 1546 (SEQ ID NO:1546), FIG. 1548 (SEQ ID NO:1548), FIG. 1550 (SEQ ID NO:1550), FIG. 1552 (SEQ ID NO:1552), FIG. 1554 (SEQ ID NO:1554), FIG. 1556 (SEQ ID NO:1556), FIG. 1558 (SEQ ID NO:1558), FIG. 1560 (SEQ ID NO:1560), FIG. 1562 (SEQ ID NO:1562), FIG. 1564 (SEQ ID NO:1654), FIG. 1566 (SEQ ID NO:1566), FIG. 1568 (SEQ ID NO:1568), FIG. 1570 (SEQ ID NO:1570), FIG. 1572 (SEQ ID NO:1572), FIG. 1574 (SEQ ID NO:1574), FIG. 1576 (SEQ ID NO:1576), FIG. 1578 (SEQ ID NO:1578), FIG. 1580 (SEQ ID NO:1580), FIG. 1582 (SEQ ID NO:1582), FIG. 1585 (SEQ ID NO:1585), FIG. 1587 (SEQ ID NO:1587), FIG. 1590 (SEQ ID NO:1590), FIG. 1592 (SEQ ID NO:1592), FIG. 1594 (SEQ ID NO:1594), FIG. 1597 (SEQ ID NO:1597), FIG. 1599 (SEQ ID NO:1599), FIG. 1601 (SEQ ID NO:1601), FIG. 1603 (SEQ ID NO:1603), FIG. 1605 (SEQ ID NO:1605), FIG. 1607 (SEQ ID NO:1607), FIG. 1610 (SEQ ID NO:1610), FIG. 1613 (SEQ ID NO:1613), FIG. 1615 (SEQ ID NO:1615), FIG. 1617 (SEQ ID NO:1617), FIG. 1619 (SEQ ID NO:1619), FIG. 1621 (SEQ ID NO:1621), FIG. 1623 (SEQ ID NO:1623), FIG. 1625 (SEQ ID NO:1625), FIG. 1627 (SEQ ID NO:1627), FIG. 1629 (SEQ ID NO:1629), FIG. 1631 (SEQ ID NO:1631), FIG. 1633 (SEQ ID NO:1633), FIG. 1635 (SEQ ID NO:1635), FIG. 1637 (SEQ ID NO:1637), FIG. 1639 (SEQ ID NO:1639), FIG. 1641 (SEQ ID NO:1641), FIG. 16431 (SEQ ID NO:1643), FIG. 1645 (SEQ ID NO:1645), FIG. 1647 (SEQ ID NO:1647), FIG. 1650 (SEQ ID NO:1650), FIG. 1654 (SEQ ID NO:1654), FIG. 1656 (SEQ ID NO:1656), FIG. 1658 (SEQ ID NO:1658), FIG. 1660 (SEQ ID NO:1660), FIG. 1662 (SEQ ID NO:1662), FIG. 1664 (SEQ ID NO:1664), FIG. 1666 (SEQ ID NO:1666), FIG. 1668 (SEQ ID NO:1668), FIG. 1670 (SEQ ID NO:1670), FIG. 1672 (SEQ ID NO:1672), FIG. 1674 (SEQ ID NO:1674), FIG. 1676 (SEQ ID NO:1676), FIG. 1678 (SEQ ID NO:1678), FIG. 1680 (SEQ ID NO:1680), FIG. 1682 (SEQ ID NO:1682), FIG. 1686 (SEQ ID NO:1686), FIG. 1688 (SEQ ID NO:1688), FIG. 1691 (SEQ ID NO:1691), FIG. 1693 (SEQ ID NO:1693), FIG. 1695 (SEQ ID NO:1695), FIG. 1697 (SEQ ID NO:1697), FIG. 1699 (SEQ ID NO:1699), FIG. 1701 (SEQ ID NO:1701), FIG. 1703 (SEQ ID NO:1703), FIG. 1705 (SEQ ID NO:1705), FIG. 1708 (SEQ ID NO:1708), FIG. 1710 (SEQ ID NO:1710), FIG. 1712 (SEQ ID NO:1712), FIG. 1714 (SEQ ID NO:1714), FIG. 1716 (SEQ ID NO:1716), FIG. 1718 (SEQ ID NO:1718), FIG. 1720 (SEQ ID NO:1720), FIG. 1722 (SEQ ID NO:1722), FIG. 1725 (SEQ ID NO:1725), FIG. 1727 (SEQ ID NO:1727), FIG. 1729 (SEQ ID NO:1729), FIG. 1731 (SEQ ID NO:1731), FIG. 1733 (SEQ ID NO:1733), FIG. 1735 (SEQ ID NO:1735), FIG. 1738 (SEQ ID NO:1738), FIG. 1740 (SEQ ID NO:1740), FIG. 1742 (SEQ ID NO:1742), FIG. 1744 (SEQ ID NO:1744), FIG. 1746 (SEQ ID NO:1746), FIG. 1748 (SEQ ID NO:1748), FIG. 1750 (SEQ ID NO:1750), FIG. 1752 (SEQ ID NO:1752), FIG. 1754 (SEQ ID NO:1754), FIG. 1756 (SEQ ID NO:1756), FIG. 1758 (SEQ ID NO:1758), FIG. 1760 (SEQ ID NO:1760), FIG. 1762 (SEQ ID NO:1762), FIG. 1764 (SEQ ID NO:1764), FIG. 1767 (SEQ ID NO:1767), FIG. 1769 (SEQ ID NO:1769), FIG. 1771 (SEQ ID NO:1771), FIG. 1774 (SEQ ID NO:1774), FIG. 1776 (SEQ ID NO:1776), FIG. 1779 (SEQ ID NO:1779), FIG. 1782 (SEQ ID NO:1782), FIG. 1784 (SEQ ID NO:1784), FIG. 1786 (SEQ ID NO:1786), FIG. 1789 (SEQ ID NO:1789), FIG. 1791 (SEQ ID NO:1791), FIG. 1794 (SEQ ID NO:1794), FIG. 1796 (SEQ ID NO:1796), FIG. 1798 (SEQ ID NO:1798), FIG. 1800 (SEQ ID NO:1800), FIG. 1802 (SEQ ID NO:1802), FIG. 1804 (SEQ ID NO:1804), FIG. 1806 (SEQ ID NO:1806), FIG. 1808 (SEQ ID NO:1808), FIG. 1810 (SEQ ID NO:1810), FIG. 1812 (SEQ ID NO:1812), FIG. 1814 (SEQ ID NO:1814), FIG. 1816 (SEQ ID NO:1816), FIG. 1818 (SEQ ID NO:1818), FIG. 1820 (SEQ ID NO:1820), FIG. 1822 (SEQ ID NO:1822), FIG. 1824 (SEQ ID NO:1824), FIG. 1826 (SEQ ID NO:1826), FIG. 1828 (SEQ ID NO:1828), FIG. 1830 (SEQ ID NO:1830), FIG. 1832 (SEQ ID NO:1832), FIG. 1834 (SEQ ID NO:1834), FIG. 1836 (SEQ ID NO:1836), FIG. 1838 (SEQ ID NO:1838), FIG. 1840 (SEQ ID NO:1840), FIG. 1842 (SEQ ID NO:1842), FIG. 1844 (SEQ ID NO:1844), FIG. 1846 (SEQ ID NO:1846), FIG. 1848 (SEQ ID NO:1848), FIG. 1850 (SEQ ID NO:1850), FIG. 1852 (SEQ ID NO:1852), FIG. 1856 (SEQ ID NO:1856), FIG. 1858 (SEQ ID NO:1858), FIG. 1860 (SEQ ID NO:1860), FIG. 1862 (SEQ ID NO:1862), FIG. 1864 (SEQ ID NO:1864), FIG. 1867 (SEQ ID NO:1867), FIG. 1869 (SEQ ID NO:1869), FIG. 1871 (SEQ ID NO:1871), FIG. 1873 (SEQ ID NO:1873), FIG. 1876 (SEQ ID NO:1876), FIG. 1878 (SEQ ID NO:1878), FIG. 1880 (SEQ ID NO:1880), FIG. 1883 (SEQ ID NO:1883), FIG. 1885 (SEQ ID NO:1885), FIG. 1887 (SEQ ID NO:1887), FIG. 1890 (SEQ ID NO:1890), FIG. 1892 (SEQ ID NO:1892), FIG. 1894 (SEQ ID NO:1894), FIG. 1896 (SEQ ID NO:1896), FIG. 1898 (SEQ ID NO:1898), FIG. 1900 (SEQ ID NO:1900), FIG. 1902 (SEQ ID NO:1902), FIG. 1904 (SEQ ID NO:1904), FIG. 1906 (SEQ ID NO:1906), FIG. 1908 (SEQ ID NO:1908), FIG. 1910 (SEQ ID NO:1910), FIG. 1912 (SEQ ID NO:1912), FIG. 1914 (SEQ ID NO:1914), FIG. 1916 (SEQ ID NO:1916), FIG. 1918 (SEQ ID NO:1918), FIG. 1920 (SEQ ID NO:1920), FIG. 1922 (SEQ ID NO:1922), FIG. 1924 (SEQ ID NO:1924), FIG. 1926 (SEQ ID NO:1926), FIG. 1928 (SEQ ID NO:1928), FIG. 1930 (SEQ ID NO:1930), FIG. 1932 (SEQ ID NO:1932), FIG. 1934 (SEQ ID NO:1934), FIG. 1936 (SEQ ID NO:1936), FIG. 1938 (SEQ ID NO:1938), FIG. 1940 (SEQ ID NO:1940), FIG. 1942 (SEQ ID NO:1942), FIG. 1944 (SEQ ID NO:1944), FIG. 1946 (SEQ ID NO:1946), FIG. 1948 (SEQ ID NO:1948), FIG. 1951 (SEQ ID NO:1951), FIG. 1953 (SEQ ID NO:1953), FIG. 1955 (SEQ ID NO:1955), FIG. 1957 (SEQ ID NO:1957), FIG. 1959 (SEQ ID NO:1959), FIG. 1961 (SEQ ID NO:1961), FIG. 1964 (SEQ ID NO:1964), FIG. 1966 (SEQ ID NO:1966), FIG. 1968 (SEQ ID NO:1968), FIG. 1970 (SEQ ID NO:1970), FIG. 1972 (SEQ ID NO:1972), FIG. 1974 (SEQ ID NO:1974), FIG. 1976 (SEQ ID NO:1976), FIG. 1978 (SEQ ID NO:1978), FIG. 1980 (SEQ ID NO:1980), FIG. 1982 (SEQ ID NO:1982), FIG. 1984 (SEQ ID NO:1984), FIG. 1986 (SEQ ID NO:1986), FIG. 1988 (SEQ ID NO:1988), FIG. 1990 (SEQ ID NO:1990), FIG. 1992 (SEQ ID NO:1992), FIG. 1994 (SEQ ID NO:1994), FIG. 1996 (SEQ ID NO:1996), FIG. 1998 (SEQ ID NO:1998), FIG. 2000 (SEQ ID NO:2000), FIG. 2002 (SEQ ID NO:2002), FIG. 2004 (SEQ ID NO:2004), FIG. 2006 (SEQ ID NO:2006), FIG. 2008 (SEQ ID NO:2008), FIG. 2010 (SEQ ID NO:2010), FIG. 2012 (SEQ ID NO:2012), FIG. 2014 (SEQ ID NO:2014), FIG. 2016 (SEQ ID NO:2016), FIG. 2018 (SEQ ID NO:2018), FIG. 2020 (SEQ ID NO:2020), FIG. 2022 (SEQ ID NO:2022), FIG. 2024 (SEQ ID NO:2024), FIG. 2026 (SEQ ID NO:2026), FIG. 2028 (SEQ ID NO:2028), FIG. 2030 (SEQ ID NO:2030), FIG. 2032 (SEQ ID NO:2032), FIG. 2034 (SEQ ID NO:2034), FIG. 2036 (SEQ ID NO:2036), FIG. 2038 (SEQ ID NO:2038), FIG. 2040 (SEQ ID NO:2040), FIG. 2042 (SEQ ID NO:2042), FIG. 2044 (SEQ ID NO:2044), FIG. 2046 (SEQ ID NO:2046), FIG. 2048 (SEQ ID NO:2048), FIG. 2050 (SEQ ID NO:2050), FIG. 2052 (SEQ ID NO:5052), FIG. 2054 (SEQ ID NO:2054), FIG. 2056 (SEQ ID NO:2056), FIG. 2058 (SEQ ID NO:2058), FIG. 2060 (SEQ ID NO:2060), FIG. 2062 (SEQ ID NO:2062), FIG. 2064 (SEQ ID NO:2064), FIG. 2066 (SEQ ID NO:2066), FIG. 2068 (SEQ ID NO:2068), FIG. 2070 (SEQ ID NO:2070), FIG. 2072 (SEQ ID NO:2072), FIG. 2074 (SEQ ID NO:2074), FIG. 2076 (SEQ ID NO:2076), FIG. 2078 (SEQ ID NO:2078), FIG. 2080 (SEQ ID NO:2080), FIG. 2082 (SEQ ID NO:2082), FIG. 2084 (SEQ ID NO:2084), FIG. 2086 (SEQ ID NO:2086), FIG. 2088 (SEQ ID NO:2088), FIG. 2090 (SEQ ID NO:2090), FIG. 2092 (SEQ ID NO:2092), FIG. 2094 (SEQ ID NO:2094), FIG. 2096 (SEQ ID NO:2096), FIG. 2098 (SEQ ID NO:2098), FIG. 2100 (SEQ ID NO:2100), FIG. 2102 (SEQ ID NO:2102), FIG. 2104 (SEQ ID NO:2104), FIG. 2106 (SEQ ID NO:2106), FIG. 2108 (SEQ ID NO:2108), FIG. 2110 (SEQ ID NO:2110), FIG. 2112 (SEQ ID NO:2112), FIG. 2114 (SEQ ID NO:2114), FIG. 2116 (SEQ ID NO:2116), FIG. 2118 (SEQ ID NO:2118), FIG. 2120 (SEQ ID NO:2120), FIG. 2122 (SEQ ID NO:2122), FIG. 2124 (SEQ ID NO:2124), FIG. 2126 (SEQ ID NO:2126), FIG. 2128 (SEQ ID NO:2128), FIG. 2130 (SEQ ID NO:2130), FIG. 2132 (SEQ ID NO:2132), FIG. 2134 (SEQ ID NO:2134), FIG. 2136 (SEQ ID NO:2136), FIG. 2139 (SEQ ID NO:2139), FIG. 2141 (SEQ ID NO:2141), FIG. 2143 (SEQ ID NO:2143), FIG. 2145 (SEQ ID NO:2145), FIG. 2149 (SEQ ID NO:2149), FIG. 2151 (SEQ ID NO:2151), FIG. 2153 (SEQ ID NO:2153), FIG. 2155 (SEQ ID NO:2155), FIG. 2157 (SEQ ID NO:2157), FIG. 2159 (SEQ ID NO:2159), FIG. 2161 (SEQ ID NO:2161), FIG. 2163 (SEQ ID NO:2163), FIG. 2165 (SEQ ID NO:2165), FIG. 2167 (SEQ ID NO:2167), FIG. 2169 (SEQ ID NO:2169), FIG. 2171 (SEQ ID NO:2171), FIG. 2173 (SEQ ID NO:2173), FIG. 2175 (SEQ ID NO:2175), FIG. 2177 (SEQ ID NO:2177), FIG. 2179 (SEQ ID NO:2179), FIG. 2181 (SEQ ID NO:2181), FIG. 2183 (SEQ ID NO:2183), FIG. 2185 (SEQ ID NO:2185), FIG. 2187 (SEQ ID NO:2187), FIG. 2189 (SEQ ID NO:2189), FIG. 2191 (SEQ ID NO:2191), FIG. 2193 (SEQ ID NO:2193), FIG. 2195 (SEQ ID NO:2195), FIG. 2197 (SEQ ID NO:2197), FIG. 2199 (SEQ ID NO:2199), FIG. 2201 (SEQ ID NO:2201), FIG. 2203 (SEQ ID NO:2203), FIG. 2205 (SEQ ID NO:2205), FIG. 2207 (SEQ ID NO:2207), FIG. 2209 (SEQ ID NO:2209), FIG. 2211 (SEQ ID NO:2211), FIG. 2213 (SEQ ID NO:2213), FIG. 2215 (SEQ ID NO:2215), FIG. 2218 (SEQ ID NO:2218), FIG. 2220 (SEQ ID NO:2220), FIG. 2222 (SEQ ID NO:2222), FIG. 2224 (SEQ ID NO:2224), FIG. 2226 (SEQ ID NO:2226), FIG. 2228 (SEQ ID NO:2228), FIG. 2231 (SEQ ID NO:2231), FIG. 2233 (SEQ ID NO:2233), FIG. 2235 (SEQ ID NO:2235), FIG. 2237 (SEQ ID NO:2237), FIG. 2239 (SEQ ID NO:2239), FIG. 2241 (SEQ ID NO:2241), FIG. 2243 (SEQ ID NO:2243), FIG. 2245 (SEQ ID NO:2245), FIG. 2247 (SEQ ID NO:2247), FIG. 2249 (SEQ ID NO:2249), FIG. 2251 (SEQ ID NO:2251), FIG. 2253 (SEQ ID NO:2253), FIG. 2255 (SEQ ID NO:2255), FIG. 2257 (SEQ ID NO:2257), FIG. 2259 (SEQ ID NO:2259), FIG. 2261 (SEQ ID NO:2261), FIG. 2263 (SEQ ID NO:2263), FIG. 2265 (SEQ ID NO:2265), FIG. 2267 (SEQ ID NO:2267), FIG. 2269 (SEQ ID NO:2269), FIG. 2271 (SEQ ID NO:2271), FIG. 2273 (SEQ ID NO:2273), FIG. 2275 (SEQ ID NO:2275), FIG. 2277 (SEQ ID NO:2277), FIG. 2279 (SEQ ID NO:2279), FIG. 2281 (SEQ ID NO:2281), FIG. 2283 (SEQ ID NO:2283), FIG. 2285 (SEQ ID NO:2285), FIG. 2287 (SEQ ID NO:2287), FIG. 2289 (SEQ ID NO:2289), FIG. 2291 (SEQ ID NO:2291), FIG. 2293 (SEQ ID NO:2293), FIG. 2295 (SEQ ID NO:2295), FIG. 2297 (SEQ ID NO:2297), FIG. 2299 (SEQ ID NO:2299), FIG. 2302 (SEQ ID NO:2302), FIG. 2304 (SEQ ID NO:2304), FIG. 2306 (SEQ ID NO:2306), FIG. 2310 (SEQ ID NO:2310), FIG. 2313 (SEQ ID NO:2313), FIG. 2315 (SEQ ID NO:2315), FIG. 2317 (SEQ ID NO:2317), FIG. 2319 (SEQ ID NO:2319), FIG. 2321 (SEQ ID NO:2321), FIG. 2324 (SEQ ID NO:2324), FIG. 2326 (SEQ ID NO:2326), FIG. 2328 (SEQ ID NO:2328), FIG. 2330 (SEQ ID NO:2330), FIG. 2332 (SEQ ID NO:2332), FIG. 2334 (SEQ ID NO:2334), FIG. 2336 (SEQ ID NO:2336), FIG. 2338 (SEQ ID NO:2338), FIG. 2340 (SEQ ID NO:2340), FIG. 2342 (SEQ ID NO:2342), FIG. 2344 (SEQ ID NO:2344), FIG. 2347 (SEQ ID NO:2347), FIG. 2350 (SEQ ID NO:2350), FIG. 2352 (SEQ ID NO:2352), FIG. 2354 (SEQ ID NO:2354), FIG. 2356 (SEQ ID NO:2356), FIG. 2358 (SEQ ID NO:2358), FIG. 2360 (SEQ ID NO:2360), FIG. 2362 (SEQ ID NO:2362), FIG. 2364 (SEQ ID NO:2364), FIG. 2366 (SEQ ID NO:2366), FIG. 2368 (SEQ ID NO:2368), FIG. 2370 (SEQ ID NO:2370), FIG. 2372 (SEQ ID NO:2372), FIG. 2374 (SEQ ID NO:2374), FIG. 2376 (SEQ ID NO:2376), FIG. 2378 (SEQ ID NO:2378), FIG. 2380 (SEQ ID NO:2380), FIG. 2382 (SEQ ID NO:2382), FIG. 2384 (SEQ ID NO:2384), FIG. 2386 (SEQ ID NO:2386), FIG. 2388 (SEQ ID NO:2388), FIG. 2390 (SEQ ID NO:2390), FIG. 2392 (SEQ ID NO:2392), FIG. 2394 (SEQ ID NO:2394), FIG. 2396 (SEQ ID NO:2396), FIG. 2398 (SEQ ID NO:2398), FIG. 2400 (SEQ ID NO:2400), FIG. 2402 (SEQ ID NO:2402), FIG. 2404 (SEQ ID NO:2404), FIG. 2407 (SEQ ID NO:2407), FIG. 2409 (SEQ ID NO:2409), FIG. 2412 (SEQ ID NO:2412), FIG. 2415 (SEQ ID NO:2415), FIG. 2419 (SEQ ID NO:2419), FIG. 2423 (SEQ ID NO:2423), FIG. 2425 (SEQ ID NO:2425), FIG. 2427 (SEQ ID NO:2427), FIG. 2429 (SEQ ID NO:2429), FIG. 2431 (SEQ ID NO:2431), FIG. 2433 (SEQ ID NO:2433), FIG. 2435 (SEQ ID NO:2435), FIG. 2437 (SEQ ID NO:2437), FIG. 2439 (SEQ ID NO:2439), FIG. 2441 (SEQ ID NO:2441), FIG. 2443 (SEQ ID NO:2443), FIG. 2445 (SEQ ID NO:2445), FIG. 2448 (SEQ ID NO:2448), FIG. 2450 (SEQ ID NO:2450), FIG. 2452 (SEQ ID NO:2452), FIG. 2454 (SEQ ID NO:2454), FIG. 2457 (SEQ ID NO:2457), FIG. 2459 (SEQ ID NO:2459), FIG. 2461 (SEQ ID NO:2461), FIG. 2465 (SEQ ID NO:2465), FIG. 2468 (SEQ ID NO:2468), FIG. 2472 (SEQ ID NO:2472), FIG. 2474 (SEQ ID NO:2474), FIG. 2482 (SEQ ID NO:2482) or FIG. 2484 (SEQ ID NO:2484) anti-PRO antibody with a test sample of tissue cells obtained from said mammal and (b) detecting the formation of a complex between the antibody and the polypeptide in the test sample, wherein formation of said complex is indicative of the presence of psoriasis in the mammal from which the test tissue cells were obtained.

22. A method of identifying a compound that inhibits the activity of a PRO polypeptide of the invention as described in FIG. 2 (SEQ ID NO:2), FIG. 4 (SEQ ID NO:4), FIG. 6 (SEQ ID NO:6), FIG. 8 (SEQ ID NO:8), FIG. 10 (SEQ ID NO:10), FIG. 12 (SEQ ID NO:12), FIG. 14 (SEQ ID NO:14), FIG. 16 (SEQ ID NO:16), FIG. 18 (SEQ ID NO:18), FIG. 20 (SEQ ID NO:20), FIG. 22 (SEQ ID NO:22), FIG. 24 (SEQ ID NO:24), FIG. 26 (SEQ ID NO:26), FIG. 28 (SEQ ID NO:28), FIG. 30 (SEQ ID NO:30), FIG. 32 (SEQ ID NO:32), FIG. 34 (SEQ ID NO:34), FIG. 36 (SEQ ID NO:36), FIG. 38 (SEQ ID NO:38), FIG. 40 (SEQ ID NO:40), FIG. 42 (SEQ ID NO:42), FIG. 43 (SEQ ID NO:43), FIG. 46 (SEQ ID NO:46), FIG. 48 (SEQ ID NO:48), FIG. 50 (SEQ ID NO:50), FIG. 52 (SEQ ID NO:52), FIG. 54 (SEQ ID NO:54), FIG. 56 (SEQ ID NO:56), FIG. 58 (SEQ ID NO:58), FIG. 60 (SEQ ID NO:60), FIG. 62 (SEQ ID NO:62), FIG. 64 (SEQ ID NO:64), FIG. 66 (SEQ ID NO:66), FIG. 68 (SEQ ID NO:68), FIG. 70 (SEQ ID NO:70), FIG. 72 (SEQ ID NO:72), FIG. 74 (SEQ ID NO:74), FIG. 76 (SEQ ID NO:76), FIG. 78 (SEQ ID NO:78), FIG. 80 (SEQ ID NO:80), FIG. 80 (SEQ ID NO:80), FIG. 84 (SEQ ID NO:84), FIG. 86 (SEQ ID NO:86), FIG. 88 (SEQ ID NO:88), FIG. 90 (SEQ ID NO:90), FIG. 92 (SEQ ID NO:92), FIG. 94 (SEQ ID NO:94), FIG. 96 (SEQ ID NO:96), FIG. 98 (SEQ ID NO:98), FIG. 100 (SEQ ID NO:100), FIG. 102 (SEQ ID NO:102), FIG. 104 (SEQ ID NO:104), FIG. 106 (SEQ ID NO:106), FIG. 108 (SEQ ID NO:108), FIG. 108 (SEQ ID NO:108), FIG. 112 (SEQ ID NO:112), FIG. 115 (SEQ ID NO:115), FIG. 117 (SEQ ID NO:117), FIG. 119 (SEQ ID NO:119), FIG. 121 (SEQ ID NO:121), FIG. 123 (SEQ ID NO:123), FIG. 125 (SEQ ID NO:125), FIG. 127 (SEQ ID NO:127), FIG. 129 (SEQ ID NO:129), FIG. 131 (SEQ ID NO:131), FIG. 133 (SEQ ID NO:133), FIG. 135 (SEQ ID NO:135), FIG. 137 (SEQ ID NO:137), FIG. 139 (SEQ ID NO:139), FIG. 141 (SEQ ID NO:141), FIG. 143 (SEQ ID NO:143), FIG. 145 (SEQ ID NO:145), FIG. 147 (SEQ ID NO:147), FIG. 149 (SEQ ID NO:149), FIG. 151 (SEQ ID NO:151), FIG. 153 (SEQ ID NO:153), FIG. 155 (SEQ ID NO:155), FIG. 157 (SEQ ID NO:157), FIG. 159 (SEQ ID NO:159), FIG. 161 (SEQ ID NO:161), FIG. 163 (SEQ ID NO:163), FIG. 165 (SEQ ID NO:165), FIG. 167 (SEQ ID NO:167), FIG. 169 (SEQ ID NO:169), FIG. 171 (SEQ ID NO:171), FIG. 173 (SEQ ID NO:173), FIG. 175 (SEQ ID NO:175), FIG. 177 (SEQ ID NO:177), FIG. 179 (SEQ ID NO:179), FIG. 181 (SEQ ID NO:181), FIG. 183 (SEQ ID NO:183), FIG. 185 (SEQ ID NO:185), FIG. 187 (SEQ ID NO:187), FIG. 189 (SEQ ID NO:189), FIG. 191 (SEQ ID NO:191), FIG. 194 (SEQ ID NO:194), FIG. 196 (SEQ ID NO:196), FIG. 198 (SEQ ID NO:198), FIG. 200 (SEQ ID NO:200), FIG. 202 (SEQ ID NO:202), FIG. 204 (SEQ ID NO:204), FIG. 206 (SEQ ID NO:206), FIG. 208 (SEQ ID NO:208), FIG. 210 (SEQ ID NO:210), FIG. 212 (SEQ ID NO:212), FIG. 214 (SEQ ID NO:214), FIG. 216 (SEQ ID NO:216), FIG. 218 (SEQ ID NO:218), FIG. 221 (SEQ ID NO:221), FIG. 223 (SEQ ID NO:223), FIG. 225 (SEQ ID NO:225), FIG. 227 (SEQ ID NO:227), FIG. 229 (SEQ ID NO:229), FIG. 231 (SEQ ID NO:231), FIG. 233 (SEQ ID NO:233), FIG. 235 (SEQ ID NO:235), FIG. 237 (SEQ ID NO:237), FIG. 239 (SEQ ID NO:239), FIG. 241 (SEQ ID NO:241), FIG. 243 (SEQ ID NO:243), FIG. 245 (SEQ ID NO:245), FIG. 247 (SEQ ID NO:247), FIG. 249 (SEQ ID NO:249), FIG. 251 (SEQ ID NO:251), FIG. 253 (SEQ ID NO:253), FIG. 255 (SEQ ID NO:255), FIG. 257 (SEQ ID NO:257), FIG. 259 (SEQ ID NO:259), FIG. 261 (SEQ ID NO:261), FIG. 263 (SEQ ID NO:263), FIG. 265 (SEQ ID NO:265), FIG. 267 (SEQ ID NO:267), FIG. 269 (SEQ ID NO:269), FIG. 272 (SEQ ID NO:272), FIG. 274 (SEQ ID NO:274), FIG. 276 (SEQ ID NO:276), FIG. 278 (SEQ ID NO:278), FIG. 280 (SEQ ID NO:280), FIG. 282 (SEQ ID NO:282), FIG. 284 (SEQ ID NO:284), FIG. 286 (SEQ ID NO:286), FIG. 288 (SEQ ID NO:288), FIG. 290 (SEQ ID NO:290), FIG. 292 (SEQ ID NO:292), FIG. 294 (SEQ ID NO:294), FIG. 296 (SEQ ID NO:296), FIG. 298 (SEQ ID NO:298), FIG. 300 (SEQ ID NO:300), FIG. 302 (SEQ ID NO:302), FIG. 304 (SEQ ID NO:304), FIG. 306 (SEQ ID NO:306), FIG. 308 (SEQ ID NO:308), FIG. 310 (SEQ ID NO:310), FIG. 312 (SEQ ID NO:312), FIG. 314 (SEQ ID NO:314), FIG. 316 (SEQ ID NO:316), FIG. 318 (SEQ ID NO:318), FIG. 320 (SEQ ID NO:320), FIG. 322 (SEQ ID NO:322), FIG. 324 (SEQ ID NO:324), FIG. 326 (SEQ ID NO:326), FIG. 328 (SEQ ID NO:328), FIG. 330 (SEQ ID NO:330), FIG. 332 (SEQ ID NO:332), FIG. 334 (SEQ ID NO:334), FIG. 336 (SEQ ID NO:336), FIG. 338 (SEQ ID NO:338), FIG. 340 (SEQ ID NO:340), FIG. 342 (SEQ ID NO:342), FIG. 344 (SEQ ID NO:344), FIG. 346 (SEQ ID NO:346), FIG. 348 (SEQ ID NO:348), FIG. 350 (SEQ ID NO:350), FIG. 352 (SEQ ID NO:352), FIG. 354 (SEQ ID NO:354), FIG. 356 (SEQ ID NO:356), FIG. 358 (SEQ ID NO:358), FIG. 360 (SEQ ID NO:360), FIG. 362 (SEQ ID NO:362), FIG. 364 (SEQ ID NO:364), FIG. 366 (SEQ ID NO:366), FIG. 368 (SEQ ID NO:368), FIG. 370 (SEQ ID NO:370), FIG. 372 (SEQ ID NO:372), FIG. 374 (SEQ ID NO:374), FIG. 376 (SEQ ID NO:376), FIG. 378 (SEQ ID NO:378), FIG. 380 (SEQ ID NO:380), FIG. 382 (SEQ ID NO:382), FIG. 384 (SEQ ID NO:384), FIG. 386 (SEQ ID NO:386), FIG. 388 (SEQ ID NO:388), FIG. 390 (SEQ ID NO:390), FIG. 392 (SEQ ID NO:392), FIG. 394 (SEQ ID NO:394), FIG. 396 (SEQ ID NO:396), FIG. 398 (SEQ ID NO:398), FIG. 400 (SEQ ID NO:400), FIG. 402 (SEQ ID NO:402), FIG. 404 (SEQ ID NO:404), FIG. 406 (SEQ ID NO:406), FIG. 408 (SEQ ID NO:408), FIG. 410 (SEQ ID NO:410), FIG. 412 (SEQ ID NO:412), FIG. 414 (SEQ ID NO:414), FIG. 416 (SEQ ID NO:416), FIG. 418 (SEQ ID NO:418), FIG. 420 (SEQ ID NO:420), FIG. 422 (SEQ ID NO:422), FIG. 424 (SEQ ID NO:424), FIG. 426 (SEQ ID NO:426), FIG. 428 (SEQ ID NO:428), FIG. 430 (SEQ ID NO:430), FIG. 432 (SEQ ID NO:432), FIG. 434 (SEQ ID NO:434), FIG. 436 (SEQ ID NO:436), FIG. 438 (SEQ ID NO:438), FIG. 440 (SEQ ID NO:440), FIG. 442 (SEQ ID NO:442), FIG. 444 (SEQ ID NO:444), FIG. 446 (SEQ ID NO:446), FIG. 448 (SEQ ID NO:448), FIG. 450 (SEQ ID NO:450), FIG. 452 (SEQ ID NO:452), FIG. 454 (SEQ ID NO:454), FIG. 456 (SEQ ID NO:456), FIG. 458 (SEQ ID NO:458), FIG. 460 (SEQ ID NO:460), FIG. 462 (SEQ ID NO:462), FIG. 464 (SEQ ID NO:464), FIG. 466 (SEQ ID NO:466), FIG. 467 (SEQ ID NO:467), FIG. 470 (SEQ ID NO:470), FIG. 472 (SEQ ID NO:472), FIG. 474 (SEQ ID NO:474), FIG. 476 (SEQ ID NO:476), FIG. 478 (SEQ ID NO:478), FIG. 480 (SEQ ID NO:480), FIG. 482 (SEQ ID NO:482), FIG. 484 (SEQ ID NO:484), FIG. 486 (SEQ ID NO:486), FIG. 488 (SEQ ID NO:488), FIG. 490 (SEQ ID NO:490), FIG. 492 (SEQ ID NO:492), FIG. 494 (SEQ ID NO:494), FIG. 496 (SEQ ID NO:496), FIG. 498 (SEQ ID NO:498), FIG. 500 (SEQ ID NO:500), FIG. 502 (SEQ ID NO:502), FIG. 504 (SEQ ID NO:504), FIG. 506 (SEQ ID NO:506), FIG. 508 (SEQ ID NO:508), FIG. 510 (SEQ ID NO:510), FIG. 512 (SEQ ID NO:512), FIG. 514 (SEQ ID NO:514), FIG. 516 (SEQ ID NO:516), FIG. 518 (SEQ ID NO:518), FIG. 520 (SEQ ID NO:520), FIG. 522 (SEQ ID NO:522), FIG. 524 (SEQ ID NO:524), FIG. 526 (SEQ ID NO:526), FIG. 528 (SEQ ID NO:528), FIG. 530 (SEQ ID NO:530), FIG. 532 (SEQ ID NO:532), FIG. 534 (SEQ ID NO:534), FIG. 536 (SEQ ID NO:536), FIG. 538 (SEQ ID NO:538), FIG. 540 (SEQ ID NO:540), FIG. 542 (SEQ ID NO:542), FIG. 544 (SEQ ID NO:544), FIG. 546 (SEQ ID NO:546), FIG. 548 (SEQ ID NO:548), FIG. 550 (SEQ ID NO:550), FIG. 552 (SEQ ID NO:552), FIG. 554 (SEQ ID NO:554), FIG. 556 (SEQ ID NO:556), FIG. 558 (SEQ ID NO:558), FIG. 560 (SEQ ID NO:560), FIG. 562 (SEQ ID NO:562), FIG. 564 (SEQ ID NO:564), FIG. 566 (SEQ ID NO:566), FIG. 568 (SEQ ID NO:568), FIG. 570 (SEQ ID NO:570), FIG. 572 (SEQ ID NO:572), FIG. 574 (SEQ ID NO:574), FIG. 576 (SEQ ID NO:576), FIG. 578 (SEQ ID NO:578), FIG. 580 (SEQ ID NO:580), FIG. 582 (SEQ ID NO:582), FIG. 584 (SEQ ID NO:584), FIG. 586 (SEQ ID NO:586), FIG. 588 (SEQ ID NO:588), FIG. 590 (SEQ ID NO:590), FIG. 592 (SEQ ID NO:592), FIG. 594 (SEQ ID NO:594), FIG. 596 (SEQ ID NO:596), FIG. 598 (SEQ ID NO:598), FIG. 600 (SEQ ID NO:600), FIG. 602 (SEQ ID NO:602), FIG. 604 (SEQ ID NO:604), FIG. 606 (SEQ ID NO:606), FIG. 608 (SEQ ID NO:608), FIG. 610 (SEQ ID NO:610), FIG. 612 (SEQ ID NO:612), FIG. 614 (SEQ ID NO:614), FIG. 616 (SEQ ID NO:616), FIG. 618 (SEQ ID NO:618), FIG. 620 (SEQ ID NO:620), FIG. 622 (SEQ ID NO:622), FIG. 624 (SEQ ID NO:624), FIG. 626 (SEQ ID NO:626), FIG. 628 (SEQ ID NO:628), FIG. 630 (SEQ ID NO:630), FIG. 632 (SEQ ID NO:632), FIG. 634 (SEQ ID NO:634), FIG. 637 (SEQ ID NO:637), FIG. 639 (SEQ ID NO:639), FIG. 641 (SEQ ID NO:641), FIG. 643 (SEQ ID NO:643), FIG. 645 (SEQ ID NO:645), FIG. 647 (SEQ ID NO:647), FIG. 649 (SEQ ID NO:649), FIG. 651 (SEQ ID NO:651), FIG. 653 (SEQ ID NO:653), FIG. 655 (SEQ ID NO:655), FIG. 657 (SEQ ID NO:657), FIG. 659 (SEQ ID NO:659), FIG. 661 (SEQ ID NO:661), FIG. 663 (SEQ ID NO:663), FIG. 665 (SEQ ID NO:665), FIG. 667 (SEQ ID NO:667), FIG. 669 (SEQ ID NO:669), FIG. 671 (SEQ ID NO:671), FIG. 673 (SEQ ID NO:673), FIG. 675 (SEQ ID NO:675), FIG. 677 (SEQ ID NO:677), FIG. 679 (SEQ ID NO:679), FIG. 681 (SEQ ID NO:681), FIG. 683 (SEQ ID NO:683), FIG. 685 (SEQ ID NO:685), FIG. 687 (SEQ ID NO:687), FIG. 689 (SEQ ID NO:689), FIG. 691 (SEQ ID NO:691), FIG. 693 (SEQ ID NO:693), FIG. 695 (SEQ ID NO:695), FIG. 697 (SEQ ID NO:697), FIG. 699 (SEQ ID NO:699), FIG. 701 (SEQ ID NO:701), FIG. 703 (SEQ ID NO:703), FIG. 705 (SEQ ID NO:705), FIG. 707 (SEQ ID NO:707), FIG. 709 (SEQ ID NO:709), FIG. 711 (SEQ ID NO:711), FIG. 713 (SEQ ID NO:713), FIG. 715 (SEQ ID NO:715), FIG. 717 (SEQ ID NO:717), FIG. 719 (SEQ ID NO:719), FIG. 721 (SEQ ID NO:721), FIG. 723 (SEQ ID NO:723), FIG. 725 (SEQ ID NO:725), FIG. 727 (SEQ ID NO:727), FIG. 729 (SEQ ID NO:729), FIG. 731 (SEQ ID NO:731), FIG. 733 (SEQ ID NO:733), FIG. 735 (SEQ ID NO:735), FIG. 737 (SEQ ID NO:737), FIG. 739 (SEQ ID NO:739), FIG. 741 (SEQ ID NO:741), FIG. 743 (SEQ ID NO:743), FIG. 745 (SEQ ID NO:745), FIG. 747 (SEQ ID NO:747), FIG. 749 (SEQ ID NO:749), FIG. 751 (SEQ ID NO:751), FIG. 753 (SEQ ID NO:753), FIG. 755 (SEQ ID NO:755), FIG. 757 (SEQ ID NO:757), FIG. 759 (SEQ ID NO:759), FIG. 761 (SEQ ID NO:761), FIG. 763 (SEQ ID NO:763), FIG. 765 (SEQ ID NO:765), FIG. 767 (SEQ ID NO:767), FIG. 770 (SEQ ID NO:770), FIG. 772 (SEQ ID NO:772), FIG. 774 (SEQ ID NO:774), FIG. 776 (SEQ ID NO:776), FIG. 778 (SEQ ID NO:778), FIG. 780 (SEQ ID NO:780), FIG. 782 (SEQ ID NO:782), FIG. 784 (SEQ ID NO:784), FIG. 786 (SEQ ID NO:786), FIG. 788 (SEQ ID NO:788), FIG. 790 (SEQ ID NO:790), FIG. 792 (SEQ ID NO:792), FIG. 794 (SEQ ID NO:794), FIG. 796 (SEQ ID NO:796), FIG. 798 (SEQ ID NO:798), FIG. 800 (SEQ ID NO:800), FIG. 802 (SEQ ID NO:802), FIG. 805 (SEQ ID NO:805), FIG. 807 (SEQ ID NO:807), FIG. 809 (SEQ ID NO:809), FIG. 811 (SEQ ID NO:811), FIG. 813 (SEQ ID NO:813), FIG. 815 (SEQ ID NO:815), FIG. 817 (SEQ ID NO:817), FIG. 819 (SEQ ID NO:819), FIG. 821 (SEQ ID NO:821), FIG. 823 (SEQ ID NO:823), FIG. 826 (SEQ ID NO:826), FIG. 828 (SEQ ID NO:828), FIG. 830 (SEQ ID NO:830), FIG. 832 (SEQ ID NO:832), FIG. 834 (SEQ ID NO:834), FIG. 836 (SEQ ID NO:836), FIG. 838 (SEQ ID NO:838), FIG. 840 (SEQ ID NO:840), FIG. 842 (SEQ ID NO:842), FIG. 844 (SEQ ID NO:844), FIG. 846 (SEQ ID NO:846), FIG. 848 (SEQ ID NO:848), FIG. 850 (SEQ ID NO:850), FIG. 852 (SEQ ID NO:852), FIG. 854 (SEQ ID NO:854), FIG. 856 (SEQ ID NO:856), FIG. 858 (SEQ ID NO:858), FIG. 860 (SEQ ID NO:860), FIG. 862 (SEQ ID NO:862), FIG. 864 (SEQ ID NO:864), FIG. 866 (SEQ ID NO:866), FIG. 868 (SEQ ID NO:868), FIG. 870 (SEQ ID NO:870), FIG. 872 (SEQ ID NO:872), FIG. 874 (SEQ ID NO:874), FIG. 876 (SEQ ID NO:876), FIG. 878 (SEQ ID NO:878), FIG. 880 (SEQ ID NO:880), FIG. 882 (SEQ ID NO:882), FIG. 884 (SEQ ID NO:884), FIG. 886 (SEQ ID NO:886), FIG. 888 (SEQ ID NO:888), FIG. 890 (SEQ ID NO:890), FIG. 892 (SEQ ID NO:892), FIG. 894 (SEQ ID NO:894), FIG. 896 (SEQ ID NO:896), FIG. 898 (SEQ ID NO:898), FIG. 900 (SEQ ID NO:900), FIG. 902 (SEQ ID NO:902), FIG. 904 (SEQ ID NO:904), FIG. 906 (SEQ ID NO:906), FIG. 908 (SEQ ID NO:908), FIG. 911 (SEQ ID NO:911), FIG. 913 (SEQ ID NO:913), FIG. 915 (SEQ ID NO:915), FIG. 917 (SEQ ID NO:917), FIG. 919 (SEQ ID NO:919), FIG. 921 (SEQ ID NO:921), FIG. 923 (SEQ ID NO:923), FIG. 925 (SEQ ID NO:925), FIG. 927 (SEQ ID NO:927), FIG. 929 (SEQ ID NO:929), FIG. 931 (SEQ ID NO:931), FIG. 933 (SEQ ID NO:933), FIG. 935 (SEQ ID NO:935), FIG. 937 (SEQ ID NO:937), FIG. 940 (SEQ ID NO:940), FIG. 943 (SEQ ID NO:943), FIG. 946 (SEQ ID NO:946), FIG. 948 (SEQ ID NO:948), FIG. 950 (SEQ ID NO:950), FIG. 952 (SEQ ID NO:952), FIG. 955 (SEQ ID NO:955), FIG. 957 (SEQ ID NO:957), FIG. 959 (SEQ ID NO:959), FIG. 961 (SEQ ID NO:961), FIG. 966 (SEQ ID NO:966), FIG. 968 (SEQ ID NO:968), FIG. 970 (SEQ ID NO:970), FIG. 972 (SEQ ID NO:972), FIG. 974 (SEQ ID NO:974), FIG. 976 (SEQ ID NO:976), FIG. 978 (SEQ ID NO:978), FIG. 980 (SEQ ID NO:980), FIG. 985 (SEQ ID NO:985), FIG. 988 (SEQ ID NO:988), FIG. 991 (SEQ ID NO:991), FIG. 993 (SEQ ID NO:993), FIG. 995 (SEQ ID NO:995), FIG. 997 (SEQ ID NO:997), FIG. 1000 (SEQ ID NO:1000), FIG. 1002 (SEQ ID NO:1002), FIG. 1005 (SEQ ID NO:1005), FIG. 1007 (SEQ ID NO:1007), FIG. 1009 (SEQ ID NO:1009), FIG. 1011 (SEQ ID NO:1011), FIG. 1013 (SEQ ID NO:1013), FIG. 1015 (SEQ ID NO:1015), FIG. 1017 (SEQ ID NO:1017), FIG. 1019 (SEQ ID NO:1019), FIG. 1022 (SEQ ID NO:1022), FIG. 1024 (SEQ ID NO:1024), FIG. 1026 (SEQ ID NO:1026), FIG. 1028 (SEQ ID NO:1028), FIG. 1030 (SEQ ID NO:1030), FIG. 1032 (SEQ ID NO:1032), FIG. 1034 (SEQ ID NO:1034), FIG. 1036 (SEQ ID NO:1036), FIG. 1038 (SEQ ID NO:1083), FIG. 1040 (SEQ ID NO:1040), FIG. 1042 (SEQ ID NO:1042), FIG. 1044 (SEQ ID NO:1044), FIG. 1047 (SEQ ID NO:1047), FIG. 1049 (SEQ ID NO:1049), FIG. 1051 (SEQ ID NO:1051), FIG. 1053 (SEQ ID NO:1053), FIG. 1055 (SEQ ID NO1055), FIG. 1057 (SEQ ID NO:1057), FIG. 1060 (SEQ ID NO:1060), FIG. 1062 (SEQ ID NO:1062), FIG. 1064 (SEQ ID NO:1064), FIG. 1066 (SEQ ID NO:1066), FIG. 1068 (SEQ ID NO:1068), FIG. 1070 (SEQ ID NO:1070), FIG. 1072 (SEQ ID NO:1072), FIG. 1074 (SEQ ID NO:1074), FIG. 1076 (SEQ ID NO:1076), FIG. 1078 (SEQ ID NO:1078), FIG. 1080 (SEQ ID NO:1080), FIG. 1082 (SEQ ID NO:1082), FIG. 1084 (SEQ ID NO:1084), FIG. 1086 (SEQ ID NO:1086), FIG. 1089 (SEQ ID NO:1089), FIG. 1091 (SEQ ID NO:1091), FIG. 1093 (SEQ ID NO:1093), FIG. 1098 (SEQ ID NO:1098), FIG. 1100 (SEQ ID NO:1100), FIG. 1103 (SEQ ID NO:1103), FIG. 1105 (SEQ ID NO:1105), FIG. 1107 (SEQ ID NO:1107), FIG. 1110 (SEQ ID NO:1110), FIG. 1112 (SEQ ID NO:1112), FIG. 1114 (SEQ ID NO:1114), FIG. 1116 (SEQ ID NO:1116), FIG. 1118 (SEQ ID NO:1118), FIG. 1120 (SEQ ID NO:1120), FIG. 1122 (SEQ ID NO:1122), FIG. 1124 (SEQ ID NO:1124), FIG. 1126 (SEQ ID NO:1126), FIG. 1128 (SEQ ID NO:1128), FIG. 1130 (SEQ ID NO:1130), FIG. 1132 (SEQ ID NO:1132), FIG. 1134 (SEQ ID NO:1134), FIG. 1136 (SEQ ID NO:1136), FIG. 1138 (SEQ ID NO:1138), FIG. 1140 (SEQ ID NO:1140), FIG. 1142 (SEQ ID NO:1142), FIG. 1144 (SEQ ID NO:1144), FIG. 1146 (SEQ ID NO:1146), FIG. 1148 (SEQ ID NO:1148), FIG. 1150 (SEQ ID NO:1150), FIG. 1153 (SEQ ID NO:1153), FIG. 1155 (SEQ ID NO:1155), FIG. 1157 (SEQ ID NO:1157), FIG. 1159 (SEQ ID NO:1159), FIG. 1161 (SEQ ID NO:1161), FIG. 1164 (SEQ ID NO:1164), FIG. 1166 (SEQ ID NO:1166), FIG. 1168 (SEQ ID NO:1168), FIG. 1170 (SEQ ID NO:1170), FIG. 1172 (SEQ ID NO:1172), FIG. 1174 (SEQ ID NO:1174), FIG. 1176 (SEQ ID NO:1176), FIG. 1178 (SEQ ID NO:1178), FIG. 1180 (SEQ ID NO:1180), FIG. 1182 (SEQ ID NO:1182), FIG. 1184 (SEQ ID NO:1184), FIG. 1186 (SEQ ID NO:1186), FIG. 1188 (SEQ ID NO:1188), FIG. 1190 (SEQ ID NO:1190), FIG. 1192 (SEQ ID NO:1192), FIG. 1194 (SEQ ID NO:1194), FIG. 1196 (SEQ ID NO:1196), FIG. 1198 (SEQ ID NO:1198), FIG. 1200 (SEQ ID NO:1200), FIG. 1202 (SEQ ID NO:1202), FIG. 1204 (SEQ ID NO:1204), FIG. 1206 (SEQ ID NO:1206), FIG. 1208 (SEQ ID NO:1208), FIG. 1210 (SEQ ID NO:1210), FIG. 1212 (SEQ ID NO:1212), FIG. 1214 (SEQ ID NO:1214), FIG. 1216 (SEQ ID NO:1216), FIG. 1218 (SEQ ID NO:1218), FIG. 1220 (SEQ ID NO:1220), FIG. 1222 (SEQ ID NO:1222), FIG. 1224 (SEQ ID NO:1224), FIG. 1226 (SEQ ID NO:1226), FIG. 1228 (SEQ ID NO:1228), FIG. 1230 (SEQ ID NO:1230), FIG. 1232 (SEQ ID NO:1232), FIG. 1234 (SEQ ID NO:1234), FIG. 1236 (SEQ ID NO:1236), FIG. 1238 (SEQ ID NO:1238), FIG. 1240 (SEQ ID NO:1240), FIG. 1242 (SEQ ID NO:1242), FIG. 1244 (SEQ ID NO:1244), FIG. 1246 (SEQ ID NO:1246), FIG. 1248 (SEQ ID NO:1248), FIG. 1250 (SEQ ID NO:1250), FIG. 1252 (SEQ ID NO:1252), FIG. 1254 (SEQ ID NO:1254), FIG. 1256 (SEQ ID NO:1256), FIG. 1258 (SEQ ID NO:1258), FIG. 1260 (SEQ ID NO:1260), FIG. 1262 (SEQ ID NO:1262), FIG. 1264 (SEQ ID NO:1264), FIG. 1266 (SEQ ID NO:1266), FIG. 1268 (SEQ ID NO:1268), FIG. 1270 (SEQ ID NO:1270), FIG. 1272 (SEQ ID NO:1272), FIG. 1274 (SEQ ID NO:1274), FIG. 1276 (SEQ ID NO:1276), FIG. 1278 (SEQ ID NO:1278), FIG. 1280 (SEQ ID NO:1280), FIG. 1282 (SEQ ID NO:1282), FIG. 1284 (SEQ ID NO:1284), FIG. 1286 (SEQ ID NO:1286), FIG. 1288 (SEQ ID NO:1288), FIG. 1290 (SEQ ID NO:1290), FIG. 1292 (SEQ ID NO:1292), FIG. 1294 (SEQ ID NO:1294), FIG. 1296 (SEQ ID NO:1296), FIG. 1298 (SEQ ID NO:1298), FIG. 1300 (SEQ ID NO:1300), FIG. 1302 (SEQ ID NO:1302), FIG. 1304 (SEQ ID NO:1304), FIG. 1306 (SEQ ID NO:1306), FIG. 1308 (SEQ ID NO:1308), FIG. 1310 (SEQ ID NO:1310), FIG. 1312 (SEQ ID NO:1312), FIG. 1314 (SEQ ID NO:1314), FIG. 1316 (SEQ ID NO:1316), FIG. 1318 (SEQ ID NO:1318), FIG. 1320 (SEQ ID NO:1320), FIG. 1322 (SEQ ID NO:1322), FIG. 1324 (SEQ ID NO:1324), FIG. 1326 (SEQ ID NO:1326), FIG. 1328 (SEQ ID NO:1328), FIG. 1330 (SEQ ID NO:1330), FIG. 1332 (SEQ ID NO:1332), FIG. 1334 (SEQ ID NO:1334), FIG. 1336 (SEQ ID NO:1336), FIG. 1338 (SEQ ID NO:1338), FIG. 1340 (SEQ ID NO:140), FIG. 1342 (SEQ ID NO:1342), FIG. 1344 (SEQ ID NO:1344), FIG. 1346 (SEQ ID NO:1346), FIG. 1348 (SEQ ID NO:1348), FIG. 1350 (SEQ ID NO:1350), FIG. 1352 (SEQ ID NO:1352), FIG. 1354 (SEQ ID NO:1354), FIG. 1356 (SEQ ID NO:1356), FIG. 1358 (SEQ ID NO:1358), FIG. 1360 (SEQ ID NO:1360), FIG. 1362 (SEQ ID NO:1362), FIG. 1364 (SEQ ID NO:1364), FIG. 1366 (SEQ ID NO:1366), FIG. 1368 (SEQ ID NO:1368), FIG. 1370 (SEQ ID NO:1370), FIG. 1372 (SEQ ID NO:1372), FIG. 1374 (SEQ ID NO:1374), FIG. 1376 (SEQ ID NO:1376), FIG. 1378 (SEQ ID NO:1378), FIG. 1380 (SEQ ID NO:1379), FIG. 1382 (SEQ ID NO:1382), FIG. 1384 (SEQ ID NO:1384), FIG. 1386 (SEQ ID NO:1386), FIG. 1388 (SEQ ID NO:1388), FIG. 1390 (SEQ ID NO:1390), FIG. 1392 (SEQ ID NO:1392), FIG. 1394 (SEQ ID NO:1394), FIG. 1396 (SEQ ID NO:1396), FIG. 1398 (SEQ ID NO:1398), FIG. 1400 (SEQ ID NO:1400), FIG. 1402 (SEQ ID NO:1402), FIG. 1404 (SEQ ID NO:1404), FIG. 1406 (SEQ ID NO:1406), FIG. 1408 (SEQ ID NO:1408), FIG. 1410 (SEQ ID NO:1410), FIG. 1412 (SEQ ID NO:1412), FIG. 1414 (SEQ ID NO:1414), FIG. 1416 (SEQ ID NO:1416), FIG. 1418 (SEQ ID NO:1418), FIG. 1420 (SEQ ID NO:1420), FIG. 1422 (SEQ ID NO:1422), FIG. 1425 (SEQ ID NO:1425), FIG. 1427 (SEQ ID NO:1427), FIG. 1429 (SEQ ID NO:1429), FIG. 1432 (SEQ ID NO:1432), FIG. 1434 (SEQ ID NO:1434), FIG. 1436 (SEQ ID NO:1436), FIG. 1438 (SEQ ID NO:1438), FIG. 1440 (SEQ ID NO:1440), FIG. 1442 (SEQ ID NO:1442), FIG. 1444 (SEQ ID NO:1444), FIG. 1446 (SEQ ID NO:1446), FIG. 1448 (SEQ ID NO:1448), FIG. 1450 (SEQ ID NO:1450), FIG. 1452 (SEQ ID NO:1452), FIG. 1454 (SEQ ID NO:1454), FIG. 1456 (SEQ ID NO:1456), FIG. 1458 (SEQ ID NO:1458), FIG. 1460 (SEQ ID NO:1460), FIG. 1462 (SEQ ID NO:1462), FIG. 1464 (SEQ ID NO:1464), FIG. 1466 (SEQ ID NO:1466), FIG. 1468 (SEQ ID NO:1468), FIG. 1470 (SEQ ID NO:1470), FIG. 1472 (SEQ ID NO:1472), FIG. 1474 (SEQ ID NO:1474), FIG. 1476 (SEQ ID NO:1476), FIG. 1478 (SEQ ID NO:1478), FIG. 1480 (SEQ ID NO:1480), FIG. 1482 (SEQ ID NO:1482), FIG. 1484 (SEQ ID NO:1484), FIG. 1486 (SEQ ID NO:1486), FIG. 1488 (SEQ ID NO:1488), FIG. 1490 (SEQ ID NO:1490), FIG. 1492 (SEQ ID NO:1492), FIG. 1494 (SEQ ID NO:1494), FIG. 1496 (SEQ ID NO:1496), FIG. 1498 (SEQ ID NO:1498), FIG. 1500 (SEQ ID NO:1500), FIG. 1502 (SEQ ID NO:1502), FIG. 1504 (SEQ ID NO:1504), FIG. 1506 (SEQ ID NO:1506), FIG. 1508 (SEQ ID NO:1508), FIG. 1510 (SEQ ID NO:1510), FIG. 1512 (SEQ ID NO:1512), FIG. 1514 (SEQ ID NO:1514), FIG. 1516 (SEQ ID NO:1516), FIG. 1518 (SEQ ID NO:1518), FIG. 1520 (SEQ ID NO:1520), FIG. 1522 (SEQ ID NO:1522), FIG. 1524 (SEQ ID NO:1524), FIG. 1526 (SEQ ID NO:1526), FIG. 1528 (SEQ ID NO:1528), FIG. 1530 (SEQ ID NO:1530), FIG. 1532 (SEQ ID NO:1532), FIG. 1534 (SEQ ID NO:1534), FIG. 1536 (SEQ ID NO:1536), FIG. 1538 (SEQ ID NO:1538), FIG. 1540 (SEQ ID NO:1540), FIG. 1542 (SEQ ID NO:1542), FIG. 1544 (SEQ ID NO:1544), FIG. 1546 (SEQ ID NO:1546), FIG. 1548 (SEQ ID NO:1548), FIG. 1550 (SEQ ID NO:1550), FIG. 1552 (SEQ ID NO:1552), FIG. 1554 (SEQ ID NO:1554), FIG. 1556 (SEQ ID NO:1556), FIG. 1558 (SEQ ID NO:1558), FIG. 1560 (SEQ ID NO:1560), FIG. 1562 (SEQ ID NO:1562), FIG. 1564 (SEQ ID NO:1654), FIG. 1566 (SEQ ID NO:1566), FIG. 1568 (SEQ ID NO:1568), FIG. 1570 (SEQ ID NO:1570), FIG. 1572 (SEQ ID NO:1572), FIG. 1574 (SEQ ID NO:1574), FIG. 1576 (SEQ ID NO:1576), FIG. 1578 (SEQ ID NO:1578), FIG. 1580 (SEQ ID NO:1580), FIG. 1582 (SEQ ID NO:1582), FIG. 1585 (SEQ ID NO:1585), FIG. 1587 (SEQ ID NO:1587), FIG. 1590 (SEQ ID NO:1590), FIG. 1592 (SEQ ID NO:1592), FIG. 1594 (SEQ ID NO:1594), FIG. 1597 (SEQ ID NO:1597), FIG. 1599 (SEQ ID NO:1599), FIG. 1601 (SEQ ID NO:1601), FIG. 1603 (SEQ ID NO:1603), FIG. 1605 (SEQ ID NO:1605), FIG. 1607 (SEQ ID NO:1607), FIG. 1610 (SEQ ID NO:1610), FIG. 1613 (SEQ ID NO:1613), FIG. 1615 (SEQ ID NO:1615), FIG. 1617 (SEQ ID NO:1617), FIG. 1619 (SEQ ID NO:1619), FIG. 1621 (SEQ ID NO:1621), FIG. 1623 (SEQ ID NO:1623), FIG. 1625 (SEQ ID NO:1625), FIG. 1627 (SEQ ID NO:1627), FIG. 1629 (SEQ ID NO:1629), FIG. 1631 (SEQ ID NO:1631), FIG. 1633 (SEQ ID NO:1633), FIG. 1635 (SEQ ID NO:1635), FIG. 1637 (SEQ ID NO:1637), FIG. 1639 (SEQ ID NO:1639), FIG. 1641 (SEQ ID NO:1641), FIG. 1643 (SEQ ID NO:1643), FIG. 1645 (SEQ ID NO:1645), FIG. 1647 (SEQ ID NO:1647), FIG. 1650 (SEQ ID NO:1650), FIG. 1654 (SEQ ID NO:1654), FIG. 1656 (SEQ ID NO:1656), FIG. 1658 (SEQ ID NO:1658), FIG. 1660 (SEQ ID NO:1660), FIG. 1662 (SEQ ID NO:1662), FIG. 1664 (SEQ ID NO:1664), FIG. 1666 (SEQ ID NO:1666), FIG. 1668 (SEQ ID NO:1668), FIG. 1670 (SEQ ID NO:1670), FIG. 1672 (SEQ ID NO:1672), FIG. 1674 (SEQ ID NO:1674), FIG. 1676 (SEQ ID NO:1676), FIG. 1678 (SEQ ID NO:1678), FIG. 1680 (SEQ ID NO:1680), FIG. 1682 (SEQ ID NO:1682), FIG. 1686 (SEQ ID NO:1686), FIG. 1688 (SEQ ID NO:1688), FIG. 1691 (SEQ ID NO:1691), FIG. 1693 (SEQ ID NO:1693), FIG. 1695 (SEQ ID NO:1695), FIG. 1697 (SEQ ID NO:1697), FIG. 1699 (SEQ ID NO:1699), FIG. 1701 (SEQ ID NO:1701), FIG. 1703 (SEQ ID NO:1703), FIG. 1705 (SEQ ID NO:1705), FIG. 1708 (SEQ ID NO:1708), FIG. 1710 (SEQ ID NO:1710), FIG. 1712 (SEQ ID NO:1712), FIG. 1714 (SEQ ID NO:1714), FIG. 1716 (SEQ ID NO:1716), FIG. 1718 (SEQ ID NO:1718), FIG. 1720 (SEQ ID NO:1720), FIG. 1722 (SEQ ID NO:1722), FIG. 1725 (SEQ ID NO:1725), FIG. 1727 (SEQ ID NO:1727), FIG. 1729 (SEQ ID NO:1729), FIG. 1731 (SEQ ID NO:1731), FIG. 1733 (SEQ ID NO:1733), FIG. 1735 (SEQ ID NO:1735), FIG. 1738 (SEQ ID NO:1738), FIG. 1740 (SEQ ID NO:1740), FIG. 1742 (SEQ ID NO:1742), FIG. 1744 (SEQ ID NO:1744), FIG. 1746 (SEQ ID NO:1746), FIG. 1748 (SEQ ID NO:1748), FIG. 1750 (SEQ ID NO:1750), FIG. 1752 (SEQ ID NO:1752), FIG. 1754 (SEQ ID NO:1754), FIG. 1756 (SEQ ID NO:1756), FIG. 1758 (SEQ ID NO:1758), FIG. 1760 (SEQ ID NO:1760), FIG. 1762 (SEQ ID NO:1762), FIG. 1764 (SEQ ID NO:1764), FIG. 1767 (SEQ ID NO:1767), FIG. 1769 (SEQ ID NO:1769), FIG. 1771 (SEQ ID NO:1771), FIG. 1774 (SEQ ID NO:1774), FIG. 1776 (SEQ ID NO:1776), FIG. 1779 (SEQ ID NO:1779), FIG. 1782 (SEQ ID NO:1782), FIG. 1784 (SEQ ID NO:1784), FIG. 1786 (SEQ ID NO:1786), FIG. 1789 (SEQ ID NO:1789), FIG. 1791 (SEQ ID NO:1791), FIG. 1794 (SEQ ID NO:1794), FIG. 1796 (SEQ ID NO:1796), FIG. 1798 (SEQ ID NO:1798), FIG. 1800 (SEQ ID NO:1800), FIG. 1802 (SEQ ID NO:1802), FIG. 1804 (SEQ ID NO:1804), FIG. 1806 (SEQ ID NO:1806), FIG. 1808 (SEQ ID NO:1808), FIG. 1810 (SEQ ID NO:1810), FIG. 1812 (SEQ ID NO:1812), FIG. 1814 (SEQ ID NO:1814), FIG. 1816 (SEQ ID NO:1816), FIG. 1818 (SEQ ID NO:1818), FIG. 1820 (SEQ ID NO:1820), FIG. 1822 (SEQ ID NO:1822), FIG. 1824 (SEQ ID NO:1824), FIG. 1826 (SEQ ID NO:1826), FIG. 1828 (SEQ ID NO:1828), FIG. 1830 (SEQ ID NO:1830), FIG. 1832 (SEQ ID NO:1832), FIG. 1834 (SEQ ID NO:1834), FIG. 1836 (SEQ ID NO:1836), FIG. 1838 (SEQ ID NO:1838), FIG. 1840 (SEQ ID NO:1840), FIG. 1842 (SEQ ID NO:1842), FIG. 1844 (SEQ ID NO:1844), FIG. 1846 (SEQ ID NO:1846), FIG. 1848 (SEQ ID NO:1848), FIG. 1850 (SEQ ID NO:1850), FIG. 1852 (SEQ ID NO:1852), FIG. 1856 (SEQ ID NO:1856), FIG. 1858 (SEQ ID NO:1858), FIG. 1860 (SEQ ID NO:1860), FIG. 1862 (SEQ ID NO:1862), FIG. 1864 (SEQ ID NO:1864), FIG. 1867 (SEQ ID NO:1867), FIG. 1869 (SEQ ID NO:1869), FIG. 1871 (SEQ ID NO:1871), FIG. 1873 (SEQ ID NO:1873), FIG. 1876 (SEQ ID NO:1876), FIG. 1878 (SEQ ID NO:1878), FIG. 1880 (SEQ ID NO:1880), FIG. 1883 (SEQ ID NO:1883), FIG. 1885 (SEQ ID NO:1885), FIG. 1887 (SEQ ID NO:1887), FIG. 1890 (SEQ ID NO:1890), FIG. 1892 (SEQ ID NO:1892), FIG. 1894 (SEQ ID NO:1894), FIG. 1896 (SEQ ID NO:1896), FIG. 1898 (SEQ ID NO:1898), FIG. 1900 (SEQ ID NO:1900), FIG. 1902 (SEQ ID NO:1902), FIG. 1904 (SEQ ID NO:1904), FIG. 1906 (SEQ ID NO:1906), FIG. 1908 (SEQ ID NO:1908), FIG. 1910 (SEQ ID NO:1910), FIG. 1912 (SEQ ID NO:1912), FIG. 1914 (SEQ ID NO:1914), FIG. 1916 (SEQ ID NO:1916), FIG. 1918 (SEQ ID NO:1918), FIG. 1920 (SEQ ID NO:1920), FIG. 1922 (SEQ ID NO:1922), FIG. 1924 (SEQ ID NO:1924), FIG. 1926 (SEQ ID NO:1926), FIG. 1928 (SEQ ID NO:1928), FIG. 1930 (SEQ ID NO:1930), FIG. 1932 (SEQ ID NO:1932), FIG. 1934 (SEQ ID NO:1934), FIG. 1936 (SEQ ID NO:1936), FIG. 1938 (SEQ ID NO:1938), FIG. 1940 (SEQ ID NO:1940), FIG. 1942 (SEQ ID NO:1942), FIG. 1944 (SEQ ID NO:1944), FIG. 1946 (SEQ ID NO:1946), FIG. 1948 (SEQ ID NO:1948), FIG. 1951 (SEQ ID NO:1951), FIG. 1953 (SEQ ID NO:1953), FIG. 1955 (SEQ ID NO:1955), FIG. 1957 (SEQ ID NO:1957), FIG. 1959 (SEQ ID NO:1959), FIG. 1961 (SEQ ID NO:1961), FIG. 1964 (SEQ ID NO:1964), FIG. 1966 (SEQ ID NO:1966), FIG. 1968 (SEQ ID NO:1968), FIG. 1970 (SEQ ID NO:1970), FIG. 1972 (SEQ ID NO:1972), FIG. 1974 (SEQ ID NO:1974), FIG. 1976 (SEQ ID NO:1976), FIG. 1978 (SEQ ID NO:1978), FIG. 1980 (SEQ ID NO:1980), FIG. 1982 (SEQ ID NO:1982), FIG. 1984 (SEQ ID NO:1984), FIG. 1986 (SEQ ID NO:1986), FIG. 1988 (SEQ ID NO:1988), FIG. 1990 (SEQ ID NO:1990), FIG. 1992 (SEQ ID NO:1992), FIG. 1994 (SEQ ID NO:1994), FIG. 1996 (SEQ ID NO:1996), FIG. 1998 (SEQ ID NO:1998), FIG. 2000 (SEQ ID NO:2000), FIG. 2002 (SEQ ID NO:2002), FIG. 2004 (SEQ ID NO:2004), FIG. 2006 (SEQ ID NO:2006), FIG. 2008 (SEQ ID NO:2008), FIG. 2010 (SEQ ID NO:2010), FIG. 2012 (SEQ ID NO:2012), FIG. 2014 (SEQ ID NO:2014), FIG. 2016 (SEQ ID NO:2016), FIG. 2018 (SEQ ID NO:2018), FIG. 2020 (SEQ ID NO:2020), FIG. 2022 (SEQ ID NO:2022), FIG. 2024 (SEQ ID NO:2024), FIG. 2026 (SEQ ID NO:2026), FIG. 2028 (SEQ ID NO:2028), FIG. 2030 (SEQ ID NO:2030), FIG. 2032 (SEQ ID NO:2032), FIG. 2034 (SEQ ID NO:2034), FIG. 2036 (SEQ ID NO:2036), FIG. 2038 (SEQ ID NO:2038), FIG. 2040 (SEQ ID NO:2040), FIG. 2042 (SEQ ID NO:2042), FIG. 2044 (SEQ ID NO:2044), FIG. 2046 (SEQ ID NO:2046), FIG. 2048 (SEQ ID NO:2048), FIG. 2050 (SEQ ID NO:2050), FIG. 2052 (SEQ ID NO:5052), FIG. 2054 (SEQ ID NO:2054), FIG. 2056 (SEQ ID NO:2056), FIG. 2058 (SEQ ID NO:2058), FIG. 2060 (SEQ ID NO:2060), FIG. 2062 (SEQ ID NO:2062), FIG. 2064 (SEQ ID NO:2064), FIG. 2066 (SEQ ID NO:2066), FIG. 2068 (SEQ ID NO:2068), FIG. 2070 (SEQ ID NO:2070), FIG. 2072 (SEQ ID NO:2072), FIG. 2074 (SEQ ID NO:2074), FIG. 2076 (SEQ ID NO:2076), FIG. 2078 (SEQ ID NO:2078), FIG. 2080 (SEQ ID NO:2080), FIG. 2082 (SEQ ID NO:2082), FIG. 2084 (SEQ ID NO:2084), FIG. 2086 (SEQ ID NO:2086), FIG. 2088 (SEQ ID NO:2088), FIG. 2090 (SEQ ID NO:2090), FIG. 2092 (SEQ ID NO:2092), FIG. 2094 (SEQ ID NO:2094), FIG. 2096 (SEQ ID NO:2096), FIG. 2098 (SEQ ID NO:2098), FIG. 2100 (SEQ ID NO:2100), FIG. 2102 (SEQ ID NO:2102), FIG. 2104 (SEQ ID NO:2104), FIG. 2106 (SEQ ID NO:2106), FIG. 2108 (SEQ ID NO:2108), FIG. 2110 (SEQ ID NO:2110), FIG. 2112 (SEQ ID NO:2112), FIG. 2114 (SEQ ID NO:2114), FIG. 2116 (SEQ ID NO:2116), FIG. 2118 (SEQ ID NO:2118), FIG. 2120 (SEQ ID NO:2120), FIG. 2122 (SEQ ID NO:2122), FIG. 2124 (SEQ ID NO:2124), FIG. 2126 (SEQ ID NO:2126), FIG. 2128 (SEQ ID NO:2128), FIG. 2130 (SEQ ID NO:2130), FIG. 2132 (SEQ ID NO:2132), FIG. 2134 (SEQ ID NO:2134), FIG. 2136 (SEQ ID NO:2136), FIG. 2139 (SEQ ID NO:2139), FIG. 2141 (SEQ ID NO:2141), FIG. 2143 (SEQ ID NO:2143), FIG. 2145 (SEQ ID NO:2145), FIG. 2149 (SEQ ID NO:2149), FIG. 2151 (SEQ ID NO:2151), FIG. 2153 (SEQ ID NO:2153), FIG. 2155 (SEQ ID NO:2155), FIG. 2157 (SEQ ID NO:2157), FIG. 2159 (SEQ ID NO:2159), FIG. 2161 (SEQ ID NO:2161), FIG. 2163 (SEQ ID NO:2163), FIG. 2165 (SEQ ID NO:2165), FIG. 2167 (SEQ ID NO:2167), FIG. 2169 (SEQ ID NO:2169), FIG. 2171 (SEQ ID NO:2171), FIG. 2173 (SEQ ID NO:2173), FIG. 2175 (SEQ ID NO:2175), FIG. 2177 (SEQ ID NO:2177), FIG. 2179 (SEQ ID NO:2179), FIG. 2181 (SEQ ID NO:2181), FIG. 2183 (SEQ ID NO:2183), FIG. 2185 (SEQ ID NO:2185), FIG. 2187 (SEQ ID NO:2187), FIG. 2189 (SEQ ID NO:2189), FIG. 2191 (SEQ ID NO:2191), FIG. 2193 (SEQ ID NO:2193), FIG. 2195 (SEQ ID NO:2195), FIG. 2197 (SEQ ID NO:2197), FIG. 2199 (SEQ ID NO:2199), FIG. 2201 (SEQ ID NO:2201), FIG. 2203 (SEQ ID NO:2203), FIG. 2205 (SEQ ID NO:2205), FIG. 2207 (SEQ ID NO:2207), FIG. 2209 (SEQ ID NO:2209), FIG. 2211 (SEQ ID NO:2211), FIG. 2213 (SEQ ID NO:2213), FIG. 2215 (SEQ ID NO:2215), FIG. 2218 (SEQ ID NO:2218), FIG. 2220 (SEQ ID NO:2220), FIG. 2222 (SEQ ID NO:2222), FIG. 2224 (SEQ ID NO:2224), FIG. 2226 (SEQ ID NO:2226), FIG. 2228 (SEQ ID NO:2228), FIG. 2231 (SEQ ID NO:2231), FIG. 2233 (SEQ ID NO:2233), FIG. 2235 (SEQ ID NO:2235), FIG. 2237 (SEQ ID NO:2237), FIG. 2239 (SEQ ID NO:2239), FIG. 2241 (SEQ ID NO:2241), FIG. 2243 (SEQ ID NO:2243), FIG. 2245 (SEQ ID NO:2245), FIG. 2247 (SEQ ID NO:2247), FIG. 2249 (SEQ ID NO:2249), FIG. 2251 (SEQ ID NO:2251), FIG. 2253 (SEQ ID NO:2253), FIG. 2255 (SEQ ID NO:2255), FIG. 2257 (SEQ ID NO:2257), FIG. 2259 (SEQ ID NO:2259), FIG. 2261 (SEQ ID NO:2261), FIG. 2263 (SEQ ID NO:2263), FIG. 2265 (SEQ ID NO:2265), FIG. 2267 (SEQ ID NO:2267), FIG. 2269 (SEQ ID NO:2269), FIG. 2271 (SEQ ID NO:2271), FIG. 2273 (SEQ ID NO:2273), FIG. 2275 (SEQ ID NO:2275), FIG. 2277 (SEQ ID NO:2277), FIG. 2279 (SEQ ID NO:2279), FIG. 2281 (SEQ ID NO:2281), FIG. 2283 (SEQ ID NO:2283), FIG. 2285 (SEQ ID NO:2285), FIG. 2287 (SEQ ID NO:2287), FIG. 2289 (SEQ ID NO:2289), FIG. 2291 (SEQ ID NO:2291), FIG. 2293 (SEQ ID NO:2293), FIG. 2295 (SEQ ID NO:2295), FIG. 2297 (SEQ ID NO:2297), FIG. 2299 (SEQ ID NO:2299), FIG. 2302 (SEQ ID NO:2302), FIG. 2304 (SEQ ID NO:2304), FIG. 2306 (SEQ ID NO:2306), FIG. 2310 (SEQ ID NO:2310), FIG. 2313 (SEQ ID NO:2313), FIG. 2315 (SEQ ID NO:2315), FIG. 2317 (SEQ ID NO:2317), FIG. 2319 (SEQ ID NO:2319), FIG. 2321 (SEQ ID NO:2321), FIG. 2324 (SEQ ID NO:2324), FIG. 2326 (SEQ ID NO:2326), FIG. 2328 (SEQ ID NO:2328), FIG. 2330 (SEQ ID NO:2330), FIG. 2332 (SEQ ID NO:2332), FIG. 2334 (SEQ ID NO:2334), FIG. 2336 (SEQ ID NO:2336), FIG. 2338 (SEQ ID NO:2338), FIG. 2340 (SEQ ID NO:2340), FIG. 2342 (SEQ ID NO:2342), FIG. 2344 (SEQ ID NO:2344), FIG. 2347 (SEQ ID NO:2347), FIG. 2350 (SEQ ID NO:2350), FIG. 2352 (SEQ ID NO:2352), FIG. 2354 (SEQ ID NO:2354), FIG. 2356 (SEQ ID NO:2356), FIG. 2358 (SEQ ID NO:2358), FIG. 2360 (SEQ ID NO:2360), FIG. 2362 (SEQ ID NO:2362), FIG. 2364 (SEQ ID NO:2364), FIG. 2366 (SEQ ID NO:2366), FIG. 2368 (SEQ ID NO:2368), FIG. 2370 (SEQ ID NO:2370), FIG. 2372 (SEQ ID NO:2372), FIG. 2374 (SEQ ID NO:2374), FIG. 2376 (SEQ ID NO:2376), FIG. 2378 (SEQ ID NO:2378), FIG. 2380 (SEQ ID NO:2380), FIG. 2382 (SEQ ID NO:2382), FIG. 2384 (SEQ ID NO:2384), FIG. 2386 (SEQ ID NO:2386), FIG. 2388 (SEQ ID NO:2388), FIG. 2390 (SEQ ID NO:2390), FIG. 2392 (SEQ ID NO:2392), FIG. 2394 (SEQ ID NO:2394), FIG. 2396 (SEQ ID NO:2396), FIG. 2398 (SEQ ID NO:2398), FIG. 2400 (SEQ ID NO:2400), FIG. 2402 (SEQ ID NO:2402), FIG. 2404 (SEQ ID NO:2404), FIG. 2407 (SEQ ID NO:2407), FIG. 2409 (SEQ ID NO:2409), FIG. 2412 (SEQ ID NO:2412), FIG. 2415 (SEQ ID NO:2415), FIG. 2419 (SEQ ID NO:2419), FIG. 2423 (SEQ ID NO:2423), FIG. 2425 (SEQ ID NO:2425), FIG. 2427 (SEQ ID NO:2427), FIG. 2429 (SEQ ID NO:2429), FIG. 2431 (SEQ ID NO:2431), FIG. 2433 (SEQ ID NO:2433), FIG. 2435 (SEQ ID NO:2435), FIG. 2437 (SEQ ID NO:2437), FIG. 2439 (SEQ ID NO:2439), FIG. 2441 (SEQ ID NO:2441), FIG. 2443 (SEQ ID NO:2443), FIG. 2445 (SEQ ID NO:2445), FIG. 2448 (SEQ ID NO:2448), FIG. 2450 (SEQ ID NO:2450), FIG. 2452 (SEQ ID NO:2452), FIG. 2454 (SEQ ID NO:2454), FIG. 2457 (SEQ ID NO:2457), FIG. 2459 (SEQ ID NO:2459), FIG. 2461 (SEQ ID NO:2461), FIG. 2465 (SEQ ID NO:2465), FIG. 2468 (SEQ ID NO:2468), FIG. 2472 (SEQ ID NO:2472), FIG. 2474 (SEQ ID NO:2474), FIG. 2482 (SEQ ID NO:2482) or FIG. 2484 (SEQ ID NO:2484) said method comprising contacting cells which normally respond to said polypeptide with (a) said polypeptide and (b) a candidate compound, and determining the lack responsiveness by said cell to (a).

23. A method of identifying a compound that inhibits the expression of a gene encoding a PRO polypeptide of the invention as described in FIG. 2 (SEQ ID NO:2), FIG. 4 (SEQ ID NO:4), FIG. 6 (SEQ ID NO:6), FIG. 8 (SEQ ID NO:8), FIG. 10 (SEQ ID NO:10), FIG. 12 (SEQ ID NO:12), FIG. 14 (SEQ ID NO:14), FIG. 16 (SEQ ID NO:16), FIG. 18 (SEQ ID NO:18), FIG. 20 (SEQ ID NO:20), FIG. 22 (SEQ ID NO:22), FIG. 24 (SEQ ID NO:24), FIG. 26 (SEQ ID NO:26), FIG. 28 (SEQ ID NO:28), FIG. 30 (SEQ ID NO:30), FIG. 32 (SEQ ID NO:32), FIG. 34 (SEQ ID NO:34), FIG. 36 (SEQ ID NO:36), FIG. 38 (SEQ ID NO:38), FIG. 40 (SEQ ID NO:40), FIG. 42 (SEQ ID NO:42), FIG. 43 (SEQ ID NO:43), FIG. 46 (SEQ ID NO:46), FIG. 48 (SEQ ID NO:48), FIG. 50 (SEQ ID NO:50), FIG. 52 (SEQ ID NO:52), FIG. 54 (SEQ ID NO:54), FIG. 56 (SEQ ID NO:56), FIG. 58 (SEQ ID NO:58), FIG. 60 (SEQ ID NO:60), FIG. 62 (SEQ ID NO:62), FIG. 64 (SEQ ID NO:64), FIG. 66 (SEQ ID NO:66), FIG. 68 (SEQ ID NO:68), FIG. 70 (SEQ ID NO:70), FIG. 72 (SEQ ID NO:72), FIG. 74 (SEQ ID NO:74), FIG. 76 (SEQ ID NO:76), FIG. 78 (SEQ ID NO:78), FIG. 80 (SEQ ID NO:80), FIG. 80 (SEQ ID NO:80), FIG. 84 (SEQ ID NO:84), FIG. 86 (SEQ ID NO:86), FIG. 88 (SEQ ID NO:88), FIG. 90 (SEQ ID NO:90), FIG. 92 (SEQ ID NO:92), FIG. 94 (SEQ ID NO:94), FIG. 96 (SEQ ID NO:96), FIG. 98 (SEQ ID NO:98), FIG. 100 (SEQ ID NO:100), FIG. 102 (SEQ ID NO:102), FIG. 104 (SEQ ID NO:104), FIG. 106 (SEQ ID NO:106), FIG. 108 (SEQ ID NO:108), FIG. 108 (SEQ ID NO:108), FIG. 112 (SEQ ID NO:112), FIG. 115 (SEQ ID NO:115), FIG. 117 (SEQ ID NO:117), FIG. 119 (SEQ ID NO:119), FIG. 121 (SEQ ID NO:121), FIG. 123 (SEQ ID NO:123), FIG. 125 (SEQ ID NO:125), FIG. 127 (SEQ ID NO:127), FIG. 129 (SEQ ID NO:129), FIG. 131 (SEQ ID NO:131), FIG. 133 (SEQ ID NO:133), FIG. 135 (SEQ ID NO:135), FIG. 137 (SEQ ID NO:137), FIG. 139 (SEQ ID NO:139), FIG. 141 (SEQ ID NO:141), FIG. 143 (SEQ ID NO:143), FIG. 145 (SEQ ID NO:145), FIG. 147 (SEQ ID NO:147), FIG. 149 (SEQ ID NO:149), FIG. 151 (SEQ ID NO:151), FIG. 153 (SEQ ID NO:153), FIG. 155 (SEQ ID NO:155), FIG. 157 (SEQ ID NO:157), FIG. 159 (SEQ ID NO:159), FIG. 161 (SEQ ID NO:161), FIG. 163 (SEQ ID NO:163), FIG. 165 (SEQ ID NO:165), FIG. 167 (SEQ ID NO:167), FIG. 169 (SEQ ID NO:169), FIG. 171 (SEQ ID NO:171), FIG. 173 (SEQ ID NO:173), FIG. 175 (SEQ ID NO:175), FIG. 177 (SEQ ID NO:177), FIG. 179 (SEQ ID NO:179), FIG. 181 (SEQ ID NO:181), FIG. 183 (SEQ ID NO:183), FIG. 185 (SEQ ID NO:185), FIG. 187 (SEQ ID NO:187), FIG. 189 (SEQ ID NO:189), FIG. 191 (SEQ ID NO:191), FIG. 194 (SEQ ID NO:194), FIG. 196 (SEQ ID NO:196), FIG. 198 (SEQ ID NO:198), FIG. 200 (SEQ ID NO:200), FIG. 202 (SEQ ID NO:202), FIG. 204 (SEQ ID NO:204), FIG. 206 (SEQ ID NO:206), FIG. 208 (SEQ ID NO:208), FIG. 210 (SEQ ID NO:210), FIG. 212 (SEQ ID NO:212), FIG. 214 (SEQ ID NO:214), FIG. 216 (SEQ ID NO:216), FIG. 218 (SEQ ID NO:218), FIG. 221 (SEQ ID NO:221), FIG. 223 (SEQ ID NO:223), FIG. 225 (SEQ ID NO:225), FIG. 227 (SEQ ID NO:227), FIG. 229 (SEQ ID NO:229), FIG. 231 (SEQ ID NO:231), FIG. 233 (SEQ ID NO:233), FIG. 235 (SEQ ID NO:235), FIG. 237 (SEQ ID NO:237), FIG. 239 (SEQ ID NO:239), FIG. 241 (SEQ ID NO:241), FIG. 243 (SEQ ID NO:243), FIG. 245 (SEQ ID NO:245), FIG. 247 (SEQ ID NO:247), FIG. 249 (SEQ ID NO:249), FIG. 251 (SEQ ID NO:251), FIG. 253 (SEQ ID NO:253), FIG. 255 (SEQ ID NO:255), FIG. 257 (SEQ ID NO:257), FIG. 259 (SEQ ID NO:259), FIG. 261 (SEQ ID NO:261), FIG. 263 (SEQ ID NO:263), FIG. 265 (SEQ ID NO:265), FIG. 267 (SEQ ID NO:267), FIG. 269 (SEQ ID NO:269), FIG. 272 (SEQ ID NO:272), FIG. 274 (SEQ ID NO:274), FIG. 276 (SEQ ID NO:276), FIG. 278 (SEQ ID NO:278), FIG. 280 (SEQ ID NO:280), FIG. 282 (SEQ ID NO:282), FIG. 284 (SEQ ID NO:284), FIG. 286 (SEQ ID NO:286), FIG. 288 (SEQ ID NO:288), FIG. 290 (SEQ ID NO:290), FIG. 292 (SEQ ID NO:292), FIG. 294 (SEQ ID NO:294), FIG. 296 (SEQ ID NO:296), FIG. 298 (SEQ ID NO:298), FIG. 300 (SEQ ID NO:300), FIG. 302 (SEQ ID NO:302), FIG. 304 (SEQ ID NO:304), FIG. 306 (SEQ ID NO:306), FIG. 308 (SEQ ID NO:308), FIG. 310 (SEQ ID NO:310), FIG. 312 (SEQ ID NO:312), FIG. 314 (SEQ ID NO:314), FIG. 316 (SEQ ID NO:316), FIG. 318 (SEQ ID NO:318), FIG. 320 (SEQ ID NO:320), FIG. 322 (SEQ ID NO:322), FIG. 324 (SEQ ID NO:324), FIG. 326 (SEQ ID NO:326), FIG. 328 (SEQ ID NO:328), FIG. 330 (SEQ ID NO:330), FIG. 332 (SEQ ID NO:332), FIG. 334 (SEQ ID NO:334), FIG. 336 (SEQ ID NO:336), FIG. 338 (SEQ ID NO:338), FIG. 340 (SEQ ID NO:340), FIG. 342 (SEQ ID NO:342), FIG. 344 (SEQ ID NO:344), FIG. 346 (SEQ ID NO:346), FIG. 348 (SEQ ID NO:348), FIG. 350 (SEQ ID NO:350), FIG. 352 (SEQ ID NO:352), FIG. 354 (SEQ ID NO:354), FIG. 356 (SEQ ID NO:356), FIG. 358 (SEQ ID NO:358), FIG. 360 (SEQ ID NO:360), FIG. 362 (SEQ ID NO:362), FIG. 364 (SEQ ID NO:364), FIG. 366 (SEQ ID NO:366), FIG. 368 (SEQ ID NO:368), FIG. 370 (SEQ ID NO:370), FIG. 372 (SEQ ID NO:372), FIG. 374 (SEQ ID NO:374), FIG. 376 (SEQ ID NO:376), FIG. 378 (SEQ ID NO:378), FIG. 380 (SEQ ID NO:380), FIG. 382 (SEQ ID NO:382), FIG. 384 (SEQ ID NO:384), FIG. 386 (SEQ ID NO:386), FIG. 388 (SEQ ID NO:388), FIG. 390 (SEQ ID NO:390), FIG. 392 (SEQ ID NO:392), FIG. 394 (SEQ ID NO:394), FIG. 396 (SEQ ID NO:396), FIG. 398 (SEQ ID NO:398), FIG. 400 (SEQ ID NO:400), FIG. 402 (SEQ ID NO:402), FIG. 404 (SEQ ID NO:404), FIG. 406 (SEQ ID NO:406), FIG. 408 (SEQ ID NO:408), FIG. 410 (SEQ ID NO:410), FIG. 412 (SEQ ID NO:412), FIG. 414 (SEQ ID NO:414), FIG. 416 (SEQ ID NO:416), FIG. 418 (SEQ ID NO:418), FIG. 420 (SEQ ID NO:420), FIG. 422 (SEQ ID NO:422), FIG. 424 (SEQ ID NO:424), FIG. 426 (SEQ ID NO:426), FIG. 428 (SEQ ID NO:428), FIG. 430 (SEQ ID NO:430), FIG. 432 (SEQ ID NO:432), FIG. 434 (SEQ ID NO:434), FIG. 436 (SEQ ID NO:436), FIG. 438 (SEQ ID NO:438), FIG. 440 (SEQ ID NO:440), FIG. 442 (SEQ ID NO:442), FIG. 444 (SEQ ID NO:444), FIG. 446 (SEQ ID NO:446), FIG. 448 (SEQ ID NO:448), FIG. 450 (SEQ ID NO:450), FIG. 452 (SEQ ID NO:452), FIG. 454 (SEQ ID NO:454), FIG. 456 (SEQ ID NO:456), FIG. 458 (SEQ ID NO:458), FIG. 460 (SEQ ID NO:460), FIG. 462 (SEQ ID NO:462), FIG. 464 (SEQ ID NO:464), FIG. 466 (SEQ ID NO:466), FIG. 467 (SEQ ID NO:467), FIG. 470 (SEQ ID NO:470), FIG. 472 (SEQ ID NO:472), FIG. 474 (SEQ ID NO:474), FIG. 476 (SEQ ID NO:476), FIG. 478 (SEQ ID NO:478), FIG. 480 (SEQ ID NO:480), FIG. 482 (SEQ ID NO:482), FIG. 484 (SEQ ID NO:484), FIG. 486 (SEQ ID NO:486), FIG. 488 (SEQ ID NO:488), FIG. 490 (SEQ ID NO:490), FIG. 492 (SEQ ID NO:492), FIG. 494 (SEQ ID NO:494), FIG. 496 (SEQ ID NO:496), FIG. 498 (SEQ ID NO:498), FIG. 500 (SEQ ID NO:500), FIG. 502 (SEQ ID NO:502), FIG. 504 (SEQ ID NO:504), FIG. 506 (SEQ ID NO:506), FIG. 508 (SEQ ID NO:508), FIG. 510 (SEQ ID NO:510), FIG. 512 (SEQ ID NO:512), FIG. 514 (SEQ ID NO:514), FIG. 516 (SEQ ID NO:516), FIG. 518 (SEQ ID NO:518), FIG. 520 (SEQ ID NO:520), FIG. 522 (SEQ ID NO:522), FIG. 524 (SEQ ID NO:524), FIG. 526 (SEQ ID NO:526), FIG. 528 (SEQ ID NO:528), FIG. 530 (SEQ ID NO:530), FIG. 532 (SEQ ID NO:532), FIG. 534 (SEQ ID NO:534), FIG. 536 (SEQ ID NO:536), FIG. 538 (SEQ ID NO:538), FIG. 540 (SEQ ID NO:540), FIG. 542 (SEQ ID NO:542), FIG. 544 (SEQ ID NO:544), FIG. 546 (SEQ ID NO:546), FIG. 548 (SEQ ID NO:548), FIG. 550 (SEQ ID NO:550), FIG. 552 (SEQ ID NO:552), FIG. 554 (SEQ ID NO:554), FIG. 556 (SEQ ID NO:556), FIG. 558 (SEQ ID NO:558), FIG. 560 (SEQ ID NO:560), FIG. 562 (SEQ ID NO:562), FIG. 564 (SEQ ID NO:564), FIG. 566 (SEQ ID NO:566), FIG. 568 (SEQ ID NO:568), FIG. 570 (SEQ ID NO:570), FIG. 572 (SEQ ID NO:572), FIG. 574 (SEQ ID NO:574), FIG. 576 (SEQ ID NO:576), FIG. 578 (SEQ ID NO:578), FIG. 580 (SEQ ID NO:580), FIG. 582 (SEQ ID NO:582), FIG. 584 (SEQ ID NO:584), FIG. 586 (SEQ ID NO:586), FIG. 588 (SEQ ID NO:588), FIG. 590 (SEQ ID NO:590), FIG. 592 (SEQ ID NO:592), FIG. 594 (SEQ ID NO:594), FIG. 596 (SEQ ID NO:596), FIG. 598 (SEQ ID NO:598), FIG. 600 (SEQ ID NO:600), FIG. 602 (SEQ ID NO:602), FIG. 604 (SEQ ID NO:604), FIG. 606 (SEQ ID NO:606), FIG. 608 (SEQ ID NO:608), FIG. 610 (SEQ ID NO:610), FIG. 612 (SEQ ID NO:612), FIG. 614 (SEQ ID NO:614), FIG. 616 (SEQ ID NO:616), FIG. 618 (SEQ ID NO:618), FIG. 620 (SEQ ID NO:620), FIG. 622 (SEQ ID NO:622), FIG. 624 (SEQ ID NO:624), FIG. 626 (SEQ ID NO:626), FIG. 628 (SEQ ID NO:628), FIG. 630 (SEQ ID NO:630), FIG. 632 (SEQ ID NO:632), FIG. 634 (SEQ ID NO:634), FIG. 637 (SEQ ID NO:637), FIG. 639 (SEQ ID NO:639), FIG. 641 (SEQ ID NO:641), FIG. 643 (SEQ ID NO:643), FIG. 645 (SEQ ID NO:645), FIG. 647 (SEQ ID NO:647), FIG. 649 (SEQ ID NO:649), FIG. 651 (SEQ ID NO:651), FIG. 653 (SEQ ID NO:653), FIG. 655 (SEQ ID NO:655), FIG. 657 (SEQ ID NO:657), FIG. 659 (SEQ ID NO:659), FIG. 661 (SEQ ID NO:661), FIG. 663 (SEQ ID NO:663), FIG. 665 (SEQ ID NO:665), FIG. 667 (SEQ ID NO:667), FIG. 669 (SEQ ID NO:669), FIG. 671 (SEQ ID NO:671), FIG. 673 (SEQ ID NO:673), FIG. 675 (SEQ ID NO:675), FIG. 677 (SEQ ID NO:677), FIG. 679 (SEQ ID NO:679), FIG. 681 (SEQ ID NO:681), FIG. 683 (SEQ ID NO:683), FIG. 685 (SEQ ID NO:685), FIG. 687 (SEQ ID NO:687), FIG. 689 (SEQ ID NO:689), FIG. 691 (SEQ ID NO:691), FIG. 693 (SEQ ID NO:693), FIG. 695 (SEQ ID NO:695), FIG. 697 (SEQ ID NO:697), FIG. 699 (SEQ ID NO:699), FIG. 701 (SEQ ID NO:701), FIG. 703 (SEQ ID NO:703), FIG. 705 (SEQ ID NO:705), FIG. 707 (SEQ ID NO:707), FIG. 709 (SEQ ID NO:709), FIG. 711 (SEQ ID NO:711), FIG. 713 (SEQ ID NO:713), FIG. 715 (SEQ ID NO:715), FIG. 717 (SEQ ID NO:717), FIG. 719 (SEQ ID NO:719), FIG. 721 (SEQ ID NO:721), FIG. 723 (SEQ ID NO:723), FIG. 725 (SEQ ID NO:725), FIG. 727 (SEQ ID NO:727), FIG. 729 (SEQ ID NO:729), FIG. 731 (SEQ ID NO:731), FIG. 733 (SEQ ID NO:733), FIG. 735 (SEQ ID NO:735), FIG. 737 (SEQ ID NO:737), FIG. 739 (SEQ ID NO:739), FIG. 741 (SEQ ID NO:741), FIG. 743 (SEQ ID NO:743), FIG. 745 (SEQ ID NO:745), FIG. 747 (SEQ ID NO:747), FIG. 749 (SEQ ID NO:749), FIG. 751 (SEQ ID NO:751), FIG. 753 (SEQ ID NO:753), FIG. 755 (SEQ ID NO:755), FIG. 757 (SEQ ID NO:757), FIG. 759 (SEQ ID NO:759), FIG. 761 (SEQ ID NO:761), FIG. 763 (SEQ ID NO:763), FIG. 765 (SEQ ID NO:765), FIG. 767 (SEQ ID NO:767), FIG. 770 (SEQ ID NO:770), FIG. 772 (SEQ ID NO:772), FIG. 774 (SEQ ID NO:774), FIG. 776 (SEQ ID NO:776), FIG. 778 (SEQ ID NO:778), FIG. 780 (SEQ ID NO:780), FIG. 782 (SEQ ID NO:782), FIG. 784 (SEQ ID NO:784), FIG. 786 (SEQ ID NO:786), FIG. 788 (SEQ ID NO:788), FIG. 790 (SEQ ID NO:790), FIG. 792 (SEQ ID NO:792), FIG. 794 (SEQ ID NO:794), FIG. 796 (SEQ ID NO:796), FIG. 798 (SEQ ID NO:798), FIG. 800 (SEQ ID NO:800), FIG. 802 (SEQ ID NO:802), FIG. 805 (SEQ ID NO:805), FIG. 807 (SEQ ID NO:807), FIG. 809 (SEQ ID NO:809), FIG. 811 (SEQ ID NO:811), FIG. 813 (SEQ ID NO:813), FIG. 815 (SEQ ID NO:815), FIG. 817 (SEQ ID NO:817), FIG. 819 (SEQ ID NO:819), FIG. 821 (SEQ ID NO:821), FIG. 823 (SEQ ID NO:823), FIG. 826 (SEQ ID NO:826), FIG. 828 (SEQ ID NO:828), FIG. 830 (SEQ ID NO:830), FIG. 832 (SEQ ID NO:832), FIG. 834 (SEQ ID NO:834), FIG. 836 (SEQ ID NO:836), FIG. 838 (SEQ ID NO:838), FIG. 840 (SEQ ID NO:840), FIG. 842 (SEQ ID NO:842), FIG. 844 (SEQ ID NO:844), FIG. 846 (SEQ ID NO:846), FIG. 848 (SEQ ID NO:848), FIG. 850 (SEQ ID NO:850), FIG. 852 (SEQ ID NO:852), FIG. 854 (SEQ ID NO:854), FIG. 856 (SEQ ID NO:856), FIG. 858 (SEQ ID NO:858), FIG. 860 (SEQ ID NO:860), FIG. 862 (SEQ ID NO:862), FIG. 864 (SEQ ID NO:864), FIG. 866 (SEQ ID NO:866), FIG. 868 (SEQ ID NO:868), FIG. 870 (SEQ ID NO:870), FIG. 872 (SEQ ID NO:872), FIG. 874 (SEQ ID NO:874), FIG. 876 (SEQ ID NO:876), FIG. 878 (SEQ ID NO:878), FIG. 880 (SEQ ID NO:880), FIG. 882 (SEQ ID NO:882), FIG. 884 (SEQ ID NO:884), FIG. 886 (SEQ ID NO:886), FIG. 888 (SEQ ID NO:888), FIG. 890 (SEQ ID NO:890), FIG. 892 (SEQ ID NO:892), FIG. 894 (SEQ ID NO:894), FIG. 896 (SEQ ID NO:896), FIG. 898 (SEQ ID NO:898), FIG. 900 (SEQ ID NO:900), FIG. 902 (SEQ ID NO:902), FIG. 904 (SEQ ID NO:904), FIG. 906 (SEQ ID NO:906), FIG. 908 (SEQ ID NO:908), FIG. 911 (SEQ ID NO:911), FIG. 913 (SEQ ID NO:913), FIG. 915 (SEQ ID NO:915), FIG. 917 (SEQ ID NO:917), FIG. 919 (SEQ ID NO:919), FIG. 921 (SEQ ID NO:921), FIG. 923 (SEQ ID NO:923), FIG. 925 (SEQ ID NO:925), FIG. 927 (SEQ ID NO:927), FIG. 929 (SEQ ID NO:929), FIG. 931 (SEQ ID NO:931), FIG. 933 (SEQ ID NO:933), FIG. 935 (SEQ ID NO:935), FIG. 937 (SEQ ID NO:937), FIG. 940 (SEQ ID NO:940), FIG. 943 (SEQ ID NO:943), FIG. 946 (SEQ ID NO:946), FIG. 948 (SEQ ID NO:948), FIG. 950 (SEQ ID NO:950), FIG. 952 (SEQ ID NO:952), FIG. 955 (SEQ ID NO:955), FIG. 957 (SEQ ID NO:957), FIG. 959 (SEQ ID NO:959), FIG. 961 (SEQ ID NO:961), FIG. 966 (SEQ ID NO:966), FIG. 968 (SEQ ID NO:968), FIG. 970 (SEQ ID NO:970), FIG. 972 (SEQ ID NO:972), FIG. 974 (SEQ ID NO:974), FIG. 976 (SEQ ID NO:976), FIG. 978 (SEQ ID NO:978), FIG. 980 (SEQ ID NO:980), FIG. 985 (SEQ ID NO:985), FIG. 988 (SEQ ID NO:988), FIG. 991 (SEQ ID NO:991), FIG. 993 (SEQ ID NO:993), FIG. 995 (SEQ ID NO:995), FIG. 997 (SEQ ID NO:997), FIG. 1000 (SEQ ID NO:1000), FIG. 1002 (SEQ ID NO:1002), FIG. 1005 (SEQ ID NO:1005), FIG. 1007 (SEQ ID NO:1007), FIG. 1009 (SEQ ID NO:1009), FIG. 1011 (SEQ ID NO:1011), FIG. 1013 (SEQ ID NO:1013), FIG. 1015 (SEQ ID NO:1015), FIG. 1017 (SEQ ID NO:1017), FIG. 1019 (SEQ ID NO:1019), FIG. 1022 (SEQ ID NO:1022), FIG. 1024 (SEQ ID NO:1024), FIG. 1026 (SEQ ID NO:1026), FIG. 1028 (SEQ ID NO:1028), FIG. 1030 (SEQ ID NO:1030), FIG. 1032 (SEQ ID NO:1032), FIG. 1034 (SEQ ID NO:1034), FIG. 1036 (SEQ ID NO:1036), FIG. 1038 (SEQ ID NO:1083), FIG. 1040 (SEQ ID NO:1040), FIG. 1042 (SEQ ID NO:1042), FIG. 1044 (SEQ ID NO:1044), FIG. 1047 (SEQ ID NO:1047), FIG. 1049 (SEQ ID NO:1049), FIG. 1051 (SEQ ID NO:1051), FIG. 1053 (SEQ ID NO:1053), FIG. 1055 (SEQ ID NO1055), FIG. 1057 (SEQ ID NO:1057), FIG. 1060 (SEQ ID NO:1060), FIG. 1062 (SEQ ID NO:1062), FIG. 1064 (SEQ ID NO:1064), FIG. 1066 (SEQ ID NO:1066), FIG. 1068 (SEQ ID NO:1068), FIG. 1070 (SEQ ID NO:1070), FIG. 1072 (SEQ ID NO:1072), FIG. 1074 (SEQ ID NO:1074), FIG. 1076 (SEQ ID NO:1076), FIG. 1078 (SEQ ID NO:1078), FIG. 1080 (SEQ ID NO:1080), FIG. 1082 (SEQ ID NO:1082), FIG. 1084 (SEQ ID NO:1084), FIG. 1086 (SEQ ID NO:1086), FIG. 1089 (SEQ ID NO:1089), FIG. 1091 (SEQ ID NO:1091), FIG. 1093 (SEQ ID NO:1093), FIG. 1098 (SEQ ID NO:1098), FIG. 1100 (SEQ ID NO:1100), FIG. 1103 (SEQ ID NO:1103), FIG. 1105 (SEQ ID NO:1105), FIG. 1107 (SEQ ID NO:1107), FIG. 1110 (SEQ ID NO:1110), FIG. 1112 (SEQ ID NO:1112), FIG. 1114 (SEQ ID NO:1114), FIG. 1116 (SEQ ID NO:1116), FIG. 1118 (SEQ ID NO:1118), FIG. 1120 (SEQ ID NO:1120), FIG. 1122 (SEQ ID NO:1122), FIG. 1124 (SEQ ID NO:1124), FIG. 1126 (SEQ ID NO:1126), FIG. 1128 (SEQ ID NO:1128), FIG. 1130 (SEQ ID NO:1130), FIG. 1132 (SEQ ID NO:1132), FIG. 1134 (SEQ ID NO:1134), FIG. 1136 (SEQ ID NO:1136), FIG. 1138 (SEQ ID NO:1138), FIG. 1140 (SEQ ID NO:1140), FIG. 1142 (SEQ ID NO:1142), FIG. 1144 (SEQ ID NO:1144), FIG. 1146 (SEQ ID NO:1146), FIG. 1148 (SEQ ID NO:1148), FIG. 1150 (SEQ ID NO:1150), FIG. 1153 (SEQ ID NO:1153), FIG. 1155 (SEQ ID NO:1155), FIG. 1157 (SEQ ID NO:1157), FIG. 1159 (SEQ ID NO:1159), FIG. 1161 (SEQ ID NO:1161), FIG. 1164 (SEQ ID NO:1164), FIG. 1166 (SEQ ID NO:1166), FIG. 1168 (SEQ ID NO:1168), FIG. 1170 (SEQ ID NO:1170), FIG. 1172 (SEQ ID NO:1172), FIG. 1174 (SEQ ID NO:1174), FIG. 1176 (SEQ ID NO:1176), FIG. 1178 (SEQ ID NO:1178), FIG. 1180 (SEQ ID NO:1180), FIG. 1182 (SEQ ID NO:1182), FIG. 1184 (SEQ ID NO:1184), FIG. 1186 (SEQ ID NO:1186), FIG. 1188 (SEQ ID NO:1188), FIG. 1190 (SEQ ID NO:1190), FIG. 1192 (SEQ ID NO:1192), FIG. 1194 (SEQ ID NO:1194), FIG. 1196 (SEQ ID NO:1196), FIG. 1198 (SEQ ID NO:1198), FIG. 1200 (SEQ ID NO:1200), FIG. 1202 (SEQ ID NO:1202), FIG. 1204 (SEQ ID NO:1204), FIG. 1206 (SEQ ID NO:1206), FIG. 1208 (SEQ ID NO:1208), FIG. 1210 (SEQ ID NO:1210), FIG. 1212 (SEQ ID NO:1212), FIG. 1214 (SEQ ID NO:1214), FIG. 1216 (SEQ ID NO:1216), FIG. 1218 (SEQ ID NO:1218), FIG. 1220 (SEQ ID NO:1220), FIG. 1222 (SEQ ID NO:1222), FIG. 1224 (SEQ ID NO:1224), FIG. 1226 (SEQ ID NO:1226), FIG. 1228 (SEQ ID NO:1228), FIG. 1230 (SEQ ID NO:1230), FIG. 1232 (SEQ ID NO:1232), FIG. 1234 (SEQ ID NO:1234), FIG. 1236 (SEQ ID NO:1236), FIG. 1238 (SEQ ID NO:1238), FIG. 1240 (SEQ ID NO:1240), FIG. 1242 (SEQ ID NO:1242), FIG. 1244 (SEQ ID NO:1244), FIG. 1246 (SEQ ID NO:1246), FIG. 1248 (SEQ ID NO:1248), FIG. 1250 (SEQ ID NO:1250), FIG. 1252 (SEQ ID NO:1252), FIG. 1254 (SEQ ID NO:1254), FIG. 1256 (SEQ ID NO:1256), FIG. 1258 (SEQ ID NO:1258), FIG. 1260 (SEQ ID NO:1260), FIG. 1262 (SEQ ID NO:1262), FIG. 1264 (SEQ ID NO:1264), FIG. 1266 (SEQ ID NO:1266), FIG. 1268 (SEQ ID NO:1268), FIG. 1270 (SEQ ID NO:1270), FIG. 1272 (SEQ ID NO:1272), FIG. 1274 (SEQ ID NO:1274), FIG. 1276 (SEQ ID NO:1276), FIG. 1278 (SEQ ID NO:1278), FIG. 1280 (SEQ ID NO:1280), FIG. 1282 (SEQ ID NO:1282), FIG. 1284 (SEQ ID NO:1284), FIG. 1286 (SEQ ID NO:1286), FIG. 1288 (SEQ ID NO:1288), FIG. 1290 (SEQ ID NO:1290), FIG. 1292 (SEQ ID NO:1292), FIG. 1294 (SEQ ID NO:1294), FIG. 1296 (SEQ ID NO:1296), FIG. 1298 (SEQ ID NO:1298), FIG. 1300 (SEQ ID NO:1300), FIG. 1302 (SEQ ID NO:1302), FIG. 1304 (SEQ ID NO:1304), FIG. 1306 (SEQ ID NO:1306), FIG. 1308 (SEQ ID NO:1308), FIG. 1310 (SEQ ID NO:1310), FIG. 1312 (SEQ ID NO:1312), FIG. 1314 (SEQ ID NO:1314), FIG. 1316 (SEQ ID NO:1316), FIG. 1318 (SEQ ID NO:1318), FIG. 1320 (SEQ ID NO:1320), FIG. 1322 (SEQ ID NO:1322), FIG. 1324 (SEQ ID NO:1324), FIG. 1326 (SEQ ID NO:1326), FIG. 1328 (SEQ ID NO:1328), FIG. 1330 (SEQ ID NO:1330), FIG. 1332 (SEQ ID NO:1332), FIG. 1334 (SEQ ID NO:1334), FIG. 1336 (SEQ ID NO:1336), FIG. 1338 (SEQ ID NO:1338), FIG. 1340 (SEQ ID NO:140), FIG. 1342 (SEQ ID NO:1342), FIG. 1344 (SEQ ID NO:1344), FIG. 1346 (SEQ ID NO:1346), FIG. 1348 (SEQ ID NO:1348), FIG. 1350 (SEQ ID NO:1350), FIG. 1352 (SEQ ID NO:1352), FIG. 1354 (SEQ ID NO:1354), FIG. 1356 (SEQ ID NO:1356), FIG. 1358 (SEQ ID NO:1358), FIG. 1360 (SEQ ID NO:1360), FIG. 1362 (SEQ ID NO:1362), FIG. 1364 (SEQ ID NO:1364), FIG. 1366 (SEQ ID NO:1366), FIG. 1368 (SEQ ID NO:1368), FIG. 1370 (SEQ ID NO:1370), FIG. 1372 (SEQ ID NO:1372), FIG. 1374 (SEQ ID NO:1374), FIG. 1376 (SEQ ID NO:1376), FIG. 1378 (SEQ ID NO:1378), FIG. 1380 (SEQ ID NO:1379), FIG. 1382 (SEQ ID NO:1382), FIG. 1384 (SEQ ID NO:1384), FIG. 1386 (SEQ ID NO:1386), FIG. 1388 (SEQ ID NO:1388), FIG. 1390 (SEQ ID NO:1390), FIG. 1392 (SEQ ID NO:1392), FIG. 1394 (SEQ ID NO:1394), FIG. 1396 (SEQ ID NO:1396), FIG. 1398 (SEQ ID NO:1398), FIG. 1400 (SEQ ID NO:1400), FIG. 1402 (SEQ ID NO:1402), FIG. 1404 (SEQ ID NO:1404), FIG. 1406 (SEQ ID NO:1406), FIG. 1408 (SEQ ID NO:1408), FIG. 1410 (SEQ ID NO:1410), FIG. 1412 (SEQ ID NO:1412), FIG. 1414 (SEQ ID NO:1414), FIG. 1416 (SEQ ID NO:1416), FIG. 1418 (SEQ ID NO:1418), FIG. 1420 (SEQ ID NO:1420), FIG. 1422 (SEQ ID NO:1422), FIG. 1425 (SEQ ID NO:1425), FIG. 1427 (SEQ ID NO:1427), FIG. 1429 (SEQ ID NO:1429), FIG. 1432 (SEQ ID NO:1432), FIG. 1434 (SEQ ID NO:1434), FIG. 1436 (SEQ ID NO:1436), FIG. 1438 (SEQ ID NO:1438), FIG. 1440 (SEQ ID NO:1440), FIG. 1442 (SEQ ID NO:1442), FIG. 1444 (SEQ ID NO:1444), FIG. 1446 (SEQ ID NO:1446), FIG. 1448 (SEQ ID NO:1448), FIG. 1450 (SEQ ID NO:1450), FIG. 1452 (SEQ ID NO:1452), FIG. 1454 (SEQ ID NO:1454), FIG. 1456 (SEQ ID NO:1456), FIG. 1458 (SEQ ID NO:1458), FIG. 1460 (SEQ ID NO:1460), FIG. 1462 (SEQ ID NO:1462), FIG. 1464 (SEQ ID NO:1464), FIG. 1466 (SEQ ID NO:1466), FIG. 1468 (SEQ ID NO:1468), FIG. 1470 (SEQ ID NO:1470), FIG. 1472 (SEQ ID NO:1472), FIG. 1474 (SEQ ID NO:1474), FIG. 1476 (SEQ ID NO:1476), FIG. 1478 (SEQ ID NO:1478), FIG. 1480 (SEQ ID NO:1480), FIG. 1482 (SEQ ID NO:1482), FIG. 1484 (SEQ ID NO:1484), FIG. 1486 (SEQ ID NO:1486), FIG. 1488 (SEQ ID NO:1488), FIG. 1490 (SEQ ID NO:1490), FIG. 1492 (SEQ ID NO:1492), FIG. 1494 (SEQ ID NO:1494), FIG. 1496 (SEQ ID NO:1496), FIG. 1498 (SEQ ID NO:1498), FIG. 1500 (SEQ ID NO:1500), FIG. 1502 (SEQ ID NO:1502), FIG. 1504 (SEQ ID NO:1504), FIG. 1506 (SEQ ID NO:1506), FIG. 1508 (SEQ ID NO:1508), FIG. 1510 (SEQ ID NO:1510), FIG. 1512 (SEQ ID NO:1512), FIG. 1514 (SEQ ID NO:1514), FIG. 1516 (SEQ ID NO:1516), FIG. 1518 (SEQ ID NO:1518), FIG. 1520 (SEQ ID NO:1520), FIG. 1522 (SEQ ID NO:1522), FIG. 1524 (SEQ ID NO:1524), FIG. 1526 (SEQ ID NO:1526), FIG. 1528 (SEQ ID NO:1528), FIG. 1530 (SEQ ID NO:1530), FIG. 1532 (SEQ ID NO:1532), FIG. 1534 (SEQ ID NO:1534), FIG. 1536 (SEQ ID NO:1536), FIG. 1538 (SEQ ID NO:1538), FIG. 1540 (SEQ ID NO:1540), FIG. 1542 (SEQ ID NO:1542), FIG. 1544 (SEQ ID NO:1544), FIG. 1546 (SEQ ID NO:1546), FIG. 1548 (SEQ ID NO:1548), FIG. 1550 (SEQ ID NO:1550), FIG. 1552 (SEQ ID NO:1552), FIG. 1554 (SEQ ID NO:1554), FIG. 1556 (SEQ ID NO:1556), FIG. 1558 (SEQ ID NO:1558), FIG. 1560 (SEQ ID NO:1560), FIG. 1562 (SEQ ID NO:1562), FIG. 1564 (SEQ ID NO:1654), FIG. 1566 (SEQ ID NO:1566), FIG. 1568 (SEQ ID NO:1568), FIG. 1570 (SEQ ID NO:1570), FIG. 1572 (SEQ ID NO:1572), FIG. 1574 (SEQ ID NO:1574), FIG. 1576 (SEQ ID NO:1576), FIG. 1578 (SEQ ID NO:1578), FIG. 1580 (SEQ ID NO:1580), FIG. 1582 (SEQ ID NO:1582), FIG. 1585 (SEQ ID NO:1585), FIG. 1587 (SEQ ID NO:1587), FIG. 1590 (SEQ ID NO:1590), FIG. 1592 (SEQ ID NO:1592), FIG. 1594 (SEQ ID NO:1594), FIG. 1597 (SEQ ID NO:1597), FIG. 1599 (SEQ ID NO:1599), FIG. 1601 (SEQ ID NO:1601), FIG. 1603 (SEQ ID NO:1603), FIG. 1605 (SEQ ID NO:1605), FIG. 1607 (SEQ ID NO:1607), FIG. 1610 (SEQ ID NO:1610), FIG. 1613 (SEQ ID NO:1613), FIG. 1615 (SEQ ID NO:1615), FIG. 1617 (SEQ ID NO:1617), FIG. 1619 (SEQ ID NO:1619), FIG. 1621 (SEQ ID NO:1621), FIG. 1623 (SEQ ID NO:1623), FIG. 1625 (SEQ ID NO:1625), FIG. 1627 (SEQ ID NO:1627), FIG. 1629 (SEQ ID NO:1629), FIG. 1631 (SEQ ID NO:1631), FIG. 1633 (SEQ ID NO:1633), FIG. 1635 (SEQ ID NO:1635), FIG. 1637 (SEQ ID NO:1637), FIG. 1639 (SEQ ID NO:1639), FIG. 1641 (SEQ ID NO:1641), FIG. 1643 (SEQ ID NO:1643), FIG. 1645 (SEQ ID NO:1645), FIG. 1647 (SEQ ID NO:1647), FIG. 1650 (SEQ ID NO:1650), FIG. 1654 (SEQ ID NO:1654), FIG. 1656 (SEQ ID NO:1656), FIG. 1658 (SEQ ID NO:1658), FIG. 1660 (SEQ ID NO:1660), FIG. 1662 (SEQ ID NO:1662), FIG. 1664 (SEQ ID NO:1664), FIG. 1666 (SEQ ID NO:1666), FIG. 1668 (SEQ ID NO:1668), FIG. 1670 (SEQ ID NO:1670), FIG. 1672 (SEQ ID NO:1672), FIG. 1674 (SEQ ID NO:1674), FIG. 1676 (SEQ ID NO:1676), FIG. 1678 (SEQ ID NO:1678), FIG. 1680 (SEQ ID NO:1680), FIG. 1682 (SEQ ID NO:1682), FIG. 1686 (SEQ ID NO:1686), FIG. 1688 (SEQ ID NO:1688), FIG. 1691 (SEQ ID NO:1691), FIG. 1693 (SEQ ID NO:1693), FIG. 1695 (SEQ ID NO:1695), FIG. 1697 (SEQ ID NO:1697), FIG. 1699 (SEQ ID NO:1699), FIG. 1701 (SEQ ID NO:1701), FIG. 1703 (SEQ ID NO:1703), FIG. 1705 (SEQ ID NO:1705), FIG. 1708 (SEQ ID NO:1708), FIG. 1710 (SEQ ID NO:1710), FIG. 1712 (SEQ ID NO:1712), FIG. 1714 (SEQ ID NO:1714), FIG. 1716 (SEQ ID NO:1716), FIG. 1718 (SEQ ID NO:1718), FIG. 1720 (SEQ ID NO:1720), FIG. 1722 (SEQ ID NO:1722), FIG. 1725 (SEQ ID NO:1725), FIG. 1727 (SEQ ID NO:1727), FIG. 1729 (SEQ ID NO:1729), FIG. 1731 (SEQ ID NO:1731), FIG. 1733 (SEQ ID NO:1733), FIG. 1735 (SEQ ID NO:1735), FIG. 1738 (SEQ ID NO:1738), FIG. 1740 (SEQ ID NO:1740), FIG. 1742 (SEQ ID NO:1742), FIG. 1744 (SEQ ID NO:1744), FIG. 1746 (SEQ ID NO:1746), FIG. 1748 (SEQ ID NO:1748), FIG. 1750 (SEQ ID NO:1750), FIG. 1752 (SEQ ID NO:1752), FIG. 1754 (SEQ ID NO:1754), FIG. 1756 (SEQ ID NO:1756), FIG. 1758 (SEQ ID NO:1758), FIG. 1760 (SEQ ID NO:1760), FIG. 1762 (SEQ ID NO:1762), FIG. 1764 (SEQ ID NO:1764), FIG. 1767 (SEQ ID NO:1767), FIG. 1769 (SEQ ID NO:1769), FIG. 1771 (SEQ ID NO:1771), FIG. 1774 (SEQ ID NO:1774), FIG. 1776 (SEQ ID NO:1776), FIG. 1779 (SEQ ID NO:1779), FIG. 1782 (SEQ ID NO:1782), FIG. 1784 (SEQ ID NO:1784), FIG. 1786 (SEQ ID NO:1786), FIG. 1789 (SEQ ID NO:1789), FIG. 1791 (SEQ ID NO:1791), FIG. 1794 (SEQ ID NO:1794), FIG. 1796 (SEQ ID NO:1796), FIG. 1798 (SEQ ID NO:1798), FIG. 1800 (SEQ ID NO:1800), FIG. 1802 (SEQ ID NO:1802), FIG. 1804 (SEQ ID NO:1804), FIG. 1806 (SEQ ID NO:1806), FIG. 1808 (SEQ ID NO:1808), FIG. 1810 (SEQ ID NO:1810), FIG. 1812 (SEQ ID NO:1812), FIG. 1814 (SEQ ID NO:1814), FIG. 1816 (SEQ ID NO:1816), FIG. 1818 (SEQ ID NO:1818), FIG. 1820 (SEQ ID NO:1820), FIG. 1822 (SEQ ID NO:1822), FIG. 1824 (SEQ ID NO:1824), FIG. 1826 (SEQ ID NO:1826), FIG. 1828 (SEQ ID NO:1828), FIG. 1830 (SEQ ID NO:1830), FIG. 1832 (SEQ ID NO:1832), FIG. 1834 (SEQ ID NO:1834), FIG. 1836 (SEQ ID NO:1836), FIG. 1838 (SEQ ID NO:1838), FIG. 1840 (SEQ ID NO:1840), FIG. 1842 (SEQ ID NO:1842), FIG. 1844 (SEQ ID NO:1844), FIG. 1846 (SEQ ID NO:1846), FIG. 1848 (SEQ ID NO:1848), FIG. 1850 (SEQ ID NO:1850), FIG. 1852 (SEQ ID NO:1852), FIG. 1856 (SEQ ID NO:1856), FIG. 1858 (SEQ ID NO:1858), FIG. 1860 (SEQ ID NO:1860), FIG. 1862 (SEQ ID NO:1862), FIG. 1864 (SEQ ID NO:1864), FIG. 1867 (SEQ ID NO:1867), FIG. 1869 (SEQ ID NO:1869), FIG. 1871 (SEQ ID NO:1871), FIG. 1873 (SEQ ID NO:1873), FIG. 1876 (SEQ ID NO:1876), FIG. 1878 (SEQ ID NO:1878), FIG. 1880 (SEQ ID NO:1880), FIG. 1883 (SEQ ID NO:1883), FIG. 1885 (SEQ ID NO:1885), FIG. 1887 (SEQ ID NO:1887), FIG. 1890 (SEQ ID NO:1890), FIG. 1892 (SEQ ID NO:1892), FIG. 1894 (SEQ ID NO:1894), FIG. 1896 (SEQ ID NO:1896), FIG. 1898 (SEQ ID NO:1898), FIG. 1900 (SEQ ID NO:1900), FIG. 1902 (SEQ ID NO:1902), FIG. 1904 (SEQ ID NO:1904), FIG. 1906 (SEQ ID NO:1906), FIG. 1908 (SEQ ID NO:1908), FIG. 1910 (SEQ ID NO:1910), FIG. 1912 (SEQ ID NO:1912), FIG. 1914 (SEQ ID NO:1914), FIG. 1916 (SEQ ID NO:1916), FIG. 1918 (SEQ ID NO:1918), FIG. 1920 (SEQ ID NO:1920), FIG. 1922 (SEQ ID NO:1922), FIG. 1924 (SEQ ID NO:1924), FIG. 1926 (SEQ ID NO:1926), FIG. 1928 (SEQ ID NO:1928), FIG. 1930 (SEQ ID NO:1930), FIG. 1932 (SEQ ID NO:1932), FIG. 1934 (SEQ ID NO:1934), FIG. 1936 (SEQ ID NO:1936), FIG. 1938 (SEQ ID NO:1938), FIG. 1940 (SEQ ID NO:1940), FIG. 1942 (SEQ ID NO:1942), FIG. 1944 (SEQ ID NO:1944), FIG. 1946 (SEQ ID NO:1946), FIG. 1948 (SEQ ID NO:1948), FIG. 1951 (SEQ ID NO:1951), FIG. 1953 (SEQ ID NO:1953), FIG. 1955 (SEQ ID NO:1955), FIG. 1957 (SEQ ID NO:1957), FIG. 1959 (SEQ ID NO:1959), FIG. 1961 (SEQ ID NO:1961), FIG. 1964 (SEQ ID NO:1964), FIG. 1966 (SEQ ID NO:1966), FIG. 1968 (SEQ ID NO:1968), FIG. 1970 (SEQ ID NO:1970), FIG. 1972 (SEQ ID NO:1972), FIG. 1974 (SEQ ID NO:1974), FIG. 1976 (SEQ ID NO:1976), FIG. 1978 (SEQ ID NO:1978), FIG. 1980 (SEQ ID NO:1980), FIG. 1982 (SEQ ID NO:1982), FIG. 1984 (SEQ ID NO:1984), FIG. 1986 (SEQ ID NO:1986), FIG. 1988 (SEQ ID NO:1988), FIG. 1990 (SEQ ID NO:1990), FIG. 1992 (SEQ ID NO:1992), FIG. 1994 (SEQ ID NO:1994), FIG. 1996 (SEQ ID NO:1996), FIG. 1998 (SEQ ID NO:1998), FIG. 2000 (SEQ ID NO:2000), FIG. 2002 (SEQ ID NO:2002), FIG. 2004 (SEQ ID NO:2004), FIG. 2006 (SEQ ID NO:2006), FIG. 2008 (SEQ ID NO:2008), FIG. 2010 (SEQ ID NO:2010), FIG. 2012 (SEQ ID NO:2012), FIG. 2014 (SEQ ID NO:2014), FIG. 2016 (SEQ ID NO:2016), FIG. 2018 (SEQ ID NO:2018), FIG. 2020 (SEQ ID NO:2020), FIG. 2022 (SEQ ID NO:2022), FIG. 2024 (SEQ ID NO:2024), FIG. 2026 (SEQ ID NO:2026), FIG. 2028 (SEQ ID NO:2028), FIG. 2030 (SEQ ID NO:2030), FIG. 2032 (SEQ ID NO:2032), FIG. 2034 (SEQ ID NO:2034), FIG. 2036 (SEQ ID NO:2036), FIG. 2038 (SEQ ID NO:2038), FIG. 2040 (SEQ ID NO:2040), FIG. 2042 (SEQ ID NO:2042), FIG. 2044 (SEQ ID NO:2044), FIG. 2046 (SEQ ID NO:2046), FIG. 2048 (SEQ ID NO:2048), FIG. 2050 (SEQ ID NO:2050), FIG. 2052 (SEQ ID NO:5052), FIG. 2054 (SEQ ID NO:2054), FIG. 2056 (SEQ ID NO:2056), FIG. 2058 (SEQ ED NO:2058), FIG. 2060 (SEQ ID NO:2060), FIG. 2062 (SEQ ID NO:2062), FIG. 2064 (SEQ ID NO:2064), FIG. 2066 (SEQ ID NO:2066), FIG. 2068 (SEQ ID NO:2068), FIG. 2070 (SEQ ID NO:2070), FIG. 2072 (SEQ ID NO:2072), FIG. 2074 (SEQ ID NO:2074), FIG. 2076 (SEQ ID NO:2076), FIG. 2078 (SEQ ID NO:2078), FIG. 2080 (SEQ ID NO:2080), FIG. 2082 (SEQ ID NO:2082), FIG. 2084 (SEQ ID NO:2084), FIG. 2086 (SEQ ID NO:2086), FIG. 2088 (SEQ ID NO:2088), FIG. 2090 (SEQ ID NO:2090), FIG. 2092 (SEQ ID NO:2092), FIG. 2094 (SEQ ID NO:2094), FIG. 2096 (SEQ ID NO:2096), FIG. 2098 (SEQ ID NO:2098), FIG. 2100 (SEQ ID NO:2100), FIG. 2102 (SEQ ID NO:2102), FIG. 2104 (SEQ ID NO:2104), FIG. 2106 (SEQ ID NO:2106), FIG. 2108 (SEQ ID NO:2108), FIG. 2110 (SEQ ID NO:2110), FIG. 2112 (SEQ ID NO:2112), FIG. 2114 (SEQ ID NO:2114), FIG. 2116 (SEQ ID NO:2116), FIG. 2118 (SEQ ID NO:2118), FIG. 2120 (SEQ ID NO:2120), FIG. 2122 (SEQ ID NO:2122), FIG. 2124 (SEQ ID NO:2124), FIG. 2126 (SEQ ID NO:2126), FIG. 2128 (SEQ ID NO:2128), FIG. 2130 (SEQ ID NO:2130), FIG. 2132 (SEQ ID NO:2132), FIG. 2134 (SEQ ID NO:2134), FIG. 2136 (SEQ ID NO:2136), FIG. 2139 (SEQ ID NO:2139), FIG. 2141 (SEQ ID NO:2141), FIG. 2143 (SEQ ID NO:2143), FIG. 2145 (SEQ ID NO:2145), FIG. 2149 (SEQ ID NO:2149), FIG. 2151 (SEQ ID NO:2151), FIG. 2153 (SEQ ID NO:2153), FIG. 2155 (SEQ ID NO:2155), FIG. 2157 (SEQ ID NO:2157), FIG. 2159 (SEQ ID NO:2159), FIG. 2161 (SEQ ID NO:2161), FIG. 2163 (SEQ ID NO:2163), FIG. 2165 (SEQ ID NO:2165), FIG. 2167 (SEQ ID NO:2167), FIG. 2169 (SEQ ID NO:2169), FIG. 2171 (SEQ ID NO:2171), FIG. 2173 (SEQ ID NO:2173), FIG. 2175 (SEQ ID NO:2175), FIG. 2177 (SEQ ID NO:2177), FIG. 2179 (SEQ ID NO:2179), FIG. 2181 (SEQ ID NO:2181), FIG. 2183 (SEQ ID NO:2183), FIG. 2185 (SEQ ID NO:2185), FIG. 2187 (SEQ ID NO:2187), FIG. 2189 (SEQ ID NO:2189), FIG. 2191 (SEQ ID NO:2191), FIG. 2193 (SEQ ID NO:2193), FIG. 2195 (SEQ ID NO:2195), FIG. 2197 (SEQ ID NO:2197), FIG. 2199 (SEQ ID NO:2199), FIG. 2201 (SEQ ID NO:2201), FIG. 2203 (SEQ ID NO:2203), FIG. 2205 (SEQ ID NO:2205), FIG. 2207 (SEQ ID NO:2207), FIG. 2209 (SEQ ID NO:2209), FIG. 2211 (SEQ ID NO:2211), FIG. 2213 (SEQ ID NO:2213), FIG. 2215 (SEQ ID NO:2215), FIG. 2218 (SEQ ID NO:2218), FIG. 2220 (SEQ ID NO:2220), FIG. 2222 (SEQ ID NO:2222), FIG. 2224 (SEQ ID NO:2224), FIG. 2226 (SEQ ID NO:2226), FIG. 2228 (SEQ ID NO:2228), FIG. 2231 (SEQ ID NO:2231), FIG. 2233 (SEQ ID NO:2233), FIG. 2235 (SEQ ID NO:2235), FIG. 2237 (SEQ ID NO:2237), FIG. 2239 (SEQ ID NO:2239), FIG. 2241 (SEQ ID NO:2241), FIG. 2243 (SEQ ID NO:2243), FIG. 2245 (SEQ ID NO:2245), FIG. 2247 (SEQ ID NO:2247), FIG. 2249 (SEQ ID NO:2249), FIG. 2251 (SEQ ID NO:2251), FIG. 2253 (SEQ ID NO:2253), FIG. 2255 (SEQ ID NO:2255), FIG. 2257 (SEQ ID NO:2257), FIG. 2259 (SEQ ID NO:2259), FIG. 2261 (SEQ ID NO:2261), FIG. 2263 (SEQ ID NO:2263), FIG. 2265 (SEQ ID NO:2265), FIG. 2267 (SEQ ID NO:2267), FIG. 2269 (SEQ ID NO:2269), FIG. 2271 (SEQ ID NO:2271), FIG. 2273 (SEQ ID NO:2273), FIG. 2275 (SEQ ID NO:2275), FIG. 2277 (SEQ ID NO:2277), FIG. 2279 (SEQ ID NO:2279), FIG. 2281 (SEQ ID NO:2281), FIG. 2283 (SEQ ID NO:2283), FIG. 2285 (SEQ ID NO:2285), FIG. 2287 (SEQ ID NO:2287), FIG. 2289 (SEQ ID NO:2289), FIG. 2291 (SEQ ID NO:2291), FIG. 2293 (SEQ ID NO:2293), FIG. 2295 (SEQ ID NO:2295), FIG. 2297 (SEQ ID NO:2297), FIG. 2299 (SEQ ID NO:2299), FIG. 2302 (SEQ ID NO:2302), FIG. 2304 (SEQ ID NO:2304), FIG. 2306 (SEQ ID NO:2306), FIG. 2310 (SEQ ID NO:2310), FIG. 2313 (SEQ ID NO:2313), FIG. 2315 (SEQ ID NO:2315), FIG. 2317 (SEQ ID NO:2317), FIG. 2319 (SEQ ID NO:2319), FIG. 2321 (SEQ ID NO:2321), FIG. 2324 (SEQ ID NO:2324), FIG. 2326 (SEQ ID NO:2326), FIG. 2328 (SEQ ID NO:2328), FIG. 2330 (SEQ ID NO:2330), FIG. 2332 (SEQ ID NO:2332), FIG. 2334 (SEQ ID NO:2334), FIG. 2336 (SEQ ID NO:2336), FIG. 2338 (SEQ ID NO:2338), FIG. 2340 (SEQ ID NO:2340), FIG. 2342 (SEQ ID NO:2342), FIG. 2344 (SEQ ID NO:2344), FIG. 2347 (SEQ ID NO:2347), FIG. 2350 (SEQ ID NO:2350), FIG. 2352 (SEQ ID NO:2352), FIG. 2354 (SEQ ID NO:2354), FIG. 2356 (SEQ ID NO:2356), FIG. 2358 (SEQ ID NO:2358), FIG. 2360 (SEQ ID NO:2360), FIG. 2362 (SEQ ID NO:2362), FIG. 2364 (SEQ ID NO:2364), FIG. 2366 (SEQ ID NO:2366), FIG. 2368 (SEQ ID NO:2368), FIG. 2370 (SEQ ID NO:2370), FIG. 2372 (SEQ ID NO:2372), FIG. 2374 (SEQ ID NO:2374), FIG. 2376 (SEQ ID NO:2376), FIG. 2378 (SEQ ID NO:2378), FIG. 2380 (SEQ ID NO:2380), FIG. 2382 (SEQ ID NO:2382), FIG. 2384 (SEQ ID NO:2384), FIG. 2386 (SEQ ID NO:2386), FIG. 2388 (SEQ ID NO:2388), FIG. 2390 (SEQ ID NO:2390), FIG. 2392 (SEQ ID NO:2392), FIG. 2394 (SEQ ID NO:2394), FIG. 2396 (SEQ ID NO:2396), FIG. 2398 (SEQ ID NO:2398), FIG. 2400 (SEQ ID NO:2400), FIG. 2402 (SEQ ID NO:2402), FIG. 2404 (SEQ ID NO:2404), FIG. 2407 (SEQ ID NO:2407), FIG. 2409 (SEQ ID NO:2409), FIG. 2412 (SEQ ID NO:2412), FIG. 2415 (SEQ ID NO:2415), FIG. 2419 (SEQ ID NO:2419), FIG. 2423 (SEQ ID NO:2423), FIG. 2425 (SEQ ID NO:2425), FIG. 2427 (SEQ ID NO:2427), FIG. 2429 (SEQ ID NO:2429), FIG. 2431 (SEQ ID NO:2431), FIG. 2433 (SEQ ID NO:2433), FIG. 2435 (SEQ ID NO:2435), FIG. 2437 (SEQ ID NO:2437), FIG. 2439 (SEQ ID NO:2439), FIG. 2441 (SEQ ID NO:2441), FIG. 2443 (SEQ ID NO:2443), FIG. 2445 (SEQ ID NO:2445), FIG. 2448 (SEQ ID NO:2448), FIG. 2450 (SEQ ID NO:2450), FIG. 2452 (SEQ ID NO:2452), FIG. 2454 (SEQ ID NO:2454), FIG. 2457 (SEQ ID NO:2457), FIG. 2459 (SEQ ID NO:2459), FIG. 2461 (SEQ ID NO:2461), FIG. 2465 (SEQ ID NO:2465), FIG. 2468 (SEQ ID NO:2468), FIG. 2472 (SEQ ID NO:2472), FIG. 2474 (SEQ ID NO:2474), FIG. 2482 (SEQ ID NO:2482) or FIG. 2484 (SEQ ID NO:2484) said method comprising contacting cells which normally express said polypeptide with a candidate compound, and determining the lack of expression said gene.

24. The method of claim 23, wherein said candidate compound is an antisense nucleic acid.

25. A method of identifying a compound that mimics the activity of a PRO polypeptide of the invention as described in FIG. 2 (SEQ ID NO:2), FIG. 4 (SEQ ID NO:4), FIG. 6 (SEQ ID NO:6), FIG. 8 (SEQ ID NO:8), FIG. 10 (SEQ ID NO:10), FIG. 12 (SEQ ID NO:12), FIG. 14 (SEQ ID NO:14), FIG. 16 (SEQ ID NO:16), FIG. 18 (SEQ ID NO:18), FIG. 20 (SEQ ID NO:20), FIG. 22 (SEQ ID NO:22), FIG. 24 (SEQ ID NO:24), FIG. 26 (SEQ ID NO:26), FIG. 28 (SEQ ID NO:28), FIG. 30 (SEQ ID NO:30), FIG. 32 (SEQ ID NO:32), FIG. 34 (SEQ ID NO:34), FIG. 36 (SEQ ID NO:36), FIG. 38 (SEQ ID NO:38), FIG. 40 (SEQ ID NO:40), FIG. 42 (SEQ ID NO:42), FIG. 43 (SEQ ID NO:43), FIG. 46 (SEQ ID NO:46), FIG. 48 (SEQ ID NO:48), FIG. 50 (SEQ ID NO:50), FIG. 52 (SEQ ID NO:52), FIG. 54 (SEQ ID NO:54), FIG. 56 (SEQ ID NO:56), FIG. 58 (SEQ ID NO:58), FIG. 60 (SEQ ID NO:60), FIG. 62 (SEQ ID NO:62), FIG. 64 (SEQ ID NO:64), FIG. 66 (SEQ ID NO:66), FIG. 68 (SEQ ID NO:68), FIG. 70 (SEQ ID NO:70), FIG. 72 (SEQ ID NO:72), FIG. 74 (SEQ ID NO:74), FIG. 76 (SEQ ID NO:76), FIG. 78 (SEQ ID NO:78), FIG. 80 (SEQ ID NO:80), FIG. 80 (SEQ ID NO:80), FIG. 84 (SEQ ID NO:84), FIG. 86 (SEQ ID NO:86), FIG. 88 (SEQ ID NO:88), FIG. 90 (SEQ ID NO:90), FIG. 92 (SEQ ID NO:92), FIG. 94 (SEQ ID NO:94), FIG. 96 (SEQ ID NO:96), FIG. 98 (SEQ ID NO:98), FIG. 100 (SEQ ID NO:100), FIG. 102 (SEQ ID NO:102), FIG. 104 (SEQ ID NO:104), FIG. 106 (SEQ ID NO:106), FIG. 108 (SEQ ID NO:108), FIG. 108 (SEQ ID NO:108), FIG. 112 (SEQ ID NO:112), FIG. 115 (SEQ ID NO:115), FIG. 117 (SEQ ID NO:117), FIG. 119 (SEQ ID NO:119), FIG. 121 (SEQ ID NO:121), FIG. 123 (SEQ ID NO:123), FIG. 125 (SEQ ID NO:125), FIG. 127 (SEQ ID NO:127), FIG. 129 (SEQ ID NO:129), FIG. 131 (SEQ ID NO:131), FIG. 133 (SEQ ID NO:133), FIG. 135 (SEQ ID NO:135), FIG. 137 (SEQ ID NO:137), FIG. 139 (SEQ ID NO:139), FIG. 141 (SEQ ID NO:141), FIG. 143 (SEQ ID NO:143), FIG. 145 (SEQ ID NO:145), FIG. 147 (SEQ ID NO:147), FIG. 149 (SEQ ID NO:149), FIG. 151 (SEQ ID NO:151), FIG. 153 (SEQ ID NO:153), FIG. 155 (SEQ ID NO:155), FIG. 157 (SEQ ID NO:157), FIG. 159 (SEQ ID NO:159), FIG. 161 (SEQ ID NO:161), FIG. 163 (SEQ ID NO:163), FIG. 165 (SEQ ID NO:165), FIG. 167 (SEQ ID NO:167), FIG. 169 (SEQ ID NO:169), FIG. 171 (SEQ ID NO:171), FIG. 173 (SEQ ID NO:173), FIG. 175 (SEQ ID NO:175), FIG. 177 (SEQ ID NO:177), FIG. 179 (SEQ ID NO:179), FIG. 181 (SEQ ID NO:181), FIG. 183 (SEQ ID NO:183), FIG. 185 (SEQ ID NO:185), FIG. 187 (SEQ ID NO:187), FIG. 189 (SEQ ID NO:189), FIG. 191 (SEQ ID NO:191), FIG. 194 (SEQ ID NO:194), FIG. 196 (SEQ ID NO:196), FIG. 198 (SEQ ID NO:198), FIG. 200 (SEQ ID NO:200), FIG. 202 (SEQ ID NO:202), FIG. 204 (SEQ ID NO:204), FIG. 206 (SEQ ID NO:206), FIG. 208 (SEQ ID NO:208), FIG. 210 (SEQ ID NO:210), FIG. 212 (SEQ ID NO:212), FIG. 214 (SEQ ID NO:214), FIG. 216 (SEQ ID NO:216), FIG. 218 (SEQ ID NO:218), FIG. 221 (SEQ ID NO:221), FIG. 223 (SEQ ID NO:223), FIG. 225 (SEQ ID NO:225), FIG. 227 (SEQ ID NO:227), FIG. 229 (SEQ ID NO:229), FIG. 231 (SEQ ID NO:231), FIG. 233 (SEQ ID NO:233), FIG. 235 (SEQ ID NO:235), FIG. 237 (SEQ ID NO:237), FIG. 239 (SEQ ID NO:239), FIG. 241 (SEQ ID NO:241), FIG. 243 (SEQ ID NO:243), FIG. 245 (SEQ ID NO:245), FIG. 247 (SEQ ID NO:247), FIG. 249 (SEQ ID NO:249), FIG. 251 (SEQ ID NO:251), FIG. 253 (SEQ ID NO:253), FIG. 255 (SEQ ID NO:255), FIG. 257 (SEQ ID NO:257), FIG. 259 (SEQ ID NO:259), FIG. 261 (SEQ ID NO:261), FIG. 263 (SEQ ID NO:263), FIG. 265 (SEQ ID NO:265), FIG. 267 (SEQ ID NO:267), FIG. 269 (SEQ ID NO:269), FIG. 272 (SEQ ID NO:272), FIG. 274 (SEQ ID NO:274), FIG. 276 (SEQ ID NO:276), FIG. 278 (SEQ ID NO:278), FIG. 280 (SEQ ID NO:280), FIG. 282 (SEQ ID NO:282), FIG. 284 (SEQ ID NO:284), FIG. 286 (SEQ ID NO:286), FIG. 288 (SEQ ID NO:288), FIG. 290 (SEQ ID NO:290), FIG. 292 (SEQ ID NO:292), FIG. 294 (SEQ ID NO:294), FIG. 296 (SEQ ID NO:296), FIG. 298 (SEQ ID NO:298), FIG. 300 (SEQ ID NO:300), FIG. 302 (SEQ ID NO:302), FIG. 304 (SEQ ID NO:304), FIG. 306 (SEQ ID NO:306), FIG. 308 (SEQ ID NO:308), FIG. 310 (SEQ ID NO:310), FIG. 312 (SEQ ID NO:312), FIG. 314 (SEQ ID NO:314), FIG. 316 (SEQ ID NO:316), FIG. 318 (SEQ ID NO:318), FIG. 320 (SEQ ID NO:320), FIG. 322 (SEQ ID NO:322), FIG. 324 (SEQ ID NO:324), FIG. 326 (SEQ ID NO:326), FIG. 328 (SEQ ID NO:328), FIG. 330 (SEQ ID NO:330), FIG. 332 (SEQ ID NO:332), FIG. 334 (SEQ ID NO:334), FIG. 336 (SEQ ID NO:336), FIG. 338 (SEQ ID NO:338), FIG. 340 (SEQ ID NO:340), FIG. 342 (SEQ ID NO:342), FIG. 344 (SEQ ID NO:344), FIG. 346 (SEQ ID NO:346), FIG. 348 (SEQ ID NO:348), FIG. 350 (SEQ ID NO:350), FIG. 352 (SEQ ID NO:352), FIG. 354 (SEQ ID NO:354), FIG. 356 (SEQ ID NO:356), FIG. 358 (SEQ ID NO:358), FIG. 360 (SEQ ID NO:360), FIG. 362 (SEQ ID NO:362), FIG. 364 (SEQ ID NO:364), FIG. 366 (SEQ ID NO:366), FIG. 368 (SEQ ID NO:368), FIG. 370 (SEQ ID NO:370), FIG. 372 (SEQ ID NO:372), FIG. 374 (SEQ ID NO:374), FIG. 376 (SEQ ID NO:376), FIG. 378 (SEQ ID NO:378), FIG. 380 (SEQ ID NO:380), FIG. 382 (SEQ ID NO:382), FIG. 384 (SEQ ID NO:384), FIG. 386 (SEQ ID NO:386), FIG. 388 (SEQ ID NO:388), FIG. 390 (SEQ ID NO:390), FIG. 392 (SEQ ID NO:392), FIG. 394 (SEQ ID NO:394), FIG. 396 (SEQ ID NO:396), FIG. 398 (SEQ ID NO:398), FIG. 400 (SEQ ID NO:400), FIG. 402 (SEQ ID NO:402), FIG. 404 (SEQ ID NO:404), FIG. 406 (SEQ ID NO:406), FIG. 408 (SEQ ID NO:408), FIG. 410 (SEQ ID NO:410), FIG. 412 (SEQ ID NO:412), FIG. 414 (SEQ ID NO:414), FIG. 416 (SEQ ID NO:416), FIG. 418 (SEQ ID NO:418), FIG. 420 (SEQ ID NO:420), FIG. 422 (SEQ ID NO:422), FIG. 424 (SEQ ID NO:424), FIG. 426 (SEQ ID NO:426), FIG. 428 (SEQ ID NO:428), FIG. 430 (SEQ ID NO:430), FIG. 432 (SEQ ID NO:432), FIG. 434 (SEQ ID NO:434), FIG. 436 (SEQ ID NO:436), FIG. 438 (SEQ ID NO:438), FIG. 440 (SEQ ID NO:440), FIG. 442 (SEQ ID NO:442), FIG. 444 (SEQ ID NO:444), FIG. 446 (SEQ ID NO:446), FIG. 448 (SEQ ID NO:448), FIG. 450 (SEQ ID NO:450), FIG. 452 (SEQ ID NO:452), FIG. 454 (SEQ ID NO:454), FIG. 456 (SEQ ID NO:456), FIG. 458 (SEQ ID NO:458), FIG. 460 (SEQ ID NO:460), FIG. 462 (SEQ ID NO:462), FIG. 464 (SEQ ID NO:464), FIG. 466 (SEQ ID NO:466), FIG. 467 (SEQ ID NO:467), FIG. 470 (SEQ ID NO:470), FIG. 472 (SEQ ID NO:472), FIG. 474 (SEQ ID NO:474), FIG. 476 (SEQ ID NO:476), FIG. 478 (SEQ ID NO:478), FIG. 480 (SEQ ID NO:480), FIG. 482 (SEQ ID NO:482), FIG. 484 (SEQ ID NO:484), FIG. 486 (SEQ ID NO:486), FIG. 488 (SEQ ID NO:488), FIG. 490 (SEQ ID NO:490), FIG. 492 (SEQ ID NO:492), FIG. 494 (SEQ ID NO:494), FIG. 496 (SEQ ID NO:496), FIG. 498 (SEQ ID NO:498), FIG. 500 (SEQ ID NO:500), FIG. 502 (SEQ ID NO:502), FIG. 504 (SEQ ID NO:504), FIG. 506 (SEQ ID NO:506), FIG. 508 (SEQ ID NO:508), FIG. 510 (SEQ ID NO:510), FIG. 512 (SEQ ID NO:512), FIG. 514 (SEQ ID NO:514), FIG. 516 (SEQ ID NO:516), FIG. 518 (SEQ ID NO:518), FIG. 520 (SEQ ID NO:520), FIG. 522 (SEQ ID NO:522), FIG. 524 (SEQ ID NO:524), FIG. 526 (SEQ ID NO:526), FIG. 528 (SEQ ID NO:528), FIG. 530 (SEQ ID NO:530), FIG. 532 (SEQ ID NO:532), FIG. 534 (SEQ ID NO:534), FIG. 536 (SEQ ID NO:536), FIG. 538 (SEQ ID NO:538), FIG. 540 (SEQ ID NO:540), FIG. 542 (SEQ ID NO:542), FIG. 544 (SEQ ID NO:544), FIG. 546 (SEQ ID NO:546), FIG. 548 (SEQ ID NO:548), FIG. 550 (SEQ ID NO:550), FIG. 552 (SEQ ID NO:552), FIG. 554 (SEQ ID NO:554), FIG. 556 (SEQ ID NO:556), FIG. 558 (SEQ ID NO:558), FIG. 560 (SEQ ID NO:560), FIG. 562 (SEQ ID NO:562), FIG. 564 (SEQ ID NO:564), FIG. 566 (SEQ ID NO:566), FIG. 568 (SEQ ID NO:568), FIG. 570 (SEQ ID NO:570), FIG. 572 (SEQ ID NO:572), FIG. 574 (SEQ ID NO:574), FIG. 576 (SEQ ID NO:576), FIG. 578 (SEQ ID NO:578), FIG. 580 (SEQ ID NO:580), FIG. 582 (SEQ ID NO:582), FIG. 584 (SEQ ID NO:584), FIG. 586 (SEQ ID NO:586), FIG. 588 (SEQ ID NO:588), FIG. 590 (SEQ ID NO:590), FIG. 592 (SEQ ID NO:592), FIG. 594 (SEQ ID NO:594), FIG. 596 (SEQ ID NO:596), FIG. 598 (SEQ ID NO:598), FIG. 600 (SEQ ID NO:600), FIG. 602 (SEQ ID NO:602), FIG. 604 (SEQ ID NO:604), FIG. 606 (SEQ ID NO:606), FIG. 608 (SEQ ID NO:608), FIG. 610 (SEQ ID NO:610), FIG. 612 (SEQ ID NO:612), FIG. 614 (SEQ ID NO:614), FIG. 616 (SEQ ID NO:616), FIG. 618 (SEQ ID NO:618), FIG. 620 (SEQ ID NO:620), FIG. 622 (SEQ ID NO:622), FIG. 624 (SEQ ID NO:624), FIG. 626 (SEQ ID NO:626), FIG. 628 (SEQ ID NO:628), FIG. 630 (SEQ ID NO:630), FIG. 632 (SEQ ID NO:632), FIG. 634 (SEQ ID NO:634), FIG. 637 (SEQ ID NO:637), FIG. 639 (SEQ ID NO:639), FIG. 641 (SEQ ID NO:641), FIG. 643 (SEQ ID NO:643), FIG. 645 (SEQ ID NO:645), FIG. 647 (SEQ ID NO:647), FIG. 649 (SEQ ID NO:649), FIG. 651 (SEQ ID NO:651), FIG. 653 (SEQ ID NO:653), FIG. 655 (SEQ ID NO:655), FIG. 657 (SEQ ID NO:657), FIG. 659 (SEQ ID NO:659), FIG. 661 (SEQ ID NO:661), FIG. 663 (SEQ ID NO:663), FIG. 665 (SEQ ID NO:665), FIG. 667 (SEQ ID NO:667), FIG. 669 (SEQ ID NO:669), FIG. 671 (SEQ ID NO:671), FIG. 673 (SEQ ID NO:673), FIG. 675 (SEQ ID NO:675), FIG. 677 (SEQ ID NO:677), FIG. 679 (SEQ ID NO:679), FIG. 681 (SEQ ID NO:681), FIG. 683 (SEQ ID NO:683), FIG. 685 (SEQ ID NO:685), FIG. 687 (SEQ ID NO:687), FIG. 689 (SEQ ID NO:689), FIG. 691 (SEQ ID NO:691), FIG. 693 (SEQ ID NO:693), FIG. 695 (SEQ ID NO:695), FIG. 697 (SEQ ID NO:697), FIG. 699 (SEQ ID NO:699), FIG. 701 (SEQ ID NO:701), FIG. 703 (SEQ ID NO:703), FIG. 705 (SEQ ID NO:705), FIG. 707 (SEQ ID NO:707), FIG. 709 (SEQ ID NO:709), FIG. 711 (SEQ ID NO:711), FIG. 713 (SEQ ID NO:713), FIG. 715 (SEQ ID NO:715), FIG. 717 (SEQ ID NO:717), FIG. 719 (SEQ ID NO:719), FIG. 721 (SEQ ID NO:721), FIG. 723 (SEQ ID NO:723), FIG. 725 (SEQ ID NO:725), FIG. 727 (SEQ ID NO:727), FIG. 729 (SEQ ID NO:729), FIG. 731 (SEQ ID NO:731), FIG. 733 (SEQ ID NO:733), FIG. 735 (SEQ ID NO:735), FIG. 737 (SEQ ID NO:737), FIG. 739 (SEQ ID NO:739), FIG. 741 (SEQ ID NO:741), FIG. 743 (SEQ ID NO:743), FIG. 745 (SEQ ID NO:745), FIG. 747 (SEQ ID NO:747), FIG. 749 (SEQ ID NO:749), FIG. 751 (SEQ ID NO:751), FIG. 753 (SEQ ID NO:753), FIG. 755 (SEQ ID NO:755), FIG. 757 (SEQ ID NO:757), FIG. 759 (SEQ ID NO:759), FIG. 761 (SEQ ID NO:761), FIG. 763 (SEQ ID NO:763), FIG. 765 (SEQ ID NO:765), FIG. 767 (SEQ ID NO:767), FIG. 770 (SEQ ID NO:770), FIG. 772 (SEQ ID NO:772), FIG. 774 (SEQ ID NO:774), FIG. 776 (SEQ ID NO:776), FIG. 778 (SEQ ID NO:778), FIG. 780 (SEQ ID NO:780), FIG. 782 (SEQ ID NO:782), FIG. 784 (SEQ ID NO:784), FIG. 786 (SEQ ID NO:786), FIG. 788 (SEQ ID NO:788), FIG. 790 (SEQ ID NO:790), FIG. 792 (SEQ ID NO:792), FIG. 794 (SEQ ID NO:794), FIG. 796 (SEQ ID NO:796), FIG. 798 (SEQ ID NO:798), FIG. 800 (SEQ ID NO:800), FIG. 802 (SEQ ID NO:802), FIG. 805 (SEQ ID NO:805), FIG. 807 (SEQ ID NO:807), FIG. 809 (SEQ ID NO:809), FIG. 811 (SEQ ID NO:811), FIG. 813 (SEQ ID NO:813), FIG. 815 (SEQ ID NO:815), FIG. 817 (SEQ ID NO:817), FIG. 819 (SEQ ID NO:819), FIG. 821 (SEQ ID NO:821), FIG. 823 (SEQ ID NO:823), FIG. 826 (SEQ ID NO:826), FIG. 828 (SEQ ID NO:828), FIG. 830 (SEQ ID NO:830), FIG. 832 (SEQ ID NO:832), FIG. 834 (SEQ ID NO:834), FIG. 836 (SEQ ID NO:836), FIG. 838 (SEQ ID NO:838), FIG. 840 (SEQ ID NO:840), FIG. 842 (SEQ ID NO:842), FIG. 844 (SEQ ID NO:844), FIG. 846 (SEQ ID NO:846), FIG. 848 (SEQ ID NO:848), FIG. 850 (SEQ ID NO:850), FIG. 852 (SEQ ID NO:852), FIG. 854 (SEQ ID NO:854), FIG. 856 (SEQ ID NO:856), FIG. 858 (SEQ ID NO:858), FIG. 860 (SEQ ID NO:860), FIG. 862 (SEQ ID NO:862), FIG. 864 (SEQ ID NO:864), FIG. 866 (SEQ ID NO:866), FIG. 868 (SEQ ID NO:868), FIG. 870 (SEQ ID NO:870), FIG. 872 (SEQ ID NO:872), FIG. 874 (SEQ ID NO:874), FIG. 876 (SEQ ID NO:876), FIG. 878 (SEQ ID NO:878), FIG. 880 (SEQ ID NO:880), FIG. 882 (SEQ ID NO:882), FIG. 884 (SEQ ID NO:884), FIG. 886 (SEQ ID NO:886), FIG. 888 (SEQ ID NO:888), FIG. 890 (SEQ ID NO:890), FIG. 892 (SEQ ID NO:892), FIG. 894 (SEQ ID NO:894), FIG. 896 (SEQ ID NO:896), FIG. 898 (SEQ ID NO:898), FIG. 900 (SEQ ID NO:900), FIG. 902 (SEQ ID NO:902), FIG. 904 (SEQ ID NO:904), FIG. 906 (SEQ ID NO:906), FIG. 908 (SEQ ID NO:908), FIG. 911 (SEQ ID NO:911), FIG. 913 (SEQ ID NO:913), FIG. 915 (SEQ ID NO:915), FIG. 917 (SEQ ID NO:917), FIG. 919 (SEQ ID NO:919), FIG. 921 (SEQ ID NO:921), FIG. 923 (SEQ ID NO:923), FIG. 925 (SEQ ID NO:925), FIG. 927 (SEQ ID NO:927), FIG. 929 (SEQ ID NO:929), FIG. 931 (SEQ ID NO:931), FIG. 933 (SEQ ID NO:933), FIG. 935 (SEQ ID NO:935), FIG. 937 (SEQ ID NO:937), FIG. 940 (SEQ ID NO:940), FIG. 943 (SEQ ID NO:943), FIG. 946 (SEQ ID NO:946), FIG. 948 (SEQ ID NO:948), FIG. 950 (SEQ ID NO:950), FIG. 952 (SEQ ID NO:952), FIG. 955 (SEQ ID NO:955), FIG. 957 (SEQ ID NO:957), FIG. 959 (SEQ ID NO:959), FIG. 961 (SEQ ID NO:961), FIG. 966 (SEQ ID NO:966), FIG. 968 (SEQ ID NO:968), FIG. 970 (SEQ ID NO:970), FIG. 972 (SEQ ID NO:972), FIG. 974 (SEQ ID NO:974), FIG. 976 (SEQ ID NO:976), FIG. 978 (SEQ ID NO:978), FIG. 980 (SEQ ID NO:980), FIG. 985 (SEQ ID NO:985), FIG. 988 (SEQ ID NO:988), FIG. 991 (SEQ ID NO:991), FIG. 993 (SEQ ID NO:993), FIG. 995 (SEQ ID NO:995), FIG. 997 (SEQ ID NO:997), FIG. 1000 (SEQ ID NO:1000), FIG. 1002 (SEQ ID NO:1002), FIG. 1005 (SEQ ID NO:1005), FIG. 1007 (SEQ ID NO:1007), FIG. 1009 (SEQ ID NO:1009), FIG. 1011 (SEQ ID NO:1011), FIG. 1013 (SEQ ID NO:1013), FIG. 1015 (SEQ ID NO:1015), FIG. 1017 (SEQ ID NO:1017), FIG. 1019 (SEQ ID NO:1019), FIG. 1022 (SEQ ID NO:1022), FIG. 1024 (SEQ ID NO:1024), FIG. 1026 (SEQ ID NO:1026), FIG. 1028 (SEQ ID NO:1028), FIG. 1030 (SEQ ID NO:1030), FIG. 1032 (SEQ ID NO:1032), FIG. 1034 (SEQ ID NO:1034), FIG. 1036 (SEQ ID NO:1036), FIG. 1038 (SEQ ID NO:1083), FIG. 1040 (SEQ ID NO:1040), FIG. 1042 (SEQ ID NO:1042), FIG. 1044 (SEQ ID NO:1044), FIG. 1047 (SEQ ID NO:1047), FIG. 1049 (SEQ ID NO:1049), FIG. 1051 (SEQ ID NO:1051), FIG. 1053 (SEQ ID NO:1053), FIG. 1055 (SEQ ID NO1055), FIG. 1057 (SEQ ID NO:1057), FIG. 1060 (SEQ ID NO:1060), FIG. 1062 (SEQ ID NO:1062), FIG. 1064 (SEQ ID NO:1064), FIG. 1066 (SEQ ID NO:1066), FIG. 1068 (SEQ ID NO:1068), FIG. 1070 (SEQ ID NO:1070), FIG. 1072 (SEQ ID NO:1072), FIG. 1074 (SEQ ID NO:1074), FIG. 1076 (SEQ ID NO:1076), FIG. 1078 (SEQ ID NO:1078), FIG. 1080 (SEQ ID NO:1080), FIG. 1082 (SEQ ID NO:1082), FIG. 1084 (SEQ ID NO:1084), FIG. 1086 (SEQ ID NO:1086), FIG. 1089 (SEQ ID NO:1089), FIG. 1091 (SEQ ID NO:1091), FIG. 1093 (SEQ ID NO:1093), FIG. 1098 (SEQ ID NO:1098), FIG. 1100 (SEQ ID NO:1100), FIG. 1103 (SEQ ID NO:1103), FIG. 1105 (SEQ ID NO:1105), FIG. 1107 (SEQ ID NO:1107), FIG. 1110 (SEQ ID NO:1110), FIG. 1112 (SEQ ID NO:1112), FIG. 1114 (SEQ ID NO:1114), FIG. 1116 (SEQ ID NO:1116), FIG. 1118 (SEQ ID NO:1118), FIG. 1120 (SEQ ID NO:1120), FIG. 1122 (SEQ ID NO:1122), FIG. 1124 (SEQ ID NO:1124), FIG. 1126 (SEQ ID NO:1126), FIG. 1128 (SEQ ID NO:1128), FIG. 1130 (SEQ ID NO:1130), FIG. 1132 (SEQ ID NO:1132), FIG. 1134 (SEQ ID NO:1134), FIG. 1136 (SEQ ID NO:1136), FIG. 1138 (SEQ ID NO:1138), FIG. 1140 (SEQ ID NO:1140), FIG. 1142 (SEQ ID NO:1142), FIG. 1144 (SEQ ID NO:1144), FIG. 1146 (SEQ ID NO:1146), FIG. 1148 (SEQ ID NO:1148), FIG. 1150 (SEQ ID NO:1150), FIG. 1153 (SEQ ID NO:1153), FIG. 1155 (SEQ ID NO:1155), FIG. 1157 (SEQ ID NO:1157), FIG. 1159 (SEQ ID NO:1159), FIG. 1161 (SEQ ID NO:1161), FIG. 1164 (SEQ ID NO:1164), FIG. 1166 (SEQ ID NO:1166), FIG. 1168 (SEQ ID NO:1168), FIG. 1170 (SEQ ID NO:1170), FIG. 1172 (SEQ ID NO:1172), FIG. 1174 (SEQ ID NO:1174), FIG. 1176 (SEQ ID NO:1176), FIG. 1178 (SEQ ID NO:1178), FIG. 1180 (SEQ ID NO:1180), FIG. 1182 (SEQ ID NO:1182), FIG. 1184 (SEQ ID NO:1184), FIG. 1186 (SEQ ID NO:1186), FIG. 1188 (SEQ ID NO:1188), FIG. 1190 (SEQ ID NO:1190), FIG. 1192 (SEQ ID NO:1192), FIG. 1194 (SEQ ID NO:1194), FIG. 1196 (SEQ ID NO:1196), FIG. 1198 (SEQ ID NO:1198), FIG. 1200 (SEQ ID NO:1200), FIG. 1202 (SEQ ID NO:1202), FIG. 1204 (SEQ ID NO:1204), FIG. 1206 (SEQ ID NO:1206), FIG. 1208 (SEQ ID NO:1208), FIG. 1210 (SEQ ID NO:1210), FIG. 1212 (SEQ ID NO:1212), FIG. 1214 (SEQ ID NO:1214), FIG. 1216 (SEQ ID NO:1216), FIG. 1218 (SEQ ID NO:1218), FIG. 1220 (SEQ ID NO:1220), FIG. 1222 (SEQ ID NO:1222), FIG. 1224 (SEQ ID NO:1224), FIG. 1226 (SEQ ID NO:1226), FIG. 1228 (SEQ ID NO:1228), FIG. 1230 (SEQ ID NO:1230), FIG. 1232 (SEQ ID NO:1232), FIG. 1234 (SEQ ID NO:1234), FIG. 1236 (SEQ ID NO:1236), FIG. 1238 (SEQ ID NO:1238), FIG. 1240 (SEQ ID NO:1240), FIG. 1242 (SEQ ID NO:1242), FIG. 1244 (SEQ ID NO:1244), FIG. 1246 (SEQ ID NO:1246), FIG. 1248 (SEQ ID NO:1248), FIG. 1250 (SEQ ID NO:1250), FIG. 1252 (SEQ ID NO:1252), FIG. 1254 (SEQ ID NO:1254), FIG. 1256 (SEQ ID NO:1256), FIG. 1258 (SEQ ID NO:1258), FIG. 1260 (SEQ ID NO:1260), FIG. 1262 (SEQ ID NO:1262), FIG. 1264 (SEQ ID NO:1264), FIG. 1266 (SEQ ID NO:1266), FIG. 1268 (SEQ ID NO:1268), FIG. 1270 (SEQ ID NO:1270), FIG. 1272 (SEQ ID NO:1272), FIG. 1274 (SEQ ID NO:1274), FIG. 1276 (SEQ ID NO:1276), FIG. 1278 (SEQ ID NO:1278), FIG. 1280 (SEQ ID NO:1280), FIG. 1282 (SEQ ID NO:1282), FIG. 1284 (SEQ ID NO:1284), FIG. 1286 (SEQ ID NO:1286), FIG. 1288 (SEQ ID NO:1288), FIG. 1290 (SEQ ID NO:1290), FIG. 1292 (SEQ ID NO:1292), FIG. 1294 (SEQ ID NO:1294), FIG. 1296 (SEQ ID NO:1296), FIG. 1298 (SEQ ID NO:1298), FIG. 1300 (SEQ ID NO:1300), FIG. 1302 (SEQ ID NO:1302), FIG. 1304 (SEQ ID NO:1304), FIG. 1306 (SEQ ID NO:1306), FIG. 1308 (SEQ ID NO:1308), FIG. 1310 (SEQ ID NO:1310), FIG. 1312 (SEQ ID NO:1312), FIG. 1314 (SEQ ID NO:1314), FIG. 1316 (SEQ ID NO:1316), FIG. 1318 (SEQ ID NO:1318), FIG. 1320 (SEQ ID NO:1320), FIG. 1322 (SEQ ID NO:1322), FIG. 1324 (SEQ ID NO:1324), FIG. 1326 (SEQ ID NO:1326), FIG. 1328 (SEQ ID NO:1328), FIG. 1330 (SEQ ID NO:1330), FIG. 1332 (SEQ ID NO:1332), FIG. 1334 (SEQ ID NO:1334), FIG. 1336 (SEQ ID NO:1336), FIG. 1338 (SEQ ID NO:1338), FIG. 1340 (SEQ ID NO:140), FIG. 1342 (SEQ ID NO:1342), FIG. 1344 (SEQ ID NO:1344), FIG. 1346 (SEQ ID NO:1346), FIG. 1348 (SEQ ID NO:1348), FIG. 1350 (SEQ ID NO:1350), FIG. 1352 (SEQ ID NO:1352), FIG. 1354 (SEQ ID NO:1354), FIG. 1356 (SEQ ID NO:1356), FIG. 1358 (SEQ ID NO:1358), FIG. 1360 (SEQ ID NO:1360), FIG. 1362 (SEQ ID NO:1362), FIG. 1364 (SEQ ID NO:1364), FIG. 1366 (SEQ ID NO:1366), FIG. 1368 (SEQ ID NO:1368), FIG. 1370 (SEQ ID NO:1370), FIG. 1372 (SEQ ID NO:1372), FIG. 1374 (SEQ ID NO:1374), FIG. 1376 (SEQ ID NO:1376), FIG. 1378 (SEQ ID NO:1378), FIG. 1380 (SEQ ID NO:1379), FIG. 1382 (SEQ ID NO:1382), FIG. 1384 (SEQ ID NO:1384), FIG. 1386 (SEQ ID NO:1386), FIG. 1388 (SEQ ID NO:1388), FIG. 1390 (SEQ ID NO:1390), FIG. 1392 (SEQ ID NO:1392), FIG. 1394 (SEQ ID NO:1394), FIG. 1396 (SEQ ID NO:1396), FIG. 1398 (SEQ ID NO:1398), FIG. 1400 (SEQ ID NO:1400), FIG. 1402 (SEQ ID NO:1402), FIG. 1404 (SEQ ID NO:1404), FIG. 1406 (SEQ ID NO:1406), FIG. 1408 (SEQ ID NO:1408), FIG. 1410 (SEQ ID NO:1410), FIG. 1412 (SEQ ID NO:1412), FIG. 1414 (SEQ ID NO:1414), FIG. 1416 (SEQ ID NO:1416), FIG. 1418 (SEQ ID NO:1418), FIG. 1420 (SEQ ID NO:1420), FIG. 1422 (SEQ ID NO:1422), FIG. 1425 (SEQ ID NO:1425), FIG. 1427 (SEQ ID NO:1427), FIG. 1429 (SEQ ID NO:1429), FIG. 1432 (SEQ ID NO:1432), FIG. 1434 (SEQ ID NO:1434), FIG. 1436 (SEQ ID NO:1436), FIG. 1438 (SEQ ID NO:1438), FIG. 1440 (SEQ ID NO:1440), FIG. 1442 (SEQ ID NO:1442), FIG. 1444 (SEQ ID NO:1444), FIG. 1446 (SEQ ID NO:1446), FIG. 1448 (SEQ ID NO:1448), FIG. 1450 (SEQ ID NO:1450), FIG. 1452 (SEQ ID NO:1452), FIG. 1454 (SEQ ID NO:1454), FIG. 1456 (SEQ ID NO:1456), FIG. 1458 (SEQ ID NO:1458), FIG. 1460 (SEQ ID NO:1460), FIG. 1462 (SEQ ID NO:1462), FIG. 1464 (SEQ ID NO:1464), FIG. 1466 (SEQ ID NO:1466), FIG. 1468 (SEQ ID NO:1468), FIG. 1470 (SEQ ID NO:1470), FIG. 1472 (SEQ ID NO:1472), FIG. 1474 (SEQ ID NO:1474), FIG. 1476 (SEQ ID NO:1476), FIG. 1478 (SEQ ID NO:1478), FIG. 1480 (SEQ ID NO:1480), FIG. 1482 (SEQ ID NO:1482), FIG. 1484 (SEQ ID NO:1484), FIG. 1486 (SEQ ID NO:1486), FIG. 1488 (SEQ ID NO:1488), FIG. 1490 (SEQ ID NO:1490), FIG. 1492 (SEQ ID NO:1492), FIG. 1494 (SEQ ID NO:1494), FIG. 1496 (SEQ ID NO:1496), FIG. 1498 (SEQ ID NO:1498), FIG. 1500 (SEQ ID NO:1500), FIG. 1502 (SEQ ID NO:1502), FIG. 1504 (SEQ ID NO:1504), FIG. 1506 (SEQ ID NO:1506), FIG. 1508 (SEQ ID NO:1508), FIG. 1510 (SEQ ID NO:1510), FIG. 1512 (SEQ ID NO:1512), FIG. 1514 (SEQ ID NO:1514), FIG. 1516 (SEQ ID NO:1516), FIG. 1518 (SEQ ID NO:1518), FIG. 1520 (SEQ ID NO:1520), FIG. 1522 (SEQ ID NO:1522), FIG. 1524 (SEQ ID NO:1524), FIG. 1526 (SEQ ID NO:1526), FIG. 1528 (SEQ ID NO:1528), FIG. 1530 (SEQ ID NO:1530), FIG. 1532 (SEQ ID NO:1532), FIG. 1534 (SEQ ID NO:1534), FIG. 1536 (SEQ ID NO:1536), FIG. 1538 (SEQ ID NO:1538), FIG. 1540 (SEQ ID NO:1540), FIG. 1542 (SEQ ID NO:1542), FIG. 1544 (SEQ ID NO:1544), FIG. 1546 (SEQ ID NO:1546), FIG. 1548 (SEQ ID NO:1548), FIG. 1550 (SEQ ID NO:1550), FIG. 1552 (SEQ ID NO:1552), FIG. 1554 (SEQ ID NO:1554), FIG. 1556 (SEQ ID NO:1556), FIG. 1558 (SEQ ID NO:1558), FIG. 1560 (SEQ ID NO:1560), FIG. 1562 (SEQ ID NO:1562), FIG. 1564 (SEQ ID NO:1654), FIG. 1566 (SEQ ID NO:1566), FIG. 1568 (SEQ ID NO:1568), FIG. 1570 (SEQ ID NO:1570), FIG. 1572 (SEQ ID NO:1572), FIG. 1574 (SEQ ID NO:1574), FIG. 1576 (SEQ ID NO:1576), FIG. 1578 (SEQ ID NO:1578), FIG. 1580 (SEQ ID NO:1580), FIG. 1582 (SEQ ID NO:1582), FIG. 1585 (SEQ ID NO:1585), FIG. 1587 (SEQ ID NO:1587), FIG. 1590 (SEQ ID NO:1590), FIG. 1592 (SEQ ID NO:1592), FIG. 1594 (SEQ ID NO:1594), FIG. 1597 (SEQ ID NO:1597), FIG. 1599 (SEQ ID NO:1599), FIG. 1601 (SEQ ID NO:1601), FIG. 1603 (SEQ ID NO:1603), FIG. 1605 (SEQ ID NO:1605), FIG. 1607 (SEQ ID NO:1607), FIG. 1610 (SEQ ID NO:1610), FIG. 1613 (SEQ ID NO:1613), FIG. 1615 (SEQ ID NO:1615), FIG. 1617 (SEQ ID NO:1617), FIG. 1619 (SEQ ID NO:1619), FIG. 1621 (SEQ ID NO:1621), FIG. 1623 (SEQ ID NO:1623), FIG. 1625 (SEQ ID NO:1625), FIG. 1627 (SEQ ID NO:1627), FIG. 1629 (SEQ ID NO:1629), FIG. 1631 (SEQ ID NO:1631), FIG. 1633 (SEQ ID NO:1633), FIG. 1635 (SEQ ID NO:1635), FIG. 1637 (SEQ ID NO:1637), FIG. 1639 (SEQ ID NO:1639), FIG. 1641 (SEQ ID NO:1641), FIG. 1643 (SEQ ID NO:1643), FIG. 1645 (SEQ ID NO:1645), FIG. 1647 (SEQ ID NO:1647), FIG. 1650 (SEQ ID NO:1650), FIG. 1654 (SEQ ID NO:1654), FIG. 1656 (SEQ ID NO:1656), FIG. 1658 (SEQ ID NO:1658), FIG. 1660 (SEQ ID NO:1660), FIG. 1662 (SEQ ID NO:1662), FIG. 1664 (SEQ ID NO:1664), FIG. 1666 (SEQ ID NO:1666), FIG. 1668 (SEQ ID NO:1668), FIG. 1670 (SEQ ID NO:1670), FIG. 1672 (SEQ ID NO:1672), FIG. 1674 (SEQ ID NO:1674), FIG. 1676 (SEQ ID NO:1676), FIG. 1678 (SEQ ID NO:1678), FIG. 1680 (SEQ ID NO:1680), FIG. 1682 (SEQ ID NO:1682), FIG. 1686 (SEQ ID NO:1686), FIG. 1688 (SEQ ID NO:1688), FIG. 1691 (SEQ ID NO:1691), FIG. 1693 (SEQ ID NO:1693), FIG. 1695 (SEQ ID NO:1695), FIG. 1697 (SEQ ID NO:1697), FIG. 1699 (SEQ ID NO:1699), FIG. 1701 (SEQ ID NO:1701), FIG. 1703 (SEQ ID NO:1703), FIG. 1705 (SEQ ID NO:1705), FIG. 1708 (SEQ ID NO:1708), FIG. 1710 (SEQ ID NO:1710), FIG. 1712 (SEQ ID NO:1712), FIG. 1714 (SEQ ID NO:1714), FIG. 1716 (SEQ ID NO:1716), FIG. 1718 (SEQ ID NO:1718), FIG. 1720 (SEQ ID NO:1720), FIG. 1722 (SEQ ID NO:1722), FIG. 1725 (SEQ ID NO:1725), FIG. 1727 (SEQ ID NO:1727), FIG. 1729 (SEQ ID NO:1729), FIG. 1731 (SEQ ID NO:1731), FIG. 1733 (SEQ ID NO:1733), FIG. 1735 (SEQ ID NO:1735), FIG. 1738 (SEQ ID NO:1738), FIG. 1740 (SEQ ID NO:1740), FIG. 1742 (SEQ ID NO:1742), FIG. 1744 (SEQ ID NO:1744), FIG. 1746 (SEQ ID NO:1746), FIG. 1748 (SEQ ID NO:1748), FIG. 1750 (SEQ ID NO:1750), FIG. 1752 (SEQ ID NO:1752), FIG. 1754 (SEQ ID NO:1754), FIG. 1756 (SEQ ID NO:1756), FIG. 1758 (SEQ ID NO:1758), FIG. 1760 (SEQ ID NO:1760), FIG. 1762 (SEQ ID NO:1762), FIG. 1764 (SEQ ID NO:1764), FIG. 1767 (SEQ ID NO:1767), FIG. 1769 (SEQ ID NO:1769), FIG. 1771 (SEQ ID NO:1771), FIG. 1774 (SEQ ID NO:1774), FIG. 1776 (SEQ ID NO:1776), FIG. 1779 (SEQ ID NO:1779), FIG. 1782 (SEQ ID NO:1782), FIG. 1784 (SEQ ID NO:1784), FIG. 1786 (SEQ ID NO:1786), FIG. 1789 (SEQ ID NO:1789), FIG. 1791 (SEQ ID NO:1791), FIG. 1794 (SEQ ID NO:1794), FIG. 1796 (SEQ ID NO:1796), FIG. 1798 (SEQ ID NO:1798), FIG. 1800 (SEQ ID NO:1800), FIG. 1802 (SEQ ID NO:1802), FIG. 1804 (SEQ ID NO:1804), FIG. 1806 (SEQ ID NO:1806), FIG. 1808 (SEQ ID NO:1808), FIG. 1810 (SEQ ID NO:1810), FIG. 1812 (SEQ ID NO:1812), FIG. 1814 (SEQ ID NO:1814), FIG. 1816 (SEQ ID NO:1816), FIG. 1818 (SEQ ID NO:1818), FIG. 1820 (SEQ ID NO:1820), FIG. 1822 (SEQ ID NO:1822), FIG. 1824 (SEQ ID NO:1824), FIG. 1826 (SEQ ID NO:1826), FIG. 1828 (SEQ ID NO:1828), FIG. 1830 (SEQ ID NO:1830), FIG. 1832 (SEQ ID NO:1832), FIG. 1834 (SEQ ID NO:1834), FIG. 1836 (SEQ ID NO:1836), FIG. 1838 (SEQ ID NO:1838), FIG. 1840 (SEQ ID NO:1840), FIG. 1842 (SEQ ID NO:1842), FIG. 1844 (SEQ ID NO:1844), FIG. 1846 (SEQ ID NO:1846), FIG. 1848 (SEQ ID NO:1848), FIG. 1850 (SEQ ID NO:1850), FIG. 1852 (SEQ ID NO:1852), FIG. 1856 (SEQ ID NO:1856), FIG. 1858 (SEQ ID NO:1858), FIG. 1860 (SEQ ID NO:1860), FIG. 1862 (SEQ ID NO:1862), FIG. 1864 (SEQ ID NO:1864), FIG. 1867 (SEQ ID NO:1867), FIG. 1869 (SEQ ID NO:1869), FIG. 1871 (SEQ ID NO:1871), FIG. 1873 (SEQ ID NO:1873), FIG. 1876 (SEQ ID NO:1876), FIG. 1878 (SEQ ID NO:1878), FIG. 1880 (SEQ ID NO:1880), FIG. 1883 (SEQ ID NO:1883), FIG. 1885 (SEQ ID NO:1885), FIG. 1887 (SEQ ID NO:1887), FIG. 1890 (SEQ ID NO:1890), FIG. 1892 (SEQ ID NO:1892), FIG. 1894 (SEQ ID NO:1894), FIG. 1896 (SEQ ID NO:1896), FIG. 1898 (SEQ ID NO:1898), FIG. 1900 (SEQ ID NO:1900), FIG. 1902 (SEQ ID NO:1902), FIG. 1904 (SEQ ID NO:1904), FIG. 1906 (SEQ ID NO:1906), FIG. 1908 (SEQ ID NO:1908), FIG. 1910 (SEQ ID NO:1910), FIG. 1912 (SEQ ID NO:1912), FIG. 1914 (SEQ ID NO:1914), FIG. 1916 (SEQ ID NO:1916), FIG. 1918 (SEQ ID NO:1918), FIG. 1920 (SEQ ID NO:1920), FIG. 1922 (SEQ ID NO:1922), FIG. 1924 (SEQ ID NO:1924), FIG. 1926 (SEQ ID NO:1926), FIG. 1928 (SEQ ID NO:1928), FIG. 1930 (SEQ ID NO:1930), FIG. 1932 (SEQ ID NO:1932), FIG. 1934 (SEQ ID NO:1934), FIG. 1936 (SEQ ID NO:1936), FIG. 1938 (SEQ ID NO:1938), FIG. 1940 (SEQ ID NO:1940), FIG. 1942 (SEQ ID NO:1942), FIG. 1944 (SEQ ID NO:1944), FIG. 1946 (SEQ ID NO:1946), FIG. 1948 (SEQ ID NO:1948), FIG. 1951 (SEQ ID NO:1951), FIG. 1953 (SEQ ID NO:1953), FIG. 1955 (SEQ ID NO:1955), FIG. 1957 (SEQ ID NO:1957), FIG. 1959 (SEQ ID NO:1959), FIG. 1961 (SEQ ID NO:1961), FIG. 1964 (SEQ ID NO:1964), FIG. 1966 (SEQ ID NO:1966), FIG. 1968 (SEQ ID NO:1968), FIG. 1970 (SEQ ID NO:1970), FIG. 1972 (SEQ ID NO:1972), FIG. 1974 (SEQ ID NO:1974), FIG. 1976 (SEQ ID NO:1976), FIG. 1978 (SEQ ID NO:1978), FIG. 1980 (SEQ ID NO:1980), FIG. 1982 (SEQ ID NO:1982), FIG. 1984 (SEQ ID NO:1984), FIG. 1986 (SEQ ID NO:1986), FIG. 1988 (SEQ ID NO:1988), FIG. 1990 (SEQ ID NO:1990), FIG. 1992 (SEQ ID NO:1992), FIG. 1994 (SEQ ID NO:1994), FIG. 1996 (SEQ ID NO:1996), FIG. 1998 (SEQ ID NO:1998), FIG. 2000 (SEQ ID NO:2000), FIG. 2002 (SEQ ID NO:2002), FIG. 2004 (SEQ ID NO:2004), FIG. 2006 (SEQ ID NO:2006), FIG. 2008 (SEQ ID NO:2008), FIG. 2010 (SEQ ID NO:2010), FIG. 2012 (SEQ ID NO:2012), FIG. 2014 (SEQ ID NO:2014), FIG. 2016 (SEQ ID NO:2016), FIG. 2018 (SEQ ID NO:2018), FIG. 2020 (SEQ ID NO:2020), FIG. 2022 (SEQ ID NO:2022), FIG. 2024 (SEQ ID NO:2024), FIG. 2026 (SEQ ID NO:2026), FIG. 2028 (SEQ ID NO:2028), FIG. 2030 (SEQ ID NO:2030), FIG. 2032 (SEQ ID NO:2032), FIG. 2034 (SEQ ID NO:2034), FIG. 2036 (SEQ ID NO:2036), FIG. 2038 (SEQ ID NO:2038), FIG. 2040 (SEQ ID NO:2040), FIG. 2042 (SEQ ID NO:2042), FIG. 2044 (SEQ ID NO:2044), FIG. 2046 (SEQ ID NO:2046), FIG. 2048 (SEQ ID NO:2048), FIG. 2050 (SEQ ID NO:2050), FIG. 2052 (SEQ ID NO:5052), FIG. 2054 (SEQ ID NO:2054), FIG. 2056 (SEQ ID NO:2056), FIG. 2058 (SEQ ID NO:2058), FIG. 2060 (SEQ ID NO:2060), FIG. 2062 (SEQ ID NO:2062), FIG. 2064 (SEQ ID NO:2064), FIG. 2066 (SEQ ID NO:2066), FIG. 2068 (SEQ ID NO:2068), FIG. 2070 (SEQ ID NO:2070), FIG. 2072 (SEQ ID NO:2072), FIG. 2074 (SEQ ID NO:2074), FIG. 2076 (SEQ ID NO:2076), FIG. 2078 (SEQ ID NO:2078), FIG. 2080 (SEQ ID NO:2080), FIG. 2082 (SEQ ID NO:2082), FIG. 2084 (SEQ ID NO:2084), FIG. 2086 (SEQ ID NO:2086), FIG. 2088 (SEQ ID NO:2088), FIG. 2090 (SEQ ID NO:2090), FIG. 2092 (SEQ ID NO:2092), FIG. 2094 (SEQ ID NO:2094), FIG. 2096 (SEQ ID NO:2096), FIG. 2098 (SEQ ID NO:2098), FIG. 2100 (SEQ ID NO:2100), FIG. 2102 (SEQ ID NO:2102), FIG. 2104 (SEQ ID NO:2104), FIG. 2106 (SEQ ID NO:2106), FIG. 2108 (SEQ ID NO:2108), FIG. 2110 (SEQ ID NO:2110), FIG. 2112 (SEQ ID NO:2112), FIG. 2114 (SEQ ID NO:2114), FIG. 2116 (SEQ ID NO:2116), FIG. 2118 (SEQ ID NO:2118), FIG. 2120 (SEQ ID NO:2120), FIG. 2122 (SEQ ID NO:2122), FIG. 2124 (SEQ ID NO:2124), FIG. 2126 (SEQ ID NO:2126), FIG. 2128 (SEQ ID NO:2128), FIG. 2130 (SEQ ID NO:2130), FIG. 2132 (SEQ ID NO:2132), FIG. 2134 (SEQ ID NO:2134), FIG. 2136 (SEQ ID NO:2136), FIG. 2139 (SEQ ID NO:2139), FIG. 2141 (SEQ ID NO:2141), FIG. 2143 (SEQ ID NO:2143), FIG. 2145 (SEQ ID NO:2145), FIG. 2149 (SEQ ID NO:2149), FIG. 2151 (SEQ ID NO:2151), FIG. 2153 (SEQ ID NO:2153), FIG. 2155 (SEQ ID NO:2155), FIG. 2157 (SEQ ID NO:2157), FIG. 2159 (SEQ ID NO:2159), FIG. 2161 (SEQ ID NO:2161), FIG. 2163 (SEQ ID NO:2163), FIG. 2165 (SEQ ID NO:2165), FIG. 2167 (SEQ ID NO:2167), FIG. 2169 (SEQ ID NO:2169), FIG. 2171 (SEQ ID NO:2171), FIG. 2173 (SEQ ID NO:2173), FIG. 2175 (SEQ ID NO:2175), FIG. 2177 (SEQ ID NO:2177), FIG. 2179 (SEQ ID NO:2179), FIG. 2181 (SEQ ID NO:2181), FIG. 2183 (SEQ ID NO:2183), FIG. 2185 (SEQ ID NO:2185), FIG. 2187 (SEQ ID NO:2187), FIG. 2189 (SEQ ID NO:2189), FIG. 2191 (SEQ ID NO:2191), FIG. 2193 (SEQ ID NO:2193), FIG. 2195 (SEQ ID NO:2195), FIG. 2197 (SEQ ID NO:2197), FIG. 2199 (SEQ ID NO:2199), FIG. 2201 (SEQ ID NO:2201), FIG. 2203 (SEQ ID NO:2203), FIG. 2205 (SEQ ID NO:2205), FIG. 2207 (SEQ ID NO:2207), FIG. 2209 (SEQ ID NO:2209), FIG. 2211 (SEQ ID NO:2211), FIG. 2213 (SEQ ID NO:2213), FIG. 2215 (SEQ ID NO:2215), FIG. 2218 (SEQ ID NO:2218), FIG. 2220 (SEQ ID NO:2220), FIG. 2222 (SEQ ID NO:2222), FIG. 2224 (SEQ ID NO:2224), FIG. 2226 (SEQ ID NO:2226), FIG. 2228 (SEQ ID NO:2228), FIG. 2231 (SEQ ID NO:2231), FIG. 2233 (SEQ ID NO:2233), FIG. 2235 (SEQ ID NO:2235), FIG. 2237 (SEQ ID NO:2237), FIG. 2239 (SEQ ID NO:2239), FIG. 2241 (SEQ ID NO:2241), FIG. 2243 (SEQ ID NO:2243), FIG. 2245 (SEQ ID NO:2245), FIG. 2247 (SEQ ID NO:2247), FIG. 2249 (SEQ ID NO:2249), FIG. 2251 (SEQ ID NO:2251), FIG. 2253 (SEQ ID NO:2253), FIG. 2255 (SEQ ID NO:2255), FIG. 2257 (SEQ ID NO:2257), FIG. 2259 (SEQ ID NO:2259), FIG. 2261 (SEQ ID NO:2261), FIG. 2263 (SEQ ID NO:2263), FIG. 2265 (SEQ ID NO:2265), FIG. 2267 (SEQ ID NO:2267), FIG. 2269 (SEQ ID NO:2269), FIG. 2271 (SEQ ID NO:2271), FIG. 2273 (SEQ ID NO:2273), FIG. 2275 (SEQ ID NO:2275), FIG. 2277 (SEQ ID NO:2277), FIG. 2279 (SEQ ID NO:2279), FIG. 2281 (SEQ ID NO:2281), FIG. 2283 (SEQ ID NO:2283), FIG. 2285 (SEQ ID NO:2285), FIG. 2287 (SEQ ID NO:2287), FIG. 2289 (SEQ ID NO:2289), FIG. 2291 (SEQ ID NO:2291), FIG. 2293 (SEQ ID NO:2293), FIG. 2295 (SEQ ID NO:2295), FIG. 2297 (SEQ ID NO:2297), FIG. 2299 (SEQ ID NO:2299), FIG. 2302 (SEQ ID NO:2302), FIG. 2304 (SEQ ID NO:2304), FIG. 2306 (SEQ ID NO:2306), FIG. 2310 (SEQ ID NO:2310), FIG. 2313 (SEQ ID NO:2313), FIG. 2315 (SEQ ID NO:2315), FIG. 2317 (SEQ ID NO:2317), FIG. 2319 (SEQ ID NO:2319), FIG. 2321 (SEQ ID NO:2321), FIG. 2324 (SEQ ID NO:2324), FIG. 2326 (SEQ ID NO:2326), FIG. 2328 (SEQ ID NO:2328), FIG. 2330 (SEQ ID NO:2330), FIG. 2332 (SEQ ID NO:2332), FIG. 2334 (SEQ ID NO:2334), FIG. 2336 (SEQ ID NO:2336), FIG. 2338 (SEQ ID NO:2338), FIG. 2340 (SEQ ID NO:2340), FIG. 2342 (SEQ ID NO:2342), FIG. 2344 (SEQ ID NO:2344), FIG. 2347 (SEQ ID NO:2347), FIG. 2350 (SEQ ID NO:2350), FIG. 2352 (SEQ ID NO:2352), FIG. 2354 (SEQ ID NO:2354), FIG. 2356 (SEQ ID NO:2356), FIG. 2358 (SEQ ID NO:2358), FIG. 2360 (SEQ ID NO:2360), FIG. 2362 (SEQ ID NO:2362), FIG. 2364 (SEQ ID NO:2364), FIG. 2366 (SEQ ID NO:2366), FIG. 2368 (SEQ ID NO:2368), FIG. 2370 (SEQ ID NO:2370), FIG. 2372 (SEQ ID NO:2372), FIG. 2374 (SEQ ID NO:2374), FIG. 2376 (SEQ ID NO:2376), FIG. 2378 (SEQ ID NO:2378), FIG. 2380 (SEQ ID NO:2380), FIG. 2382 (SEQ ID NO:2382), FIG. 2384 (SEQ ID NO:2384), FIG. 2386 (SEQ ID NO:2386), FIG. 2388 (SEQ ID NO:2388), FIG. 2390 (SEQ ID NO:2390), FIG. 2392 (SEQ ID NO:2392), FIG. 2394 (SEQ ID NO:2394), FIG. 2396 (SEQ ID NO:2396), FIG. 2398 (SEQ ID NO:2398), FIG. 2400 (SEQ ID NO:2400), FIG. 2402 (SEQ ID NO:2402), FIG. 2404 (SEQ ID NO:2404), FIG. 2407 (SEQ ID NO:2407), FIG. 2409 (SEQ ID NO:2409), FIG. 2412 (SEQ ID NO:2412), FIG. 2415 (SEQ ID NO:2415), FIG. 2419 (SEQ ID NO:2419), FIG. 2423 (SEQ ID NO:2423), FIG. 2425 (SEQ ID NO:2425), FIG. 2427 (SEQ ID NO:2427), FIG. 2429 (SEQ ID NO:2429), FIG. 2431 (SEQ ID NO:2431), FIG. 2433 (SEQ ID NO:2433), FIG. 2435 (SEQ ID NO:2435), FIG. 2437 (SEQ ID NO:2437), FIG. 2439 (SEQ ID NO:2439), FIG. 2441 (SEQ ID NO:2441), FIG. 2443 (SEQ ID NO:2443), FIG. 2445 (SEQ ID NO:2445), FIG. 2448 (SEQ ID NO:2448), FIG. 2450 (SEQ ID NO:2450), FIG. 2452 (SEQ ID NO:2452), FIG. 2454 (SEQ ID NO:2454), FIG. 2457 (SEQ ID NO:2457), FIG. 2459 (SEQ ID NO:2459), FIG. 2461 (SEQ ID NO:2461), FIG. 2465 (SEQ ID NO:2465), FIG. 2468 (SEQ ID NO:2468), FIG. 2472 (SEQ ID NO:2472), FIG. 2474 (SEQ ID NO:2474), FIG. 2482 (SEQ ID NO:2482) or FIG. 2484 (SEQ ID NO:2484) said method comprising contacting cells which normally respond to said polypeptide with a candidate compound, and determining the responsiveness by said cell to said candidate compound.
